United States Patent Application Publication US 2013/0332133 A1 - sequence listing, part 32

SEQ ID NO: 240530 - DNA, 277 bp, Unknown
  Bacterial polypeptide expressing nucleotide sequence isolated from the Sargasso Sea
cctgaactgataaatcaacgtcttgtagtggcccttgatccaatgttggccacaggacattcttcatcagcagcagtaacgagacttaaggaaaacggggcttctaatatacgatttgtttgtctccttgctgctccagagggcattgaatttttttcaaaagttcatccagacgttcctatcttcacagctgctattgatgaaaaattaaatgatcacgcatatattctgccaggtcttggagacgctggggatcgtatttttggaacaaaataaa

SEQ ID NO: 240531 - DNA, 229 bp, Unknown
  Bacterial polypeptide expressing nucleotide sequence isolated from the Sargasso Sea
caactggaactcatctatagcggcaattaatttaattaaaaataaaggagtaaaggcaaaagatatatttctagtatctttacttgcggcgcccgaaggaattaaaaaccttcaaaaaaatcaccgctctcttcatatttttacttgtaaaattgatgctaaactgaacaaaaataagttcattgtccctggtcttggtgatgcaggtgacagatatatgggaacctag

SEQ ID NO: 240532 - DNA, 316 bp, Unknown
  Bacterial polypeptide expressing nucleotide sequence isolated from the Sargasso Sea
tgaacaaacatacgagccagtagagtacctatttaaactaccaaagataaaaaacaaaaaaattctaattttagaccccatgcttgcaaccggaaattcatcaattgctgcaattgatcttatcaaaaacaaaggcgctaatataaaagatatttttctaatatctcttttagctgctcctgaggggctaaaaaacatccaaaagatacaaaaaggaattcatatttttacctgcagtattgacaaaaaattgaataaaaataagtttattgtccctggcctaggcgatgcaggtgataggtacatgggaacttga

SEQ ID NO: 240533 - DNA, 625 bp, Unknown
  Bacterial polypeptide expressing nucleotide sequence isolated from the Sargasso Sea
atgaaagtagaagttataaatcaccctcttattaatctttacatgacaatattaaggtcaaaagatacacaaagtactaagtttagatctttagcacgaaaaatatcttctcttatggcttttgaaatttttaaggatttgagagttttaccaaaaactgttgaaacccctctagaaaaatataatggtgtaaaattaagtgatccaaaaccttgtgtaatatcaattttgagggctggattaataatgagcgaaggtattacagatatatttgacgtggtatcaattggtcatataggcatgtatagggatgaacaaacacttaaaccaataaattatgtaagaaaacttccttctgatttgaaaaatagacaatgttatttatgtgatccaatgcttgcaactggtggaagcgcagtatctgctattataacactcaaagatcactttgccacagatattaaattaatttgtcttctagcatctgatccaggtataaaaaaggttcaggatagctttccagaagttgagattatatgcgctcaaaaagataacaaacttaacgaaaatggttttattttacctgggcttggagatgctggagatagaatctttgaaacttgaa

SEQ ID NO: 240534 - DNA, 574 bp, Unknown
  Bacterial polypeptide expressing nucleotide sequence isolated from the Sargasso Sea
atgattacagtaattaaatcaccattcgttcaatacaaattaacaattttacgaaataaaaaaacatcaaatactgtttttagacaaactatgaatgaaataagctatctcattgcttctgatgttcttcagcacgttccctttaaaaaacaaacaattgaaacacctctaaaaaaaatgagtggtacagccttgggtcaacccataattttggtcccaattttacgtgccggtttagggttacttgaggggtttgcaaaatttttaccggaagctgaaaaaggtcacataggtttataccgcgacgaacaaacttatgaacctgtagaatacctctttaaacttccaagagttaaaaataaaaaagtgttaattctagatccaatgttggctacaggtaattcttcaattgctgcaatcaatttaataaaaaacaaaggcgttaatattaaagatatatttttggtgtctttgctagctgctcctgaaggtattaaaaaaattcaaaaaaaccaaaaaggcattcatatatttacctgcaacattgatgctaaattgaataaaaataagttca

SEQ ID NO: 240535 - DNA, 403 bp, Unknown
  Bacterial polypeptide expressing nucleotide sequence isolated from the Sargasso Sea
atgagccgccaagggcaattgaaaattcttaatcacccactaattcaacataaactaactttaatgagatgtactgacacgccatccaatagctttcggcgtcttttaaaagaaatttctattttaatgtcatacgaggtcttcagggacttaccactgaaaaacattattacgaatacaccgattcaatccatgagatcgccagttttatctgaaaaaactttatgtctcgttccaatattacgagctggaaatggaatgctagatgggtttattgaaattgtttcaggtgctttagtcggacacattggcctatatcgtgacgaagaaacgcttaaagcgcatgattattacataaaccttcccaaaggtattggaaatgcaaaaaccattattttggatc

SEQ ID NO: 240536 - DNA, 513 bp, Unknown
  Bacterial polypeptide expressing nucleotide sequence isolated from the Sargasso Sea
tatgcttacattaatcaaatcatcattcatagattataaattaacaattttgagaaataaaaagactcgtaactcgttatttaggcaaacaatgaacgaagtaagttatttaatagctggagaagtttttaaattttgtaaatataataaaattactattgaaacacccattaccaaaacaagaggaattaatattagtgaaaaaataattatagttcctattttgcgtgctggccttggtttaattgaaggatttgtaaagtttttaccaaatgtagaaaaaggtcatataggtctttatagaaatgaacaaacataccaacctgtcgaatatttatgtaaattgccaaaagttggaaataaacaagtcattatacttgatcctatgcttgctacgggaaattcgtcttctgctgccatagatcttgttaaaaaagagggtgtcaaaattagtaatattaaattagtttcccttttggcctcaccagaaggattaaaaaatttaagaaaaaa

SEQ ID NO: 240537 - DNA, 255 bp, Unknown
  Bacterial polypeptide expressing nucleotide sequence isolated from the Sargasso Sea
aaaccgttgtcttggatcccatgctcgccactggaaattcagcaaatacagcaatctcaattattaagaaacacggggctaatgatattgtttttacctctatattagcggcgccagagggagtagaagctatagagcaaaaacatcctgatgttccaatatacacttgctccttagatgagcgtttgaatgaaaatggctacataattcctggcctaggggatgctggagatcggttatatggaactacttaac

SEQ ID NO: 240538 - DNA, 409 bp, Unknown
  Bacterial polypeptide expressing nucleotide sequence isolated from the Sargasso Sea
atgcttacattaatcaaatcaccattcatagaatataaattaacaattttgagaaataaaaacacctcaaactcattatttaggcaaactatgaatgaaataagctatcttattgctgcagaggtattgaagcatttagaatttaaaaaaaccaatattcaaacaccacttaaaaaaactaatggcctttcattaaagtgtgacccaattataataccaattctaagagcaggtcttggacttgttgaaggatttgtaaaatttttaccaaatgtagaaaaaggacatatagggctttatcgtgatgaacaaacttatcagccagttgaatatttatgcaagttacccaaagttaaaaataagattgttttaattttggaccctatgcttgcaactggaaactcttcat

SEQ ID NO: 240539 - DNA, 298 bp, Unknown
  Bacterial polypeptide expressing nucleotide sequence isolated from the Sargasso Sea
gtagagtatttatttaaacttccaaaaacaaaaaacaaaaaaatccttgttcttgacccaatgcttgctactgggaattcatcaattgcagccataaatctaataaagagtaaaggagttaaaacaaaagatgttttcctggtctctcttttagcagcccctgaaggtatcaaaaatttgaaaaaacatcaccgttcactccacatttttacttgtaaaattgacgcaaaattaaacaaaaataagtttatagttccgggtcttggtgacgcaggtgacaggtacatgggaacctaag

SEQ ID NO: 240540 - DNA, 277 bp, Unknown
  Bacterial polypeptide expressing nucleotide sequence isolated from the Sargasso Sea
ccaaagccaagaaataaaaaagtcatatttctagacccaatgttagcaactggtaattcttcaattgcagctattaatttaattaaaaataaaggagttaccaataaagatatatttttagtttcattacttgccgccccagagggcattaaaaatattcaaaaacaccaaaaaggcacccatatatttacttgcagtattgatacaaaattaaataaaaataagtttatagtaccaggactaggagatgcaggcgataggtacatgggtacttgaa

SEQ ID NO: 240541 - DNA, 478 bp, Unknown
  Bacterial polypeptide expressing nucleotide sequence isolated from the Sargasso Sea
atgattacatcaattcgatcaccattcatagaacataaaatgacaattcttagggataaaagaacctctaattcattattcagacaaactatgaatgaaacaagctatttaatagcttcagaagttttaaaatttttaccatacaaaaaagttaatgttcaaacaccactaaccaaaactgttggtagaaaactctcccaacaaattattcttgttccaatattaagagccggattggggcttttagaaggttttgtaaaatttttacctgatgcagaaaaagggcacattggtttgtatagagatgaacaaacatataagcctgtagaatatttatttaaactaccaaagacaaaaaataaaaaattattagtactcgatcctatgttagctactggaaattcttctattgcggcaattgatctaataaaaggaaaaggggtcagcccaaaagatatttttctgatttctttattag

SEQ ID NO: 240542 - DNA, 216 bp, Unknown
  Bacterial polypeptide expressing nucleotide sequence isolated from the Sargasso Sea
cgatgatcgccactatcgacctgctgaaaaaagcgggttgctccagcattaaggtgctggttctggtggcggcgccggaagggattgccgcgctggagaaagcgcatccggatgttgagatgtataccgcatccattgaccagggcctcaacgagcacggatacattattccggggctcggcgatgccggcgataagatttttggtaccaagtgat

SEQ ID NO: 240543 - DNA, 622 bp, Unknown
  Bacterial polypeptide expressing nucleotide sequence isolated from the Sargasso Sea
aatgattacagtaattaaatctaaatttgttcagcataaactaacaatattaagaaataaaaaaacatcaaacactatttttagacaaacaatgaatgaaactagctatttaattgcagctgatgttttgcaatgccttccatataaaagaaaaaaaatacaaactccgctaaaacaaacaaacggtttaactctttcaaaacaaataattcttgtgcctattttaagggcaggcttaggcttgcttgagggttttactaaatttttacctgatgcagaaaaaggccacattggcttatatagagatgagcaaacttatgagccagttgagtatttatttaaattgccaaaaataaaaaataaaaaaattttgatattggatccaatgcttgcaactggaaattcatctattgcagcaattgatctcattataagtaagggggccaatattaaagatatatttctaatatctcttttggcagctccagaagggttaaaaaatattaaaaaaaaacagaaaggaattcatatttttacctgtagcattgactctaagcttaataaaaacaagttcatagttccaggcctaggtgacgcaggtgatcgctatatggggacttga

SEQ ID NO: 240544 - DNA, 622 bp, Unknown
  Bacterial polypeptide expressing nucleotide sequence isolated from the Sargasso Sea
atgattacatctattaaatcatctttcttagaatacaaaatgactattttaagaaataaaaaaacttctaattctttgtttaggcaaacaatgaacgaagttagctatttaattgctactgaggtgcttaaacatctgaaatataaaaaaatcactgtacaaacacctttgattaaaactaagggcctggatttagctcagcaagtaattcttgttccaattttacgagcgggccttggtctattagaaggctttgttaaatttttgcctgatgcagaaaaaggtcatattggtttgtatcgtaatgaacaaacatatgagcccgttgagtatttatgcaaactgcctaaaacaaaaaacaaaacagtgttggttcttgacccaatgttagcaactggcaactcatcaatagctgcaattaatttaattataaataaaaatgtaaacataaaagatattttcttagtatcccttcttgcggcacctgagggaattaaaaatttacagaaaaaacacaagtcgcttcatatttttacatgcaaaattgatgctaaattgaataaaaataagtttattgtccctggtcttggtgacgcaggagacagatatatgggcacctaga

SEQ ID NO: 240545 - DNA, 382 bp, Unknown
  Bacterial polypeptide expressing nucleotide sequence isolated from the Sargasso Sea
atgcgcgtcgtcgaagtttctcatccgctggtacagcacaaaattggtttgctcagagctgccgatatcaatacccggcaattccggcaattagccgtagagctcggtagcctgctgacttatgaagccactaaagatctgccaacagaaaccgtgacgatcgaagcctggagcgggccctgccagatcaaacaaatccagggcaagaaagtgaccgtggtaccgattttacgcgccggtctgggcatgctcgacggcgtattggatctgatccccagtgcccgcattagtgtggtcgggatttatcgtgacgaaacgacactgcaacctgtgccctattttcaaaaactggcaccggaaatagaccagcggctggcgatta

SEQ ID NO: 240546 - DNA, 622 bp, Unknown
  Bacterial polypeptide expressing nucleotide sequence isolated from the Sargasso Sea
atgcttacattaatcaaatctccattcctagaatataaattaacaattcttagaaacaaaagaacaaaaaattctctttttagacaaacaatgaatgaaataagctatttaattgccgcagaagtactaaaacatataaaatttaaaaaaataaagatacaaaccccaatacaaaatactagcggtaacgaaatttctaacccccttataatcattccaattttaagagcaggacttgggttagttgaagggttcgttaaatttttaccaaatgtagaaaaaggtcatattggtctctatagagatgagcagacatatcaacctgttgaatatctatgcaaattaccaaaagtaagtaataagactattttggttcttgatcccatgttggcaactggaaattcctcatcagctgcaatagatcttataaaagagcgaggagtcaaagtgaaaaatattaaacttgtatctttgttggcagctccagaaggtattaaaaatattcgtaaaaatcataaggatcttcatatatttacttgcagtcttgacaaaggactaaacaagaaaaaatatattgtgccaggcctcggagatgctggcgataggtatatgggcacctaat

SEQ ID NO: 240547 - DNA, 651 bp, Unknown
  Bacterial polypeptide expressing nucleotide sequence isolated from the Sargasso Sea
tcactaggtttattactatggctattcacgttatttctcacccccttgttcaacataagttaggtttaatgcgcgcgcatggaattagcacgaaaagttttcgcgagttgtgttcagaagttggcacattattaacttacgaagccactaaaaacctagaattagaagataacgaaattacaggttgggacggtaataaacttaaagttgagcatattaaaggtaaaaaaattaccgttgtgccaattttacgcgcaggccttgggatgatggacggcgtaatgcaattactcccagcggctaaagtgagtgtagtggggttagagcgtaacgaagaaacacttgagccagtaccttattttgaaaagctagtaggtaatattgatgagcgtttgagcttagtgattgaccctatgctggctactggtggctctatgatcgccaccatcgatatgcttaaaaaagcgggctgtaaagaaattaaagtaatcgtactggttgctgcacctgaaggcgttgaaaaaacattagccgctcacccagatgtagagatttttactgcctcagttgatagccaccttaatgaaaaaggctacattatcccaggattaggggatgcaggtgataaaattttcggtacggtttactagg

SEQ ID NO: 240548 - DNA, 617 bp, Unknown
  Bacterial polypeptide expressing nucleotide sequence isolated from the Sargasso Sea
tacattaatcaaatctccattcctagaatataaattaacaattctagaaaacaaaagaacaaaaaattctctttttagacaaaccatgaatgaaataagctatttaattgccgcagaagtattaaaacatataaaatttaaaaagataaagatacagacgccaatacaaaaaacaagtggtaatgaaattttaaatccccttattattgttccaatactaagagcaggacttggattagttgaggggttcgttaaatttttaccaaatgtagaaaaaggtcatattggtctttatagggatgaacatacatatctacctgtcgaatatctgtgtaaattaccaaaagtaaataataagactattctggttcttgatccaatgttggcaactggtaattcttcttcagccgcaatagaccttataaaagaacgaggagttaaagtgaaaaatatcaaacttgtatctttgctagcatctccagaaggtattaaaaatcttcgtaaaaatcataaggatctccatatttttacatgcagtcttgacaagggactaaacaagaaaaaatatattgttccaggtcttggagacgctggtgataggtatatgggtacctaaa

SEQ ID NO: 240549 - DNA, 514 bp, Unknown
  Bacterial polypeptide expressing nucleotide sequence isolated from the Sargasso Sea
ttagcttatgaaattactagaaatttacctatgactactagacgaatagaaactcctattgaagaaatggatgcaccaacgctcgatggaaagaagttagcattaatatcaattctacgtgcaggcaacggacttttagacggtgttttggagttggttccatcagctagagttggctttgtaggattgtatagagatgaagaaactctccagcccgtccaatattattataaggttcctcacggtttagaaaaccgcatggttatcgcagttgatccaatgttagctacaggaaattcatctgctgcagctgtagaattacttaaaaagtctggagcaaaaaatataaggtttttgtgtctattagcggcaccagaaggtatcaagcgaatggaggaggctcatcctgatgttccgattgtaactgctgccgtggatagtcatctaaattcacatggttatattgttccggggttaggagatgccggagatagaatgtacggcacaaaataac

SEQ ID NO: 240550 - DNA, 598 bp, Unknown
  Bacterial polypeptide expressing nucleotide sequence isolated from the Sargasso Sea
attcgttcaatacaaattaacaatcttgcgaaataaaaaaacatcaaatactgtttttagacaaactatgaatgaaataagttacctcattgcttctgatgtcctacaatatgtaccctttaaaagacaaacaattgaaacccctctgataaaaatgagtggaacagtcttgggtcaaccaattattttagtgccaattttacgagctggtttgggactgcttgagggttttgcaaagttcttacctgaagctgaaaaaggccacataggtttatatcgtgacgaacaaacttatgaacctgtagaatatctctttaaacttccaagagttaaaaataagaaagtgttgatcttagatccaatgttggccacaggtaattcttcaattgctgcaatcaatttaataaaaaacaaaggagttaatattaaggatatatttttggtttctttacttgctgctcccgaaggtattaaaaatatccaaaaaaagcaaaaaggcattcatatatttacttgtaatattgatgctaagttgaataaaaataagttcattgtaccgggcttaggtgacgcaggtgatagatacatgggtacttga

SEQ ID NO: 240551 - DNA, 510 bp, Unknown
  Bacterial polypeptide expressing nucleotide sequence isolated from the Sargasso Sea
cttatgaagtgacaaaagatttacctttagtatataaagaaattgaaactccgcttatgaaaatgaatgctccttttctagaaggtaaaaaactctgtctggtttcaattttaagagctggtaatggattgttggatggatttatggatcttgtgccttctgcaagagtaggacacattggtctatatcgagatccagaaactctagtggcagtagaatactacatgaaacttcctgatctaataaatcagcgccttgtactggcacttgatccaatgctggccacaggacattcttcatctgctgcagttaccaggcttaaggaaaacggagcttcaaatatacgatttgtatgtctacttgctgcacctgagggtattgaatatttttcaaatgtacatccagacgtccctatctacacagctgcagttgatgaaaaactaaacaatcacgcttacatcttgcccgggcttggagacgcaggggatagaatttttggaacaaaataaa

SEQ ID NO: 240552 - DNA, 634 bp, Unknown
  Bacterial polypeptide expressing nucleotide sequence isolated from the Sargasso Sea
atggtacaacatcttactgtcgttgatcatccactggtacaacataaacttacactaatgagaaaaaagacgacgtcaacggtagagtttagacagcttctaagggaaataagtcaatttttagcttatgaaattactagaaatttacctatgactacaagacgaatagaaactcctattgaagagatggatgcaccaacactcgatggaaagaagttagcattaatttcaattctacgcgctggaaacgggcttctagacggtgttttggagttggttccatcagctagagttggttttgtagggttatacagagatgaagaaaccctccaacctgtacaatattattacaaggttcctcatggattagaaaaccgtatggtgattgcggttgatccgatgttggcaacgggaaattcgtctgctgcagctatagaattacttaaaaaatctggtgcaaaaaatatcaggtttctttgcttattagcggcaccagaaggtataaagagaatggaggaggcgcatcctgatgtcccgattgtgaccgctgctgtggatagccatctaaattcaaatggttatattgtgcccggtttaggagatgccggagatagaatgtatggcacgaaataag

SEQ ID NO: 240553 - DNA, 628 bp, Unknown
  Bacterial polypeptide expressing nucleotide sequence isolated from the Sargasso Sea
atgtataagcatctcgatttcgccaatttgttcatcgttgaccacccattagtgcagcataagctgactttgatgcgacgggccgaaacccccaccagtttgttccggcagcttttgaaggaagtgagccttttgatggcttatgagttaacgcaaccgctgccgatgacccgcgaacggattgacacgccgttagccccaatggacgcgccggttttggctggccgcaaaccggcgattgtttcgattttgcgtgccgggctcggtatggcggaggggttgcgcgaattattgccatctgcgcgggaggggcatatcggtgtctatcgtgatcccaaaactaagcgtccggtcgagtattacgtaaaattgccggagccagctggacgtctctttattgtcagcgatccgatgctagcgaccggctattcagcggcgcatgcgatcgatgtgttacgccagcatggcgtttctaatcaaaacattcgatttatggcactcgtagccgcgcctgaaggcatgcgtgtcgtcgaggaggcgcatccaggcgtgcatgtatatgcggccgcgctcgatgagaatcttgatgagaacgcctatatcgtgccaggcctgggcgatgctggtg

SEQ ID NO: 240554 - DNA, 340 bp, Unknown
  Bacterial polypeptide expressing nucleotide sequence isolated from the Sargasso Sea
catgcatgaaaacctgacgatcattgatcatcccctcgtccagcataaactttccctcatgcgtgacaaagaaacttccacgcggagtttcaggattctcatccgggaaaccggaacccttctggcctatgaggtaaccaaggatctgcccctgatcaccaaggaaatcgaaacacccttgatgaaaatgaatgctccgtttttggaagggaaaaaactatgcctggtttctattcttcgagcagggaacggactgctcgacggtttcctcgatctggttccttctgccagagtggggcatattggactttatcgtgatcccgaacccttgtggctgtgg

SEQ ID NO: 240555 - DNA, 622 bp, Unknown
  Bacterial polypeptide expressing nucleotide sequence isolated from the Sargasso Sea
atgattacactaattaaatcatctttcttggaatataaaatgactattttaagaaataaaaaaacccctaattcactttttaggcaaacaatgaatgagacaagctatttaatagctgcagaagtcttgaagcatttgaaatataaaaaaattagtgttcaaacgccgctcaaaaaaacgacaggtaaagatttagctcagcaaattattcttgtaccaattttaagagctggactaggtttgttagaggggtttgttaaatttttaccagatgcagaaaagggtcatataggcttatatcgtgatgaagaaacatacaaacctgtagaatatttatttaaacttccaaaaacaaaaaataaaaaaatcattgttctagacccaatgcttgcaacaggaaactcatcaattgcagctataaatttaattaagaataaaggtgtaaatattaaagatgtgtttcttgtatctcttttagcagcacctgaaggtattagaaatgtccaaaaaaatcataaatctctgcatgtttttacttgtaaaattgatgcaaaattgaataaaaataagtttattgttccaggtcttggtgacgcaggtgacaggtatatgggaacctagg

SEQ ID NO: 240556 - DNA, 622 bp, Unknown
  Bacterial polypeptide expressing nucleotide sequence isolated from the Sargasso Sea
atgattacagtaattaaatctcaatttgttcagcataaactaacaatattaagaaataaaaaaacttcaaatactgtttttagacaaacaatgaacgaaacaagttatttaattgcagcagaggtgttaaagcatcttccttataaaaaaaccaaagttgagacacctttaaagagtactagtggaacgatccttgctaaacaaatcatactagttccaatattaagagccggtttaggactgcttgagggttttgctaaatttcttcctgatgctgaaaagggtcacattggtttatatcgagatgagcaaacatatgagccagtagagtacctatttaaattaccaaagataagaaataaaaaaattctgattttagaccccatgcttgcaactggaaattcatcaattgctgcaattgatcttattagaaacaagggcgctaatataaaagatatttccctaatatctcttttagctgctccagaggggctaaaaaacatccaaaagatacaaaaaggaattcatatttttacctgcagtattgacaaaaaattgaataaaaataagtttattgtccctggccttggtgatgcaggtgacaggtatatgggaacttgat

SEQ ID NO: 240557 - DNA, 622 bp, Unknown
  Bacterial polypeptide expressing nucleotide sequence isolated from the Sargasso Sea
tatgcttaaactaattaaatcatcttttatagattataaactatcaattttaagaaataagaaaacatcaaatgctctttttaggcaaactatgaatgaggttagctatttgattgctgcagaggtgcttaaaaatcttaaatttaaaaaaatttactttgatacgcctctcaaaaagacttcaggaaaagaaattttaaaaccaatagtaattattccaattttaagagctggtttagggctagttgagggctttttaaaattactacctaatgtagaaaagggacatattggactctacagagatgagcatacctataagcctgttgaatatttgtttaaacttccaaaaattaaaaataagacaataatagttctggacccaatgttagctaccggaaattcctctgttgaggcaataaatctagttaaaaaatcaggggtttctataaataacatatttttagtatctcttttggcagcccctgaaggcatcaaaaatcttaacaaatctcacaaggggcttaaattatttacttgtagcgttgataaaggacttaataaaagtaaatttattgttcctggcctaggtgatgccggagatagatatatgggcacttaa

SEQ ID NO: 240558 - DNA, 622 bp, Unknown
  Bacterial polypeptide expressing nucleotide sequence isolated from the Sargasso Sea
aatgattacagtaattaaatcttcttttcttcagcataaattaacaattttaagaaacaaaaaaacatcaaacactgtttttaggcagacaatgaatgaagcaagttatttaattgcagctgaagttttaaaatatttaaaatacaaaaaaaccaccattgaaactcctctaaaaaaaatgcaagggttaacaatagggcaacctataattcttgttcctattttgagggctggattaggtttgctagagggctttagtaaatttttacctgatgctgaaaaaggtcatattggcttgtatagagatgagcaaacatatgagccagttgaatatttatttaaattaccaaaacccaaaaacaaaaaaattataattctagacccaatgcttgctacaggtaattcctcaattgctgcaattaatttgataaaaaataaaggtgttagtaataagaatatatttctagtctctcttcttgccgctccagaaggagttaaaaacattcaaaagcatcaaaaggggatccatatatttacatgcagtatcgactctaaacttaacaaaaataaatttattgttccaggtctaggtgacgcaggtgatcgatatatggggacttga

SEQ ID NO: 240559 - DNA, 622 bp, Unknown
  Bacterial polypeptide expressing nucleotide sequence isolated from the Sargasso Sea
aatgcttacattaatcaaatctccattcctagaatataaattaacaattcttagaaacaaaagaacaaaaaattctctttttagacaaactatgaacgaaataagctatttaattgccgcagaagtattaaaacatataaaatttaaaaaaataaagatacagactcctatacaaaatactagtggtaacgaaatttccaatccccttattattgttccaatattaagagcaggacttggattagtagaaggctttgttaaatttttaccgaatgtagaaaaaggtcatattggtctttatagagatgaacagacataccaacctgttgagtatctatgcaaattaccaaaagtgagtaataagactattctagttcttgatcctatgttggcaactgggaattcctcatcagctgcaatagatcttataaaagaacgaggagtcaaaattaaaaatattaaacttatatctttgctagcagctccagaaggcattaaaaatcttcgtaaaaatcatagggatctccatatttttacttgcagtcttgataagggactaaacaagaaaaaatatattgttccaggtttgggagatgctggcgataggtatatgggcacctaa

SEQ ID NO: 240560 - DNA, 621 bp, Unknown
  Bacterial polypeptide expressing nucleotide sequence isolated from the Sargasso Sea
tgtccattcacattctcgatcatgcccttgcgaagcatcatattaccacgcttcgtgacaagaagacggaggcagatcagtttcggaggcttcttcgccgcctcacgaccttgcttgtagccgaagccaccaaaaaccttgcgagtgattcttatgaggtagaaacaccactggctctatttcaaggtaaacaaatctctcactccattgggctcgttcccattctgcgtgctggtctgagtatggttgatacggccctggatctcttgccctttgctgaagtctggcatcttggcatgtatcgagatgaaacaacggcacatccagtcgagtactacagcaaaataccgaagactgacccgatcgatgtggcaatcattcttgatcccatgcttgcgacgggtggctctgcatcggcagtaatcgacaaactcaatgcctggggtgttcaacacatatatctcctttcaattattgcatcacagccaggagttgatgcactttgtaaaaactatcctgacgtacactatttcatctgtgatattgattcatctctcaatgacaaaaaatttattgttccagggttaggagatgctggtgatcgtgcctttcaaacatgag

SEQ ID NO: 240561 - DNA, 634 bp, Unknown
  Bacterial polypeptide expressing nucleotide sequence isolated from the Sargasso Sea
atggtacaacatcttactgtcgttgatcatccactggtacaacataaacttacactaatgagaaaaaagacgacttcaacggtagagtttagacagcttctaagggaaataagtcaatttttagcttatgaaattactagaaatttacctatgaccacaagacgaatagaaactcctattgaagagatggatgcaccaacactcgatggaaagaagttagcattaatttcaattctacgcgccggaaacgggcttctagacggtgttttggagttggttccatcagctagagttggttttgtagggttatacagagatgaagaaaccctccaacctgtacaatattattacaaggttcctcatggattagaaaaccgtatggtgattgcggttgatccgatgttggcaacgggaaattcgtctgctgcagctatagaattacttaaaaaatctggtgcaaaaaatatcaggtttctttgcttattagcggcaccagaaggtataaagcgaatggaggaggcgcatcctgatgtcccgattgtgaccgctgccgtggatagccatctaaattcaaatggttatattgtacccggtttaggagatgccggagatagaatgtatggcacgaaataag

SEQ ID NO: 240562 - DNA, 373 bp, Unknown
  Bacterial polypeptide expressing nucleotide sequence isolated from the Sargasso Sea
cctgcgagacttctgccatccgcacgggaggggcatatcggcctttatcgtgacccggataccaaaatccccgtggaatattatgtcaaactgccgaagtcggcagggcggctgttcatcgtcagtgacccgatgctcgcaaccggacactcagccgcgcacgccatcgacgtgctgcggcggcacggtgtttcaaatcagaacatccgcttcatggcgctcgtcgccgcacctgagggcatgaaggtggtagaggatgcacatccgggcgtacatgtctacgcggcggccctcgatgaacggctcgacgaaaacgcctatatcgtccccggccttggtgatgccggggaccggctcttcggtacgaagtaac

SEQ ID NO: 240563 - DNA, 622 bp, Unknown
  Bacterial polypeptide expressing nucleotide sequence isolated from the Sargasso Sea
aatgcttacattaatcaaatctccattcctagaatataaattaacaattcttagaaacaaaagaacaaaaaattctctttttagacaaacaatgaatgaaataagctatttaattgccgcagaagtactaaagcatataaaatttaaaaaaataaagatacagaccccaatacaaaatactagcggtaacgaaatttctaacccccttataatcattccaattttaagagccggacttggattggttgaagggtttgttaaatttttaccaaatgtagaaaaaggccatattggtctctatagagatgaacagacatatcagcctgttgaatatctatgcaaattacccaaagtaaataataagaatattctagttcttgatccaatgttggcaactggaaattcttcatcagctgctatagatcttataaaagaacgaggagtaaaagtgaaaaatattaaacttgtatcattactagcagcgccagaaggtattaaaaatctgcgtaaaaatcataaagaccttcatatttttacttgcagtcttgataaaggactaaacaagaaaaaatatattgttccaggtcttggagacgctggtgataggtatatgggcacctaa

SEQ ID NO: 240564 - DNA, 400 bp, Unknown
  Bacterial polypeptide expressing nucleotide sequence isolated from the Sargasso Sea
tttacgagctggtcttggtctattagaaggttttgttaaatttttgcctgatgcagaaaaaggtcatattggtttgtatcgtaatgaacaaacatatgagcccgttgagtatttgtgtaaacttcctaaaacaaaaaacaaaacagtgttggttcttgatccaatgctagcaactggcaactcatcaatagctgcaattaatttaattataaataaaaatgtaaacataaaagatattttcttagtatctcttcttgcggcacctgagggaattaaaaatttacaaaaaaaacacaagtctcttcatatttttacatgcaaaattgatgctaaattgaataaaaacaagttcatagtccctggtcttggtgacgcaggggacagatatatgggcacctag

SEQ ID NO: 240565 - DNA, 352 bp, Unknown
  Bacterial polypeptide expressing nucleotide sequence isolated from the Sargasso Sea
gaagctgaaaaaggtcatataggtttataccgtgatgaacaaacttatgaacctgtagaatacctctttaagcttccaagagtaaaaaataaaaaagtgttaatcctagacccaatgttagcaacaggtaattcatcaattgcagctatcaaccttatcaaaaacaaaggcgttaatattaaagatatatttctggtgtctttgctagctgctcctgaaggtataaaaaatatccaaaaaaagcaaaaagggattcatatatttacatgtaatatcgatgcgaagttgaataaaaataagttcattgtaccgggcttaggtgacgcaggcgataggtacatgggtacttgaa

SEQ ID NO: 240566 - DNA, 427 bp, Unknown
  Bacterial polypeptide expressing nucleotide sequence isolated from the Sargasso Sea
catgcatgaaaacctgacgatcattgatcatcccctcgtccagcataaactttccctcatgcgtgacaaagaaacttccacgcggagtttcaggattctcatccgggaaaccggaacccttctggcctatgaggtaactaaggatctccccctgatcaccaaggaaatcgaaacacccttgatgaaaatgaatgctccgtttttagaagggaaaaaactatgcctggtttctattcttcgagcagggaatggtctgctcgacggtttcctcgatctggttccttctgccagagtggggcatattggactttatcgtgatcccgagaccctggtggctgtggagtattacctgaaacttccggaactgatcgaccaacgcctggtgattgctctagatccgatgctggcgacaggccactcatcagca

SEQ ID NO: 240567 - DNA, 501 bp, Unknown
  Bacterial polypeptide expressing nucleotide sequence isolated from the Sargasso Sea
gacaaaagattttgcctttgctgtataaagaaattgaaactccgcttatgaaaatgaatgccccttttctggaagggaaaaaactctgtcttgtctcaatattaagagctggcaatggattgcttgatggatttatggaccttgttccatctgcacgagttggacacatcggcctatatagagacccggaaacccttgtggctgtagaatattacatgaaacttcctgaactgataagtcggcgccttgtactggcccttgacccaatgctagccacaggacattcttcatccgctgcagttaccagactcaaggaaaacggtgcttcaaatattcgatttgtatgtctacttgctgctcctgaaggcattgaatatttttcaaaagttcatccggacgtacctatctacacagctgcaattgatgaaaaactaaacaaccacgcatacattatgcccggacttggagacgcaggggatcgtatttttggaacaaaataaa

SEQ ID NO: 240568 - DNA, 580 bp, Unknown
  Bacterial polypeptide expressing nucleotide sequence isolated from the Sargasso Sea
gatgcaagaaacattttcgttagttgatcatcctttggtgcagcacaagcttacgctgatgcgtgacaagaactgcccgactgcccatttccgccagttgatccgggaaatcgcattgctgctggcatatgaagtgacccgtgacctccctttggcgcagaccgaggtggagactccgctggaaacgatgcaagccccgatccttgcgggaaagaaactgtgttttatctcggtactgcgggcgggcaatggcctgttggaaggtatgctggatctgattccttcggcccgtgtcgggcacatcggactgtatcgcgatccggataccttgcaggcagttgagtactactacaaggtgccggaggatatcagtgagcgtcaggcgatcgtggtcgatccgatgctcgcaacggcaaactccctgagtgctgcgattaccagactcaagcaggaccggccggtcaaggtaaaggtagtttgtctccttgcggcccctgagggcgtggcggccttcagtgaggcgcacccggatgtgccggtcttcactgcggcgcttgaccgtgagctgaatgatcacggt

SEQ ID NO: 240569 - DNA, 640 bp, Unknown
  Bacterial polypeptide expressing nucleotide sequence isolated from the Sargasso Sea
atgcccactcgcgagatccgccacccgctgatccgtcacaagatcggcctgatgcgccgcgccgatatcagcaccaagaatttccgtgagctggcccaggaagtgggcgccctgctgacttatgaagccaccaacgacctgccactggaagcctacgacatcgaaggttgggcgggcaccgtgcaggtggagaagatcgccggcaagaaaatcaccgtggtgcccatcctgcgcgccggcatcggcatgctcgacggcgtgctcagcctgattcccggtgccaaggtcagcgccgtgggcgtggcacgcaacgaggaaaccctggaagcgcacacctacctggaaaagctcgcgccggaaatcgactcgcgcctggcgctgatcatcgacccgatgctggccaccggcggctcgatggtcgccaccatcgacctgctgaagaaagccggctgcaaggacattcgcgccatggttctggtcgccgctccagaaggcatcaaggcggtcgagaaggcgcacccggacgtgaccatcttcaccgcctccatcgatcagcgcctgaacgagcacggctacattatcccgggcctgggcgatgccggtgacaagatcttcggcaccaagcagaaggacgcctgac

SEQ ID NO: 240570 - DNA, 556 bp, Unknown
  Bacterial polypeptide expressing nucleotide sequence isolated from the Sargasso Sea
taaaagctttcgtgagctgtgctcagaagttggcacattattaacgtacgaagcaacgaaaaatattccccttgaagacaatgaaataaccagttgggacggcaacaaacttaacgtacagcatattaaaggcaaaaaaattacagtggtgcctatcttacgtgcaggtttaggtatgatggatggggttatgcagttgttgcctgcggctaaagtgagtgtagttggccttcaacgcaacgaagaaacgcttgagccaattccttattttgagaagttggttggtaacattgaacaacgtcttagcttggttattgacccgatgcttgcaacaggtggctcgatgattgccacaatagacatgttaaaaaaagcgggctgtaaagaaatcaaagttatagtgttagttgcagcccctgaaggggtagaaaaaacgttagcagctcaccctgatgtagaaatatttaccgcagcggtagatagccacttaaacgaaaaaggatatatagtgccaggtttaggtgatgcgggtgataaaatatttggtacggtgtaa

SEQ ID NO: 240571 - DNA, 370 bp, Unknown
  Bacterial polypeptide expressing nucleotide sequence isolated from the Sargasso Sea
tatgctcgatatcatcccctttgcccgggttggttttgtcgggctctaccgcgatgaagaaacgctcgaacccgtgcaatattacttcaaggtccccgaccgcctggacgagcgggccgtgatcgtggtcgatccgatgctggccacgggccattcatctgccgccgccatcgatcttctgaaacaacacggcgccaggaatattcgcctgatgtgccttgtcgcggcccccgaaggcgtggcgcatatgcgggaaaaacaccccgatgtgccgctcgtgatcgcggccctcgacgatcgtctcgatgagaaaggttacatcgttccggggctaggggatgcgggcgaccgcatgttcggcacaaaataa

SEQ ID NO: 240572 - DNA, 438 bp, Unknown
  Bacterial polypeptide expressing nucleotide sequence isolated from the Sargasso Sea
cttttttagaaggaaaaaaactttgtctggtctcaatattaagagctggaaatggactgcttgatggatttatggatcttgttccatctgcccgtgtaggacacataggtttgtatagagatccaaaaacactagaggcagttgaatattacatgaagcttcctgaacttataaatcagcgcctcgtactggctcttgatccaatgctggcaacaggccactcttcagcagctgctgttacaagacttaaagaaaacggggcttcaaatatacgatttgtatgccttcttgcagttcctgaaggtattgaatatttttcaaaagtccatcctgacgttcctatctatacagctgcggtagatgaaaaattagacagtcacgcatacatcttaccaggacttggggacgcgggtgatcgtatctttgggacaaaataaa

SEQ ID NO: 240573 - DNA, 548 bp, Unknown
  Bacterial polypeptide expressing nucleotide sequence isolated from the Sargasso Sea
attatttagacaaacaatgaatgaagcaagctatttaatagctgcagaagtgttgaaacatttacgatataaaaaaattagtgttcacactcccctgacaaaaacgacagggaaggaattagctcagcaaattattctcgtcccaattttaagagcaggactaggcctgttagagggatttgttaaatttctgcctgatgcagaaaaagggcatattggcttatatcgagatgaacaaacttatgagcctgtagaatatttatttaaacttccaaaaacaaaaaataaaaaagttttagttcttgacccaatgcttgcaaccggaaactcatctattacagcaataaatctaattaaaaacaatggtgttaaaattaaagatgttttcttagtttctttgcttgccgctcctgagggtattaaaaatttacaaaaacatcacagatctctccatatatttacatgcaaaattgatgctaaattgaataaaaataagtttatagttcctggtcttggtgacgcaggtgacaggtatatgggaacatagg

SEQ ID NO: 240574 - DNA, 628 bp, Unknown
  Bacterial polypeptide expressing nucleotide sequence isolated from the Sargasso Sea
aatgaaagttgtcgaggttaaacacccgttagtgcgtcacaaaatcggcctgatgcgtgaaggcgacattagcactaaacgtttccgtgagctagccgccgaagtgggcagcttgttaacctatgaagctaccgcagatttcgaaaccgaaactgttacgattgaaggctggaatggtccagttgatgtggatcagatcaagggcaaaaaagtgactgttgtgccaatcctgcgtgcgggtttaggcatgatggacggtgtacttgagcatattccaagtgcgcgtatttcggttgtaggtatttaccgcgacgaagaaaccttagagccagtgccatattttgaaaagctggccagcgatatgaatgagcgtatcgcgctgattgttgaccccatgctggcaactggcggctctatgattgcgactatcgacctgctgaaaaaacgcggttgtacgtcaattaaagccctagtgttagttgctgcgcctgaagggattaaagcccttgaagcggctcacccagatgtagagctgtatactgccgctatcgacagatgcttaaacgagaagggctacattctgcctggtttaggcgatgccggtgataaaatcttcggtactaaataa

SEQ ID NO: 240575 - DNA, 622 bp, Unknown
  Bacterial polypeptide expressing nucleotide sequence isolated from the Sargasso Sea
atgattacagtaattaaatcaccattcgttcaatacaaattaacaattttacgaaataaaaaaacatcaaatactgtttttagacaaactatgaatgaaataagctacctcattgcttctgatgtccttcaatacgttccatttaaaaaacaaacaattgaaacacctctaaaaaaaatgagtggtacagctttgggtcaacccataattttggttccaattttacgtgccggtttagggttacttgaggggtttgcaaaatttttaccggaagctgaaaaaggtcatataggtttataccgtgacgaacaaacttatgaacctgtagaatacctttttaagcttccaagagtaaaaaataaaaaagtgttaatcctagacccaatgttagcaacaggtaattcatcaattgcagctatcaaccttattaaaaacaaaggcgttaatattaaagatatatttttggtatctttgctagctgctcctgaaggtataaaaaatatccaaaaaaagcaaaaaggcattcatatatttacatgtaatattgatgcgaaattaaataaaaataagtttatagtgccgggcttaggtgacgcaggtgatagatatatgggtacttgaa

SEQ ID NO: 240576 - DNA, 529 bp, Unknown
  Bacterial polypeptide expressing nucleotide sequence isolated from the Sargasso Sea
aattctcatctacgaggccgggagagagtggttaccgacgtttgaggcgcaggtgcagggtccgctcgcgatcgcggacgtggagtttgtcaacccggagaagccggtgagcgtggtgccgattttacgcgccggtttgacgctcctggaggaatcctcgagcgtgctcccggcgtcggtgacttatcacctcgggtacgtccgcgacgaggagactcttcaacccaagttgtacctgaacaaacttcccgaaaagtttgaagaggacgcgcaggtattgatcagcgacccgatgttagcgacgggcggcaccattctcgccgcggtcgaagaaatcatctctcgaggcgcgtcgccgaagaacattcgcatcatctgcgtcgtcgcgtgtccggtatcgctcaccgagctcagcaagcggtacccgggccttcgcgtgtacgcggcgatgatcgacgaacacttgaacgagaacggttacatcgttccgggtctcggcgacgccggcgaccgcgcgttcggcacgtaa

SEQ ID NO: 240577 - DNA, 652 bp, Unknown
  Bacterial polypeptide expressing nucleotide sequence isolated from the Sargasso Sea
atgaaacaggacagccgcttcccgaatctcttcatcaccgatcatccgctgatccagcacaagctcacgcacatgcgcgacaaggacacgtccacacgcacgttccgcgagctgctgcgcgaaatcacgctgctgatgggctacgagatcacccgcaacctgccgatcacgaccaagcgggtcgaaaccccgctcgtcgaggtcgacgcgccggtgatcgcgggcaagaagctggcgatcgtgccggtgctgcgcgcgggtatcgggatgtcggacggcctgctcgacctggttccgtccgcccgcgtcggccacatcggcgtttaccgcgccgacgaccatcgcccggtcgaatacctggtgcgcctgccggatctcgaagaccgcatcttcatcctgtgcgacccgatggtcgcgaccggctactcggccgtgcacgcggtcgacgtgctgaagcgccgcaacgtgccggccgcgaacatcatgttcgtcgcgctggtcgccgcgcccgaaggcgtgcaggtgttccaggatgcgcacccggacgtgaagctgttcgtcgcgtcgctcgattcgcacctgaacgagcacgcgtacatcgtgccgggcctcggcgacgcgggcgaccgcctgttcggcaccaagaactgag

SEQ ID NO: 240578 - DNA, 634 bp, Unknown
  Bacterial polypeptide expressing nucleotide sequence isolated from the Sargasso Sea
catgcatgaaaacctgacggtcatcgatcatcccctcgtccagcataaactttccctcatgcgtgacaaagaaacttccacgcggagtttcaggattctcatccgggaaaccggaacccttctggcttatgaggtaaccaaggatctgctcctgatcaccaaggaaatcgaaacacccttgatgaaaatgaatgctccgtttttggaagggaaaaaactatgcctggtttctattcttcgagcagggaacggactgctcgacggtttcctcgatctggttccttctgccagagtggggcatattggactttatcgtgatcccgaaaccctggtggctgtggagtattacctcaaacttccggaactgatcgatcaacgtctggtgattgccctagatccgatgctggcgacaggccactcctctgcggctgcagtgacccgtattaaggaaaatggtgccgctaatatccgttttgtctgcttactggctgctccggaaggggttgagtattttaataaaatccatccggatgtgaagatctacactgcagcacttgatgacaaactgaatgatcatgcctacatcctgcccggcctgggtgatgctggagaccggattttcggtaccaaataa

SEQ ID NO: 240579 - DNA, 382 bp, Unknown
  Bacterial polypeptide expressing nucleotide sequence isolated from the Sargasso Sea
ttacttgaggggtttgcaaaatttttaccggaagctgaaaaaggtcacataggtttataccgcgacgaacaaacttatgcacctgtagaatacctctttaagcttccaagagtaaaaaataaaaaagtgttaatcctagacccaatgttagcaacaggtaattcatcaattgcagctatcaaccttattaaaaacaaaggcgttaatattaaagatatatttttggtatctttgctagctgctcctgagggtattaaaaatattcaaaaaaagcaaaaagacattcatatatttacatgtaatattgatgctaaattgaataaaaataagttcatcgtaccgggcttaggtgacgcaggcgatagatacatgggtacttgaa

SEQ ID NO: 240580 - DNA, 628 bp, Unknown
  Bacterial polypeptide expressing nucleotide sequence isolated from the Sargasso Sea
atgaaagtcgttgaagtcaaacaccccctggtcaagcacaagatcggtctgatgcgtgaaggcgatatcagcaccaagcgtttccgtgaactggccaaggaagtgggcagtttgttgacctacgaagcgacctctgacttcgaaaccgagaaggttaccatcgatggctggaatgggccagtggaagttgaccagatcaagggcaagaaggtcaccgtcgtgcccatcctgcgtgccggtcttggcatgatggatggcgtgctggagcacatgccgagcgcccgcgtcagcgtggtcggcatctaccgcgacgaagagaccctgcagccggttccctatttcgagaagatcgtcagcaacatcgaagagcgtctggcgctggtcatcgaccccatgctggctaccggcggctccatgatcgccaccatcgacctgctcaagaagaagggctgccagtccatcaaggtgctggtgctggttgccgcgccggaaggcatcaaggcgctggaagccgctcacccggacgtggagctgttctgcgcctccatcgaccagggcctgaacgagaagggctacattgtcccgggtctgggcgacgccggcgacaagatcttcggcaccaagtaag

SEQ ID NO: 240581 - DNA, 634 bp, Unknown
  Bacterial polypeptide expressing nucleotide sequence isolated from the Sargasso Sea
atgcatgaaaacctgacgatcattgatcatcccctcgtccagcataaactttccctcatgcgtgacaaagaaacttccacgcggagtttcaggattctcatccgtgaaaccggaacccttctggcctatgaggtaaccaaggatctgcctctgatcaccaaggaaatagaaacacccttgatgaaaatgaatgctccgtttttggaagggaaaaagctatgcctggtttctattcttcgtgccgggaatggtttgctcgacggtttcctcgatctggttccttctgccagagtggggcacattggactttatcgtgatcccgaaaccttggtggctgtggagtattacctcaaacttccggaactgatcgatcaacgtctggtgattgccctagatccgatgctggcgacaggccactcctctgcggctgcagtgacccgtatcaaggaaaatggtgccgccaatatccgttttgtctgcttactggctgctccggaaggggttgactattttaataaaatccatccggatgtaaagatctacactgcagcacttgatgacaaactgaatgatcatgcctacatcctgcccggcctgggtgatgctggagaccggattttcggaaccaaataaa

SEQ ID NO: 240582 - DNA, 487 bp, Unknown
  Bacterial polypeptide expressing nucleotide sequence isolated from the Sargasso Sea
ctgccctacaaaaaaaccaaagttattacacctttaaagaaaacaactggtactaccttagtaaaacaaataatattagttccaatattaagagcaggtctgggtttacttgagggttttgctaaatttcttcctgatgcggaaaaaggacatattggcctataccgagatgaacaaacatatgagcctgttgagtatttatttaaattaccaaaaattaaaaataaaaaaattttaatactcgatccaatgctagcaactggaaattcatctattgcagcaatagatcttattaaaaataaaggcgcaaatataaaggatatatacttaatatcgctattagccgcaccagagggattaaaaaatatccaaaagaaacaaaaagggatccatatttttacctgtagcattgacacaaaattgaataaaaataagttcattgtgccaggattaggagacgcaggtgataggtacatgggtacttgaa

SEQ ID NO: 240583 - DNA, 622 bp, Unknown
  Bacterial polypeptide expressing nucleotide sequence isolated from the Sargasso Sea
tatgattacagtaattaaatcaccattcgttcaatacaaattaacaattttacgaaataaaaaaacatcaaatactgtttttagacaaactatgaatgaaataagctacctcattgcttctgatgttcttcaatacgttccatttaaaaaacaaacaattgaaacacctctaaaaaaaatgagtggtacagccttgggtcaacccataattttggttccaattttacgtgctggtttagggttacttgaggggtttgcaaaatttttaccggaagctgaaaaaggtcacataggtttataccgtgatgaacaaacctatgaacctgtagagtacctctttaaacttccaagagttaaaaataaaaaagtgttaattctagacccaatgttagcaacaggtaattcgtcaattgcagcaatcaatttaataaaaaataagggtgttaatattaaagatatatttttagtgtccttgcttgcggcacctgaaggtataaaaaatatccaaaaaaagcaaaaagggattcatatatttacatgtaatatcgatgcgaagttgaataaaaataagttcattgtaccgggcttaggtgacgcaggcgataggtacatgggtacttga

SEQ ID NO: 240584 - DNA, 628 bp, Unknown
  Bacterial polypeptide expressing nucleotide sequence isolated from the Sargasso Sea
aatgaaagttgtcgaggttaaacacccgttagtgcgtcacaaaatcggcttaatgcgtgaaggtgacattagcactaaacgtttccgtgagctagccgctgaagtcggcagcttgttaacctatgaagctaccgcagatttcgaaaccgaaactgttacgattgaaggctggaatggtccggtagatgtggatcagatcaaaggcaagaaagtgactgttgtgcctatcttgcgtgcgggtttaggcatgatggacggtgtacttgagcatattccaagtgcgcgtatttcggttgtgggtatctaccgcgacgaagaaaccctagaacctgtgccatattttgaaaagctggccagcgacatgaacgagcgtattgcgctgatcgttgaccccatgctggcaactggtggctcgatgattgcgactatcgacctgctgaaaaaacgcggttgcacgtcaattaaagccttagtgttagttgccgcgcccgaaggactcaaagcccttgaagcggctcacccggatgttgagctgtatactgccgcaatcgacagatgcttaaacgagaagggctatatcctgcctggtttaggtgatgcgggcgataagatttttgggactaaataa

SEQ ID NO: 240585 - DNA, 544 bp, Unknown
  Bacterial polypeptide expressing nucleotide sequence isolated from the Sargasso Sea
tcgtgaattaacctcagaaataacaagcttgcttttataccaggcaacaaaggaactcacattgtctaactataacattgaaacacctattaccgaaacaataggatacaaaattaaattagataatatagtaatactccctattctacgtgctggattggggatggttaagggggctcaagatttaatgccaaactctcgcgttggctatatcggcatggaaagagatcataaaacacatcagcctgtagattattactttaaaattcccaaagtaacagatagcatggtttttatcgttttagatccaatgcttgcaacaggtgggacgatgattgctgctatagataggttaaaagatctaggtgcgaaaaatattgtatcaatttgtataatttcttctcctgaagggatgaatgaaatttgtaatcatcatcaggatgtaaaaatatatacaggggcactagataaaaaacttaataataataaatatattgtacctggattaggtgacgctggtgatcgtctttatggaacagaataa

SEQ ID NO: 240586 - DNA, 631 bp, Unknown
  Bacterial polypeptide expressing nucleotide sequence isolated from the Sargasso Sea
atggccgttcacgaaattacccacccgcttattgcgcacaaactagggcttatgcgatacgctaaaattagcagcaaagactttcgcgagcttgcctctgaagtagggaaccttctgacttatgaagcaacgcgaacactgcctacggaaagagcgacgattaaaagttggtcgggggatgaggtagaagtaagacaaattaaaggtaagaaaataactgttgtccctattcttcgtgctggcttaggtatgcttgaaggcgtactggaacttattccaaatgcgaagattagtgtagtcggtctgtaccgtgatgaagatacactgcagccagttgcgtattttgacaaggtagtaaaaaacattgatgaacgtaccgcactgattgttgacccaatgctggcaacaggcggcacgttgattgcaacaatcgaccttctgaaaaagaaagggtgtcgaagaataatgggactattccttgttgctgcgcctgaaggcattaaagccgttgttgaagcacaccctgatgttgatatctttaccgccgcaatcgatgatagattgaatgagaaaggctatatcctaccgggattaggagatgctggagacaaaatctttggcacgcgctaag

SEQ ID NO: 240587 - DNA, 634 bp, Unknown
  Bacterial polypeptide expressing nucleotide sequence isolated from the Sargasso Sea
aatgaacgaaaatgtgcaagttatcaatcatcctctggttcaacacaagctttcgctgatgcgcaagaaagacacctccacaaagagttttcgtatcctaattcgtgaggtcggcactttactggcttatgaagtgacaaaagatttgcctttgctttataaagaaattgaaactccacttatgaaaatgaatgccccttttctggaaggaaaaaagctctgtctggtctcaatattaagagctggtaatggattgctggatggatttatggaccttgtaccatctgcacgagtcgggcacatcggcctatatcgagacccggaaacccttgtagcagtagaatattacttaaaacttcctgaactgataaatcgtcgccttgtactggcccttgacccaatgctggccacaggacattcttcatctgctgcggttaccagactcaaggaaaacggtgcttcaaatatacgatttgtatgtcttcttgctgctcctgaaggtattgactatttttcaaaagttcatccggacgtacctatcttcacagctgcaattgatgaaaaactaaacaaccacgcatacatcctgcccggacttggagacgcaggggatcgtatttttgggacaaaataa

SEQ ID NO: 240588 - DNA, 622 bp, Unknown
  Bacterial polypeptide expressing nucleotide sequence isolated from the Sargasso Sea
atgattacatctattaaatcatctttcttagaatacaaaatgactattttaagaaataaaaaaacttctaattctctttttagacaaacaatgaacgaagctagctatttaattgctgctgaggtgcttaaacatctgaaatataaaaaaattactatacaaacacctttgattaaaacacaggggttggatttagctcagcaagtgattcttgtgccaattttacgagccggtcttgggttattagaaggatttgttaaatttttgcctgatgcagaaaaaggccatattggtttgtatcgtaatgaacaaacatatgagcctgtcgagtatttgtgtaaacttcctaaaacaaaaaacaaaacagtgttggtgcttgatccaatgctagcaactggcaactcatcaatcgctgcaattaatttaattattaataaaaatgtaaacataaaagatattttcttagtatctcttcttgcagcacctgagggaattaaaaatttacaaaaaaaacacaagtcgcttcatatttttacatgcaaaattgatgctaaattgaataaaaacaagttcattgtccctggtcttggtgacgcaggggacagatatatgggtacttaga

SEQ ID NO: 240589 - DNA, 634 bp, Unknown
  Bacterial polypeptide expressing nucleotide sequence isolated from the Sargasso Sea
catgcatgaaaacctgacgatcattgatcacccactcgtccagcataaactttccctcatgcgtgacaaagaaacttccacgcggagtttcaggattctcatccgggaaaccggaacccttctggcctatgaggtaaccaaggatctccccctgatcaccaaggaaatcgaaacacccttgatgaaaatgaatgctccgtttttggaagggaaaaaactatgcctggtttctattcttcgagcagggaatggtctgctcgacggtttcctcgatctggttccttctgccagagtggggcatattggactttatcgtgatcccgaaaccttggtggctgtggagtattacctcaaacttccggaactgatcgatcaacgactggtgattgccctagatccgatgctggcgacaggccactcatcagcagctgcagtgacccgtatcaaggaaaatggtgccgctaatatccgttttgtctgcttgctggctgctccggaaggagttgagtattttaataaaatccatccggatgtgaagatctacactgcagcacttgatgacaaactgaatgatcatgcctacatcctgcccggcctgggtgatgctggagaccggattttcggtaccaaataa

SEQ ID NO: 240590 - DNA, 736 bp, Unknown
  Bacterial polypeptide expressing nucleotide sequence isolated from the Sargasso Sea
ttgcgccgtggcgcgtccgtcagccggtttccggccgggcggcgcgccgaaccgatccctctagccgccgcttgcgcccccgccatgactcaggacagccgttttcccaatcttttcatcctcgatcacccgctgatccagcacaagctgtcgcatatgcgcgaccgggacacctcaacccgcacgttccgcgaactgctgcgcgaaatcacgctgctgatgggttacgaaatcacccgtaacctgccgatgaccacgcgccgcatcaccacaccgctggtcgacatcgacgcacccgtgatcgccggcaagaaactggcgatcgtgccggtgctgcgtgccggcatcggcatgtcggacggcctgctggagcttgtgccgtcggcgcgggtgggccatatcggcgtctatcgcgccgaggaccaccgcccggtggagtatctggtgcgcctgccggatctggaggaccgcgtgttcattctgtgcgatccgatggtcgcgaccggttattcggccgtgcacgccgtggacgtgctcaagcgccgcaacgtggccggcgaaaacatcctgttcctcgcgctggtggcggcgcccgaaggcgtgcaggtgttccaggacgcccatcccgacgtcaagctgtacgtcgcgtcgctcgattcgcatctgaacgagcacgcctacatcgtgccgggtctcggcgacgccggcgatcgcctgttcggcacgaaaaactgac

SEQ ID NO: 240591 - DNA, 463 bp, Unknown
  Bacterial polypeptide expressing nucleotide sequence isolated from the Sargasso Sea
atgagtgaatggtttacagaaaatgatgatggagtgttaaactttggctataagatagaggaccatctgttttctaaaaaatcaaaatttcaaaaagtggatgtatacaaaacaaaagcttatggtaagattcttgttcttgatgattgtattatgatgtccgaagcggacgaatttgtttatcatgagatgatttcacatattcctgtatgctatcactcgaatccaaaaagagttcttgtcattggtgggggtgatggaggaactcttagagagttatccaagcatcctagtcttgaaaagatagtactatgcgaaatagacaagcttgttattgatgtaagtaaggaatattttccgaatgttgcttgtggttttgatggtcctcgtgtcgaagtaaaagttgctgatggtattgactatataaagaaaaataaaaactattttgatattgtcattgttg

SEQ ID NO: 240592 - DNA, 538 bp, Unknown
  Bacterial polypeptide expressing nucleotide sequence isolated from the Sargasso Sea
gaatttggaaatgcattatttattgatgatgaacttcaagtggcagaaaaagatgaaaaactttatagctccacttttgtgaaatctggtacagatatttgcaaaagaaagggtattgcagctgttataggcggcggagatggaggcgtagtaagagaatgtttgcaaaataatttcaattttgtagattggtttgagcttgatcctcaagttgttgaattaagttataagcacttacctaaaattacatctagaattaaaaaaagcaataaagtgaaaacatattggggggatgcattcaaaagcattaagtcgattgaggactccaaatatgataatattttcgtagatcttaacgatgatcagtattgcatagatctagccaagcgcaatatgaaaagtttaaagagaattttaaaaaaaggcggagctttaaccgctcaagtcggatgtcaggacaaaaaaccaaagcaaataaacaattggacaaaagttttgaaaactagctttggaaatacaagtttatctgaaattttca

SEQ ID NO: 240593 - DNA, 545 bp, Unknown
  Bacterial polypeptide expressing nucleotide sequence isolated from the Sargasso Sea
gatgagcggctggatcgacgaggtacatcaaggcgtgcgttacgggttggcaggcgaggtcttgatcgaggagatcagcccgttccaacgaatcaccgtgatcagaagcgagcgctacggccgggggctgatgctcgatggctgctggatgacggcggaaggtcaggaacggcagtatcacgaggctctggttcatcccgccctgtgtgctgcagccgcggtcgaacgcgtgttggtgattggtggcggcgatggcggcacggcccgtgagtgcctgcgccacaaggatgtcaagcaactggaccttgttgagattgacgcccgtgtggtggagctcagccggatccatctgcccgatatcggcggcggcgcctgggatgatccccgtctgcagctgagcatcggcgacggcatcgcctgggtcttgagcgcagaagcggccagctacgacgtcatccttgtcgacggctccgacccggcaggtcccgcggaagggctgttcaaccaggccttttttgaacattgccgaagggtcctcagaccgg

SEQ ID NO: 240594 - DNA, 607 bp, Unknown
  Bacterial polypeptide expressing nucleotide sequence isolated from the Sargasso Sea
tattggtggaggagacggcggtacagcaagagaatgcgttaaatattctcaaatatcgaaaattgatctagtagaaattgatgaggaggtaatcaaaatatctaaaaaatttttaaaagaaattggaggcgaagcatggaatgacaaaagattagaaatacatgttgatgatggtgttaaatgggtaaaaaaaacacgagataatttttacgacgttatttttatagattgttcagatccctcagaattttcaaatttattattttcagattctttttataaagaatgtaaaagaatacttacaccaaaggggatattagcaacgcaaagcgaatctcctgaatccttcaaaaatatacacataaatattttgaaaaccctaaaaaatatatttaaagtttctgaaactatgtattcctttgtgcctatatatccaagcgggatttggagttggacattcgcttcttcagaagatctaaatttatcaaagcaaaattatgatgaagccctaagaatagaaaaaggatgtgaaatttggaatttaaattttcaaaacgcagcattcaaaatgatgccaaataaaattgtaaaagaactagattcataa

SEQ ID NO: 240595 - DNA, 629 bp, Unknown
  Bacterial polypeptide expressing nucleotide sequence isolated from the Sargasso Sea
ttcaaaagttgggcaaaaattggaaattttaaatatagaagaatttgggaatgcactatttatagatgatgaacttcaagtttcagaaaaagatgaaaaactttatagttctacttttgttaaatctggaattagtatttgtaaaaaaacagatatcgcagcagtaataggtggtggcgacggcggagtagttagagaatgtttacaaaataatttcaattttgttgattggtttgagctcgatccacaggttgttgaacttagttataagcatttacctaaaataacatcaagaattaaaaaaagtaataaagtaaaatcatactggggcgatgcatttaaaagtatcaaatctatagaggactcgaaatatgatcatatatttgtagatcttaatgatgatcaatattgcatagatttagcaaagcgtaatatgaaaggtttaaaaagaattttaaaaaaaggtggagctttaaccgcccaggtcggatgtcaggacaaaaaaccaaagcaggttaaaaattggacaaaagttttagagactagctttggcaatgcaaatttatctgaaattttcattccaagttttgattgtagatggaattttatctcctcttccaacaaatagt

SEQ ID NO: 240596 - DNA, 558 bp, Unknown
  Bacterial polypeptide expressing nucleotide sequence isolated from the Sargasso Sea
catgaccagctccggttggatcgatgaacaccacaacggggtgcgctatggcctggcaggtcaggtgctgcacgaagagcagagcccgtttcagcgcgtcacgatcatcgacagcgagcgctacggcaaaggactactgctcgatggctgttggatgactgccgagcggcaagagcggcactaccacgaagccttggtgcatccagccctctgcagcgccgagcgcattgaacgggtgctggtgatcggcggcggtgatggcggcacagcccgcgagtgcctgcgccatggggaagtgcagcagcttgacctggtggaaatcgatggccgtgtggtggagctgagtcagcaacacctgccatccatcggcggcagtgcctggagtgatcggaggttgcagttaacgatcggcgatggcatcgcctgggctgccaatgccgccgatgccagctacgacgtggtgctggtggatggttccgatccaactggccctgctgaagggctgttcaaccgggcctttttcgagcattgccgccgcctactgaaacccggcggtgt

SEQ ID NO: 240597 - DNA, 652 bp, Unknown
  Bacterial polypeptide expressing nucleotide sequence isolated from the Sargasso Sea
atgggcggatggatcgatgaagagcaccgtggggtccgctacggcctcgccggagaggtgctcgtggaggagaccagcccgttccaacgcatcagcgtgatccgcagcgagcgctacggcagaggcctgctgctcgatggctgctggatgaccgccgagcagcaggagcggcactatcacgaagtgctggtccatccagccctctgcagcgccgaggcgatcgagcgggtgctggtgatcggcggcggcgacgggggcactgcccgcgaatgtcttcggcacccgggagtgctccatctagacctcgtggagatcgacggacgggtggtggagctcagccaggagcacctaccgggcatcggcggggcggcctggagtgatccccgctgtcacctcacggtgggggacggcattgcctgggccgccgctgctcctgatcagagctacgacgttgtgctggtggacggctcggacccggctggcccggcggaaggcctattcaatcgagccttcttcgaacactgcagacgcatcctccgacctggcggggtgttcgccacccagagcgaatcaccggaagccttccgggaggttcatgtggccatggtgcgcctgctccgcgaggtgttcggccacgccgaccccctctacg

SEQ ID NO: 240598 - DNA, 796 bp, Unknown
  Bacterial polypeptide expressing nucleotide sequence isolated from the Sargasso Sea
gatgcataatttttctgataaattagatctaattgcaaaagatacaaatttttttctaagaaaattgttttcaaaaaaaaataaaatttccaatttaaatacttcaatgatgtatagtattttttctggaggtaaaagatttaggtcagctataataattaatagcggaaaaatttttaatattaactacaagcaattgattacagttgcggcggctgttgaatgtattcattcatactctttaatacatgatgatttgcctgcaatggacaatgatgatttaaggagaggaaaattagcaactcataaaaaatttaatgaatatactgcaattttggcaggcaactctttacttgctttagcatttgaaattttatctagcaaaaatttaaaattacctccaaaaataaaaaatgagttaattacaacactagcactttattcaggatcatcaggtttggcgggaggtcagtattctgatctttcttttgaaaataaaaaaatttcaaaaagaaaaattattgaaattcaaaaaaataaaactggtaaattatttgccttttgttgtgagtgctcaggaattattaaaggtcaaaattttaataaaagaaaaattctaagggaaataggtatggatattggtttactatttcaaattgcagatgatttgattgactttaaaggagatagtaaaattgttggaaaacccacaaaaaaagataaaaaaaaaggtaaacagacattagttagaatgctgggctatgagaaaactataaattttgctaataatctgaaa

SEQ ID NO: 240599 - DNA, 463 bp, Unknown
  Bacterial polypeptide expressing nucleotide sequence isolated from the Sargasso Sea
aattggtggaggtgatggtggagtcgcaagagaatgtatttctcaaaatttcggtttcatagattggtatgagcttgaccaagaggtagtagaggtatgtgataaacatttatcaaaaattggagaaaaggcatcagaaaaaaattctgtgaaatgcgtatggggtgatgcatttaaaagtataaaagcagttaaggatgacacttatgatcagatatatgtagatcttaatgacgatcaattttgtattgatttagctgcaaaaaatatggattctttggttagaattttaaagcccaagggagttataacagcacaagttggaagccaggataaaaaacctaaacaggttgaaaactggatgaatgtttttaatcaaaattttggaaatgcaaatttatcaagagtttatgtaccaagttttgattgttcttggaatttttcctcgtcaataaatcattaa

SEQ ID NO: 240600 - DNA, 721 bp, Unknown
  Bacterial polypeptide expressing nucleotide sequence isolated from the Sargasso Sea
ggaaaaatatttaatatttagtgaaaaaaaacttataaatatttgtgccgcagttgagtgcattcactcttattcattaattcacgatgatttgccttgtatggacaacgatactattagaagaggcaaaccagcaacacatattaaatttggcgaagcttcagctgtactagcaggaagttctcttcttactttggcttttgaaattattgctgataaaaaatatttattaagtcctaaagaaaaaaatgaaataattaaatttttgtctagttgctctgggcatactggtattgctggggggcaagaattagatctaaagtttgagaataaaaaaaagggaattaatcaaattattgatatgcagaaaaaaaaaacaggaaaattatttaatttctgtttatatgccgttggggttgtagctaaaaaaaatactaaagataaattatttttaagcaatttaggagaagaaataggtttgttatttcaactagctgacgattttttagattttaaaggtttgaaaaaattactgggtaaaccagttaaaaaagatcataaaaaaggcaagtcaactttattaaacttaatgggcgaaaaaaaagcttatttgtttgcaaataatttaaaaagaaaaatattgcgtaaattagaaaaacatggaaaaaatgcaaaagaattaattagtacaattgagtttatattagaaagaaaattttaa

SEQ ID NO: 240601 - DNA, 445 bp, Unknown
  Bacterial polypeptide expressing nucleotide sequence isolated from the Sargasso Sea
catgcccgtttgggttgatgaggaacatcggcaggtccgttacggactcgccggtgaggtgctggtggagaaaaccagtccgttccaacggatcaccctgatccgcagtgagcgctacggcaatgcattgctgctggatggctgctggatgacggccgagaggcaggaacgtcactatcacgaagctctggtccatccggccctctgcggcgccgaggcgatcgagcgcgtgctggtgatcggcggcggagatggcggcaccgcccgggagtgtctgcgccatcagggcgtgcagcatctggacatggtggagatcgacggcgaagttgtgaatctgtgccggacccatctgccatcgcttggcggatccgcctggagcgacccccgcctgcatctcaccgtgggggatggcattgcctgggctgcaggacgccccggacagcca

SEQ ID NO: 240602 - DNA, 854 bp, Unknown
  Bacterial polypeptide expressing nucleotide sequence isolated from the Sargasso Sea
tatgattaaagttggggagcatgttaccttagatataattggtacaaaaaaagaatatgatccttctttttttgaaggtttagttcataaaattgcagataaggcaaaagtaacagttttaaatatagcgaaatataaatttgaacctcaaggatttaccttagtagctttattagcagaaagtcatattagctttcatacttacccagaaaaaggaataattagttttgacttttatacttgtgggacagtatctccttcaattgctttagaagttataaaaaaagaaatagagcacaaaaggataattaaaaaagaattaaacagagatacaatttctttttatcatgacacaacaagcacgaaaggattaaagaaaaattatctagtaaaagaagttctagaagattttacatctaaagttggccaacatattgaaatacttaatcttgtagaatatggaaaatcattattcattgataatgatttacaagtcgcagaaagtgatgagcatatttatagtggaacctttgtaaattctgcattgaaattaaacaaaagtaaagatagagcagcaattattggtggcggtgatggaggagttgcacgagagtgtatatctaaaggcttcggttttattgattggtatgaattagatcctgaagttgttgaggtttgtaaaaagcatattggttctattggaaaaaatgccactgagaaaaattctgtaaaatgtgtttggggagatgcttttgaaagtattaaaaaagttgaagatgatgcttatgaccagatatttattgatttaaacgatgatcaattctgcattgatcttgcagcaaaaaatatgagtt

SEQ ID NO: 240603 - DNA, 467 bp, Unknown
  Bacterial polypeptide expressing nucleotide sequence isolated from the Sargasso Sea
aatcattggtggtggtgatggaggagttgccagagaatgcatatctaaaaaatttaattttatcgattggtatgagcttgatcctgaggtagttgaagtttgtaataaacatttaggggacattggaaaaaaagctacagagaaaaattcagttaaatgtgtttggggagatgcgtttcatagtattaaatcagtaaaagacgatacatacgatcatatttttgtagatttaaatgatgatcagttttgtatagatttggctgcaaaaaatatggactctttagtaagaatattaaagccaaagggtgtgatcacagcacaagttggcagccaagataaaaaacctcttcaagttgaaaattggatgaatgtttttcatcatcattttggaaataccaaattatctagggtttatgtacccagttttgattgttcttggaatttctcgtcttcaataaatcattagt

SEQ ID NO: 240604 - DNA, 888 bp, Unknown
  Bacterial polypeptide expressing nucleotide sequence isolated from the Sargasso Sea
ttacattggtagctctgttagcagaaagccatataagctttcacactttcccggaaaatgaaattataagctttgattttcttacttgtggtaaagtttcaccatcagttgctcttaaagtaattaaagaagaaatagaacacaaacaaatcattattaaggaatttaacagagatacgattgatctatatcatgataactatagttcaccaggattaaaaaaatcttatgttgtaaacaaagtattagaaaattttaaatccaaagcaggtcaatatattgaaatattagatttagaacagtttggaaaagctttatttattgataatgagatacaagttgctgagattgatgagcatttatatagctcaacctttgtaaattctggtcttaatttaaattcaaataaagagaaagctgcaattattggtggaggtgatggtggtgttgcaagagaatgtatttcacaaaattttggatttatagattggtatgaattagatcctgaagttgttgatgtatgtgataaacacctaagtaaaattggtgaaaaggctacagaaaaaaattcagttaaatgtgtttggggtgatgcatttgagagcattaaatcagtcaaagataatacctatgatcaaattttcgttgatcttaacgatgatcaattttgcatagatttagctgcaaaaaatatgtcatctctagaaagaatattaaaacctaaaggtgtaatcactgctcaagttggaagccaagacaaaaaaccaaaacaagttgaaaattggttaaatgtttttaataaaaattttggaaatacaaaactttcaagagtttacataccaagtttcgattgttcttggaatttttcctcgtcaataaatcattaat

SEQ ID NO: 240605 - DNA, 781 bp, Unknown
  Bacterial polypeptide expressing nucleotide sequence isolated from the Sargasso Sea
aattaaaaaaacctcaaaatatcaagaaattattgttattgaaaatgaatattatggtaaagctttaatgttagatggctgctggatgacatcattaaaagacgagaaatattatcatgagtgtcttgtacatcctgtattaagtagcactgacgcaaaatctaatgtactaattattggaggtggtgacggtggtactgtgagagaatgcgttaaatattctcaaatatcaaaaattgatctagtagaaattgatgaggaggtaatcaaaatatctaaaaattttctaaaagaaattggaggcgaagcatggaatgacaaaagattagaaatacatatagatgatggtgttaaatgggtaaaaaaaacaagagataatttttacgacgttatatttatagattgttcagatccatcagaattttcaaatttattattttcagatattttttataaagaatgcaaaagaatacttacaccaaaggggatatttgcaacgcaaagcgaatctcctgaatcattcaaaaatattcacataaatattttgaaaaccctaaaaaatatatttaaagtttctgaaactatgtattcatttgtacctatatatccaagcgggatttggagttggacattcgcttcctcagaagatctaaatttatcaaagcaaaattatgatgaagtcctaaaaatagaaaaaggatgtgaaatttggaatttaaattttcaaaacgcagcatataaaatgatgccaaataaaattgtaaaagaactagattcataa

SEQ ID NO: 240606 - DNA, 568 bp, Unknown
  Bacterial polypeptide expressing nucleotide sequence isolated from the Sargasso Sea
atgacagatattacaacatggatagatgaatatcataaaggctcaagatttggcctaaatgggaaaattctaattaaaaaaacctcaaaatatcaagaaattattgttattgaaaatgaatattatggtaaagctttaatgttagatggttgctggatgacatcattaaaagacgagaaatattatcatgagtgtcttgtgcatcctgcattaagtagcattgacgaaaaatctaatgtactaattattggaggtggtgacggtggtactgtaagagaatgcgttaaatattctcaaatatcaacaattgatctagtagaaattgatgaggaggtaatcaaaatatctaaaaaatttctagaagaaattgcaggcgaagcatggaatgacaaaagattagaaatacatattgatgatggcgttaaatgggtaaaaaaaacaaaagataatttttacgacgttatatttatagattgttcagatccctcagaattttcaaatttattattttcacattctttttataaagaatgtaaaagaatacttgcaccaaggggggatattagca

SEQ ID NO: 240607 - DNA, 619 bp, Unknown
  Bacterial polypeptide expressing nucleotide sequence isolated from the Sargasso Sea
aatgaaaaaagtcggggaacacgtaactatagattttttaggggtaaaacgtgattatacgcctgaattttacactaaagtgatctataaaattgctaaaaaggccagagtagaggttcttaatatagcagaaaaggtttttaaaccacagggatatacttgtgttgcacttttggcagaaagccacatgagcttccatacatttccagaaagaggaataataagttttgatttcttcacttgtgcaaaaatttctccaacggcagccttagatattttgaaaaatgaaattaagcatgaaagagcagtagtcagaaattttgacagaagtaataaaggtatgtacgaagatatatatagtacacccggacatcaaaaatattacattgttaatgatgttttagaaaattttatatcaaaagtaggacaacatattgaaataatgaaactcgaagaatttggtaatgctttatttatagatagcgaattacaggttgctgagaaagacgaaaaaaaatatagcggacaatttgtcaattcagcacttagtttatctaaggaaaattcaagtgcagctataattggtggaggagatggaggcgtagccagagaactttta

SEQ ID NO: 240608 - DNA, 748 bp, Unknown
  Bacterial polypeptide expressing nucleotide sequence isolated from the Sargasso Sea
aatgactaatatttcaacatggatagatgaatatcataaaggctcaagattcggtctaaatggagatgttttaattaaacaaaaatcacaatatcaagaaattattgttattgaaaatgaatactatggaagagctttaatgcttgatggttgttggatgacatcactaaaagacgagaaatattatcatgagtgtcttgtgcatccagcattaagtagcattgacgaaaaatctaatgtactaattattggtggaggagacggcggtacagcaagagaatgcgttaaatattctcaaatatcgaaaattgatctagtagaaattgacgaggaggtaatcaaaatatctaaaaaatttttaaaagaaattggaggcgaagcatggaatgataaaagattagaaatacatgttgatgatggtgttaaatgggtaaaaaaaacaagagataatttttacgacgttatttttatagattgttcagatccctcagaattttcaaatttattattttcagattctttttataaagaatgtaaaagaatacttacaccaaaggggatattagcaacgcaaagtgaatctcctgaatccttcaaaaatattcacataaatattttgaaaaccctaaaaaatatatttaaagtttctcaaactatgtattcctttgtgcctatatatccaagcggaatttggagttggacattcgcttcttcagaagaatctaatttatcaaagcaaaattgtgat

SEQ ID NO: 240609 - DNA, 732 bp, Unknown
  Bacterial polypeptide expressing nucleotide sequence isolated from the Sargasso Sea
aatgatcaaagtcggtgaacatattaccattgattttttaggtgtaaaaaaagattattctccagaattttacgaaaaaataatttataaaattgctaaggcagcaaaagtagagatactgaatgtagcctcacataagtttgaacctcagggatttacactagttgctctattagctgaaagtcattttagctttcatacttttcctgaaaaaagtgtaataagttttgatttttttacttgcggtaaagtcaaccctaaagttgcattaaagatattaaggaaagaaatagaacataaaagagttgtaactaatgcttttgatagaagtagtataggactttatgatgatatttacagcactgctggtcaaaaaaaattttatgtagtcaaagacgttttagaaaagtttacttctaaagtaggtcaatttgttgagataatggatcttgaggaatttggtcatgcattatttattgaccatgaaattcaagtagctgaaaaagatgagaaaatttatagttcaaacttttttaagtctagttatgatttaagtaaaaaaaataacaatgtagctatcattggtggtggagatggaggggtggcaagagcttgcttagaaaataattcaaattatatagattggtttgaattagatccagaaatagtagatgtttgttttcgtcatttaccgaaagtttgttctaaggtaaaaaaaagtaacaaaatcaa

SEQ ID NO: 240610 - DNA, 529 bp, Unknown
  Bacterial polypeptide expressing nucleotide sequence isolated from the Sargasso Sea
ttgtacagttcaacatttgtaaattcgggattaaacttaaatccaaaaaaagaaaaagctgcaattattggtggaggtgatggaggagttgcaagggaatgtatttcaaaaaattttggatttatagattggtacgaattagatcccgaagttgttaaagtttgtgataaacatttaagcaagattggtgaaaaagcttctgaaaaaaattctgttaaatgtgtttggggcgatgcatttaaaagtataaaatctgttaaagacgatacttatgatcagatttatgttgatctaaatgatgatcaattttgtatagatcttgctgcaaaaaatatggactctttagttagaatactaaaacctaaaggagttattacagctcaagtaggaagtcaggataaaaaaccaaaacaagtagacaactggatgaatgtttttaacgaaagttttggaaatactaaattatcacgagtttatataccaagttttgattgttcttggaatttttcctcatcaataaaccattaat

SEQ ID NO: 240611 - DNA, 805 bp, Unknown
  Bacterial polypeptide expressing nucleotide sequence isolated from the Sargasso Sea
caaatacatattgaaagaatatttgctaaaaaaataagtaaatatcaggaaattatgatatttcaatcaaagctatttggaaaaattttaactctagatggtgttattcaaattactgaaaaagaccatcatccatattcggaaatgttaacacacgtccccactttatctcataatcaaataaaaaaggttcttataattggagggggtgacggagctatagctcacgaatgtcttaaatactctgaaatagatgaaattacattatgcgaaatcgatgaagaagttataaatttaagcaaaaaatatttacgtaaaatcaactatggctcattgaacaataaaaaggtaaaaattttaattaaaaatgcttttgaatttgttagcaataaaaattttaaaaactattttgaccttatcatagttgacaggcctgaccccataggacctggaaaacaattattcagaaaaatattctatgaaaatataaaacaaataatgaaagaaaaaggtattgcagtttttcaaactggcgttcctttctttcaaaaaaaagagcttaaagaaacaatgattaagttaaaaagtatatttaaacattcaggagtttatttaactgtaataccaacttatacgggcggatatatggcattaacttgggcatcaaacaaaactgatattaaaaataaaaaaattcgtgataattttatccaggataataatattaagactaaatactataatgaacatatacattatagttcattcaatttaccagagtggatatttaatataattacgtgat

SEQ ID NO: 240612 - DNA, 744 bp, Unknown
  Bacterial polypeptide expressing nucleotide sequence isolated from the Sargasso Sea
aaaatataattataaaaaaatttaatagggatactatagaccattatcatgacaattatagctcgccgggtctaaagaagtcttacatagttaaaaaagttttagaaaaatttaaatctgaagttggacaacaaatagaaattttagaattagaacagttcggtaaagcattatttatagataatgaaattcaagtagcagaaaaagatgagcatctttatagttctacatttgtaaaatctggattaagtttaaattctaataaagaaaaagctgctattatcggtggaggtgatggaggtgttgctagagaatgtatatcaaaaaatttcggatttatagattggtacgaattagatcccgaagtagtagaggtttgtgacaaacatcttggaacaattggagataaggctactgaaaaaaattcagtaaagtgtgtatggggtgatgcttttgaaagtataaaagctgttaaagatgatacatatgatcaaatatatgtagatctaaacgatgatcaatattgtattgatttagctgctaaaaatatgaaatctcttgtaagaatattaaaaccaaaaggtgtaattactgcccaagttgggagtcaagataaaaagcctaagcaagttgaaaattggttaaatatatttaaccaaaattttggtaacactaaattatccagagtttatatacctagttttgattgttcttggaacttttcctcttcaataaatcattaaa

SEQ ID NO: 240613 - DNA, 674 bp, Unknown
  Bacterial polypeptide expressing nucleotide sequence isolated from the Sargasso Sea
tcaaaaaaaattttatgtagtcaaggacgttttagaaaagtttacttccaaagtaggtcaatttgtagagataatggatcttgaggaattcggtcatgcattatttattgaccatgaaattcaagtagctgaaaaagatgagaaaatttatagttcaaacttttttaagtctagttatgatttaagtaaaaaaaataataatgtagctattattggtggtggagatggaggggtggcaagagcttgtttagaaaataattctaactacattgattggtttgaattggatccggaaatagttgatgtttgttatcgtcatttacctaaagtttgctctaaggttaaaaaaagcaataagattaaaagtttttggggagatgcatttaaaagcataaaagaaattgaagattcaaaatatgataaaattttcgtcgatttgaatgacgaccaatactgtatagacttagccaaaaaaaatatgagaggtttgaaaagaattcttaaaaaaggaggcgtcattacagctcaagtaggtagtcaagacaaaaaacctaaacaagtcgacaactggtgtaaagttttagaaagaagttttggtaacgtcaaattatcaggtacttacattccaagttttgactgtagatggaatttcgcttcatcaataatgaaataat

SEQ ID NO: 240614 - DNA, 679 bp, Unknown
  Bacterial polypeptide expressing nucleotide sequence isolated from the Sargasso Sea
tttcagggttttgaaatcaatagaaccttatttgagggaaagagcgaatatcaagatattgcaatttacgagaacgatacacttggtcgagtgctagccattgatggtataattcagatcacagaatgtgatgaattcgtttatcaagagatgatgacgcatgtaccccttttttcacatgaaaaaccagagcatattctaattattggcggtggtgatggtgggattttacgtgaggttcttcgccataaaggcataaaaagagttgtcatggcagaaattgatcagatggtaattgatgcctgtatggaatatatacctagcgttaataatggaggtgaagtttaccaagatactagagtgcaactaatggttggcgatgcttttgcgtatgtgaaagaaacagatttaaagttcgatgtagttataattgactcaactgatcctgtaggccctggggagaaattatttagctatgaattttataaaaacttagttgaaattcttaaggaaaatgctgtggtttccacccaaggaggtgtccctcaattccaatcaggtgaggttggaagtactctatcttgccttgagaaggcaggtttgagcgctagttgttatatcgctgcgatcccaacgtattatggcggatacatgacgctgggctttggagttctcaact

SEQ ID NO: 240615 - DNA, 706 bp, Unknown
  Bacterial polypeptide expressing nucleotide sequence isolated from the Sargasso Sea
ttgttagcagaaagtcatattagttttcatacatatccagaaaaaggaataattagttttgatttttatacctgcggaacagttgctccatcaattgctttagatgttataaaaaaagagattgaacataaaagaataatcaaaaaagaattaaatagagatacaatttctttctattatgacaacacaagtacaaaaggattgcaaaaaaattatcttgtaaaagaagttattgaggactttaaatctaaagttggacagcatatagagatattagatttagtagaatatggtaaatcattatttatagatggggatttacaagtggctgagagtgatgaacatttatatagcggaacatttgtaaattctgcaatgaaactcaataaaagcaaagatagagctgctattattggtggaggtgacggaggagttgcaagagagtgtatagcaaaaggatttgggtttattgattggtacgaattagaccctgaagttgttgaagtttgtaaaaaacatattggatctattggtaaaaatgctacggagaaaaattctgtaaaatgtgtttggggagatgcctttcaaagtattaaaaaagttgaagacgattcttatgataaaatatttattgatttaaatgatgatcaattctgcatagatcttgcagctaaaaatatggactcacttagtaagaattcttaaa

SEQ ID NO: 240616 - DNA, 842 bp, Unknown
  Bacterial polypeptide expressing nucleotide sequence isolated from the Sargasso Sea
tttatttgaaaaagtaattcacgatattgctaaagcagcaaacgttacaattttaaatatttctaaatataaatttgaaccacaaggatttacaattttagctttattggccgaaagtcacattagttttcatacttttccagagaaaggtatgataagttttgatttttttacttgtggaaaaattagtccatcagttgcaatcgatataattaaaaaagaatttaaacatcaaagaattgttaagaaagaatttaatagagataccaaagctttatatcatgatatttatagctctccaggtttacagaaggcttatgtggtaaatgatgttttagaagattttaaatcaaaagtaggtcaacatattgaaattttagatttagagcaatttgggaaatctttatttattgatggagaaattcaagtagcagcatctgatgaacatttatatagctcaacttttgttggagcgggtttaaatttaaataaaaagaatgatagagcagcaattatcggagggggtgatggaggtgttgctagagaatgtgtaactaaaaaatttaattttatagactggtatgagcttgatcctgaagtagttgaagtttgtaataaacacctaggaaatattgcaaataaagctactgaaaaaaactcagtcaaatgtgtttggggagatgcttttaaaagtattaagtctgtagaagatgatacttatgatcatatttttgttgacttgaatgatgatcaattttgtattgatttagctgctaaaaatatggactcattagtgagaattttaaaaccaaaaaggagttattactgcacaagttggtagt

SEQ ID NO: 240617 - DNA, 616 bp, Unknown
  Bacterial polypeptide expressing nucleotide sequence isolated from the Sargasso Sea
atggaaaaagttggagaacatataatactagatatagttggaactaaaaaggaatatactcctgaattttatgaaaaattagtttataaaattgcaaaagcagcaaaagtaacagttttaaaaatatctaaatataaattcgaaccacaaggatttacattggtcgctttgcttgctgaaagtcacattagctttcatactttcccagaaaaagagattgtaagctttgatttttttacatgtggaaaagtatcaccaaaagtttctctagatataataaaagacgagatcgaacactcaaatatcattattaaagaattcaacagagatacaattgatctttatcatgacaattatagttctccaggtttaaaaaaatcgtatgttgttaataaagttttagaaaattttaaatctaaagttggtcaatatattgaaatacttgacttagaacaatttggaaaagctttatttattgataatgaaatacaagtagctgaaagtgatgaacatttatacagctcaacttttgtaaattcaggtcttaatttaaattcatataaagaaaaagctgcaattattggtggaggagatggaggtgttgcaagagaattat

SEQ ID NO: 240618 - DNA, 649 bp, Unknown
  Bacterial polypeptide expressing nucleotide sequence isolated from the Sargasso Sea
atgattacaaaagttggcgaacatataacacttgatataataggtactaacaaagagtatgatcctgttttttttgaaaaattagtttacaaaattgctaaaattgcaaaagtaactgtattaaaaatatcaaaatataagtttgaaccacaaggttttactttagttgcacttcttgcagaaagccacataagtttccatacatttcctgaaaaaggaattattagttttgacttttttacatgtgcaaaaatttcaccttcagtagcaataaatgttattaaagaagaaatagaacacagcagaatagttaagaaagaatttaatagagatacagtagatctttatcatgacatttatagttctccaggtttaaaaaaatcatacatagttaataaagtgttagaaaattttaaatcaaatgttggtcagcatatcgagatattagaattagaacaatttggaaaagcattatttatagacaatgaaattcaagtagccgaaaaagatgagcatctttatagcactacttttgttaaagctggattagatttgaactctaataaggaaaaagctgcaataattggtgggggagatggaggtgtagctagagagtgtatatctaaaaattttggatttattgattggt

SEQ ID NO: 240619 - DNA, 659 bp, Unknown
  Bacterial polypeptide expressing nucleotide sequence isolated from the Sargasso Sea
attggctgaaagccatattagctttcatacatttccagaaaaaggaattataagttttgatttttttacttgtggcaaaatttcgccgtcagttgcaatagatgttctaaagaaagaaattaaacataaaagaattgtaaaaaaagaatttaatagagacacagttactctttatgatgatatttatagctcaccaggtctaaaaaaatattacattgttaataatgttttagaagattttacttcaaaagtaggccagcatattgagatacttgatctcgagcagtttggaaaatctttatttatagataatgaattacaagtttctagcaaggatgaacatttatacagctcaacatttgttaacgctggtttgaaattaaataaagcaaaagataaagcagcgattataggtggaggagatggaggggttgccagagagtgtgtgtctaaaaactttaattttattgattggtttgaattagatccagaagtggttgaggtttgtagtaaatatttaagcaaagtaggaaacaatgctaccaaaaaaaattctgtaaaatgtatatggggagatgcctttgagagtattaaatctgtagaagataatagatacgataaaatttttgtagatttaaatgatgatcagtattgcattg

SEQ ID NO: 240620 - DNA, 647 bp, Unknown
  Bacterial polypeptide expressing nucleotide sequence isolated from the Sargasso Sea
aatgattaaagttggggagcatattactttagatattataggtactacaaaagagtacgatccttcaatctatgaaaaagtcataaataaaatcgcgaaagcagcagatgtaactatccttaatatttctaaatataaatttgaacctcagggctttacaattttagctttattagctgaaagtcacatcagctttcatacatttccagaaaaaggaataataagttttgatttttttacctgtgggaaaataagtccatcagtagcaattgatattgttaaaaaagaatttgaacataaaagaattgttaaaaaagaatttaatagagataccagatctttttaccatgatatctatagttcacctggattacaaaaatcatatgttgtaaatgaagttttagaggattttaaatcaaaagttggtcaacatattgaaattttagaattagaacaatttggaaaatctttatttattgatggtgaaatacaggtagcggcatcagatgaacatttgtatagctcaacttttgttggtgctggtttaaaattaaacaaaaaaaatgagagagctgcaataattggtggtggtgacggtggcgttgccagagaatgcatttcaaaaaagtttaattttatagattggt

SEQ ID NO: 240621 - DNA, 617 bp, Unknown
  Bacterial polypeptide expressing nucleotide sequence isolated from the Sargasso Sea
tgttctaattattggcggtggtgacggtggtactgtaagagaatgcgttaaatattctcaaatatcaaaaattgatctagtagaaattgatgaggaagtaatcaaaatatctaaaaaatttctaaaagaaattgcaggcgaagcatggaatgacaaaagattagaaatacatattgatgatggcgttaaatgggtaaaaaaaacaaaagataatttttacgacgttatatttatagattgttcagatccctcagaattttcaaatttattattttcacattctttttataaagaatgtaaaagaatacttgcaccaagggggatattagcaactcaaagcgaatctcctgaatccttcaaaaatattcacataaatattttgaaaagcctaaaaaatatatttaaagtttctgaaactatgtattcctttgtgcctatatatccaagcgggatttggagttggacatttgcttcttcagaagatctaagtttatcaaagcaaaattatgatgaagtcgtaaaaatagaaaaaggatgtgaaatttggaatttaaattttcaaaatgcagcattcaaaatgatgccaaataaaattgtaaaagaactagattcataag

SEQ ID NO: 240622 - DNA, 631 bp, Unknown
  Bacterial polypeptide expressing nucleotide sequence isolated from the Sargasso Sea
aaatctaaagtagggcaatatgttgaaattttagatttagagcagtttggaaaatctttatttatagataatgaaattcaagtagcagaaagtgatgagcatttatatagctcaacatttgttaattcaggactaaaattgaattcaaaaaaagaaaaggctgcaattattggtggcggtgatggaggagttgcaagagaatgtatttcacaaaattttggatttattgattggtatgagctagatcctgaagtagttgatgtttgtgataaacatctaagcaagatcggtgaaaaagcttctgaaaaaaattcagttaaatgtgtttggggtgatgcttttgaaagtataaaatctgttaaggatgattcatacgatcaaatttatgttgatctgaatgatgatcaattttgtattgatcttgcagcaaaaaatatggactcacttgttaggatattaaaacccaaaggtgttatcactgcacaagtgggaagtcaggacaaaaaacaaaaacaagttgaaaattggatgaatgtatttaatcacagttttggaaatacaaaattatcgagagtttatatacctagttttgattgttcttggaacttttcctcatcaataaaccattaat

SEQ ID NO: 240623 - DNA, 773 bp, Unknown
  Bacterial polypeptide expressing nucleotide sequence isolated from the Sargasso Sea
aaactcaaaatatcaagaaattattgttattgaaaatgaatattatggcagagctctaatgctagatggttgttggatgacatcattaaaagacgagaaatattatcatgagtgtcttgtacatcctgcattaagtagcattgacgaaaaatctaatgtactaattattggcggtggtgacgggggtagtttaagagaatgcgtcaaatatactcaaatatcaaaaattgatctagtagaaattgatgaggaggtaatcaaaatatctaaaaaatttctaaaagaaattggaggcgaagcatggaatgacaatagattagaaatacatgttgatgatggtgttcaatgggtaaaaaaaacaaaagataatttttacgacgttatatttatagattgttcagatccctcagaattttcaaatttactattttcagattctttttatgaagaatgtaaaagaatacttacaccaaaggggatattagcaacgcaaagcgaatctcctgaatccttcaaaaatattcacataaatattttgaaaaccctaaaaaatatatttaaagtttctaaaactatgtattcctttgtgcctatatatccaagcgggatttggagttggacattcgcttcttcagaagttctaaatttatcaaagcaaaattacactgaaaccctgagaatagaaaaaggatgtgaaatttggaatttgaattttcaaaatgcagcattcaaaatgatgccaaataaaattgtaaaagaactagattcataag

SEQ ID NO: 240624 - DNA, 636 bp, Unknown
  Bacterial polypeptide expressing nucleotide sequence isolated from the Sargasso Sea
actttacatcaaaagtaggtcaaaacattgaaattttagatttagaacaatttggtaaatctctttttatcgatggtgaacttcaggtggcagaaaatgatgaacatttgtatagctcaacatttgtaaactctggattaaaacttaatccttcaaatgacaaaactgcaattattggtggaggagatggaggggttgcaagagaatgtatatctaaaggttttaaattaattgattggtatgaattagatccagaagttgtaacaatgtgtgaaaaatatttatctaaggtcggtaagaaagcaactacgaaaaatcatgtacagtgcgtatggggtgacgcatttgaaagtattaaatcagttgaagataataaatatgataaaatttatgtagatctaaatgatgatcagtattgtattgatttggccgcaaaaaatatcaaatctttaaaaagaattcttaaaccaaacggaactattactgcccaagttggaagccaggataaaaaacctaagcaagttgataaatggttaaatctttttgaaaaaagttttggtaatacatctttagacagagtttatattccaagctttgattgttcttggaattttgcatcttctttgaataaataat

SEQ ID NO: 240625 - DNA, 526 bp, Unknown
  Bacterial polypeptide expressing nucleotide sequence isolated from the Sargasso Sea
gtatagttcaacatttgtaaattcaggattaaaactgaattcttcaaaagatagagctgcaataattggtggcggagacggaggagtcgcaagggaatgtatatctaaaaattttggtttcatagattggtatgaattagatccagaggttgttgaagtatgtgacaaacatcttggaacaattggtcaaaaagcaaccgaaaaaaattcagttaaatgtgtttggggtgatgcctttgaaagtattaagaaagttgaaaccgacacatatgataaaatatatattgatcttaatgatgatcaattctgcatagatcttgcagccaaaaatatggatcaaattattagagttttaaagccaaatggggtagttactgcacaagttggcagtcaagacaaaagaccaaaacaggtcgaaaactggaaagatgtattcaataaaaactttggaaatgctaccctagatagagtttatattccaagtttcgatagttcttggaatttttacacatctgtaaatcactaa

SEQ ID NO: 240626 - DNA, 529 bp, Unknown
  Bacterial polypeptide expressing nucleotide sequence isolated from the Sargasso Sea
tttatatagctcaacttttgtaggagcaggattgaaattaaataaaaaaaatgagagagcagcaataatcggtggtggtgatggcggtgttgcaagggaatgtatttcaaaaaagtttaattttatagattggtatgagttagatccagaagttgtggaggtttgtaataaacatcttggtgatattggaaaaaaatctacagaaaagaattctgtaaaatgtgtatggggtgatgcctttgaaactataaaaacggtaaacgaagatacatatgatcatatttttgttgatctaaatgatgaccagttttgtatagaccttgctgctaaaaatatggactctttagtaagaatactcaaacccaagggtgtaattactgcgcaagtaggaagtcaggataaaaaacctcttcaagttgaaaattggttgaatgtatttaatcatcattttggaaatactaatttatcaagagtttacatacctagttttgattgctcttggaatttttcttcttcaataaatcattaa

SEQ ID NO: 240627 - DNA, 606 bp, Unknown
  Bacterial polypeptide expressing nucleotide sequence isolated from the Sargasso Sea
attgactaaagttggagaacatataactctagatattattggaactactaaagaatacgatccttctgtttatgaaaaagtaattaatgaaattgcaaaagctgcaaaagtttcaattttaaatatttctaaatacaagtttgaaccacaaggatttacaattttagcattattagctgaaagtcacatgagttttcatacatttcctgaaaaaggcattataagttttgacttctttacttgtggtaaagtaagtccatcagttgcaattgatattataaaaaaagaatttgaacataaaagaatagttaaaaaagaatttaatagagatacaaaatctctttatcatgatatttatagttcaccaggattacaaaaatcttacgtagtgaatgatgttttagaagattttaaatctaaagtaggtcaacatattgaaattttagacttagaacaatttggtaagtctttatttatagatggcgagatacaagttgctgctactgatgaacatttatacagctctactttcgttggttccggtttaaatttaaataatgataatgaaagagctgctatcataggtggtggagatgggggagttgc

SEQ ID NO: 240628 - DNA, 854 bp, Unknown
  Bacterial polypeptide expressing nucleotide sequence isolated from the Sargasso Sea
ttatgaaaaaattatatatacaattgctaaagctgctaaagttgaaattttaaacgtgtcatcacatcgctttcaacctcaaggttttacactagttgcattattagctgaaagtcactttagttttcatacgtttccagaaaaaggtgtaattagctttgatttttttacttgcggaaaagttaatccaaaagttgctttaaaaattttaagaaaagaaatccaacatgaaagagttgtaactaatgctttcgatagaagtagtattggcctttatgatgatatttatagcaccccaggacaaaaaaaatattatgtagttaaaaatgttttagaaaaatttacatctaaagttggtcaatttgttgaaataatggatttagaagaatttgggcatgctttatttattgatcatgaaatacaagtagctgaaaaggatgaaaaaatttatagttcaaattttttcaagtctagttatgacttaagcaaaaaaaataataacgtagcaattattggcgggggagacggtggtgtcgctagagcgtgcttagaaaataattcaaacttcattgattggtttgagctagatccagaaatagtagacgcatgttacaagcatttgccaaaagtgtgttcaaaagtaaaaaaaagtaacaaaattaaaactttttggggagatgctttcaaaagcataaaaggagtagaaaattctaagtatgataaaatatttgtagatttaaacgatgatcaatattgtattgatttagcaaaaaaaaacatgaaagatttaaagagaatcctcaaaaaaggtggagtaattaccgctcaagtaggtagtcaagacaaaaaaccaa

SEQ ID NO: 240629 - DNA, 781 bp, Unknown
  Bacterial polypeptide expressing nucleotide sequence isolated from the Sargasso Sea
attgcaaaagctgcagatgttaaaatacttaacatttctaaatataagtttgaaccgcaaggatttactattatagcattattagcagaaagtcatattagttttcatacttttccagaaaaaggaattattagttttgatttttttacttgtggaaaaataagtccttcagttgcgattgatattataaaaaaagaatttgaacataaaagaatagtaaaaaaagaatttaatagagatacaaaatctctttatcatgacatttatagttctccaggtttacaaaaatcatatgtggttaatgatgttttagaggattttaaatctaaagtagggcagcatattgaaattttagacttagaacagtttggaaaatctttgtttatagatggtgaaatacaagttgcctcaacagatgaacatttatacagttcaacatttgtaggctctggtttagatttaaacaaagataatgaaagagctgcaataattggtggaggagatggtggagttgcaagagaatgtatttataaaaaatttaatttcattgattggtatgagcttgatccagaagtagttgatatttgcaacaagcatcttggagatattggaaaaaaagcaactgaaaaaaattctgtaaaatgtgtttggggtgatgcatttgaaagcataaaaactgttagtgatgatacttatgaccatatttttgtagatttgaatgatgatcaattttgtatagatctagcagcaaagaacatggactcacttgtaaggatattaa

SEQ ID NO: 240630 - DNA, 631 bp, Unknown
  Bacterial polypeptide expressing nucleotide sequence isolated from the Sargasso Sea
attggcagaaagtcacattagttttcatacatttcctgaaaaaggaattatcagtttcgatttttttacatgtgcaaaaatttcgccctctgttgctttagaggttattaaagatgaaattgaatatactcatataattaaaaaacagtttaatcgagataccgtagacctctatcatgacaattatagctcaccaggtttaaaaaaaacatatgttgtaaataaagtgatcgaaaattttaagtcaaaagttggccaacatattgaaatattagaattagaacaatttggaaaagcattatttatagataatgaaattcaagtagcagaaaaagatgagcatctttatagttctacatttgtaaactctggactaagtttaaactctaataaagaaaaagctgctattatcggtggaggagatggaggagttgctagagaatgtatatcaagaaattttggatttatagattggtacgaattagatcccgaagtagtagaggtatgtgataaacatcttggaacaattggagataaggctactgaaaaaaattcagttaagtgtgtatggggtgatgcttttgaaagtataaaagctgttaaagatgatacatatgatcaaatttatgta

SEQ ID NO: 240631 - DNA, 799 bp, Unknown
  Bacterial polypeptide expressing nucleotide sequence isolated from the Sargasso Sea
gtggcaagtaagcccttcgattgctattgatattataaaaaaagaatttgagcatacaagaatagttaaaaaagaatttaatagggataccaaatctctttatcatgatatctatagttcaccaggattgcaaaaatcctacgttgtaaacaatgttctagaggattttaaatcaaaagttggtcaacacatcgaaattttagatttagagcaatttggaaaatctttatttattgatggagaaattcaagtagctgctactgatgaacatttgtatagctcaacttttgtaggcgcaggattaaaattaaacaaacaaagtgaaagtgctgctattattggtggtggagacggtggtgttgcaagagaatgtatatcaaaagattttagttttatagattggtatgaactagatcctgaagttgttgatgtttgtaataaacatcttggagatataggaaaaaaagcaactgaaaaaaattcagttaaatgtgtgtggggtgatgcgtttgaaagtattaaatcaataaaagatgacacttatgatcatatatttgttgatcttaatgacgatcaattttgtattgatcttgcagcaaaaaatatggattcaatgattagaattttaaaaccaaaaggtgtgattacagcacaagtaggaagtcaggataaaaaacctaaacaggttgataattggcttaatgtatttaaccaccactttggaaatacaaaactgtctagagtatatgtacctagttttgattgttcttggaacttttcttcatcaattaatcattaa

SEQ ID NO: 240632 - DNA, 214 bp, Unknown
  Bacterial polypeptide expressing nucleotide sequence isolated from the Sargasso Sea
ccaacatattgaaattttagaattggagcaatttggaaagtctctttttattgatggcgaaattcaagtagcaactacagatgaacatttgtatagctcaacatttgttggagcaggtttagatttaaatcagaataatgagcgagctgctataattggtggcggagatggaggagttgccagagaatgtatatctaaaaattttaattttata

SEQ ID NO: 240633 - DNA, 498 bp, Unknown
  Bacterial polypeptide expressing nucleotide sequence isolated from the Sargasso Sea
taaagttaaataaaagtaatgaaagagcagcaataattggaggaggagatggaggagttgcaagagaatgtatctctaaaaaatttaattttatagattggtttgaacttgatccagaagttgtagaagtttgtaataaacatcttggagatattggaaaaaaagctacagaaaaaaattctgttaaatgcgtgtggggagacgcttttgaaagtattaaatcagttaaagatgatagttatgatcatatattcgtcgatctaaatgatgatcaattttgtatcgatttagctgcaaataatatggactctctggtaagaattttaaaacccaaaggagtgataactgctcaagtaggtagccaagataaaaaaccccaacaagttgaaaattggttaaatgtatttcatcatcattttggaaatactaaattatcaagggtttatgtgcctagtttcgattgttcgtggaatttctcttcatcgataaatcattaat

SEQ ID NO: 240634 - DNA, 871 bp, Unknown
  Bacterial polypeptide expressing nucleotide sequence isolated from the Sargasso Sea
gttgtcggaaagccatttcagttttcatactttccctgaaagaggtgttataagttttgatttttttacttgtggaaaggtgaatcctaaagtcgctcttaaaatcttaagaaaagaaattgatcatcaaagagttgtgactaatacttttgatagaagtagcataggtctttatgacgacatttacagcaccccaggccaaaagaaattctatgtggttaaggatgttttagaaaaattcacttctaaagttggtcaatttgttgaaataatggatctagaggagtttggccatgctttatttatagaccatgaaattcaagtagctgaaaaagatgaaaaaatttatagctcaaacttttttaaatccagttatgatttgagtaaaaaaaataataatgttgcgataatcggcggaggagatgggggagtagccagagcgtgtttagaaaataattcaaactatatagattggtttgagttagacccagagatagtagatgtttgttaccgtcatttgccaaaagtttgttctaaagttaagaaaagtaacaaaataaaaactttctggggagatgcctttaaaagtataaaagaaatagaagattctaaatatgataaaatttttgttgatttaaatgatgatcaatactgcatagatttagctaagaaaaatatgagaggtttaaaaagaattttaaaaaggggtggtgtgattactgctcaagtcggaagccaggataaaaaaccaaaacaagtagataactggtgtaaagttttagaaaaaagcttcggaaacgttaaattatctggtgcttatattcctagttttgactgtaaatggaattttgcttcatctataatgaagtaa

SEQ ID NO: 240635 - DNA, 472 bp, Unknown
  Bacterial polypeptide expressing nucleotide sequence isolated from the Sargasso Sea
gctgcaattattggtggcggagatggtggtgtagcaagagaatgtatttctcaaaattttggatttatagattggtacgaattagaccctgaggttgttgatgtttgtgataaacatttaagcaagattggtgaaaaagcttctgaaaaaaattcagtcaaatgtgtttggggtgatgcatttaaaagcataaaatcagttaaagacgatacttatgatcagatttatgttgatttaaatgatgatcagttttgtattgatcttgctgcaaaaaatatggactctttagttagaatactaaaacccaaaggagttattacggctcaagtaggaagtcaggataaaaaaccaaaacaagtagatagatggatgaatgtttttaacgagagttttggaaatactaaattatcaagagtttatataccaagtttcgattgttcttggaatttttcctcatctataaaccattaat

SEQ ID NO: 240636 - DNA, 695 bp, Unknown
  Bacterial polypeptide expressing nucleotide sequence isolated from the Sargasso Sea
tatgattaaagttggtgagcacattaccatcgattttctaggtgtaaaaaaagattattcaccagagttttacgaaaaagttatttatacaattgctaaagctgcaaaagttgaaatactaaatgtatcctcacacaaatttgagcctcaaggctttacattggttgctctactagcagaaagtcattttagttttcatacttttcctgaaaaaggtgtaataagttttgatttttttacttgcggtaaagtcaacccaaaagttgcgttaaagatattaaggaaagaaatagaacacaaaagagttgtaactaatgcttttgaaagaagtagcatcggtctttatgatgacatttatagtacaccaggtcaaaaaaaattttatgtagtcaaagacgtattagaaaaatttacatcaaaagtaggtcaatttgttgaagttatggacctggaagagtttggtcatgctttatttattgaccatgaaatccaagtcgctgaaaaagatgaaaaaatttatagctccaatttttttaaatctagttatgatttgagcaaaaaaaataataatgttgctatcattggaggtggggacggtggtgtagcacgcgcctgtttagaaaataattcgaattatatcgattggtttgagcttgatccagaaatagttgaagcttgttatcgtcacttgccta

SEQ ID NO: 240637 - DNA, 725 bp, Unknown
  Bacterial polypeptide expressing nucleotide sequence isolated from the Sargasso Sea
aatgacaacaaaagttggagaacatattacacttgatattttaggaacaaagaaagaatacgatccagctttttatgaaaaattagtctataaaattgcaaaaattgcaaaagtaacagtattagaaataacaaaatataagtttgaaccacaaggatttacccttgtagctttacttgcagaaagccatataagttttcatacatttcctgaaaaaggcataataagttttgatttttttacatgtgcaaaagtatcccctttagtagctttggatgttattaaagaggaaatagatcatacaaatataattattaaaaaatttaatagggatactatagaccattatcatgacaattatagctcgccgggtctaaagaagtcttacatagttaaaaaaattttagaaaaatttaaatctgaggttggacagcaaatagaaattttagaattagaacagtttggtaaagcactattcatagataatgaaattcaggtggcagagagtgatgagcacttatatagctcaacatttgttaactctggacttaatctaaattcaaataaagaaaaagctgcaataattggtggaggtgacggaggtgttgcaagagagtgtatttcaaaaaattttggctttattgattggtttgaattagatccagaggttgtaaatgtttgcgacaaacacttagcaaaaattggaaacaaagctacagaaaaaa

SEQ ID NO: 240638 - DNA, 798 bp, Unknown
  Bacterial polypeptide expressing nucleotide sequence isolated from the Sargasso Sea
gaaaaaggaataataagttttgatttttatacttgtggaacagttgcaccatcaattgctttagaagttataaaaaaggaaattgagcataaaagaattatcaaaaaagaattaaacagagatacaatttctttttactatgacaatacaagcacaaaaggattacaaaaaaattatttagtaaaggaagttttggaagacttcaaatcaaaagtaggccagcatgttgaaatattagatttagtagaatatggaaaatcattgtttatagacggtgatttacaagttgctgagagtgatgaacatttatatagcggtacatttgtaaattctgcgatgaaattaaataaaagcaaagatagagcagcaattattggtggaggcgacggaggagttgcaagagagtgtatagcaaaaggttttggatttattgattggtacgaattagacccagaagtagtagaagtttgtaaaaaacatattggatctattggtaaaaatgcaactgaaaaaaattctgttaaatgcgtatggggagatgcttttgaaagtattaaaaaagtagaagatgatagttatgataaaatatttattgatttgaatgacgatcagttctgcatagatcttgcagctaagaatatgaattcgttagtaagaatacttaaaccagatggagtgattacagctcaagttggaagccaagataaaaaaccaaaacaagtagataactggttaaatgtatttaacaaaaactttggcaatgctaccttggatagagtatatataccaagctttgat

SEQ ID NO: 240639 - DNA, 736 bp, Unknown
  Bacterial polypeptide expressing nucleotide sequence isolated from the Sargasso Sea
atgactaaagttggagaacatataactctagacattattggaaccacaaaagaatatgattcttccttctttgaaaaagtaatctatgacatagctaaagctgctaaagttacaatacttaatatttccaaatataagtttgagccccaaggttttacaattttagctttattagcagaaagccatattagctttcacacttttccagaaaaaggcattattagctttgatttttttacatgtggaaaaataaatccatcagttgcagtggaaattataaaaaaagagtttgaacataccagaatagttaaaaaagagtttaatagagatactaagtctctttatccagatatttacagctcaccaggtatacaaaaatcatatgtagtaaatgatgtattagaggactttaaatcaaaagtagggcaacatattgaaattttagaattggagcaatttggaaagtctctttttattgatggcgaaattcaagtagcaactacagatgaacatttgtatagctcaacatttgttggagcaggtttagatttaaatcagaataatgagcgagctgctataattggtggcggagatggaggagttgccagagaatgtatatctaaaaattttaattttatagattggtatgagttagatcctgaggttgtcgatgtatgcaataaacatcttggagatattggaaaaaaagcaactgaaaaaaattctgttaagtgtg

SEQ ID NO: 240640 - DNA, 838 bp, Unknown
  Bacterial polypeptide expressing nucleotide sequence isolated from the Sargasso Sea
tcccgaacgaggtgtaattagtttcgatttcttcacttgcggcaaagtaaatccaaaggtagctctaaaaattttacgaaatgaaattcaacacgaaagagtagtaacaaatacttttgatagaagtagcattggtctatatgacgatatttacagctcacctggccaaaagaaatactatgttgttaaaaatgttcttgaaaaattcacttcaaaagtaggtcaatttgttgaagtcatggatatcgaagaatttggtaatgctttatttatagatcatgaaatacaagttgccgaaaaagatgaaaaaatttacagctcaactttttttaactctagttatgatttaagcaaaaaaaacaataatgttgctatcattggcggtggtgacggtggagttgcaagagcttgtttggaaaacaactctaattatatcgattggtttgaacttgacccggaaatagttgatgcgtgctaccgtcacttacctaaagtatgttccaaagttaaaaagagtaataaagttaaaacattttggggtgacgcatttaaaagcatcaaagagattgaagacgctaaatatgataaaatttttgtagatttaaatgatgatcaatattgcattgatttagctagaaaaaatatgaaaggtctaaaaagaattcttaaaaaaggtggtgtgataactgctcaagtaggtagtaaggataaaaagcctaagcaagtggagaattggtgtaaagtttttaacaaaagctttggaaatgtaaatttgtcaggtgcttatgtgccaagttttgactgtaattggaattttgcttcatctataatgaagtaa

SEQ ID NO: 240641 - DNA, 652 bp, Unknown
  Bacterial polypeptide expressing nucleotide sequence isolated from the Sargasso Sea
ttggaaaattttgtatccaaagtaggtcagcatattgaaattttaaaattagaggaatttggtccggctttatttatagatagtgaattacaagttgcagaaaaagatgaaaaaaaatatagcagtcaatttgttgggtctgctttaaatctatctaaaaataattctagcgctgcaataataggtggtggtgatggtggagttgcaagagaattgtcatctaaaggttttgatctaattgattggtatgagttagatccagaggtggttaaagtttgccagaaacatctaataaaagtttgtggtgacgtaaaagcaaataacaaagttaaaactttttggggagacgcttttgaaagtatcaaaaaggttaaggactcgaaatatgataaaatttttgttgatctaaatgatgatcagttttgtatcgacttagcagctaaaaacatgaaagctttgaaaagaatactgaaatcaggtggagttatcacagcccaagttggatgtatgtccaaaaaaccaagacaggtaaaaaattggttagaattattaaaaaataattttggaaatgtaacacttgatgaagtttttattccaagttttgattgtagatggaattttgcttcttcacataacaaagatcagtattaat

SEQ ID NO: 240642 - DNA, 572 bp, Unknown
  Bacterial polypeptide expressing nucleotide sequence isolated from the Sargasso Sea
aatgacaaatatttcaacatggatagatgaatatcataaaggctcaagattcggcctaaatgggaaaattctaattaaaaaaaactcaaaatatcaagaaattattgttattaaaaatgaatattatggtaaagctttaatgttagatggttgctggatgacatcattaaaagacgagaaatattatcatgagtgtcttgtgcatcctgcattaagtagcattgacgaaaaatctaatgtactaattattggaggtggtgacggtggtactgtaagagaatgcgttaaatattctcaaatatcaaaaattgatctagtagaaattgatgaggaagtaatcaaaatatcaaaaaaatttctaaaagaaattggaggcgaagcatggaatgacaaaagattagaaatacatattgatgatggtgttaaatgggtaaaaaaaacaagagataatttttacgacgttatatttatagattgttcagatccctcagaattttcaaatttattattttcagattctttttataaagaatgtaaaagaatacttacacgaaaggggatattagcaacgc

SEQ ID NO: 240643 - DNA, 889 bp, Unknown
  Bacterial polypeptide expressing nucleotide sequence isolated from the Sargasso Sea
ctttacaattttagctttattagctgaaagtcatattagttttcacacctttcccgaaaaaggtatcattagttttgatttttttacttgtggaaaaattactccatctgttgcaatcgacattgttaaaaaagaattcaaacacaaaagaattgtcagaaaagagtttaacagggacactagagctctttatcatgatatttatagctcaccaggtttacaaaaatcttacgtagttaatgatgttcttgaagattttaaatctaaagtagggcaacatattgaaattcttgatttagaacagtttggaaaatcattatttattgatggtgaaattcaggtagcatcaacagacgaacatctttatagctcaacttttgttggatcaggattaaaactaaacaaatcaaatgaaaaagcagccataattggtggtggagatggaggggtcgcgagagagtgtatctctaaaaaatttaattttatagattggtatgaacttgatcctgaagtagtagaagtttgcaaaaaacatctaggtgaaataggtaaaaaagcgactgaaaaaaattcagttaaatgtgtttggggagatgcatttgaaagtattaaatctgttaaagaagatacatatgaccatatatttgttgatttaaatgatgatcaattttgcattgatctggcagcaaagaatatggattcacttgtgagaattttgaaaccaaaaggtgtaattactgctcaagtaggtagtcaagataaaaaacctcttcaagttgaaaattggttaaatgtttttaaccatcattttggaaatactaatttatcaagagtttacataccaagttttgactgttcttggaatttttcttcctcaataaatcactaa

SEQ ID NO: 240644 - DNA, 823 bp, Unknown
  Bacterial polypeptide expressing nucleotide sequence isolated from the Sargasso Sea
gagtaaaaatgatattgaaatcaaatctatcacaacaaaaggtgataaagttaaaaatactagattgtcagacataggaggaaaaggtttgttctcaaccgaaattgaaaaagaattagaaaacaaaaatatcgatattgcagttcacgcattaaaagatatgccagcaatcgaaacaagtggtttgcaaaccgacacatttttagagagaaatgatccaagagaaattttaattacaactaataaaaaaaaactaaatgatcttaaactgaaatcaattataggaacatcttcatttagaagagaattccaaattaaaaaattaagatctgatttaacgtgcaaaattattagaggaaacgtagatactagaatgaaaaaacttaaaaatggagattatgatgcaatcattttgtcttatgcggggatcaaaaatttaaaccttgaaaatgagatagctgaagttttttcagtacaagaaattataccaagtgctggacaaggaataatagcactacagtgtcgggatacagataaagacataatttcaattttacaaaaagtaaatcatgaagagacttataaaagagctcatgctgagagaaatgttctaaaagttttagagggagattgtcaaacagctattggtgtttattcaaaaatagatggagaagcaatcgtagttgaagcagaacttttttcaatagatggttctcaaagattttatgaaaaaaaatctgataggattgataaatttaaagaagttggagaacaaattgggcaaaatttaaaaattaaatcaaataattcttataaaaaataa

SEQ ID NO: 240645 - DNA, 448 bp, Unknown
  Bacterial polypeptide expressing nucleotide sequence isolated from the Sargasso Sea
ttgtatgatgatatctatagcacccctgggcaaaaaaaatattatgtagtaaaagatgttttagaaagacttactacaaaagtaggtcagtatatagaggtgcttaacctagaagagttcggccatgctttatttattgatcatgaaattcaggttgctgaaaaagatgaaaaaatttatagctctagcttttttaaatctagttatgatttaagtaagaaaaattctaatgttgccattatcggtggtggtgatggcggggtggcaagagcatgtattgaaaataattcaaattttatagactggtatgaactagatccagaagttgtagatgtttgctataaacatttgcctaaagtttgttctaaagttaaaaaaagcaacaaaattaaaactttctggggcgatgcttttgaaagcataaaatcaatcgaagactcaaaataga

SEQ ID NO: 240646 - DNA, 787 bp, Unknown
  Bacterial polypeptide expressing nucleotide sequence isolated from the Sargasso Sea
atgattaaggttggcgaacatattacgattgattttttaggtgtaaaaaaagattacgcaccttcgttttatgaaaaggtaatttataaaattgcaaaatcagcaaaagttcagatacttaaagtaaatagtcataaatttgaaccacaaggctttacattagttgcattactatctgaaagtcacatgagttttcatacgtttccagaaaaaggagtaatcagttttgatttttttacatgtggaaaagttaatcctaaaatagctctgaaaatattaagaaaggaaattcaacacgaaagagtagtcacaaataatttcgatagaaacagcattagtttgtatgatgatatctatagcacccctgggcaaaaaaaatattatgtagtaaaagatgttttagaaagacttactacaaaagtaggtcagtatatagaggtgcttaacctagaagagttcggccatgctttatttattgatcatgaaattcaggttgctgaaaaagatgaaaaaatttatagctctagcttttttaaatctagttatgatttaagtaagaaaaattctaatgttgccattatcggtggtggtgatggcggggtggcaagagcatgtattgaaaataattcaaattttatagactggtatgaactagatccagaagttgtagatgtttgctataaacatttgcctaaagtttgttctaaagttaaaaaaagcaacaaaattaaaactttctggggcgatgcttttgaaagcataaaatcaatcgaagactcaaaataga

SEQ ID NO: 240647 - DNA, 697 bp, Unknown
  Bacterial polypeptide expressing nucleotide sequence isolated from the Sargasso Sea
ttgactaaagttggtgaacatataactctagatataattggaactataaaagagtatgatccttcagttttcgaaagagttatttatgatattgcaaaagctgcaaaggtaacaattttaaaaatttcaaaatataaatttgaaccacaaggttttacaatattagcgttattagcagaaagccatattagttttcatacatttccagaaaaaggtattataagttttgatttctttacatgtggaaaagtaagtccatcagtcgcaatagatattataaaaaaagaatttgagcataaaagaatagtaaaaaaagaatttaatagagacacaaaatccctttaccatgacatttatagctcaccaggtttacaaaaatcatatgtagtgaatgatgttttagaagattttaaatctaaagttggtcagcacattgaaattttagatttagagcaatttggaaaatctttatttatagatggtgaaattcaggttgcttcgacagatgaacatttgtacagctcaacttttgttggttctggtttaggtttaaataatgataaagaaagagctgctatcattggtggtggagatggcggtgtggcaagagaatgcatttcaaaaaattttaattttatagattggtatgagcaagatccagaagtagtcgatgtttgtaacaagcatttaggagata

SEQ ID NO: 240648 - DNA, 655 bp, Unknown
  Bacterial polypeptide expressing nucleotide sequence isolated from the Sargasso Sea
tatgactacaaaagttggcgaacatattacacttgatataataggtactaaaaaagagtatgatcctgttttttttgaaaaattagtttacaagattgcaaaaattgcaaaagtaacagtattagaaatatctaaatataaatttgaaccacagggatttaccctagttgcacttcttgcagaaagtcacatcagtttccatacctttcctgaaaaaggtattatcagttttgacttttttacatgtgcaaaaatttcaccttctgttgcaataaatgttattaaagaggaaattgaacacagtagaataattaaaaaagaatttaatagagatacagtggatctttatcatgacatttatagctcgccaggtctaaaaaagtcatacgtagttaataaagtattagaaaattttaaatcaaatgttgggcagcatattgagatattagaattagaacaattcggaaaagcattatttatagacaatgaaattcaagtagctgaaaaagatgaacatttttatagctctacttttgttaatgctggattagatttgaactctaataaagaaaaagcagcaataattggtggaggtgatggaggtgtggctagagagtgtatatctaaaaattttggatttattgattggtatgaa

SEQ ID NO: 240649 - DNA, 721 bp, Unknown
  Bacterial polypeptide expressing nucleotide sequence isolated from the Sargasso Sea
atgattaaagttggggagcacattactttagatataattggtactgataaagaatacgatccatcagtttatgaaaaagttattaaagaaattgctaaagtagctaatgttacaatcttaaatatttcaaaatataaatttgaaccacaaggctttacaattctggcattgttagccgaaagtcatatcagctttcataccttccctgaaaaaggaataataagttttgatttttttacttgtggaaagataagtccttcagttgcaatcgatataataaaaaaagaatttaaacacaaaagaattgtgaaaaaagaatttaacagagatactaaatctctttaccacgatatttatagctcaccaggacttaaaaaatcatatgtagttaatgatgttcttgaggactttaaatcaaaggttggtcagcatattgaaattttagaattggaacaatttggtaaatctttatttatagatggagaaatacaagtggctgcttcagatgaacatttatatagttcaacttttgttggagcaggaatcaatttaaacaaaaataatgagagagctgcaattattggtggaggagatggaggtgttgcaagagaatgtatttcaaaaaaatttaattttatagattggtttgaattagacccagaagtggttgaggtttgtaataaacatctcggtgatattgaaaaaaagcaactgaaaaaaa

SEQ ID NO: 240650 - DNA, 790 bp, Unknown
  Bacterial polypeptide expressing nucleotide sequence isolated from the Sargasso Sea
ttggtggaccataagtccccatttcaaaaagtcgaagtttacgacacctataagtatggcaagatgctcaccctggacggtctcattatgaccaccgagaaagatgagtatgtttaccacgaaatgattgcccaccctgccatgcaagctcataaacaagccaaacgcgttttgattatcggcggtggtgatggtggcgtcgcacgagagcttctgcgctacgaacagcttgaggaagttgtgatcgccgaagttgatgaagtcgtcataaaaaccgcgcgtgaacatttccctaaaatcgcttccagctttgcccaccccaaatccaaactcgaaattggcgacggcatgaaatacgtcagcgaatctgccgatgaatcttttgacttagtcattgtagactcacctgatcgcgtgggacctgcagaaggtctctactcggaggatttttatcaaaacattcaccgaatactcaaacccaatggaatcatggttgctcagagcgaatctccaaggttcaacgagcacgtttttgtgggcatcgccaattgtcaccgaaaactatttggtaaagacaacgtttggacttacctagccttcgttcccacttacacaacaggaatgtgggctttctcctttgcgtccaaaggagctttaagtccatcaagtgttgatagagcagaagcggccaagttcgcccatgaacatgaactccagtattacaacgaagacattcacaatgctgcctttgtacttccaacttacgtaaagaaaatgctcgaagaataat

SEQ ID NO: 240651 - DNA, 759 bp, Unknown
  Bacterial polypeptide expressing nucleotide sequence isolated from the Sargasso Sea
tatctgaaatcggtggaaaaggtttgttttctagtaatattgaaaaagaacttataaataataatattgatatagctgttcatgcacttaaagatatgccaacaactgaaacaaaaggcctaaggacagatacatttttggaaagaaacgatccaagagaaattttagtaactaaagataaaaaaaaattaagtcagttaaatccaaattcaatccttggaacttcttcatatagaagagaatttcaaattagaaaaatcagaccagatattaattgtaagcttattagaggaaatgttgacacaagaataaaaaaattaaaagatggagattacgatgcaataattttatcttatgcaggtcttaaatgtttagaacttgagaatgaaatatctgaaattttttcagcaaaagatataattccaagtgctggccaaggtattattgcattacagtgccgtgaaaatgataatgagacagcttctattttagaaaaaattaatcatgaaggaactcataagagggcgcactctgagagaaatattttaaaagtcttagagggagattgcgagaccgctattggtgcacattcagttattaatggaaataaaattattttagaagctgaacttttttctatagatggaactaaaagatattatgaaaagaaaattggggatttaaaagagttttctcaaattgggagagaaattggtgaaactttaaaagttaaatcaaatggctcttataaaaaataaa

SEQ ID NO: 240652 - DNA, 728 bp, Unknown
  Bacterial polypeptide expressing nucleotide sequence isolated from the Sargasso Sea
gaatttaatagagacacaaaattctctttatcatgatatttatagctcaccaggtctacaaaaatcttacgtagtaaatgatgttttagaagattttaaatcgaaagtaggtcaacatatagaaattttagatttagagcaatttggtaaatctttatttattgatggtgaaatacaagttgctacaactgatgagcatttatacagctcaacttttgtggggtctggtttaaatttaaacaaagataatgaaagagctgctatcataggtggtggtgatggtggagtagcaagagaatgtatttcaaaaaattttaactttatcgattggtacgaactagatcctgaagttgtagatgtttgtaataaacaccttggagatattggaaaaaaagcaactgaaaaaaattctgtaaaatgtgtttggggtgatgcttttgaaagtattaaatcagttggtgatgatacttatgaccatatatttgtagatcttaatgatgatcaattttgtatagatttagctgcaaaaaatatggattcattagtcagaattttaaaacccaaaggagttataacggctcaagttggaagtcaggataaaaaaccacagcaggttgaaaattggttaaatgtttttaatcaaaattttgggaatgcaaaattatcaagagtttacatacctagttttgattgttcttggaatttttcttcatcaataaatcattaat

SEQ ID NO: 240653 - DNA, 691 bp, Unknown
  Bacterial polypeptide expressing nucleotide sequence isolated from the Sargasso Sea
ttgaaaaaagaaataaaacataaaagaattgtaaaaaaagagtttaatagagatacagtagagtactatgatgatatttatagttcaccaggattaaagaaattttatattgtcaataatgttttagaaaattttacttctaaaatgggacaacacatagaaattttagaattagaacaatttggcaaatctttatttattgataatgaacttcaagtagctgaaaaagatgaacatttatatagttcaacctttgttaattcaggacttaaattaaatcctgataagaataaatcagctataataggaggtggagatggaggagttgctagagaatgtatccatcaaggtttcaattatattgattggtatgaacttgatcaagaagtagtaactgcatgtgaaaaacacctgtctaaaataggaaaaaaagctacatcaaaaaattctgttaaatgtatttggggagatgcttttgagagcattaaaagtattgaagataataagtatgataaaatttttgtagatttgaacgatgatcaatattgtatagacttagctgcaaaaaatattaattctttaaaaagaattttaaaaccaaaagggacaattactgctcaagtaggaagccaggataaaaaaccaaaacaagttcaaaactggctaaaattattgataaaaactttaataa

SEQ ID NO: 240654 - DNA, 877 bp, Unknown
  Bacterial polypeptide expressing nucleotide sequence isolated from the Sargasso Sea
atcgcaaaaaaagcaaaagttactgttttaaatatatcaaaatataaatttgagccccaggggtttactcttgtagctttactagcagaaagtcatattagttttcatacttttccagaaaaaggaataataagttttgatttttttacatgcggtaaaattaatcccaatgtctcgatagatatattgaaaaaagaaataaaacataaaagaattgtaaaaaaagagtttaatagagatacagtagagtactatgatgatatttatagttcaccaggattaaagaaattttatattgtcaataatgttttagaaaattttacttctaaaatgggacaacacatagaaattttagaattagaacaatttggcaaatctttatttattgataatgaacttcaagtagctgaaaaagatgaacatttatatagttcaacctttgttaattcaggacttaaattaaatcctgataagaataaatcagctataataggaggtggagatggaggagttgctagagaatgtatccatcaaggtttcaattatattgattggtatgaacttgatcaagaagtagtaactgcatgtgaaaaacacctgtctaaaataggaaaaaaagctacatcaaaaaattctgttaaatgtatttggggagatgcttttgagagcattaaaagtattgaagataataagtatgataaaatttttgtagatttgaacgatgatcaatattgtatagacttagctgcaaaaaatattaattctttaaaaagaattttaaaaccaaaagggacaattactgctcaagtaggaagccaggataaaaaaccaaaacaagttcaaaactggctaaaattattgataaaaactttaataa

SEQ ID NO: 240655 - DNA, 669 bp, Unknown
  Bacterial polypeptide expressing nucleotide sequence isolated from the Sargasso Sea
catggctgtctctcaatctcatcccaacatcgtcgacggctggttcagggagatcaacacccaatggcctggtcaggctatgaccctcaaggtcaaacaagtcttgcaccaggagaagtccctcttccaggatgtccttgtcttcgaatccgagacctacggtaatgtgcttgtcctcgacggtgtcattcaggccaccgagcgtgatgagttctcttaccaggagatgatcactcatcttcccatggcttcacaccctaaccccgaaaatgttcttgttatcggcggtggtgacggtggtgtcattcgagaagttctcaagcacaagtctgtcaagaaggtcactctctgtgacattgacgaggctgtcatccgagtctctaagcaatggctccctctcatgtccgactgctacaaggaccctcgagttgaggttcacattggtgacggtttcaagttccttcccgagcacaagaacgaatacgacgttattatcaccgactcctctgaccctgtcggtcccgccgaggcgcttttccagcctccttacttccaactcctcaaggaagctcttaaggagggtggttccgtctctacccaggctgagtgcttgtggattcaccttcccctcatcaagaccctcaaggaaacttgctccaagctcttccc

SEQ ID NO: 240656 - DNA, 748 bp, Unknown
  Bacterial polypeptide expressing nucleotide sequence isolated from the Sargasso Sea
ctataagtatggaaaaatgcttgcattagatgatatggtcatgactactgagaaagatgagtttcattaccatgaaatgattagtcatccttccgtttttattcatggaaatgttaaaaatgtattggttattggtgggggagatggaggaaccattcgagaacttataagacatgaggaaattgaaaaaatcaccatggttgaaattgatgaagaggtagtaaatgcatgtaaaaagcacttgccttcaatttctcatgaattgaacaatccaaagttaaatttaattattgatgatggaattgaatttgtaaagcttgctaaaaaagaaatatatgatttaatcatagttgatggctctgatccaattggaccagctgaaggcttgttcacagttgatttttatgagaattgttataactgtttaagttccaaaggtattcttgttgctcaaggggagtctccaaaatttaatcaaaatgcatttgttgatttaaataaaaccttacaaagtatttttgggtcatccaatacctctgtagctttgttttatgcaccaacttatccaacaggaatgtggagttttcaatatggttttaaaggtatcaccaatcatatttcatcatctaaaagagaacaaatagatacatttgtatctgatcatcaactattatattacaattacaatattcacctttcaagttttgcattgccaaactttgtgaaaaataaaatatctaatttatag

SEQ ID NO: 240657 - DNA, 819 bp, Unknown
  Bacterial polypeptide expressing nucleotide sequence isolated from the Sargasso Sea
tctttacatgtgaaaagatctcaccgactgcagcactagacatactcaaagaggagattaaacacgaaagagctgtggtaagaagttttgacagaagtaataagggaatttacgaagacatatacagtacacctggacataaaaaatactatgttgtcagcgatgttctagaaaactttgtttctaaagtagggcagcatattgaagttctaaaattagaagaatttggaccatctttatttattgatagtgagttacaagttgcagaaaaagacgaaaaaaaatacagcggtcaatttgttgggtctgctttaaatctatctaaaaataattcaagtgctgcaattattggtggaggagatggtggagtagctagagaactttcttccaaaggctttgatttgattgactggtacgaattagatcccgaagtggtcaaagtatgtcaaaaacatcttttaaaagtttgtggagatattaaagcaaacaataaagtaaaaacttattggggagatgcttttgaaagtattaaaaaagtaaaagactcgaagtatgacaaaattttcgtagatttaaacgatgatcagttttgtatagacttagctgcaaaaaatatgaaggggttaaaaagaatacttaagccaggtggaataataacagctcaagttggatgtatgtcaaaaaaacctagacaagtgaaaaattggctagaattattaaaaaataactttggcaacgtaactcttgatgagatttttattccaagctttgattgtagatggaattttgcttcttcttcaaataagaatcagtcttagt

SEQ ID NO: 240658 - DNA, 707 bp, Unknown
  Bacterial polypeptide expressing nucleotide sequence isolated from the Sargasso Sea
atctctttatcctgacatttatagctcaccaggtttacagaagtcatatgttgtaaaagatgtattagaggactttaaatctaaagtaggtcaacatattgaaatattagatttagagcagtttggaaaatcattatttatagatggagaaattcaagttgcttcaacagatgaacatttatacagctcaacttttgttggttctggtttagatttaaataaagtcaatgaaagggctgctatcattggaggcggtgacggtggtgtagcaagagaatgtattactaaaaaatttaattttatcgattggtacgaacttgatccagaagtggtcgatgtttgtaataagcatattggggatataggaaaaaaagcgactgagaaaaattcagtaaaatgtgtttggggcgatgcatttgaaagtattaaatcagtaagtgatgattcttatgatcatatttttgtagatcttaatgatgatcaattttgtatagatttagctgcaaaaaatatggaatcacttgttagaattttaaaaccaaagggagttattactgcacaagtgggaagtcaagataaaaaaccacagcaggttgaaaattggttaaatgtatttaaccaaaactttggaaatgcaaaattatctagagtttatatacctagttttgattgttcttggaatttttcttcatcaataaatcattaat

SEQ ID NO: 240659 - DNA, 633 bp, Unknown
  Bacterial polypeptide expressing nucleotide sequence isolated from the Sargasso Sea
gatttccttggtgttaaaaaagactattcaccagagttttacgaaaaagttatttacaaaatagcaaaagctgcaaaggtagaaatattaaacgttgcttcccataaatttgaacctcaaggttttactttagttgctttgttgtcagaaagccattttagttttcatactttccctgagagaggtgttataagtttcgatttttttacttgcggaaaagtgaatcctaaagtcgctcttaaaattttaagaaaagagattgaccatcaaagagttgtgaccaatgcttttgatcgaagtagcgtaggtctttatgatgatatttatagtaccctaggtcaaaagaaattttatgtggtcaaagatgttttagaaaaatttacttctaaagttggtcaatttgttgaaataatggatctagaagagtttggtcacgctttatttatagaccatgaaattcaagtagctgaaaaagatgaaaaaatttatagttcaaacttttttaaatccagttatgatttgagtaaaaaaaataataatgttgcgataattggtggaggagatgggggagtagccagagcgtgtttagaaaataattcaaactatatagattggtttgagttagacccagag

SEQ ID NO: 240660 - DNA, 765 bp, Unknown
  Bacterial polypeptide expressing nucleotide sequence isolated from the Sargasso Sea
gaaataaccacgaaagagctgtggtaagaagttttgacagaagtaataaggggatttacgaagatatatatagcacacctggacataaaaaatattatgtggtcagcgatgttttagaaaactttgtttctaaagtaggacaacatattgaagttctaaaattagaggaatttggaccatctttatttattgatagtgagttacaagttgcagaaaaagatgaaaaaaaatatagcggacaatttgttgggtctgctttaaatctatctaaaaataattcaagcgctgcaattattggtggaggagatggtggagtagctagagagctttcgtcaaaaggttttgatttaattgactggtacgaattagatcccgaagtggtcaaagtatgtcaaaaacatcttttaaaagtttgtggagatattaaagccaacaacaaagtaaaaacttattggggagatgcttttgaaagtattaaaaaagtaaaaaattcaaagtatgataaaatttttgtagatttaaacgatgatcagttttgtattgatttagcggcaaaaaatatgaaaggattaaagagaatattaaaaccgggaggagtaattacagcccaggttggatgtatgtcaaaaaaacctagacaagtgaaaaattggttagagttgttaaaaaataattttggtaacgtgatacttgatgaggtttttattccaagttttgactgtagatggaatttcgcttcttcatcaaatagagatcattcttagt

SEQ ID NO: 240661 - DNA, 280 bp, Unknown
  Bacterial polypeptide expressing nucleotide sequence isolated from the Sargasso Sea
aatggacattgaagaatttggtcatgccttatttatagatcatgagatacaagttgccgaaaaagatgaaaaaatttatagctcaactttttttaaatctagttatgacctaagtaaaaaaaataataatgttgctattattggtggtggcgatggtggagttgcaagagcttgtttagaaaataactctaactatatcgattggtttgaacttgaccctgaaatagttgatgcgtgctaccgtcacctacctaaagtatgttccaaagttaaaaagagt

SEQ ID NO: 240662 - DNA, 574 bp, Unknown
  Bacterial polypeptide expressing nucleotide sequence isolated from the Sargasso Sea
attatttatagatggagaaattcaagttgcttcaacagatgaacatttgtacagctcaacatttgttggttctggtttagatttaaataaagacaatgaaagggctgctatcattggaggaggtgacggtggtgtagcaagagaatgtatttctaaaaaatttaattttatcgattggtacgaactagatccagaagtagttgatgtttgtaataagcatcttggagaaattggtaagaaggcaacagaaaaaaattctgttaaatgtgtatggggtgatgcattcaaaagtattaaatcagtaggtgatgacacttacgatcatatttttgttgatcttaatgatgatcaattttgtatagatttagctgctaagaatatggactcattagtaagaattttaaaacccaaaggagtcattactacacaagttggaagtcaggacaaaaaaccacaacaggttgaaaattggttaaatgtttttaatcaaaattttgggaatgcaaaattatcaagagtttacatacctagttttgattgctcttggaatttttcttcatcaattaatcattaa

SEQ ID NO: 240663 - DNA, 766 bp, Unknown
  Bacterial polypeptide expressing nucleotide sequence isolated from the Sargasso Sea
atgacgaaagttggcgaacatattactctagatataattggaactactaaagagtatgatccttctatatttgaaaaagtaatttatgatattgcaaaagctgcaaaagtaacaattttaaatatatctaaatataaatttgaacctcaaggttttacaattattgctttgttggctgaaagccatattagttttcatacttttcctgaaaaaggaattattagttttgatttctttacttgtggaaaagtaagcccttccgtcgcgatagatattattaaaaaagagtttgaacatacaagaatagttaaaaaggaattcaatagagataccaaatctctttatcatgatatttatagctcaccgggattacaaaaatcatatgtagtaaatgatgttttagaagactttaaatctaaggtaggccaacacattgaaattttagatttagagcagtttggaaaatctttatttatagatggcgaaatacaagtggcttcaacagacgaacatttatatagctcaacatttgtaggctctggtttagatttaaataaagacaatgaaagagctgcaataatcggtggtggagacggtggagttgcaagagaatgtatttctaaaaaatttaattttattgattggtacgaactggatcctgaagtagttgatgtttgtaacaaacatcttggagacataggaaaaaaatcaactgagaagaattctgtaaaatgtgtttggggcgatgcattcgaaagtagtaaat

SEQ ID NO: 240664 - DNA, 709 bp, Unknown
  Bacterial polypeptide expressing nucleotide sequence isolated from the Sargasso Sea
cttggatctttatcatgacatttatagctcgccaggtttaaaaaaatcatacgtagttaataaagtgttagaaaattttaaatcagatgttggacagcatattgagatattagaattagaacaatttggaaaagcattatttatagataatgaaattcaagtagctgaaaaggatgaatatctttatagctctacttttgttaacgcaggattagacttgaactcccataaggaaaaagctgcaataatcggaggtggtgatggtggcgttgccagagagtgtatatccaaaaactttagttttattgattggtatgagttagaccctgaagtcgttgaagtctgtgacaagcatctaggtaaaataggtgagaaggctacagagaaaaattctgtgaaatgtgtgtggggagatgcattcgagagcattaaatctgttaaagaaaatacatatgatcagatatacgttgatttaaatgacgatcaatactgcattgatttggctgctaaaaatatgaattcacttgcaagaattttaaaaccaaaaggtgtcatcacagctcagatcggaagccaagataaaaaaccaaaacaagtagaaaattggttaaatatatttaataaaaactttggtaatactaaattatctagagtttacatacctagttttgattgctcttggaacttctcttcttcaataaatcattaa

SEQ ID NO: 240665 - DNA, 595 bp, Unknown
  Bacterial polypeptide expressing nucleotide sequence isolated from the Sargasso Sea
ttggaacaatttggaaagtctctttttattgatggcgaaattcaagtagccactacagacgaacatttgtatagctcaacatttgtagaagcaggcttaaatctaaataaaaataatgagagagcagctattataggtggaggtgatggaggagttgccagagaatgcatatcgaaaaattttaactttattgattggtacgaattagatccagaggttgttgatgtatgtaataaacatcttggagaaataggaaaaaaagcaactgaaaaaaattctgttaagtgtgtttggggagatgcttttgaaagcattaagtctgttagcgatgatacttacgatcatatttatgtagatctaaatgatgatcaattctgtattgatttagcatcaaataacatggactcgttagtaagaattttaaaaccaaaaggagttatcactgcacaagttggtagccaagataaaaaaccacagcaggttgaaaattggctaaatgtttttaatcaaaattttggaaacacaaaattatcaagagtttacatacctagttttgattgttcttggaatttttcttcttcaataaaccattgat

SEQ ID NO: 240666 - DNA, 535 bp, Unknown
  Bacterial polypeptide expressing nucleotide sequence isolated from the Sargasso Sea
gagcatctttacagttcaacttttgttggctcaggattaaaactaaatagatcaaatgagagagcagctataataggtggtggagatggtggagttgccagagaatgtatttcaaaaaaatttaatttcattgattggtatgagctcgatcccgaggtagtagaagtttgtaataaacatttgggagatattggaaaaaaagctattgaaaaaaattcagttaaatgtgtgtggggtgatgcatttgaaagtattaaattagttaaagaagatacatatgatcatatatttgttgatttaaatgatgatcaattttgcatagatctagcagcaaaaaatatggactcgcttgttagaattttaaaacctaagggagtaattactgcacaggtaggaagtcaagataaaaaaccccatcaagttgaaaattggctaaatatatttcatcatcattttggaaatactaaattatctagggtttatgtgcctagttttgattgttcatggaatttttcttcatcaattaatcattaat

SEQ ID NO: 240667 - DNA, 609 bp, Unknown
  Bacterial polypeptide expressing nucleotide sequence isolated from the Sargasso Sea
aatggtaaaaaaagtaggcgagcacattaccttagatataattggtacaaaaaaagaatacaaaccaactttttttgaaaatctagttcataaaattgctgataaagcaaaagtaaccgttttaaatactgcaaaatataaatttgaaccccagggatttactttagtagccttactagccgaaagtcacatgagctttcatacttatccagaaaaagggattataagttttgatttttatacatgtggaatagtttctccgtctgtagctttaaatattataaaaaaagaaattgaacataaaagaatcattaaaaaagaaattagcagagatacgatttcttattataaagatattaccagcacaaaaggtttaaaaaaaaactatttagtaaaagaaattttggaagattttacatctaaagtgggtcaacatattgaaattcttgatcttgttgaatatggaaaatcattatttatagataatgatttacaagtagctgaaagcgatgaacatatttatagtggaacttttgtaaattcagctttaaaattaaacagcagcaaagatagagcagcaattattggtggtggagatggaggagttgc

SEQ ID NO: 240668 - DNA, 655 bp, Unknown
  Bacterial polypeptide expressing nucleotide sequence isolated from the Sargasso Sea
atgataaaggttggtgagcacattaccatcgattttcttggtgtaaaaaaagattattcaccagaattttatgaaaaagtaatctataaaattgctaaggcagctaaagtcgaaatattaaatgtagcctctcacaaatttgaacctcaaggttttacattagttgcgcttctttcagaaagtcattttagttttcatacttttccagagaggaatgttattagctttgatttttttacttgtggaaaagtaaatcctaaagttgctctaaaaatattaagaaatgaaattgaacacaaaagggttgtaactaacacttttgaaagaagtagtgttggactttacgatgacatttatagcactcctggtcaaaagaaattttatgttattaaagatgttttagaaaaattcacttctaaagtaggccagttcgttgaaattatggatctagaagaatttggtaatgctttatttattgatcatgaaattcaagtagcagaaaaagatgaaaaaatttatagctctaatttttttaaatctagttatgatttaagtaaaaaaaataataatgttgccattattgggggaggcgatggaggcgttgctagagcctgtttagagaacaattctaattatattgattggtttgagcttg

SEQ ID NO: 240669 - DNA, 657 bp, Unknown
  Bacterial polypeptide expressing nucleotide sequence isolated from the Sargasso Sea
tatgacaaaagtaggggagcatattacactagatatcttaggtgcaaccaaagatcacgattcgaaattttttgaaaagttagtttataaaattgccaaaaaagctaaagtaacagtgttagaaatctctaaatataaatttgaacctcaaggttttactttagtagcacttttagctgaaagccatattagttttcacacatttccagagaaaggaattattagttttgatttttttacttgtggaaaggttaatccaattattgctttagacataattaaaaaagaaattgatcataaacgaattgttaaaaaagaatttaatagagatacagttgcttattatgacgatatatacagctcaccaggtttaaagaaattttatatagttaataatgtattagaggattttacttctaaagtaggtcagcatattgaaattttagaattagaacaatttggtaaatctttgtttatagataatgaactacaggtagctgaaaaagatgaacacctttatagttcaacgtttgttaattctggactaaagctcaatcctgaaaaaaataatgctgctataatcggaggaggagatggcggagttgcaagggaatgtatttcacaaaattttaattttattgattggtttgaattaga

SEQ ID NO: 240670 - DNA, 630 bp, Unknown
  Bacterial polypeptide expressing nucleotide sequence isolated from the Sargasso Sea
acgaaaaatctaatatactaattattggcggtggcgacggtggtactttaagagaatgcgttaaatattctcaaatatcaaaaattgatctagtagaaattgatgaggaggtaatcaaaatatctaaaaaatttctaaaagaaattggaggcgaagcatggaatgacaaaagattagaaatacatgttgatgatggtgttaaatgggtcaaaaaaacaagagataatttttacgacgttatatttatagattgttcagatccctcagaattttcaaatttattattttcagattctttttataaagaatgtaaaagaatacttacaacaagggggatattagcaacgcaaagcgaatctcctgaatccttcaaaaatattcacatggatattttgaaaaccctaaaaaatatatttaaagtttctgaaactatgtattcctttgtgcctatatatccaagcgggatttggagttggacatttgcttcttcagaagatctaaatttatcaaagcaaaattatgatgaagtcttaaaaatagaaaaaggatgtgaaatttggaatttaaattttcaaaatgcagcattcaaaatgatgccaaataaaattgtaaaagcactagattcataag

SEQ ID NO: 240671 - DNA, 634 bp, Unknown
  Bacterial polypeptide expressing nucleotide sequence isolated from the Sargasso Sea
ttttaaatctaaagttggtcagcatattgaaattttagatcttgagcagtttggaaaatcactatttatagatggtgaaattcaagttgctgcaaccgatgagcacttatacagttctacatttgtaggttcaggtttaaatcttaacaaagataatgaaagagcagctatcattggaggtggagatggtggtgttgcaagagaatgtatttcgaaaaattttaattttattgattggtatgagttagatccagaagttgtagatgtttgtaataaacatcttggtgacatcggaaaaaaatctatagaaaaaaattcagttaaatgtgtatggggagatgcatttgaaagtattaaatcagttgccgatgatacgtacgatcatatttttgttgatctaaatgatgatcaattttgtatcgatctagcagcaaaaaacatggactcattggtaagaatattaaagccaaaaggggtaatcacagctcaagttggtagtcaggataaaaaacccaaacaagttgatagttggttaaatgtatttaatcaaaattttggtaatgctaaattatctagagtttatataccaagttttgattgtgcttggaacttttcatcctcaataaatcattaa

SEQ ID NO: 240672 - DNA, 775 bp, Unknown
  Bacterial polypeptide expressing nucleotide sequence isolated from the Sargasso Sea
gttggcagaaagccatattagcttccatacatttccagaaaaaggaattattagttttgatttctttacttgtggaaagattagtccatcagttgctattgatatagtaaaaaaagaattcgaacataaaagaatagtaaaaaaagagtttaatagagataccaaatctctttatcatgatatttatagctcaccaggattacaaaaatcatatgtagtgaatgatgttttagaagattttaaatctagagttggtcagcatatagagattttagatttagaacagtttggaaaatctttgtttatagatggtgaaatacaagttgcttcaacagacgaacatttatacagctcaacatttgttggctctggtttggatttaaataaagataatgaaagagcagcaattattggtggtggtgatgggggagttgctagagagtgtatttctaaaaagtttaattttgttgattggtatgaattggatccggaagttgtagatgtttgcaataaacatcttggagatataggaaaaaaggcaactgaaaagaattctgtaaaatgtgtttggggtgatgcttttgagagtattaaatcagtaagcgatgatacttatgatcatatttttgtagatcttaatgatgatcaattttgtatagacctagcagctaaaaatatggactcgttagttagaatacttaaacctaaaggagttattactgcacaagttggaagccaggataaaaaaccacatcaggttgaaaattggttaaat

SEQ ID NO: 240673 - DNA, 904 bp, Unknown
  Bacterial polypeptide expressing nucleotide sequence isolated from the Sargasso Sea
ttgagccacaaggattttactttagttgcttgctgggctgaaagtcatattagttttcacacatttccagaaaagggaataataagttttgacttttttacatgtgcgaaaatttctccctctattgctttagatgttattaaagatgaaatagaacatgcacaaataattaaaaaagaatttaatagagatacagtagatctctatcatgataattatagttcacctggtttaaaaaaatcatatgtagtaaaaaatgttatcgaaaattttaagtcaggggtaggccaacatattgagattctggaattagaacaatttggaaaagctttatttatagataatgagattcaagtagcagaaaaagatgaatatctttatagctctacttttgtaaattcaggacttgacttaaattcaaataaagaaaaagcagctattataggtggtggagatggtggtgtagcacgagaatgtatttcgaaaaattttagttttattgattggtatgagttagaccctgaagtagttgaagtttgtgataagcatctaggcaaaataggcgagaaggctacagagaaaaattcagtaaaatgtgtttggggagatgcatttgagagcatcaaatcagtcaaagatgatacatatgatcagatatatgtcgatttaaatgatgatcaatactgcatagatttggcctctaaaaatatgaattcacttgcaagaattttaaagccaaaaggagttattacagctcaggttggtagccaggataaaaaaccaaaacaagtagagaattggttaaacatatttaatgaaaattttggcaatactaaattatctagaatttatataccaagttttgactgctcttggaatttctcatcttcaataaatcattaga

SEQ ID NO: 240674 - DNA, 554 bp, Unknown
  Bacterial polypeptide expressing nucleotide sequence isolated from the Sargasso Sea
tttgtttatagatcatgaaatacaagtagctgaaagtgatgaacatttatatagctcaacatttgtaaattcaggattaaaattaaacccaaaaaaagaaaaggctgcaataatagggggaggagatggcggtgtcgcaagagaatgtatatcaaaaaattttggctttattgattggtatgaattggatccagaagtagtcgaagtctgcgatgagcatctaagcaagattggagaaaaggcttctgaaaaaaattcagtgaagtgtgtttggggagatgcttttgaaagtataaagtcagtaaaagatgatacttacgatcaaatctatgttgatttaaatgatgaccagttttgtatagatcttgctgcaaaaaatatggactcactagttagaatattaaaacccaaaggcgttattacagcccaagtaggaagtcaggataaaaaaccaaaacaagtagaaaattggatgaatgtatttaatcaaagctttggaaatacaaaattatcaagagtttatatacctagttttgattgttcatggaattttt

SEQ ID NO: 240675 - DNA, 855 bp, Unknown
  Bacterial polypeptide expressing nucleotide sequence isolated from the Sargasso Sea
aaagtaacaattctcaatatatccaaatataaatttgaacctcagggttttacaattctcgctttattagctgaaagtcatattagttttcatacattccctgaaaaaggaattataagttttgatttttttacatgtggaaaggtgagtccatcagttgcaattgatataataaaaaaagaatttgatcacaaaagaatagttaaaaaagaatttaatagagacacaaaatctctttatcatgatatttatagctcaccaggtttacaaaaatcttacgtagtaaatgatgttttagaagattttaaatcgaaagtaggtcagcatatagaaattttagatttagagcaatttggtaaatctttatttattgatggtgaaatacaagtggctacaactgatgagcatttatacagctcaacttttgttgggtctggtttaaatttaaacaaagataatgaaagagttgctatcataggtggtggtgatggtggagtagcaagagagtgtatttcaaaaaattttaactttatcgattggtacgaactagatcctgaggttgtagatgtttgtaataaacaccttggagatattggcaaaaaagcaaatgaaaaaaattctgtaaaatgtgtttggggtgatgctttcgaaagtattaaatcagttggtgatgatacttatgaccatatatttgtggatcttaatgatgatcaattttgtatagatttagctgcaaagaatatggaaactttggaaagaattttaaaaccaaaaggagttattactgcacaagttggaagccaagacaaaaaaccacagcaggttgaaaattggttaaatgtttttaatcaaaat

SEQ ID NO: 240676 - DNA, 703 bp, Unknown
  Bacterial polypeptide expressing nucleotide sequence isolated from the Sargasso Sea
ttggctgaaagccatataagctttcatacatttccagaaaaaggaataattagttttgatttttttacttgcggaaaaataagcccgtcagtagcaattgatattataaaaaaagaattcaaacataaaagaattgttaaaaaagaatttaatagagatactaaatctctttatcacgatatttatagtacaccaggtttacaaaaatcatatgtagtaaatgacgtattagaagattttaaatcaaaagttggacaacatattgaaattctagatttagaacaatttggtaaatcattatttattgatggtgaaattcaagtagcttcaacagatgagcacttatatagttcgacttttgttggtgcaggtttaaaacttaataaatttaacgaaagagcggctataattggaggaggagatggtggcgtcgcaagagagtgtatctctaaaaaatttaatttcatagattggtttgaattagatccagaggtagtagaagtttgtaataaacatttaggtgatataggaaaaaaagctacagaaaaaaactcagttaaatgtgtttggggggatgcatttgaaagtattaaatcagttaaagaggatacttacgaccatatatttgttgatcttaacgatgatcaattttgtattgatttagctgcaaaaaatatggagtcaataataaggattttaaaac

SEQ ID NO: 240677 - DNA, 748 bp, Unknown
  Bacterial polypeptide expressing nucleotide sequence isolated from the Sargasso Sea
atgaatacaaaagttggtgaacatattacacttgatattataggcactaataaagagtatgatcccgttttttttgaaaaattagtttacaagattgcaaaaattgcaaaagtaacagtattagaaatatctaaatataaatttgaaccacagggatttactctagttgcgcttcttgctgaaagtcacatcagttttcatacctttcccgaaaaaggtattattagttttgacttttttacatgtgcaaaaatttcaccatcagtagcaataaatgtaattaaagaagaaattgaacatagtagaatagttaaaaaagaatttaatagagatacagttgatctttatcatgacatttatagctcgccaggtttaaaaaaatcatatgtagtaaataaagtgttagaaaattttaaatcaaatgttggacagcatattgaaatattagaattagaacaatttggaaaagcattatttatagataatgaaattcaagtagctgaaaaagatgaacatctttatagctctacttttgttaatgctggattagatttgaactctaataaggataaagctgcaataattggtggaggtgatggaggcgtggctagagaatgtatatctaaaaattttggttttattgattggtatgaattagacccagaagtcgtagatgtatgtgataaacatcttggtaaaattggtgataaagcaactgaaaaaaattcagtaaaatgtgtttggggag

SEQ ID NO: 240678 - DNA, 625 bp, Unknown
  Bacterial polypeptide expressing nucleotide sequence isolated from the Sargasso Sea
attggcagaaagtcacattagttttcatacatttcctgaaaaaggaattatcagtttcgatttttttacatgtgcaaaaatttcgccctctgttgctttagaggttattaaagatgaaattgaatatactcatataattaaaaaacagtttaatcgagataccgtagacctctatcatgacaattatagctcaccaggtttaaaaaaaacatatgttgtaaataaagtgatcgaaaattttaagtcaaaagttggccaacatattgaaatattagaattagaacaatttggaaaagcattatttatagataatgaaattcaagtagcagaaaaagatgagcatctttatagttctacatttgtaaactctggactaagtttaaactctaataaagaaaaagctgctattatcggtggaggagatggaggagttgctagagaatgtatatcaagaaattttggatttatagattggtacgaattagatcccgaagtagtagaggtatgtgataaacatcttggaacaattggagataaggctactgaaaaaaattcagttaagtgtgtatggggtgatgcttttgaaagtataaaagctgttaaagatgatacatatgatcaaatt

SEQ ID NO: 240679 - DNA, 703 bp, Unknown
  Bacterial polypeptide expressing nucleotide sequence isolated from the Sargasso Sea
atgtatgaagatatatatagtacaccgggacataaaaaatattacgtagtagatgatgtgctagaaaattttgtatcaaaagtaggtcagcatatagaaatagtgaaattagaagaatttggtaacggtctttttatagacagcgagctacaagtggctgaaagagatgaaaaaaaatacagcggtcaatttgtaaattctgctcttaatttatcaaaggataattccagtgcagcgataattggtggtggtgatggcggagtggcaagagagctttcatcaaaaggatttgatttaatcgattggtatgagttagatcctgaggtagtaaaagtttgtcaaaaacatttaccaaaagtttttggagacgtaaaagcaaacaataaagtaaaaacttattggggagatgcttttgaaagtattaagaaggttaaagattcaaagtatgataaaatttttgtagatttaaatgatgacgatttttgtataaatctggcggccaaaaacatgaaaggtttaaaaagaattcttaagcctggaggggttattacagcacaagtaggttgtatgtcaaagaagcctaagcaagttaaagggtggatggatttattaaataataattttgggaatgttaaattgagtgaagtctttattccaagttttgattgtagatggaactttgcatcgtcttcgcaaaaataat

SEQ ID NO: 240680 - DNA, 631 bp, Unknown
  Bacterial polypeptide expressing nucleotide sequence isolated from the Sargasso Sea
aaaactaaagttggtcagcacattgaaattctaaacctggagcaatttggtaaatctctttttattgatggtgaaattcaagtagccgcatcagatgagcatttatatagttcaacatttgttggtgcaggattaaaattaaacaagaataatgaaagggcagcaataatcggtggaggagacggaggtgttgcaagagaatgtatttcaaagaaatttaattttatagattggtttgagcttgatcctgaagtagtagaagtttgtaataaacatcttggagatattggtaacaaggcaacagaaaaaaattctgttaagtgtgtatggggagacgcttttgagagcattaaatcagttaaagatgatagttacgatcatatatttgttgatcttaatgatgatcaattttgtattgatttggccgcaaaaaatatggactctttagttagaattttaaaaccaaaaggagtaattactgcgcaagtaggtagccaagataaaaaaccccatcaagttgaaaattggttgaatgtatttcatcattattttggaaatactaaattatcaagggtttatgtgcccagttttgattgttcgtggaatttttcttcatcgataaatcactaat

SEQ ID NO: 240681 - DNA, 682 bp, Unknown
  Bacterial polypeptide expressing nucleotide sequence isolated from the Sargasso Sea
attggcagaaagtcacattagttttcatacatttcctgaaaaaggaattatcagtttcgatttttttacatgtgcaaaaatttctccctctgttgccttagaggttattaaagatgaaattgaacatactcatataattaaaaaacagtttaatcgagataccgtagacctctatcatgacaattatagctcaccaggtttaaaaaaatcatatgtggtaaataaagtaatagaaaactttaaatcaaaagttggacaacacattgagatattagaattagaacagtttggaaaagcattatttatagataatgaaattcaagttgctgagagcgatgagcatttatatagttctacatttgtaaactcaggattaaaattaaactcaaataaagaaaaggctgcaattattggaggaggtgatggtggagttgcaagagagtgtattttaaaaaattttggttttatagattggtttgaattagatcccgaagttgtagatgtttgtgataaacatattggaacaattggaaataaggccactgaaaaaaattcagtaaaatgtatatggggagatgcatttgaaagcataaaagccatcaaagatgatacatatgatcaaatatttgttgatctaaatgacgatcaatattgtattgatttagctgctaataatatgaat

SEQ ID NO: 240682 - DNA, 670 bp, Unknown
  Bacterial polypeptide expressing nucleotide sequence isolated from the Sargasso Sea
attggctgaaagtcatattagttttcatacatttccagaaaatggaataataagttttgatttttttacctgtggtaaaataagcccatcagtagcaattgatattgttaaaaaagaatttgaacataaaagaattgttaaaaaagaatttaatagagatacaagatctctttaccatgatatttatagttcacctggattacaaaaatcatatgttgtaaatgaagttttagaagactttaaatcaaaagttggtcaacacattgaaattttagaattagaacaatttggaaaatctttatttattgatggtgaaatacaggtagcagcatcagatgaacatttatacagctcaacttttgttggagcaggtctgaatttaaataaaaaaaatgaaagagcagcaataattggtggtggtgatggtggtgttgcaagagaatgtatttcaaaaaaatttaattttatagattggtatgaattagatccagaagttgtagaagtttgtaataaacatcttggtgatataggaaaaaaatctacagaaaagaattctgtaaaatgtgtgtggggtgatgcgttcgaaagtataaagacaataaatgaagatacatacgatcatatttttgttgatttaaatgatgatcagttttgtatagatcttgctgct

SEQ ID NO: 240683 - DNA, 480 bp, Unknown
  Bacterial polypeptide expressing nucleotide sequence isolated from the Sargasso Sea
aagatagagccgctataataggaggtggagatggcggcgttgcaagagagtgtatagctaaaggtttcggtttcatagattggtatgagcttgatcctgaggttgtcgaaatttgcaaaaaacatattggatcaataggaaaaaatgctacagaaaaaaattcagtaaaatgcgtttggggcgacgcttttgcaagtattaaaaaagttgaggatgatacatatgataaaatttttgttgatctaaatgatgaccaattttgtattgatttagctgcaaaaaatatggatagcttggtgagaattttaaaaccaaatggtgtgataacagcccaagttggtagtcaagataaaaaacccaaacaagttgaaaactggcttaaagtcttcaacaaaaactttggaaatgctaccctagatagagtttatataccaagctttgatagttcttggaatttttcttcatcaatcaatcattaat

SEQ ID NO: 240684 - DNA, 820 bp, Unknown
  Bacterial polypeptide expressing nucleotide sequence isolated from the Sargasso Sea
tttgatttttttacctggtggaaaaatatctccaacagcagctttagacatattaaaaagtgaaattaagcatgaaagagctgtggttagaagctttgatagaagtaacaaaggtttatatgaagatatatatagtacaccaggacaccaaaaattttacattgttaatgacgtattagaaaattttgtatcaaaagttggacaacatatcgaaataatgaaactagaagaatttggtaatgctctatttatagatagtgaattacaggttgctgagaaagacgaaaaaaaatatagcggacaatttgttaattcggctttaagtctatccaaaaataattctagtgcagcaattataggtggtggagatggtggtgtagcgagagagcttttgtctaaaggatttgatttgatcgattggtatgagctagatccagaagtggtaaaagtttgccaaaaacatcttccaaaaatttgtggagatgtgaaggctaataatagagtaaaaactttttggggggacgcttttgaaagtattaaaaaagttaaagactcaaaatatgataaaatttttgtagatctaaacgatgatcagttttgcatagatctagctgcaaaaaatatgaaaagcttgaaaagaattttaaagcctggtggggtaataactgcgcaagtaggaactttatcgaaaaagcctaaacaggttaataattggctaaaagtcctttctgataactttggaaactctaaattagatgagacagtaatacctagcttcgattgtcgttggaattttgcctcttccataatgaattcttaa

SEQ ID NO: 240685 - DNA, 479 bp, Unknown
  Bacterial polypeptide expressing nucleotide sequence isolated from the Sargasso Sea
tagcgcagcaatcattggcggtggagatggcggtgtagctagagaatgtttatcaaaaggatttgatttagttgattggtacgaactagatcctgaagtagtaaaagtttgccaaaaacaccttcctaaaataagcggagacgtaaaagcaaacaataatgtaaagacttactggggcgatgcttttgagagcattaaaaaagttaaagatgctaaatatgataaaatttttgttgatcttaatgatgatcagttttgcatagatctggctgcaaaaaatatgaaaggtttaaaaagaattctaaagcctggaggtgtgattaccgcacaagttggaactttatctaaaaaaccaaaacaagtgaacaattggttaaaagtcctttcagataattttggcaactctaaactagatgaagtaatgataccaagctttgattgtcgttggaattttgcttcttcaatcatgaattcttaaa

SEQ ID NO: 240686 - DNA, 710 bp, Unknown
  Bacterial polypeptide expressing nucleotide sequence isolated from the Sargasso Sea
aatgaaaaaagttggagaacacgtaacaatagattttttaggtgtaaagaaggagtactctcctgatttttacagtaaggttatatataaaattgcaaaaaaagccaaaatagaggttctcaacatttctgaaaaggtatttaaaccacaaggatatacttgtttagctcttttggcggagagtcatatgagttttcatacttttccagaaagaggcgtaataagctttgatttttttacttgcggaaaaatttcaccaacagcagctttagatgttttaaaaactgaaattaaacatgaaagagctgtagtaagaagttttgatagaagcaataaaggtatttacgaagacatatatagcacacctggacacaaaaaatattatgttgtggatgatgttttagagaattttgtatcaaaagctggtcagcatgttgaaattttaaaattagaagaatttggatatgctcttttcatagacagtgaattacaagtagcggaaaaagatgaaaaaaaatatagtggtcagtttgttaattcagctcttagtttgtctaaagataattctagtgcagcaataattggcggtggagacgggggagtagcgagagaactttcttcaaaaggattcgacctaattgactggtatgaactagatcctgaagtagtaaaagtttgtcaaaaatatcttccaaaaatttgcggtgatg

SEQ ID NO: 240687 - DNA, 448 bp, Unknown
  Bacterial polypeptide expressing nucleotide sequence isolated from the Sargasso Sea
atgagttttcatacttttcctgaaagaggtataattagttttgatttttttacttgcggaaaaatttcgccaaaagcagctcttgaggttttaaaaactgaaattaaacacgaaagagcagtagttagaagttttgatagaagcaacaaaggcgtatatgaagatatatatagtacaccaggacacaaaaaatattatattgtagacgatgcattagaaaattttgtatcaaaagctggtcagcacatcgaaattttaaaattagaagagtttggcaatgctctatttatagatagcgagttacaagtagccgaaaaagatgaaaagaaatatagcggtcaattcgttaattcatccctaagcttatcaaaagataattctagtgcagcaataattggtggcggagatgggggtgtagctagagaactttcatcaaaacggttttgat

SEQ ID NO: 240688 - DNA, 757 bp, Unknown
  Bacterial polypeptide expressing nucleotide sequence isolated from the Sargasso Sea
gaatttgaacacaaaagaattgtaaaaaaagaatttaatagagataccagatctctttatcacgatatatatagctcacctggtttacaaaaatcatatgttgtaaatgaagtcctagaagattttaaatcaaaagttggtcaacatattgaaattttagaattagaacaatttggaaagtctttatttattgatggtgaaatacaagtagcagcatctgatgaacatttatatagctcaactttcgttggtgcaggtttaaaattaaataaagataatgagcgagcggcaattattggtggtggtgacggtggtgttgcgagagaatgtatttctaaaaaatttaattttgttgattggtatgaacttgatcctgaagtagttgaaatatgcaataaacatttgggtaatattagcaataaagctacagaaaaaaactctgttaaatgtgtttggggtgatgcttttgaaagtattaaagctgtaggtgatgatacttatgaccatatatttgtagatttaaatgatgatcagttttgcattgatttagctgcaaaaaatatggactcacttgtaaggatcttaaaaccaaaaggggtaattacaactcaagttggtagtcaagataaaaaacctcttcaagttgaaaattggctaaatgtttttaaccatcattttggaaatactaatttatctagagtttatatacctagttttgattgctcttggaatttttcatcttcaatcaaccactaaa

SEQ ID NO: 240689 - DNA, 593 bp, Unknown
  Bacterial polypeptide expressing nucleotide sequence isolated from the Sargasso Sea
attgagaaatgaaattgatcataaaagagtagtaactaatgctttcgatagaagtagtgttggtctttatgatgatatttatagcacacctggccaaaaaaaatattatgtagttaaagatgttttagaaaaatttacatctaaagtaggccaatttgtagaagttatggatattgaagaatttggccatgctttatttattgatcatgaaatacaagttgccgagaaagatgaaaaaatttacagctcaaatttttttaaatcgagttatgatttaagtaaaaaaaataacaatgtagctattatcggaggcggagacggtggtgtagcccgtgcttgcttagaaaataactcacattatattgattggtttgagcttgatccagaaatagtagatgcttgttaccgtcacttaccaaaggtttgctctaaagtaaaaaaaagtaataaaattaaaaccttctggggagacgcttttaaaagcataaaagaaattgaagattctaaatatgataaaatttttgttgatttaaatgacgatcaatattgtattgatctagcaagaaaaaatatgaaaggcttgaaaagaattc

SEQ ID NO: 240690 - DNA, 833 bp, Unknown
  Bacterial polypeptide expressing nucleotide sequence isolated from the Sargasso Sea
cttgggtgtaaaaaaagattactcacccgaattctacgaaaaagtaatttataaaattgcaaaagctgcaaaagttgagatattaaatgtagcttcacataaatttgagcctcaaggttttacattagtcgctctactttcagaaagtcattttagctttcatacttttcctgagagaggcgttattagttttgatttctttacttgtggtaaagtaaatccaaaagttgcgttaaaaatattgagaaatgaaattgatcataaaagagtagtaactaatgctttcgatagaagtagtgttggtctttatgatgatatttatagcacacctggccaaaaaaaatattatgtagttaaagatgttttagaaaaatttacatctaaagtaggccaatttgtagaagttatggatattgaagaatttggccatgctttatttattgatcatgaaatacaagttgccgagaaagatgaaaaaatttacagctcaaatttttttaaatcgagttatgatttaagtaaaaaaaataacaatgtagctattatcggaggcggagacggtggtgtagcccgtgcttgcttagaaaataactcacattatattgattggtttgagcttgatccagaaatagtagatgcttgttaccgtcacttaccaaaggtttgctctaaagtaaaaaaaagtaataaaattaaaaccttctggggagacgcttttaaaagcataaaagaaattgaagattctaaatatgataaaatttttgttgatttaaatgacgatcaatattgtattgatctagcaagaaaaaatatgaaaggcttgaaaagaattc

SEQ ID NO: 240691 - DNA, 593 bp, Unknown
  Bacterial polypeptide expressing nucleotide sequence isolated from the Sargasso Sea
tctggaggttatagaagatgaaattgagcatactcatatagttaaaaaacagtttaatagagatactgtagacctatattatgataattatagctcaccaggtttaaaaaaatcatatgttgtaaataaagttttagaaaattttaaatcaaaggttggccaacatattgagatattggaattagaacagtttggaaaagcattatttattgataatgaaattcaagtggcagaaaaagatgaacatctttatagttctacttttgtaaattcaggactaggtttaaacgccaataaagaaaaagctgctattatcggtggtggagatggaggagttgctagagaatgtatatcaaaaaattttggatttatagattggtacgaattagatcctgaagttgtagatgtttgtgacaaacaccttggaacaattggagagaaggctactgaaaaaaattcagtaaagtgtgtgtggggtgatgcatttgaaagtataaaagctgttaaagatgacacatatgatcaaatatatgttgacctaaacgatgaccaatattgtattgatttagctgctaaaaatatgaattcacttg

SEQ ID NO: 240692 - DNA, 836 bp, Unknown
  Bacterial polypeptide expressing nucleotide sequence isolated from the Sargasso Sea
aaccttagatataataggtacaaaaaaggagtatgatcctgtcttctttgaaaaattagtttacaaaattgctaaaatagcaaaagttactgtgctccaaatatcaaaatataagtttgagccacaaggatttactttagttgcattattggcagaaagtcacattagttttcatacatttcctgaaaaagggattattagtttcgatttttttacatgtgcaaaaatttctccttctgttgctctggaggttatagaagatgaaattgagcatactcatatagttaaaaaacagtttaatagagatactgtagacctatattatgataattatagctcaccaggtttaaaaaaatcatatgttgtaaataaagttttagaaaattttaaatcaaaggttggccaacatattgagatattggaattagaacagtttggaaaagcattatttattgataatgaaattcaagtggcagaaaaagatgaacatctttatagttctacttttgtaaattcaggactaggtttaaacgccaataaagaaaaagctgctattatcggtggtggagatggaggagttgctagagaatgtatatcaaaaaattttggatttatagattggtacgaattagatcctgaagttgtagatgtttgtgacaaacaccttggaacaattggagagaaggctactgaaaaaaattcagtaaagtgtgtgtggggtgatgcatttgaaagtataaaagctgttaaagatgacacatatgatcaaatatatgttgacctaaacgatgaccaatattgtattgatttagctgctaaaaatatgaattcacttg

SEQ ID NO: 240693 - DNA, 562 bp, Unknown
  Bacterial polypeptide expressing nucleotide sequence isolated from the Sargasso Sea
tttgaaaattttaagaaaagaaatccaacatgaaagagttgtaactaatgctttcgatagaagtagtattggcttatatgatgatatttatagtactccaggacaaaaaaaatactatgttgttaaaaatgttttagaaaaatttacatctaaagtaggtcaatttgttgaaataatggatttagaagaatttggacatgctttatttattgatcatgaaatacaggtagctgaaaaggatgaaaaaatttatagttcaaattttttcaagtctagttatgacttaagcagaaaaaataataatatagcaattattggtggaggagatggcggtgttgctagagcgtgcttagaaaataattcaaactttattgattggtttgagctagatccagaaatagtagacgcatgttacaagcatttgccaaaagtgtgcacaaaagtaaaaaaaagtaacaaaattaaaactttttggggagatgctttcaaaagcataaaaggagtagaggattctaaatatgataaaatatttgttgatttaaacgatgatcaaaatattgta

SEQ ID NO: 240694 - DNA, 814 bp, Unknown
  Bacterial polypeptide expressing nucleotide sequence isolated from the Sargasso Sea
tgaacatataacgatagattttctaggtgtaaaaaaagattacacacctgaattttatgaaaaaattatatatacaattgcaaaagctgctaaagttgaaattttaaatgtatcgtcacatcgctttcaacctcaaggttttacactagttgcattattagctgaaagtcactttagttttcatacttttccagaaaaaggtgtgataagttttgatttttttacttgtggaaaggtaaatccaaaagttgctttgaaaattttaagaaaagaaatccaacatgaaagagttgtaactaatgctttcgatagaagtagtattggcttatatgatgatatttatagtactccaggacaaaaaaaatactatgttgttaaaaatgttttagaaaaatttacatctaaagtaggtcaatttgttgaaataatggatttagaagaatttggacatgctttatttattgatcatgaaatacaggtagctgaaaaggatgaaaaaatttatagttcaaattttttcaagtctagttatgacttaagcagaaaaaataataatatagcaattattggtggaggagatggcggtgttgctagagcgtgcttagaaaataattcaaactttattgattggtttgagctagatccagaaatagtagacgcatgttacaagcatttgccaaaagtgtgcacaaaagtaaaaaaaagtaacaaaattaaaactttttggggagatgctttcaaaagcataaaaggagtagaggattctaaatatgataaaatatttgttgatttaaacgatgatcaaaatattgta

SEQ ID NO: 240695 - DNA, 475 bp, Unknown
  Bacterial polypeptide expressing nucleotide sequence isolated from the Sargasso Sea
tatggtgaaggatgttttggaaaactttacctcaaaagtaggtcaaaacatcgaaattctagatttagaacaatttggtaaatctctttttatagacggcgaacttcaagtggcagaaaatgatgaacacttgtatagctctacatttgtaaattctggtttaaaactaaatccatcaaacgataagactgcaattatcggtggaggagatggaggtgttgcgagagaatgtatatctaaaggttttaaattaattgattggtatgagttagatcccgaagttgtaacaatgtgtgaaaaatatttatcaaaggtaggtaagaaagctactacaaaaaatcatgtgcaatgtgtatggggagatgcatttgaaagcataaaatcagttgaagataacaagtatgataaaatttatgtggacctaaacgatgatcaatattgtattgatttagccgcaaaaatatcaaatctttaa

SEQ ID NO: 240696 - DNA, 859 bp, Unknown
  Bacterial polypeptide expressing nucleotide sequence isolated from the Sargasso Sea
tatgacgaaggttggggagcacgtcactttagatattatcggtactgaaaaagagtacgagcctaagttttttgaaaaactggtttataagatatcaaaaaaagcaaaagtaactgtcttagagatttcaaagtacaaattcgaaccacaaggctttactcttgtggccttattagcagaaagtcatattagctttcatacttttcctgaaaggggaattataagttttgatttttttacgtgtggaaaggtaaatcctaatgttgcctacgatatattaaaaaaagaaattaagcataaaagaattgttaagaaagagtttaatagagatactataagttattatgatgatatttatagctcaccaggtttaaaaaagttttatatggtgaaggatgttttggaaaactttacctcaaaagtaggtcaaaacatcgaaattctagatttagaacaatttggtaaatctctttttatagacggcgaacttcaagtggcagaaaatgatgaacacttgtatagctctacatttgtaaattctggtttaaaactaaatccatcaaacgataagactgcaattatcggtggaggagatggaggtgttgcgagagaatgtatatctaaaggttttaaattaattgattggtatgagttagatcccgaagttgtaacaatgtgtgaaaaatatttatcaaaggtaggtaagaaagctactacaaaaaatcatgtgcaatgtgtatggggagatgcatttgaaagcataaaatcagttgaagataacaagtatgataaaatttatgtggacctaaacgatgatcaatattgtattgatttagccgcaaaaatatcaaatctttaa

SEQ ID NO: 240697 - DNA, 529 bp, Unknown
  Bacterial polypeptide expressing nucleotide sequence isolated from the Sargasso Sea
ttgtatagctcaacatttgttggagcaggtttagatttaaatcagaataatgagcgagctgctataattggtggcggagatggaggagttgccagagaatgtatatctaaaaattttaattttatagattggtatgagttagatccagaggttgtcgatgtatgcaataaacatcttggagatattggaaaaaaagcaactgaaaaaaattctgttaagtgtgtttggggagatgcttttgaaagcattaagtctgtaaatgatgatacttacgatcatatttatgtagatttaaatgatgaccaattctgtattgatttagcatcgaagaatatggactcgttagtaagaattttaaaaccaaaaggagttatcactgcacaagttggtagccaagataaaaaaccacagcaggttgaaaattggttgaatgtttttaatcaaaattttggaaacacaaaattatcaagagtttacatacccagttttgattgttcttggaatttttcttcctcaataaaccattgat

SEQ ID NO: 240698 - DNA, 746 bp, Unknown
  Bacterial polypeptide expressing nucleotide sequence isolated from the Sargasso Sea
aatgattaaagtaggtgagcatataattttagatataattggtaccacaaaagaatatgaaccatctttttttgaaaaacttgtatataaaatagcaaaaaaagcaaaggtaacagttttagaaatttccaaatataaatttgaacctcaaggatttaccttggtggcattacttgccgaaagccatattagttttcatacctttccagaaaaaggtattattagttttgatttttttacctgtgctaaagtttcgccgatagtagcattaaaaattcttaaggaagagatagaacatactcatataataaaaaaagaatttaatagagatacagttgatttatataatgataactatagttctccaggtttacgcaaatcttatgtggtaaataaagttttagaaaattttaaatcaaaagtaggacaaaacatagagatattagaattagaacagtttggtaaatctctttttattgataatgagatacaagtagctgaaagtgacgaacatttgtacagctcaacatttgtaaactcagggctaaaattaaatcctaaaaaagaaaaagcagcaattatcggaggcggagatggcggagtagctagagaatgtatttctcaaagttttggatttattgactggtatgaattagacccagaagttgttgaagtttgtgataaacatttaagcaaaattggggaaaaagctgtagaaaaaaattctgttaaatgtgtgtggggtg

SEQ ID NO: 240699 - DNA, 862 bp, Unknown
  Bacterial polypeptide expressing nucleotide sequence isolated from the Sargasso Sea
actggctgaaagtcatatcagctttcatacttttcctgagaaaggaataattagctttgatttttttacgtgtgggaaaattaatccaaaggttgcagtagatataattaaaaaagagatcaaacataaaagaattgttaaaaaagaatttaatagagataccaaatcactttaccatgatatttatagttctcctggtttacaaaaatcttatgttgtaaatgatgttcttgaggattttaaatctaaagtaggacagcacattgaaattttagatttagaacaatttggaaaatctttatttattgatggagaaattcaagttgcaactactgacgaacatttatatagctcaacgtttgtaggggctggtcttaagttaaataataataatgaaagagcagctattattggaggtggagatggaggcgttgcaagggaatgtatttcaaaaaattttaattttattgattggtatgaacttgaccctgaagttgttgaagtttgcaagaaacacctcggagaaattggaaaaaaagctactgaaaaaaattctgtaaaatgtatatggggtgatgcatttgaaagtatcaaatctgcaaaagatgatacttacgatcatatctttgttgatttaaatgatgaccagttctgtattgatctcgcagctaaaaatatggattctttggtaagaattctaaaacccaaaggcgtaattactgctcaagttggaagccaagataaaaaacctcttcaagttgaaaattggatgaatgtttttaatcacaactttggaaacacaacattatcaagagtttatatacctagttttgattgttcttggaatttctcttcctcaata

SEQ ID NO: 240700 - DNA, 841 bp, Unknown
  Bacterial polypeptide expressing nucleotide sequence isolated from the Sargasso Sea
atttccagaaagaggtataataagttttgattttttcacatgtggaataataagcccatcaattgcaatagatattgttaaaaaagaatttaagcacaaaagaattgttaaaaaagaattcaatagagatactagagctctataccacgatatttatagctcccctggtcttcaaaaagcatacgtagttaatgatgttttagaagattttaaatctaaagttggtcagcatattgaaattttagatcttgaacaatttggaaaatctttatttattgatggtgaaattcaagtcgctgccttagatgaacatttgtatagctcaacttttgttggttcaggattaaacttaaataaaaacaatgaaagagccgctattattggtggtggagatggtggagttgctagagaatgtatttcaaaaaaatttaattttatagattggtttgaacttgatcccgaagttgttgaagtttgtaataaacatttaggagatataggaaaaaaagctacagaaaaaaattcagttaaatgtgtttggggtgatgcgtttgaaagtatcaagactgttaaagaagatacttatgaccatatttttgttgatctaaatgatgatcagttctgtattgatttagctgctaagaatatggactcgcttgttagaattttaaaaccaaaaggagtaattactgctcaagttggtagtcaagataaaaaaccacaacaggttgaaaattggttaaatgtatttcaccatcattttggaaatactaaattatcaaggatttatgtgcctagttttgattgttcatggaatttttcttcatcgattaatcattaa

SEQ ID NO: 240701 - DNA, 550 bp, Unknown
  Bacterial polypeptide expressing nucleotide sequence isolated from the Sargasso Sea
agcagaaaaagatgaaaagaaatatagcggacaatttgttaattcagctcttagcttgtctaaagaaaattcaagcgcagcaataattggtggtggagacggtggagttgcaagagaatgtctatctaaaggatttgatttggttgattggtatgaacttgatccggaggtagtaaaagtttgtcaaaaacacttacctaagatttgtggcgatgtaaaagcaaataataacgtaaaaacatactggggagatgcatttgaaagcattaaaaaagttaaagattcaaaatatgacaaaatttttgtagatcttaacgatgatcagttctgtatagatttggctgcaaaaaatatgaaaagcttaaaaagaattcttaaaccaggaggagtaattacagcgcaagtaggaactttatctaaaaaaccaaagcaggttaataattggttaaaagtcctttcagacaatttcggtaactctaaattggacgaggcaatgataccaagctttgattgtcgttggaatttcgcctcttccatcatgaattcttaa

SEQ ID NO: 240702 - DNA, 859 bp, Unknown
  Bacterial polypeptide expressing nucleotide sequence isolated from the Sargasso Sea
tatgagctttcatacatttcctgaaagaggaataattagttttgatttttttacttgtgcaaaaatttctccaacagcagctttagatattttaaaaagtgaaattaagcatgaaagagcagtagtaagaaattttgatagaagtaacaaaggcgtatatgaggatatatatagtacaccaggtcatcaaaaatattatattgttaatgatgtattagaaaattttgtttcgaaggtagggcagcacgttgaagtaatgaaattagaggaattcggtaatgctctatttatagatagtgagttacaagttgctgaaaaagatgaaaaaaaatatagcggtcaatttgtaaattctgcacttagcttatccaaagataattctagtgccgcaataattggtggtggagatggtggtgtcgctagagaatgtttagcaaaaggatttgatttagttgattggtacgaactagatcctgaagtagtaaaggtatgtcaaaaacaccttcccaaaatatgtggtgatgtaaaagcaaacaataatgtaaaaacgtattggggagatgcatttgaaagtattaaaaaagttaaagattctaaatatgataaaatttttgttgatcttaatgacgatcaattttgcatagatctggctgcaaaaaatatgaagggtttaaaaagaattttaaagcccggaggtgtgattacagcgcaagttggaactttatctaagaagcctaaacaagtgaataattggctaaaagttctttcagataattttggtaactccaaattagatgaagtaatgataccaagctttgattgtcgttggaatttcgcttcatcaatcatgaattcttaa

SEQ ID NO: 240703 - DNA, 397 bp, Unknown
  Bacterial polypeptide expressing nucleotide sequence isolated from the Sargasso Sea
attggatattcttaaggaggagattaaacacgaaagagctgttgtaagaagctttgatagaagtaataagggaatttacgaagatatatatagtacacctggacataaaaaatactatgtggtgagtgatgtattagaaaactttgtatctaaagtaggacaacatattgaaattctaaaattagaagaatttggaccagctttatttattgatagtgagttacaagttgcagaaaaagatgaaaaaaaatacagcggtcaatttgttgggtctgctttaaatctatctaaaaataactcaagtgcagcaattattggtggaggagacggtggagtagctagagagctttcatctaaaggctttaatttaattgactggtacgaattagatcccgaa

SEQ ID NO: 240704 - DNA, 664 bp, Unknown
  Bacterial polypeptide expressing nucleotide sequence isolated from the Sargasso Sea
aatgaagaaagttggagaacacgtaacgatagattttttaggcgtaaaacgagattacgctccagaattttataacaaagttatatataaaatagcaaaaaaagccaaaattgaagtcctgaacatcgcagaaaaaatatttaaaccccagggatacacttgtttagcgcttctagcagagagtcatatgagttttcatacttttcctgaaaaaggtataattagttttgatttctttacgtgtggaaagatctcacctactgcagcattggatattcttaaggaggagattaaacacgaaagagctgttgtaagaagctttgatagaagtaataagggaatttacgaagatatatatagtacacctggacataaaaaatactatgtggtgagtgatgtattagaaaactttgtatctaaagtaggacaacatattgaaattctaaaattagaagaatttggaccagctttatttattgatagtgagttacaagttgcagaaaaagatgaaaaaaaatacagcggtcaatttgttgggtctgctttaaatctatctaaaaataactcaagtgcagcaattattggtggaggagacggtggagtagctagagagctttcatctaaaggctttaatttaattgactggtacgaattagatcccgaa

SEQ ID NO: 240705 - DNA, 694 bp, Unknown
  Bacterial polypeptide expressing nucleotide sequence isolated from the Sargasso Sea
cgatatttatagttcaccaggtttgcaaaaatcttatgttgtgaacgatgtattggaagattttaattcaaatgtaggacaacatattgaaattttagaattagaacaatttggtaaatctttatttattgatggtgagatacaagtcgcagcttcagatgaatatttatatagttcaacttttgtaggagcaggactgaagctaaataaaaataatgaaagagctgcaataattggtggtggtgatggtggtgttgcaagagagtgtatttctaaaaaatttaattttgttgactggtatgaacttgatcctgaagtagttgaagtatgtaacaaacatttaggagatattggaaaaaaagccactgaaaaaaactcagttaaatgtgtttggggtgatgcatttgaaagtatcaaatcagttggggacgatacttatgaccatatatttgttgatttaaatgatgaccaattttgtattgatttagcctcaaagaacatggactcactaattagaattttaaaacccaaaggtgtgatcactgcccaagtaggaagccaagataaaaaacctcttcaagttgaaaattggctaaatgtatttaatcatcattttggaaatactaatttagctagagtttatatacctagttttgattgttcttggaatttttcgtcatctataaatcactaa

SEQ ID NO: 240706 - DNA, 745 bp, Unknown
  Bacterial polypeptide expressing nucleotide sequence isolated from the Sargasso Sea
tcgcttcctcatttgttttcgagcatttttaacctgccaccagacgttgtacttaatggctatgtatttcaaaagttacaagaatggtcacgctttttaccttatgtatttggcttagtattaggactgtttattggtatggaaataccgcttatagcgcgtattcgccaacatgtgtacgggcggtttttagaaaacaatgcaggaactatttatggtgcagactacattggggcaggtattggcgcagcaatttgggtaagcataatgttggctatgcctatcatgcaagctgctgcatggaccgctttatttaatattattgcagggcttgcttttttatggcgctaccatgcccatgttcgctttgctaaagctttgttggtttgccatattttactgcttgtgctgtttggctttattttagtgctcggcagcagttggatgaatagcctaagcaacgtcttatataaagataaagttatttattctcaggcgactaaatatcagcatgttgtattaacagaacgacttagcaaaaatcaaccgcaacctattaccgacctatacttaaatggccgcctacagttctcaagtgttgatgaacaaatatatcattcaatgctagtttatccggctatgcttgcctctaaccgacatgataaggtgctaattattggcggtggtgacggtttagcattaagggatgtactaaaatggtcggtaaacgaagtcactttaattg

SEQ ID NO: 240707 - DNA, 501 bp, Unknown
  Bacterial polypeptide expressing nucleotide sequence isolated from the Sargasso Sea
gcttagacttaaataaagataatgaaagagctgcaattattggtggtggagacggtggaattgcaagagaatgtatttctaaaaattttaattttatagattggtttgaactggatcctgaagtggttgaggtttgtaacaaacatctcggagatattggtaaaaaagctacagaaaaaaattcagtaaaatgtgtgtggggtgacgcatttgaaagtattaaatctgtaagtgacgatacttatgatcatatttttgtagatcttaatgatgatcaattctgcattgatctggcagcaaagaacatggattctctagtaagaattttgaaaccaaaaggagttattactgctcaagtaggaagtcaggataaaaaaccacaacaggttgaaaattggttaaatgttttcaatcaaaattttggaaatgcaaaattatcaagagtttacatacctagttttgattgctcttggaatttttcttcatcaattaatcattaat

SEQ ID NO: 240708 - DNA, 503 bp, Unknown
  Bacterial polypeptide expressing nucleotide sequence isolated from the Sargasso Sea
aaaaattaacaaagataaggacaaggccgctataataggaggtggagacggaggagttgcaagagaatgtatatctaaaaattttaattttattgattggtttgaactagatccagaagttgttcaagtttgtaacaagcatcttagtaaagttggaaataaagctactaagaaaaattctgtaaaatgtatatggggagacgcttttgaaagcataaaatctgttgaggataatagatatgataaaatttttgttgatttaaacgacgatcaattttgtatagatcttgcagcaaaaaatatgaaatcattaaaaagaattcttaaaccgaatggagttattacagcgcaagtcggaagtcaggataaaaagcctaaacaagtagataattggctaaaagtttttaacaaaaactttaaaaatacaactttagatagggtttatataccaagttttgattgttcttggaattttgcatcatctataaatcattctagctaaa

SEQ ID NO: 240709 - DNA, 746 bp, Unknown
  Bacterial polypeptide expressing nucleotide sequence isolated from the Sargasso Sea
attggtagctcttttagcagaaagccacattagttttcatacttttccagaaaagggaattgtaagttttgatttttttacttgtggaaaagtaacaccttctgttgcaatagatattattagaaaagaaatagaacatacacaattaataaaaaaagaattcaatagagatacagtggattggtatcatgatatatatagttcatctggtttaaaaaaatcttatttagtaaaaaaagtaatagaaaactttaaatcaaaagttggacaacatattgaaatattagaattagaacaatttggaaaatctctttttattgataacgaaatacaagtagcagagagtgacgagcatttatatagttcaacttttgtaaaatcaggcttaaatctaaatcctaataaagaaaaagctgcaataataggtggaggagatggaggagttgcaagagaatgtatttctaaaaattttggatttattgattggttcgaattagatccagaggttgttgaagtatgtgataagcacttaggaaaaattggtgaaaaagcaactgagaaaaattctgtaaaatgtgtatggggagatgcttttgaaagtattaaatctattaaagatgatacttatgatcaaatatttgtagacttaaatgatgaccaattttgcattgatcttgcgtcaaaaaatatggattctttagtaagaatattaaaacctaaaggagttattactgcacaagtaggaa

SEQ ID NO: 240710 - DNA, 535 bp, Unknown
  Bacterial polypeptide expressing nucleotide sequence isolated from the Sargasso Sea
tgaaaaaatttatagctcaaatttttttaaatccagttatgatttgagtaaaaaaaataacaatgttgcaataattggtggaggagacggaggtgttgcaagagcttgtttagagaataactctaattacatcgattggtttgaattagatcctgagatagtagatgtttgttatcgccatttacctaaagtttgctctaaagttaaaaagagcaataaaataaaaactttttggggagatgcattcaaaagtataaaagagatagaggattcaaaatacgataaaatttttgtagatttaaacgacgatcaatattgcattgatttagcaaaaaaaaatatgaaaggtttaaaaagaattctaaaaaaaggcggcgtaattactgctcaagtcggaagtcaggataaaaaacctaaacaagttgataactggtgtaaggttttaggaaaaagctttggaaacgtcaaattatccggtgcttatattcctagctttgactgcaaatggaatttcgcctcatctataatgaagtaa

SEQ ID NO: 240711 - DNA, 732 bp, Unknown
  Bacterial polypeptide expressing nucleotide sequence isolated from the Sargasso Sea
tatgattaaagtaggggagcatgttactctagatataattggtacaaagaaagaatacgatgcatctttctttgaaagtttagttcataaaattgcagaaaaagccaaagtaacagttttaaatatagcaaaatacaaatttgaaccacaaggttttactttagtagctctcttggcagaaagtcatattagttttcatacatatccagaaaaaggaataattagttttgacttttatacctgtggaacagttgctccatcaattgctttagatgttataaaaaaagaaattgaacataaaagaataataaaaaaagaattaaacagagatacaatttctttttattatgacaatacaagcacaaaaggattaaaaaaaaactatctagtaaaagatgtccttgaagattttaaatcaaaagtaggacagcacatagaaatattagatttagtagaatatggaaaatcattgtttatagatggagatttgcaagtagcggagagtgatgagcatttatatagtggaacatttgtaaattctgcaatgaaattgaataaaagcaaagacagagcagcaattatcggtggaggagacggaggagttgcaagagagtgtatagcaaaaggatttggatttattgactggtatgaattagatcaagaagtagttgaggtttgtaaaaaacatattggcagtataggtaaaaatgcaactgaaaagaattctgttaa

SEQ ID NO: 240712 - DNA, 615 bp, Unknown
  Bacterial polypeptide expressing nucleotide sequence isolated from the Sargasso Sea
tttgtatcatgacaattatagctctctaggtttgcgtaaatcttacgttgtaaataaagttttagaaaattttaaatcaaaagctggtcaatatattgaaattttagaacttgaacaatttggaaaatctcttttcattgataatgagattcaagtagctgaaacagatgaacatttatatagttcaacatttgtgaattcaggattaaaattaaatccaaaaaaagaaaaagcagcaattattggtggcggtgatggaggtgttgctcgagaatgtatatctaaaaactttggctttatagactggtacgaattagaccccgaagttgttgaagtatgcgacaagcatttaagtaaaattggagaaaaagcatctgaaaaaaattctgtaaagtgtgtttggggtgatgcttttgaaagtataaaatcagttaaagatgacacctatgatcaaatttatgttgatttgaacgatgaccaattctgtatagatctagctgcaaaaaacatggactcacttgtgagaattcttaaaccaaaaggagttattactgcacaagtaggaagccaagataaaaaaccaaaacaggttgaaaaatggatgaacgtatttaa

SEQ ID NO: 240713 - DNA, 742 bp, Unknown
  Bacterial polypeptide expressing nucleotide sequence isolated from the Sargasso Sea
atgactaaagttggagaacacataactctagacattattggtacaacaaaagaatacgatccaacagtatttgaaaaagtaataaatgatattgcaaaagctgcaaaagtaacaattctcaatatatctaaatataaatttgaacctcagggttttacaattcttgctttattagctgaaagtcacattagttttcatacattccctgaaaaaggaattataagttttgatttctttacatgtggaaaagtaaacccatcagtggcgatagacattataaagaaagaatttgaacataaaagaatagttaaaaaagaatttaatagagacacaaaatcactttatcatgatatttatagcacaccgggtttacaaaaatcttacgtagtaaatgatgttttagaagattttaaatctaaagtaggtcaacatattgaaattttagacttagaacaatttggtaagtctttatttattgatggtgagatacaagttgctgctaccgatgagcatttatatagttctactttcgttggctctggtttaaatttaaataaaaataatgaaagagccgctatcataggtggtggagatgggggagttgcaagagaatgtatttcaaaaaattttaactttattgattggtatgaattggatcctgaagttgtagatgtttgcaataaacatcttggagatattgggaaaaaagcaactgaaaaaaattctgtaaatatgtgtttgg

SEQ ID NO: 240714 - DNA, 507 bp, Unknown
  Bacterial polypeptide expressing nucleotide sequence isolated from the Sargasso Sea
aatcagggttaaatctaaataaaaacagagacaaagctgccattataggaggtggtgatggaggtgttgcaagagaatgtatttctaaaaattttggatttattgattggtttgagttagaccctcaggttgttaaggtttgtgaaaaacatctagcaaaagtaggagatagagctacaaaaaaaaattcagttaagtgtttttggggtgatgcatttgaaagtataaaaaatatcgagaataataaatacgataaaatatttgttgacctcaatgatgatcagtattgtattgatcttgccgcaaaaaacatgaaatctttgaaaagaattttaaaaacaaatggtactattaccgctcaggtaggaagccaagacaaaaaacctaaacaggttagaaattggctaaatgtatttaacaaaaactttggtaatgctaccctagatagagtttatataccaagttttgattgttcttggaattttgcatcatcaattaataattaat

SEQ ID NO: 240715 - DNA, 805 bp, Unknown
  Bacterial polypeptide expressing nucleotide sequence isolated from the Sargasso Sea
atgaccaaagtaggtgaacatttaacattagatattattggtactgataaagaatatgagccaaaattttacgaaaaattaatttataaaattgctaagaaagcaaaagtatcagtattaaaaatatctagtcataaatttgaaccccagggtttcacattagttgctttattggcagaaagtcatatgagtttccatacttttcctgagaatggaattataagttttgatttttttacttgtggtaaagtttcaccaaatatagccttaagtataattaaagatgaaataaaacataaacaaattattaaaagagaatttaaccgtgatactaaagatttgtatcacgatatttactcatccccaggtttgagtaaaaattatatagtaaaaaaagtcttagaaaattttaaatctaaggtaggtcaacatgtagaaatattggaattagaacagtttggtaaagcactttttatagataatgagattcaagtctcagaaacagacgagcatttatacagttctacatttgtaaactgtggaataaaacttaattcaaataataataaagcagctattattggaggaggggatggtggagttgcaagagagtgtattacaaaaaactttggttttatagattggtttgaattagatcccgaagttgttgaagtatgcgataagcatttagcaaaggttggtaacaaagctacaaaaaataactcagtatcatgtgtctggggtgatgcatttgagagtataaaaaaaataaatgataataattatgaccaaaatatttattgat

SEQ ID NO: 240716 - DNA, 740 bp, Unknown
  Bacterial polypeptide expressing nucleotide sequence isolated from the Sargasso Sea
tataattaagaaagaatttaatagagatacagtagatttatatcatgataattatagctctccaggattacgaaaatcttatgtagttaataaagtattagaaaactttaaatctaaagctggacaatatattgaaattttagaattagaacaatttggtaaatcactttttatagataatgaaatacaagtggcagaaagtgatgagcatttatacagttcaacatttgtaaattcaggattaaacttaaatccaaaaaaagaaaaagctgcaattatcggtggtggagacggaggagttgcaagagaatgtatttcacaaaattttggatttatagattggtacgaattagaccccgaggttgttgaagtttgtgataaacatttaagcaagattggtgaaaaagcttctgaaaaaaattcagttaaatgtgtttggggtgatgcatttaaaagtataaaatctgttaaagatgatacatatgatcagatttatgttgatttaaatgatgatcaattttgtatagaccttgctgcaaaaaacatggactctttagttagaatactaaaacccaaaggagttattacagctcaagtaggtagccaagataaaaaaccaaaacaagtagatagctggatgaatgtttttaacgaaagttttggaaatactaaattatcaagagtttatataccaagttttgattgttcttggaatttttcgtcgtcaataaaccattaat

SEQ ID NO: 240717 - DNA, 624 bp, Unknown
  Bacterial polypeptide expressing nucleotide sequence isolated from the Sargasso Sea
aatgactaaagttggagagcatataactctagacattatcggcactacaaaagaatacgatccatctgtatttgaaaaagtaattcatgagattgcaaaagccgcaaaagtaacaattctgaatatatcaaaatataaatttgaacctcaaggatttacaatattagcattattggccgaaagtcatattagctttcatactttcccagaaaaaggaattattagttttgatttttttacttgtggaaaaataagtccttcagttgcgattgacattataaaaaaaaaatttgaacataaaagaatagttaaaaaagaatttaaaagagatacaaaatccttatatcacgatatttatagctcaccaggactacaaaagtcttatgttgtaaatgatgtattagaggattttaaatctaaagttggtcagcatattgaaattttagatttagaacagtttggaaaatctttatttattgatggtgaaatccaagttgcagcaacagacgaacatttatatagctcaacatttgtaggctctggtttaaatttaaataaagataatgatcgtgctgctataataggtggtggtgatggcggagtagcaagagagtgtatttctaa

SEQ ID NO: 240718 - DNA, 871 bp, Unknown
  Bacterial polypeptide expressing nucleotide sequence isolated from the Sargasso Sea
gttggctgaaagtcatattagttttcacacatttccagaaaagggaattataagtttcgacttttttacttgtgcaaaaatttctccctctgtcgctttagatattattaaagatgaaatagagcatacacaaataattaaaaaagaatttaatagagatacagtagatctatatcatgacaattatagttcacctggtttaagaaaaacatatgtagtaaataaagttattgaaaattttaagtcagaggtaggccaacatattgagatattggaattagaacaatttggaaaagctttatttatagataatgaaattcaggtagcagaaaaagatgaatatctatatagctctacttttgtaaattcaggacttgaattaaattcaaataaagaaaaagcagctattataggtggtggagatggtggtgtagcaagagaatgtatttcaagaaattttagttttattgattggtatgaattagaccctgaagtagttgatgtttgtgataaacacctaggtaaaataggtgagaaggctacagagaaaaattcggtcaaatgcgtttggggagatgcatttgaaagcattaaatcagtcaaagatgatacatatgatcaaatatacgttgatctaaatgacgatcaatattgtattgatttagccgccaaaaatatgaattcacttgtgagaattttaaaaccaaaaggagttattactgcacaagttggttcccaagataaaaaaccgagacaagtagaaagttggctaaatgtattcaatgaaaactttggaaatgcaaaattatccaggatttatattccaagctttgattgttcctggaacttttcttcatcaataaaccattaa

SEQ ID NO: 240719 - DNA, 613 bp, Unknown
  Bacterial polypeptide expressing nucleotide sequence isolated from the Sargasso Sea
atgactaaagttggagagcatataactctagacattattggaaccacaaaagaatatgatccttcagtttttgaaaaaataatttacgatatagctaaagctgctaaagttaccatacttaatatttccaaacataaatttgagcctcaaggttttacaattttagctttattagcagaaagccatattagttttcatacttttcctgagaaaggaattattagttttgatttttttacttgtggaaaaataaatccgtcagttgcagtggaaattatcaaaaaagaatttgaacatacaagaatagttaaaaaggaatttaatagagataccaagtctctttatcctgatatttacagctcaccaggtctacaaaaatcatatgtagttaataatgtgttagaagattttaaatcaaaagtaggtcaacatattgaaattctagaattggagcaatttggaaaatcactttttattgatggtgaaatccaagtagcaacaacagacgaacatttgtatagctcaacatttgtaggagcaggtttaagtctaaataaaaataatgagagagtagccattattggtggaggtgatggaggagttgccagagaat

SEQ ID NO: 240720 - DNA, 703 bp, Unknown
  Bacterial polypeptide expressing nucleotide sequence isolated from the Sargasso Sea
cctttatgatgatatttatagcaccccaggtcaaaagaaattttatgtggtcaaagatgttttagagaaattcacttctaaagttggtcaatttgttgaaataatggacctagaagagtttggtcatgcattgtttattgatcatgaaattcaagtcgctgaaaaagatgaaaaaatttatagcacaaacttttttaagtctagttatgatttaagtaaaaaaaataataacgttgcaataattggtggaggagacggaggtgtggctagagcttgtttagagaataatactgattacattgattggtttgaattagatccagagattgtagatgtttgcttccgtcacttaccaaaagtttgttcaaaagttaaaaaaagtaataaaattaagacgttctggggagatgcatttaaaagtataaaagaaattgaagactcaaaatacgataaaatttttgtagatttaaacgatgatcaatactgtattgacttagctaaaaaaaatatgaaaggtttaaaaagaatacttaaaaaaggcggtgtaatcactgctcaagtaggaagtcaggataaaaaacctaaacaagttgataactggtgtaaggttttgggtaaaagctttggaaacgttaaattatctggtgcttatatccctagttttgactgtaaatggaattttgcttcatctataatgaagtga

SEQ ID NO: 240721 - DNA, 720 bp, Unknown
  Bacterial polypeptide expressing nucleotide sequence isolated from the Sargasso Sea
gatgactaaagttggagaacatataactctagacattattggaaccacaaaagaatatgatccttccttctttgaaaaagtaattcatgatatagctaaaactgccaaagttaccattcttaatatttccaaatataaatttgaaccgcaaggttttacaattttagctttattagcagagagccatattagctttcatacttttccagaaaaaggcattattagctttgatttttttacatgtggaaaaataaatccatcagttgcagtggaaattataaaaaaggagtttgaacatacaagaatagttaaaaaagaatttaatagagatactaagtctctttatccagatatttacagctcaccaggtctacaaaaatcatatgtagtaaatgatgttttagaggactttaaatcaaaagtagggcaacatattgaaattttagaattggagcaatttggaaagtctctttttattgatggcgaaattcaagtagcaactacagatgaacatttgtatagctcaacatttgtaggagcaggtttagatttaaatcagaataatgagcgagctgctataattggtggcggagatggtggaattgcaagagaatgtatatccaaaaattttaattttatagattggtatgagttagatcctgaggttgtcgatgtatgtaataaacatcttggagatattggaaaaaaagcaactgaaaa

SEQ ID NO: 240722 - DNA, 259 bp, Unknown
  Bacterial polypeptide expressing nucleotide sequence isolated from the Sargasso Sea
aaatctttatttattgatggagaaatccaggtagctgcttcagatgaacacttatatagttctacatttgtgggggctggattaaaattaaataattctaacgaaagagctgctattattggaggaggagatggaggtgttgcaagagagtgtatatctaaaaaattcaattttattgattggtttgaacttgatccagaagtagtcgaggtttgtaataaacatcttggtgatattggaaaaaaagcaactgagaaaa

SEQ ID NO: 240723 - DNA, 647 bp, Unknown
  Bacterial polypeptide expressing nucleotide sequence isolated from the Sargasso Sea
aatggctaaaaaggtaggagaacatattactatagacattataggcaccaaaaaagagtatgccccatctttttttgagaaacttgtgtataaaattgcaaaaaaagcaaaagttacggtgcttgaaatatcaagacacagatttgaaccacaaggttttacactagtggcattattggcagaaagccatattagttttcatacttttccggaaaaaggaattataagttttgatttttttacttgtggcaaaatatctccttctgttgcaatagatatattaaaagaagaaattgaacataaaagaattgttaaaaaagaatttaatagagatacgattacattttatgatgatatttatagttcaacgggtttaaaaaaatattatattgtaaataatgtattagaagattttacttcaaaagtgggtcaacatatagaaatacttgatcttgaacaatttggaaaatctttatttattgatagtgaactacaagtggcagctagtgatgaacatttatatagctcaacttttgtgaattctagtttaaaacttaacaaagcaaaaaataaagctgccattataggaggaggcgatggtggggttgcaagagaatgtatttctaaagattttaattatattgatt

SEQ ID NO: 240724 - DNA, 508 bp, Unknown
  Bacterial polypeptide expressing nucleotide sequence isolated from the Sargasso Sea
aattcaggactgaaattaaattcttctaaggatagagctgcaattattggtggaggagatggtggtgttgcacgagaatgtatatctaaaaattttggatttatcgactggtttgaattagatccagaagttgttgaggtttgtgataagcatcttggaacaatcggacaaaaagctactgaaaagaattctgttaaatgtgtttggggagatgcatttgaaagtattaaaaatatagaaacagatacatacgataaaatttttattgatcttaatgatgaccaattttgtatagatcttgctgcaaaaaatatggatcaaataataagagtgctaaaacctaatggagtagtaactgcgcaggttggaagtcaagataaaagaccaaaacaggtcgaaaattggaaagatgtattcaataaaaactttggaaatgctacccttgatagagtttatattccaagttttgatagttcatggaatttttatacatctataaatcattaat

SEQ ID NO: 240725 - DNA, 782 bp, Unknown
  Bacterial polypeptide expressing nucleotide sequence isolated from the Sargasso Sea
agtagcaattgatattgtaaaaaaagaatttgaacataaaagaattgtaaaaaaagaattcaatagagataccagatctctttaccacgatatttatagctcacctggattacaaaaatcatatattgtaaatgaagttttagaagactttaaatcaaaggttggtcaacatattgaaattttagaattagaacaatttggaaagtctttatttattgatggtgaaatacaagtggcggcatcggatgaacatttatatagctcaacttttgttggagcaggacttaaattaaataaaaagaatgaaagagcagcaataattggaggtggtgatggtggtgttgcaagagaatgtatttcaaaaaagtttaattttatagattggtacgaattagatccagaagttgtggaagtttgtaataagcatcttggtgaaattggaaaaaaatctacagaaaagaattcagtaaaatgtgtatggggcgatgcctttgaaaacatcaagacagtaaacgaagatacatatgatcatatttttgtagatctaaatgatgatcaattttgtattgatcttgctgctaaaaatatggactctttagttagaattttaaaacctaaaggagtgattacggctcaagttggtagtcaagataaaaaacctcttcaagttgaaaattggttgaatgtttttaatcatcactttggaaataccaatttagctagagtttatatacctagttttgattgttcatggaatttttcctcatctattaatcattaat

SEQ ID NO: 240726 - DNA, 631 bp, Unknown
  Bacterial polypeptide expressing nucleotide sequence isolated from the Sargasso Sea
atgactacaaaagttggtgaacatattacacttgatataataggtactaaaaaagagtatgatcctgttttttttgaaaaattagtttacaagattgcaaaaattgcaaaagttaaagtattagaaatatctaaatataaatttgaaccacagggatttactctagttgcacttcttgctgaaagtcacatcagcttccatacctttcccgaaaaaggtattattagttttgacttttttacatgtgcaaatatttcaccttcagtagcaataaatgttattaaagatgaaattgaacatagtagaatagttaagaaggaatttaatagagatacagtggatctttatcatgacatttatagctcgccaggtttaaaaaagtcatacgtagttaataaagtattagaaaattttaaatcaaatgttggtcaacatattgagatattagaattagaacaatttggaaaagcattatttatagacaatgaaatacaagtagctgaaaaagatgaacatctttatagctctacttttgttaattctggtttagatttaaactctaataaggaaaaagctgcaataattggtggaggtgatggaggtgtggctagagagtgtatatctaaaaatt

SEQ ID NO: 240727 - DNA, 751 bp, Unknown
  Bacterial polypeptide expressing nucleotide sequence isolated from the Sargasso Sea
tttgcttgctgaaagccatataagctttcatacatttcctgaacatggaattataagttttgatttttttacttgtggaaaagtttcacctagcgtggcgctagatgtaattaaaaatgaaattaagtgcaaaagaattgttaaaaaatcatttgatcgtcatacaattgaaaattactttgatacctctagcacttcaggcatgcaaaaatcttatgtcgtaaaagatgttcttgaggattttgtatcaaaagttggtcaacatgttcaaattttggatctagaggaatttggtaaatctttatttattgataaagatttacaagtggcttcatgcgatgagcacttatacagttcaacttttgttaattcgggattaaaattaaatccatctaaagaaagagcagctataattggaggtggagacggtggagttgcacgtgaatgtatttccaaaaattttggatttatagattggtatgaattagatccagaagttgttgaggtatgtgataaacatcttggaacaattggacaaaaagctacagaaaaaaattctgtaaaatgcgtttggggagatgcttttgaaagcataaagaaaatagagacagatacttatgataaaatatacattgatttgaatgatgatcaattttgtattgatctagctgcaaaaaatatggatcaaataataagggtattgaaaccaaacggagtagtcactgcacaggtagggagtcaagataaaaga

SEQ ID NO: 240728 - DNA, 676 bp, Unknown
  Bacterial polypeptide expressing nucleotide sequence isolated from the Sargasso Sea
ggacaaaaaaaatattatgtagtaaaaaacgttttagaaaaatttacctcaaaagtaggtcaatttgtcgaaataatggatctagaagaatttggaaatgctttatttattgatcatgaaatccaagtatctgaaaaagatgaaaaaatttatagctcaaatttttttaaatcgagttacgatttgagtaaaaagaataataacattgctattattggtggaggggacggaggcgttgctagagcatgtttagaaaacaactcaaattacatagattggtttgaactagatcccgaaattgttgatgcctgttttaaacatttacctaaagtttgttctaaggttaagaaaagtaacagaattaaaactttttggggtgatgcatttaaaagtattaaagagattgaagactctaaatatgataaaatttttgttgatttaaatgacgatcaatactgtattgatcttgccaaaaaaaatatgaaaggtttaaaaagaatattaaaaaaaggtggtgtgattacagctcaagtaggtagccaagataaaaaacctaaacaagttgagaaatggtgtaatgttttagagaaaaattttggcaatgtaaaattatcaggagcttatgtccctagttttgactgtaagtggaattttgcatcttcagtgatgcgttaat

SEQ ID NO: 240729 - DNA, 1045 bp, Unknown
  Bacterial polypeptide expressing nucleotide sequence isolated from the Sargasso Sea
atggtaaaaaaagtaggagagcatgtcaccctagatataattggtacaaaaaaagaatatgaaccttctttttttgagggcttggttcataaaattgcagataaagcaaaagttacagttttaaatatagcaaaatataaatttgaaccacagggttttactttagtagcgttactggcagaaagccatatgagctttcacacttatccagaaaaaggaataataagttttgatttttacacttgtggaataatttctcctacagttgctttagatattttaaaaaaagaaattgatcataaaagaatcgtaaaaaaagaaattagtagggatacaatttcttactatcacgacattactagcactaaaggtttacaaaaaaattatttggtaaaagaagttttagaagatttcacatctaaagttggccagcatattgaaattcttgatcttgttgagtatggaaaatctttattcatagataatgatttacaagtagctgaaagtgatgaacatatttatagtggaacttttgtaaattcagctttaaaattaaacaaaagtaaagatagagcagcaattattggcggaggagatggaggagttgctagagaatgtatttcaaaaggatttggatttattgattggtatgagctagatccagaggtcgttgaagtttgtaaaaaacatattggatctattggtaaaaacgccactgaaaaaaattctgtaaaatgtgtttggggagatgcatttgaaagtattaaaaaagtcgaggatgatagttatgataaaatatttattgatttaaacgatgatcagttttgtatagatcttgcagctaaaaatatgaattcattagtaagaattcttaaacctgatggagtaataacagctcaagttggaagtaaagacaaaaaaccaaaacaagtggataattggctaaatgtatttaataaaaactttggcaatgctaccttagatagagtatatatcccaagctttgatagttcttggaatttttattcatcaattaaccattaat

SEQ ID NO: 240730 - DNA, 1042 bp, Unknown
  Bacterial polypeptide expressing nucleotide sequence isolated from the Sargasso Sea
atgacaaaagtaggcgaacatataactttagatataattgggactaacaaggaatatgatccttcagtatttgaaagagtaattcatgaaattgcaaaagctgcaaaggttactattttaaatatttctaaatataaatttgaaccacaaggttttacaatattagctcttcttgcagaaagtcatatcagtttccatacttttcctgaaaagggtattattagttttgatttttttacatgtggaaaggtaagcccatcagttgcaattgaaataattaaaaaagaatttgaacacactagaattgttaaaaaagaatttaatagagatacaaaatcactctatcatgacatttatagctctccaggtttgcaaaaatcttatgttgtaaatgatgttttggaggattttaaatctaaagtaggacaacatattgaaattttagatcttgagcagtttggaaaatcattatttatagatggtgaaattcaagttgctgcaacagatgagcacttgtatagttcaacatttgttggttcaggtttaaatctaaacaaagataatgaaagagcagctatcattggaggtggagatggtggtgttgcaagagaatgtatttctaaaaattttaattttattgattggtatgagttagatcaagaagttgtagatgtttgcaataaacatcttggtgatattggaaaaaaagctaccgaaaaaaattcagttaaatgtgtctggggagatgcatttgaaagtattaaatcagtttctgatgatacttacgatcatatctttgttgatcttaatgatgatcagttttgtattgatctagcagcaaaaaacatggactcattggtgagaatattaaaaccaaaaggagtaattacagctcaagttggtagtcaggataaaaaacctaagcaagttgataactggctaaatgtttttaaccaaaatttcggtaatgctaaattatctagagtttatataccaagttttgattgtgcttggaacttttcatcctcaataaatcattaat

SEQ ID NO: 240731 - DNA, 688 bp, Unknown
  Bacterial polypeptide expressing nucleotide sequence isolated from the Sargasso Sea
atgattaaagtaggggagcatgttactctagatataattggtacaaagaaagaatacgatgcatctttctttgaaggtttagttcataaaattgcagaaaaagccaaagtaacagttttaaatatagcaaaatacaaatttgaacctcaaggatttaccttagtagcattgttggcggaaagtcatattagttttcatacttatccagaaaaaggaatcattagttttgatttttatacttgtggaacagtcgcaccttcaattgcattagatgttataaaaaaagaaattgaacataaaagaataataaaaaaagaattaaatagagatacaatttctttttactatgacaacacaagtacaaaaggattaaaaaaaaattatctagtaaaagatgttattgaagactttaaatcaaaagtaggacagcacatagaaatattagatttagtagaatatggaaaatcattgttcatagatggtgatttgcaagtagcggagagcgatgagcatatatatagtggaacatttgtaaattctgcaatgaaattgaataaaagcaaagacagagcagcaattatcggtggaggcgatggaggagttgcaagagaatgtatagcaaaaggatttggatttattgattggtatgagttagatcctgaagttgttgaggtttgtaaaaaacata

SEQ ID NO: 240732 - DNA, 709 bp, Unknown
  Bacterial polypeptide expressing nucleotide sequence isolated from the Sargasso Sea
atgactaaagttggggagcatataacattagacattattgggacgaaaaaagaatatgatccgtcgttttacgaaaaattagtttataaaattgctaaaaaagcaaaagtcacagttttagaaatatccagatataaatttaaaccccaaggctttacattagttgctttattagcagaaagtcatattagttttcatacttttccagaaaatgggataataagttttgatttttttacctgtggaaaagtttctccttcgattgcaatagatataattaaaaaagaaattgaacataaaagaattgtaaaaaaagaatttaatagagatactatagctctatatcacgatatatatagctctccgggattacaaaaatcatatgtagttaaaaatgtacttgaggactttacttcaaaagtaggtcaacatattgagattttagatttagaacaatttggaaaatccttattcattgataatgaaatccaagttgcaactaaagatgagcatctttatagcggtacatttgttaatgccggattaaaactaaataaaaataaagaaacagcagctattattggtggtggagatgggggtgtagcaagagaatgtatatccaaagaatttggatacatagattggtttgagcttgatccagaagtagttgaagtttgtgaaaagcatcttgggttcaattggaaataaa

SEQ ID NO: 240733 - DNA, 1045 bp, Unknown
  Bacterial polypeptide expressing nucleotide sequence isolated from the Sargasso Sea
atgactacaaaagttggtgaacatattacacttgatattataggtactaaaaaagagtatgatcctgttttttttgaaaaattagtttacaagattgcaaaaattgcaaaagtaacagtattagaaatatctaaatataaatttgaaccacagggatttactttagttgcgcttctcgcagaaagccacatcagtttccatacctttccagaaaaaggtattatcagttttgacttttttacatgtgcaaaaatttcaccttccgtagcaataaatattattaaagaggaaattgaacacagaagaatagttaagaaggaatttaatagagatacagtggatctttatcatgacatttatagttcgccaggtttaaaaaagtcatacgtagttaataaagtgttagaaaattttaaatcaaatgttggtcaacacatcgagatattagaattagaacaatttggaaaagcattatttatagataatgaaattcaagtagctgaaaaagatgaacatctttatagctctacttttgttaattctggtttagatttgaactctaataaggaaaaagccgcaataattggtgggggtgatggaggtgtggctagagagtgtatatctaaaaattttggatttattgattggtatgaattagatcctgaagtcgtagatgtatgtgataaacatcttggaaaaattggtgataaagcaactgaaaagaattcagtaaaatgtgtttggggagatgcatttgagagcatcaaatcagtcaaagatgatacatatgatcagatatatgttgatttaaatgatgatcaatactgcatagatttggcctctaaaaatatgaattcacttgtaagaattttaaagccaaaaggagttattacagctcaggttggtagccaggataaaaaaccaaaacaagtagagaattggttaaacatatttaatgaaaattttggcaatactaaattatctagaatttatataccaagttttgattgttcctggaatttttcttcatcgataaatcattaga

SEQ ID NO: 240734 - DNA, 726 bp, Unknown
  Bacterial polypeptide expressing nucleotide sequence isolated from the Sargasso Sea
tatgagtaaagtgggggagcacgttactttagacattattggaataagcaaagaatatgaacctaaattctttgagaagttagtttataaaattgcaaaaaaagcaaaggtaacagtactagaaatttcaaaatataagtttgaacctcaaggttttactttggtggctttattagcagaaagtcatatcagctttcacacttttcctgaaaaaaatattattagttttgatttttttacatgtggaaaagttagtccaacagttgcattagatattttaaaaaaagaaattaagcacaaaagaattattaaaaaggaatttaatagagatacagttagttattacgatgacatttatagctctccaggtcttaagaagttctatatagtaaaaaatgttttagaagattttacatcaaaagtaggtcaacatattgaaattttagatttagaacaatttggaaagtctttatttattgataatgaacttcaagtagctgaaagtgatgaacatttatatagttccacatttgttaactctggtattaaacttaaccctgcaaaagacaaatcagcaataattggtggcggagacggtggagttgctagagaatgtatttcacaaggatttaatcttatagactggtatgaacttgaccctgaagtagtgcatgtttgtgaaaaacatatttcaaaaatggagaaaaagctactgctaaaaattca

SEQ ID NO: 240735 - DNA, 1042 bp, Unknown
  Bacterial polypeptide expressing nucleotide sequence isolated from the Sargasso Sea
tatgacgaaggttggggagcacgtcactttagatattataggtactgaaaaagagtacgaaccaaaattctttgaaaaactggtctataagatatcaaaaaaggcaaaagtaactgttttagagatttcaaaatacaaatttgaaccacaaggcttcacacttgtagcgttattggcagaaagtcatattagttttcatactttccctgaaagaggaattataagttttgatttttttacatgtggaaaagtaaatcctaatgttgcctatgatattttaaaaaaagaaattaaacataaaagaattgtaaagaaagagtttaatagagatacaataagttattatgatgatatttatagttcgccgggtttaaaaaaatattacatggtaaaagatgttctggaaaattttacatcaaaagtaggtcaaaacattgaaattttagatttagaacaatttggtaaatctctttttatagacggtgaactacaagtggcagaaaatgatgaacacttgtatagctccacatttgttaactctggtttaaaactcaatccatcaaatgataaaaccgcaatcattggtggaggggatggaggggttgcgagagaatgtatctctaaaggatttaaattaattgattggtatgagctagatcctgaagttgtgacaatgtgtgaaaaatatttatctaaggtaggtaagaaagcgaccacaaaaaatcatgtgcaatgtgtatggggagatgcatttgaaagtattaaatcagttgaagataataagtatgataaaatttatgtggacttaaacgatgatcagtattgtattgatctggccgcaaaaaatatcaaatctttaaaaagaattcttaagccaaatgggacaataaccgcacaagttggaagccaagataaaaaacctaaacaagttgataaatggttaaatctttttgaaaaaagttttggcaatacgtcattagatagagtttatattccgagctttgattgttcttggaattttgcatcttctctaaatgaataa

SEQ ID NO: 240736 - DNA, 520 bp, Unknown
  Bacterial polypeptide expressing nucleotide sequence isolated from the Sargasso Sea
tctacattcgttggctctggtttaaatttaaataaagataatgaaagagctgctatcataggtggtggtgatggtggagtagcaagagaatgtatttcaaaaaattttaactttatagattggtacgaacttgatcctgaagttgtagatgtttgtaataaacaccttggagatattggaaaaaaagcaactgaaaaaaattctgtaaaatgtgtttggggtgatgctttcgaaagtattaaatcagttggtgatgatacttatgatcatatttttgttgatctaaatgatgatcaattttgtatagatttagctgcaaaaaatatggactcattagtcagaatattaaaacctaagggagtaattacagctcaagtagggagtcaggacaaaaaaccacaacaggttgaaaattggctgaatgtttttaaccaaaattttggaaacgcaaaattagcaagggtttacataccaagctttgattgctcttggaatttttcttcgtcaattaatcattaat

SEQ ID NO: 240737 - DNA, 622 bp, Unknown
  Bacterial polypeptide expressing nucleotide sequence isolated from the Sargasso Sea
tgtaggtcaacatattgaaattttagatttagaacaatttggtaaatctttattcatagatagtgagatacaagttgctgcaactgacgaacatttatacagctctacttttgttggttctggtctaaatttaaataaagataatgacagagcagcaatcattggcggtggtgatggtggagtagcaagagaatgtatttcaaaaaaattcaattttattgattggtatgaattagatccagaggttgttgatgtttgtaaaaaacatcttggaaatattggaaacaaagcaactgagaaaaattctgtaaaatgtgtttggggagatgcatttgaaagtattaaatcagtaagtgatgatacttatgatcatatttttgtagatcttaatgatgatcaattttgtatagatttagcagcaaagaatatggactcgcttgtaagaattttaaaaccaaaaggagttattaccgcacaagtcggtagtcaggataaaaaaccacatcaggttgaaaattggctaaatgtatttaatcaaaattttggaaatgcaaaattatcaagagtttatatacctagttttgattgttcatggaatttttcttcttcaataaatcattaa

SEQ ID NO: 240738 - DNA, 780 bp, Unknown
  Bacterial polypeptide expressing nucleotide sequence isolated from the Sargasso Sea
aatgacaaaagttggcgaacatataactcttgatataattggcacaaataaagaatacgatcctaatttctttgaaaaattggtttataaaatagcaaaagctgcaaaagtaactgttctagaaatttcaaaatataagtttgaacctcaaggttttacacttgtagcacttcttgcagagagccatataagttttcacacttttccagaaaagggtataattagctttgatttctttacgtgtggaaaaatttcgccttcagttgcattgaaagttattaaagaggaaattcaacatacaaatataattaaaaaagaatttaatagagatacaattgatctttaccaagataattatagctcacctggtttaaataaagcatatgtagttaataatgttctagaaaattttaaatctaaagttggtcaatatattgaaattcttgatttggagcagtttggaaaagcactatttattgataacgaaatacaagtagctgaaagtgatgaacatctttatagctcaacatttgttaactctggtcttaaattgaatcctaaaaaagaaaaagcagcaattattggtggaggagatggtggagttgcaagagaatgtatttcacaaaactttggttttatagattggtttgaattggatcctgaggtagttgatgtatgtgataaacatttaagtaaaataggtgaaaggtctactgaaaaaaattcagtaaaatgtgtatggggagatgcatttgaaagtattaaatcagttaatgatga

SEQ ID NO: 240739 - DNA, 1018 bp, Unknown
  Bacterial polypeptide expressing nucleotide sequence isolated from the Sargasso Sea
aatgattaaagtaggtgagcacataactatagatttcttaggtgttaaaaaagattattcaccagagttttatgaaaaagtaatttataaaattgctaaagctgcaaaagttgaaatattaaatgtttcatcacataaatttgaacctcaaggatttactctagttgctttactagcagaaagtcactttagctttcatacatttccagaaagaggggtgattagttttgatttctttacatgtggtaaagttaatccaaaagttgctcttaaaatacttagaaaagaaatcgatcatactagagtagttacccatgcatttgatagaagtagtgtaggcctatacgatgacatttacagtactccgggtcaaaagaaattttacgtagttaaagatgttttagaaaaatttacttctaaagtaggtcaatttgtagaaataatggatttagaagaatatggacatgctttatttattgatcatgaaatacaagtcgctgaaaaagatgaaaaaatttatagttcaaacttctttaaatcgagctacgatctaagcaaaaaaaataataatgtagcaattattggtggtggagacggaggagttgcacgagcttgcttagaaaataattctaattacatagactggtttgaacttgatccagaaatagttgatgtttgttaccgtcatttaccaaaagtttgttccaaagtaaaaaaaagtaataagataaaaacattttggggggatgcatttaaaagcataaaagaaatagaagactctaaatatgacaaaatttttgtagatttaaatgatgatcaatattgtatcgatttagctaaaaaaaacatgaaaggtcttaaaagaattctgaaaaaaggcggagttattaccgcacaagtaggcagtaaagataaaaaacctaaacaagtagataattggtgcaaggtgctggataaaagcttcggaaatgttagggtttcgggaacgtatatacctagttttgactgtaattggaat

SEQ ID NO: 240740 - DNA, 792 bp, Unknown
  Bacterial polypeptide expressing nucleotide sequence isolated from the Sargasso Sea
tttcaccatcagttgcattgaaaattattaaagaggaaattcaacatacaaatataattaaaaaagaattcaatagagatacaattgatctttaccatgataattatagctcacccggattaaataaagcatatgtggttaataaagttctggaaaattttaaatctaaagttggtcaatatattgaaattcttgatttggagcaatttggaaaagcattatttattgataatgaaatacaagtagcagaaagtgatgagcatctttacagctcaacatttgtaaattctggtctcaaattaaattcaaaaaaagaaaaggcagcaattattggtggaggagatggtggagttgcaagagaatgtatttcacaaaactttggttttatagattggtttgaattggatcctgaggtagttgatgtatgcgataaacatttgagcaaaataggagaaaaggctactgaaaaaaattcagtaaagtgtgtatggggagatgcttttgaaagcataaaatctgttaaagatgatacgtacgatcaaatatttgttgatttaaatgatgatcaattttgtatagatcttgcagcaaaaaatatggactctttagtaagaatattaaaacctaaaggagttattacagcgcaggttggaagccaagataaaaaaccaaaacaagtagataattggttaaatgtttttaataaaaattttggaaatacgcaactttcaagagtttatatcccaagttttgattgtgcttggaacttttcttcatcaataaatcattaat

SEQ ID NO: 240741 - DNA, 553 bp, Unknown
  Bacterial polypeptide expressing nucleotide sequence isolated from the Sargasso Sea
caagtggctgaaaaagacgaacatctatatagttcaactttcgtaaattctggtattaaacttaatccaaacaaagataaatcagcaattattggtggtggagatggtggtgtagcaagagaattaatttcaaaaggttttaacttaattgattggtatgaacttgatccagaggttgtaaaagtttgcgaaaaacatttatctaaaattggagaaaaagctacaactaaaaattctgttaagtgtgtttggggtgacgcttttgagagtattaaaaaagttgaggataataaatatgataaaatttttgttgatttgaatgatgatcaatattgtatagatcttgcagcaaaaaacataaaatctctaaaaagaattttaaaatctgatggaacaattacagcacaagttggtagccaagataaaaaacctaagcaagtagaaaaatggttaaatttgtttcaaaaaagctttggtaatacatccttagatagaatctatataccaagctttgattgttcttggaattttgcatcttcaataaataaataat

SEQ ID NO: 240742 - DNA, 871 bp, Unknown
  Bacterial polypeptide expressing nucleotide sequence isolated from the Sargasso Sea
ttggctgaaagtcatattagttttcatacgtttccagaaaaaggaattataagttttgacttttttacatgtgcaaaaatttctccctctattgctttagatgttattaaagatgaaatagaacattcacaaataattacaaaaaaatttaatagagatacggtagatctctatcatgacaattatagttcacctggtttaaaaaaatcatatgtagtaaataatattattgaaaattttaagtcaaaggtaggccaacatattgagatactggaattagaacaatttggaaaagctttgtttatagataatgaaattcaggtagcagaaagagatgaatatctttatagctctacttttgtaaaatcaggacttgacttaaattctagtaaagaaaaagcagctattataggtggtggagatggaggtgtagcaagagaatgtatatcaaaaaattttagttttattgattggtatgagctggaccctgaagtagttgaggtttgtgataagcatctaggtaaaattggtgagaaagctacagagaaaaattcagtaaaatgtatttggggagatgcatttgaaagcattaaaacagttaaagatgatacatatgatcagatatatgttgatttaaatgatgaccaatactgcatagatttagctgctaaaaatatgaattcacttgtaagaattttaaaaccaaaaggagtcattacagctcaggttggaagccaagataaaaaacctaaacaagtagagaattggctaaacatatttaatgaaaattttggtaatactaaattatctagagtttatataccaagttttgattgttcttggaatttttcttcatcgataaatcactaga

SEQ ID NO: 240743 - DNA, 619 bp, Unknown
  Bacterial polypeptide expressing nucleotide sequence isolated from the Sargasso Sea
tatgacaaaagtaggggagcacattactttagatattattggtaccaagaaagagtattctccgtctttctatgagaagcttgtctataaaatagcaaaaaaagcaaaagttacagtattagaaattgctaaatataaatttgaaccacagggttttacattagttgcattgttagcagaaagtcatattagttttcatacatttccagaaaaaggcattataagctttgatttttttacttgtgcaaaaatatcacctgcggttgctttagatattattaagaaagaaattggacacactagaatagtaaaaaaagaatttaacagagattccctaggtctttacgatgatatatatagctcgcctggtcaaaaaaaatattatgtagttaaaaaatatttagaaaattttacttctaaagtgggccaacacattgaaattatagaactagaagagtttggaaaatctttatttatcgacaatgaactacaagtagcagaaaaagacgaacatctttacagttcaacttttgtaaattccggcatgaaattaaataaaaacaaagataaagctgctattattggaggaggagatggtggtgtcgccagagagtgtatt

SEQ ID NO: 240744 - DNA, 505 bp, Unknown
  Bacterial polypeptide expressing nucleotide sequence isolated from the Sargasso Sea
atgacaaatattacaacatggatagatgaatatcataaaggctcaagattcggcctaaatggggaaattctaattaaaaaaacctcaaaatatcaagaaattattgttattgaaaatgaatattatggtaaagctttaatgttagatggttgctggatgacatcactaaaagacgagaaatattatcatgagtgtcttgtgcatccagcattaagtagcattgacgaaaaatctaatgtactaattattggtggaggagacggcggtacagcaagagaatgcgttaaatattctcaaatatcaaaaattgatctagtagaaattgatgaggaggtaatcaaaatatctaaaaaatttttaaaagaaattggaggcgaagcatggaatgacaaaagattagaaatacatgtcgatgatggtgctaaatgggtaaaaaaaacaagagataatttttacgacgttatttttatagattgttcagatccctcagaattttcaaatttat

SEQ ID NO: 240745 - DNA, 1006 bp, Unknown
  Bacterial polypeptide expressing nucleotide sequence isolated from the Sargasso Sea
ttgggaaccacaaaagaatatgatccttcagtctttgaaaaagtaattcacgacatagctaaagctgccaaagttaccattcttaatatttccaaatataaatttgaaccccaaggttttacaattttagctttattagcagagagccatattagctttcatacttttccagaaaaaggcattattagctttgatttttttacatgtggaaaaataaatccgtcagttgcagtggaaattatcaaaaaagaatttgaacatacaagaataattaaaaaagagtttaatagagataccaagtctctttatccagatatttacagctcaccaggtctacaaaaatcatatgtagtaaatgatgtattagaggactttaaatcaaaagtagggcaacatattgaaattctggatttagaacaattcgggaaatctcttttcattgatggcgaaattcaagtagcaactacagatgaacatttgtatagctcaacatttgtaggagcaggcttaaatctaaataaaaataatgagagagcagctattataggtggaggtgacggaggagttgccagagaatgcatatcaaaaaattttaactttattgattggtacgaattagatccagaggttgttgatgtgtgtaataaacatcttggagatataggaaaaaaagcaactgaaaaaaattccgtcaagtgtgtttggggagacgcttttgagagcattaagtctgtgagtgatgatacttacgatcatatttatgtagatttaaatgatgaccaattttgcattgatttagcatcaaataacatggactctttagttcgaattttaaaaccaaaaggagttatcactgcacaagttggtagccaagataaaaaaccacagcaggttgaaaattggttaaatgtttttaatcaaaattttggaaatacaaatttatcaagagtttacatacctagttttgattgttcttggaatttctcttcttcaataaaccattaat

SEQ ID NO: 240746 - DNA, 817 bp, Unknown
  Bacterial polypeptide expressing nucleotide sequence isolated from the Sargasso Sea
ttgatttttttacatgtgggaaaaataagtccatcaattgcaatcgatattgttaaaaaagaatttaagcataaaagaattgttaaaaaagaattcaatagagacactagagctctatatcatgatatttatagttcaccaggtcttcaaaaagcatatgtagttaatgatgttttggaagactttaaatctaaagttggtcaacatattgaaattttagatcttgaacaatttgggaaatctttatttattgatggagagatacaagtggctgcttctgatgagcatctttatagttcaactttcgttggatcaggattaaatttacaaaaaaacaatgaaagagctgccataattggtggtggagatggtggtgttgctagagaatgtatttcaaaaaaatttaattttatagattggttcgagcttgatcctgaagttgttgaggtttgcaataaacatcttggagatataggtaaaaaagcaacagaaaaaaattcagttaaatgtgtttggggggatgcatttgaaagtattaagactgtcaaagatgatagttatgatcatatatttgtagatttaaatgatgatcaattttgcatagatctagccgcaaaaaatatggactcgcttgttagaattttaaaaccaaagggtgtaattactgcacaggttggaagccaggataaaaaaccacaacaggttgaaaattggcttaatgtttttcatcatcactttggtaatactaaattatcaagggtttatataccaagttttgattgttcatggaatttttcatcatcaataaatcattaat

SEQ ID NO: 240747 - DNA, 706 bp, Unknown
  Bacterial polypeptide expressing nucleotide sequence isolated from the Sargasso Sea
ggcataatacaaaccaccgagagggatgaattttcttatcacgagatgttggctcacgtcccaattatggaccatggtaacgtgaaaaaagtgcttattattggagggggtgatggtggtgtactaaaagaagtactgaagcacaaaaaaatagagagggtcacccttgttgaaattgatgcaagagtaattgagctgtgcaaattacatctgccaagtgttaattccggagcttttgagagttcgcgtgttgatattttaattgaaaatggctttgattttgtctcaactaaccgtaatttatttgacttaattatagttgattctacagacccttccccttcaagcaaattgcttttttcgaggaagttctttgagagttgtcaagcgtgtctagcgcctaaaggtatttttgtaaaccaaaatggtgtgccatttcttcaaggttatcaatttaaaaatactagtgatataattcagcatatttttgtttatccacgtttctattttgtcgcggtgccaacctatgttggaggacatatggccttgggacatttttccgatagtaactatggtaatgaaggcattgataaaataattcgtcgatttcaacaaacagagttggatacttgttactacaacccagatattcaccagagtgctttcgctgctccaaattttatatctaatttagtttataaataat

SEQ ID NO: 240748 - DNA, 1039 bp, Unknown
  Bacterial polypeptide expressing nucleotide sequence isolated from the Sargasso Sea
atgaaagttggtgaacatataacacttgatattataggcactaaaaaagagtatgatcctgttttttttgaaaaattagtttacaaaattgctaaaattgcaaaagtaaccgtattagagatatcaaaatataagtttgaaccacaaggatttactctagttgcacttcttgcagaaagtcacataagttttcatacatttccagaaaaaggtattattagtttcgatttttttacatgtgcaaaaatttcaccttctgttgctttggaagtgattaaagatgaaatagagcatacaaatataattaaaaaagaatttgatagagatacagtagatctttatcatgataactatagttcacctggtttaaaaaaatcatatgtagtaaataatgttattgaaaattttaagtcaaaagtaggtcaacatattgagatactagaattagaacaatttggaaaagcgttgtttatagataatgaaattcaagtagcagaaaaggatgagtatctttatagctctacttttgtaaaatcaggacttgacttaaattcaagtaaagaaaaagtagctattataggtggtggagatggtggtgtagcaagagaatgtatatcaaaaaattttagttttattgattggtatgaattagacccagaggtagtagaagtttgtgataagcatctaggcaaaataggcgagaaggctacagagaaaaattcagtaaaatgtgtgtggggagatgcatttgaaagcatcaaatctgtcaaagatgatacatatgatcagatatacgttgatttaaatgatgatcaatattgtattgatttagctgctaaaaatatgaattcacttttaagaattttaaagccaaaaggagtcattacagctcaagttggcagccaagacaaaaaaccaaaacaagttgaaaattggttaaatatttttaatgagaactttggcaatactaaattatctagagtttatataccaagttttgactgctcttggaatttttcatcttcaataaaccattaga

SEQ ID NO: 240749 - DNA, 1042 bp, Unknown
  Bacterial polypeptide expressing nucleotide sequence isolated from the Sargasso Sea
atgattaaagtaggggagcatattattttagatattataggcactacaaaagagtatgatccttcagtttttgaaaaagtcataaataaaattgctaaagcagcagatgtaactatccttaatatttctaagtataaatttgaacctcagggctttacaattttagctttattagctgaaagtcacatcagctttcatacatttccagaaaaaggaataattagttttgatttttttacttgtggaaaaataaatccatcagtggcaatagatattgttaaaaaagaatttgaacataggcgtatagttaaaaaagaatttaatagagatacaagatctctttaccacgatatctatagttcaccgggattacaaaaatcgtatgttgtaaatgaagttttagaagattttaaatcaaaagttggtcaacatatagaaattttagaattggagcagtttggaaaatctttatttattgatggtgaaattcaagtagctgcttcagatgaacatttgtatagctcaacttttgttggtgctggtttaaaattaaacaaaaaaaacgagagagctgcaataattggtggtggggatggtggtgttgcaagagaatgtatttcaaaaaagtttaactttatagattggtatgaattagatccagaagttgttgaagtttgtaacaaacatcttggtgatataggaaaaaaagctacagaaaaaaattctgtaaaatgtgtctggggtgatgcttttgaaagcataaaaacagtgaacgaagatacatatgatcatatttttgttgatttaaatgatgaccagttttgcattgatctcgctgcaaaaaatatggactctttggtaagaatactcaaacctaaaggagttattaccgctcaagttggcagccaagataaaaaacctcttcaagttgaaaattggttaaatgtatttaatcatcattttggaaatactagtttatctagagtttacatacctagttttgattgttcctggaatttctcatcatcgataaatcactaat

SEQ ID NO: 240750 - DNA, 1042 bp, Unknown
  Bacterial polypeptide expressing nucleotide sequence isolated from the Sargasso Sea
atgacaaaagtaggggagcacattactttagatataattggtactaataaagagtatgagccaaagttttttgaaaaattagtttataagattgcaaaaaaagcaaaagttacagttttaaatatatcaaaatataaatttgagccacaggggtttactcttgtagctttactagcagaaagtcatattagttttcatacttttccagaaaaaggaataatcagttttgatttttttacatgcggtaaagttaatcccaatgtctcgatagatatattgaaaaaagaaataaaacataaaagaattgtaaaaaaggagtttaatagagatacaatagagtactatgatgatatttatagctcacctgggttaaagaaattttatattgtaaataacgttttggaagattttaattctaaagtaggtcaacatatagaaattttagaattagaacaatttggtaaatctttgttcattgataatgaacttcaagttgctgaaaaagatgaacatttatatagctctacatttgttaactctggactaaagttaaatcctgacaaaaataattcagcaataattggaggtggagacggaggagttgcccgggaatgtataaaccaaggatttaattacattgattggtatgaattagatcctgaagtagtaactgtatgtgagaagcatctttctaaaataggaaaaaaagctacatctaaaaattctgttaagtgcgtatggggagatgcgtttgaaagtattaaaaatattgaagataataaatatgataaaatctttgtagatctaaatgatgatcagtactgtattgatttagctgcaaaaaatattaattctttaaaaagaattttaaaaccgcaaggaacaattactgctcaagtaggaagccaggataaaaaaccaaaacaagttgaaaaatggctacaattatttgaaaagaactttgccaatacatctcttgatagaatttatataccaagttttgattgctcttggaattttgcctcttcaattaataaataat

SEQ ID NO: 240751 - DNA, 820 bp, Unknown
  Bacterial polypeptide expressing nucleotide sequence isolated from the Sargasso Sea
aagctttgatttttttacttgtggaaaggtaaaccctaaagttgctcttaaaattttaagaaaagagatagaacacaaaagggtagtgaccaatgcttttgaccgaagcagcataggtctttatgatgatatttatagcactccaggtcaaaagaaattttatgttgttaaagatgttttagaaaaatttacttctaaagttggtcaatttgttgaaataatggatttagaagaattcggacacgctttgtttattgatcatgaaattcaagtagctgaaaaagatgaaaaaatttatagctcaaacttttttaaatccagctatgatttgagtaaaaaaaataataatgttgcaataattggcggaggtgatggaggtgttgctagagcatgtttagagaataattctaattacatcgattggtttgagttagatcctgagattgtggatgtttgttatcgccatttacctaaagtttgctccaaagttaaaaaaagcaataaaattaaaactttctggggagatgcttttaaaagcataaaagagatagaggactcaaaatacgataaaattttcgtagatttaaacgacgatcaatattgcattgatttggcaaaaaaaaatatgaaaggtttaaaaagaattcttaaaaaaggtggcgtgataactgctcaagttggaagtcaggataaaaagcctaaacaagttgataactggtgtaaggtattaggaaaaagctttggaaacgttaaagtatctggggcttatatccctagttttgactgtaaatggaattttgcttcatctataatgaagtaa

SEQ ID NO: 240752 - DNA, 707 bp, Unknown
  Bacterial polypeptide expressing nucleotide sequence isolated from the Sargasso Sea
tatggttaaagtcggtgaacacataacaattgattttcttggtgtaaaaaaagattacacacctgaattttacgaaaaaatcatatacactattgctaaagcagctaaagttgaaattttaaatgtagcttctcaccgttttcaaccacaaggatttacgttggtagctttattggctgaaagtcattttagtttccatacattcccagaaaaaggagtaataagttttgatttttttacttgtggaaaagttaatccaaaagttgccttaaaaattttaaggaaagaaattagtcacgacagggttgttacaaacgcatttgatagaagcagtatcggactatatgacgatatttatagcactccaggtcaaaaaaaatattatgtagttaaaaatgttttagaaaaatttacttcaaaagtaggccaatttgttgaaataatggatctagaggagtttggtcatgctttatttattgatcacgaaatacaggttgccgaaaaagatgaaaaaatttacagctcaaatttttttaagtccagttatgacttaagtaaaaaaaataataacgttgcaattataggaggaggagatggcggtgttgctagatcatgcttagacaataattctaactttattgactggtttgagctcgaccctgaaatagttgacgtatgctatagacatttacctaaagtatgttcaa

SEQ ID NO: 240753 - DNA, 1042 bp, Unknown
  Bacterial polypeptide expressing nucleotide sequence isolated from the Sargasso Sea
atgacaaaagtaggcgaacatataactttagatattattggaacatttaaggaatatgaccccaaattttttgaaaaacttgtttataggattgctaaactcgccaaagttactgttttggaaatatcaaaatataaatttgagcctcaaggttttacattagttgctcttttggctgaaagtcatataagttttcatactttccctgaaaaaggaattattagttttgatttctttacgtgtgcaaatgtttcaccttcagttgcaataaatgtaattaaagaggaaattgaacatacacacataattaaaaaagaatttaatagagatactgttgacttgtaccacgacaattatagctcacctggattacgtaaatcatatgtagttaacaaagttttagaaaactttaagtctaaagcgggtcagtatgtggaaattttagaattagaacaatttggtacatctctttttatagataatgaaattcaagtagctgaaagtgatgagcatttgtacagttcaacatttgtaaactcaggattaaaattaaactcaaataaacaaaaagctgcaattataggcggcggcgacggaggtgttgcaagagaatgcatttcacaaaattttggttttattgattggtatgaattagatcctgaagtagtagaagtttgcgataaacatttaagtaagattggtgaaaaagcgtcagaaaaaaattccgttaaatgtgtttggggcgatgcatttgaaagcataaaatcagttaaagacgatacatatgatcaaatctatgtagatcttaatgatgaccaattttgtatagatttagccgcaaaaaatatggaatccttagttagaattttaaaaccaaaaggtgttattacagcgcaagtaggaagtcaggacaaaaaacctaaacaagttgaaaattggatgaatgtatttaaccacagttttggtaatacaaaattatctagaatttatataccaagttttgattgttcttggaatttttcctcttcaattaaccattaat

SEQ ID NO: 240754 - DNA, 789 bp, Unknown
  Bacterial polypeptide expressing nucleotide sequence isolated from the Sargasso Sea
tttggtatttgagagagtaatttacgatatagctaaagctgctaaagttaccatacttaatatttctaaatataaatttgaaccccaaggttttacaattttagctttattagcagaaagccacattagtttccacacttttcctgagaaaggaattattagctttgatttttttacttgtggaaaaataaatccatcagttgcagtggaaattataaaaaaggagtttgaacatacaagaatagttaaaaaggaattaaatagagatactaagtctctttatcctgatatttacagttcaccaggtattcaaaaatcatatgtggtaaacgatgtactggaagactttaagtcaaaagtaggtcaacatatcgaaattctagaattggagcaatttggaaaatctctttttattgacggtgaaattcaagtagcagctacagatgaatatttgtatagctcaacatttgtaggagcaggtttaagtctaaacaaaaacaatgaaagagcagctattattggtggaggtgatggaggggttgcaagagaatgcatatcaaaaaattttaattttattgattggtacgaattagatccagaggttgttgatgtatgtaataaacatcttggagatataggaaaaaaagcaactgaaaaaaattctgttaagtgtgtctggggagatgcttttgaaagcattaagtctgtgagtgatgatacttataatcatatttatgtagatttaaatgatgaccaattctgcattgatctagcatctaaaaacatgga

SEQ ID NO: 240755 - DNA, 533 bp, Unknown
  Bacterial polypeptide expressing nucleotide sequence isolated from the Sargasso Sea
aaaaatttatagttctaatttttttaaatctagctatgatttaagcaaaaagaattcaaacgttgctattataggaggaggcgatggtggtgtagcaagagaatgcttggaaaataatgcaaactatatagactggtatgaattggatccagagattgttgagacttgttttaaacatcttccaaaagtttgttctaaagttaagaaaagtaataaagttaaaactttttggggagatgctttcgagagcattaaatcagttgaagactcgaaatacgataaaatttttgtagatttgaatgatgatcaatattgtattgatcttgcaaaaaaaaacatgaaaggtcttaaaagaattcttaaaaaaggtggagttattacagcccaggtaggtagtaaagataaaaagccaaaacaagtagaaaattggtgcaaggtattagataaaagctttggcaatgtaaaagtctctggtgttcatattccaagttttgactgcaattggaactttgcatcttctgtgatgaaataac

SEQ ID NO: 240756 - DNA, 748 bp, Unknown
  Bacterial polypeptide expressing nucleotide sequence isolated from the Sargasso Sea
atgactaaagttggagaacatattaccttagatataataggcatagaaaaggagtatgatcctgtcttctttgaaaaattagtttataaaattgctaaaatagcaaaagttactgtactccaaatatcaaaatataagtttgagcctcaagggtttactttagttgcattattggcagaaagtcatattagttttcatacatttcctgaaaaaggagttattagttttgatttttttacatgtgcaaaaatttctccttctgtcgctttagaggttattaaagatgaaattgaacatactcatataattaaaaaacaatttaatcgagataccgtagacctctatcatgataattatagttcaccaggtttaaaaaaatcatatgttgtaaataaagtgttcgaaaactttaagtcaaaagttggtcaacatattgagatattagaattggaacaatttggaaaagcattatttatagataatgaaattcaagtagcagaaaaagatgagcatctttatagttctacatttgtaagctcaggactaagtttaaactctaataaagaaaaagctgctattattggtggaggagatggaggagttgctagagaatgtatatcaaaaaattttggatttatagattggtacgaattagatcctgaagtagtagaggtttgcgacaaacatcttggaacgattggagataaggctactcgaaaaaaattcagtaaaatgtgtatggggtgat

SEQ ID NO: 240757 - DNA, 1042 bp, Unknown
  Bacterial polypeptide expressing nucleotide sequence isolated from the Sargasso Sea
atgagtaaagtaggcgagcatattaccttggatattataggaacaacaaaagagtatgagccaagcttttttgaaaaattggtttataaaattgcaaaaaaagcaaaagtaacagttttagaaatatctaagtataaatttgaaccacaaggctttactatagttgctcttttagcagaatctcacattagttttcacacatttccagaaaaagggataataagttttgatttttttacttgtggaaaaattaatccaattgttgctttagatgttttgaaaaaagaaattaaacacaaaagaattattaaaaaagaatttaacagagatgcagttgattattatgacgatatatatagttcacgaggccttaaaaaattttatttagtaaaggaggtgcttgaagattttagatctaaagtaggtcaacatgtgcaaatattagaattagaacagtttggcaaatctctatttattgacaatgaacttcaagtagcggaaaaagatgaacatctttatagttcaacatttgttaactcaggattaaaattaaacccggaaaaaaacaattcagcaattattggtggtggtgatggtggtgttgcaagagaatgtataagtaaaggatttaattacattgactggtacgagcttgacccagaggtagttgatgtatgtgaaaagcatctaagcaaagttggtcagaaagcaactaaaaaaaattctgtaaagtgtgtttggggtgatgcattcgaaagtattaaaaaagtagaggacagcaagtatgataaaatttttgtggatttaaatgatgatcagtactgtatagatttagcagcaaaaaatataaattctttaaagagaattttaaagcctaatggtacgataactgctcaagttggtagccaagacaaaaaaccaaaacaagtcgacaaatggttaaatttgtttgaaaaaagttttaaaaatacatccctagatagaatttatattccaagctttgactgttcttggaattttgccacctcaataaacaaataat

SEQ ID NO: 240758 - DNA, 709 bp, Unknown
  Bacterial polypeptide expressing nucleotide sequence isolated from the Sargasso Sea
atgacgaaggttggggagcacgtcactttagatatcataggtactgaaaaagagtacgaaccaaaattctttgaaaaactagtctacaagatatcaaagaaagcaaaggtaactgttctagagatttcaaagtataaatttgagccacaaggcttcactcttgtagctttattagcagaaagtcatatcagctttcatacttttcccgaaagaggaattataagttttgatttttttacgtgtggaaaagtaaatcctaatgttgccttcgatattttaaaaaaagaaattaagcataaaagaattgttaaaaaagaattcaatagagatacaataagttattatgatgatatttatagctcaccaggtttaaaaaagtattatatggttaaagatgttttggaaaactttacatcaaaagtaggtcaaaacattgaaattttagatttagaacaatttggcaaatctctatttatcgatggtgaacttcaggtggcagaaaatgatgaacacttgtatagctcaacatttgtaaactctggtttaaaactgaatccatcaaatgataaaactgcaattattggcggaggagatggaggcgtagcaagagagtgtatatctaagggttttaaactaattgattggtatgagttagatcccgaagttgtaacaatgtgtgaaaaatatttatctaaggtaggtaagaaag

SEQ ID NO: 240759 - DNA, 837 bp, Unknown
  Bacterial polypeptide expressing nucleotide sequence isolated from the Sargasso Sea
catgaaaaaagttggggagcacgtcactttagatattattggtacagaaaaagaatacgagccgaaattctttgaaaagctagtctataagattgcaaaaaaagcaaaagtaacagttttggaaatttcaaaatataaatttgaacctcagggcttcacactagttgctttattagcagagagtcatattagttttcatacatttccagaaaaaggcattataagttttgattttttcacatgtggcacagtaagtccaaatattgctctagatattttaaaaaaagaaataaaacataaaagaatagtaaaaaaggaattcaatagagacactataagctactacgatgacatttatagctctataggattaaaaaagttttatatggttagaaatattttagaggattttacttcaaaagttggccaacatattgaaattttagagttagaacaatttggcaaatctttatttattgataatgaattacaagtagcagaaaaagatgaacatttatatagttcaacatttgtaaactctggaataaaattaaatccagcaaaagaaaaatcagctataattggtggtggagatggtggtgtagcaagagagtgtatctcacaaggatttaatattatagattggtatgagcttgacccagaggtagttaaagtatgcgaaaagcacctatctaagataggagaaaaggcaacttctaaaaattcagtcaaatgtttttggggtgatgcatttgaaagtattaaaaaagttgaagataacaaatacgataaaatttttgtagacctaaatgatgaccaatattgcattgatcttgc

SEQ ID NO: 240760 - DNA, 943 bp, Unknown
  Bacterial polypeptide expressing nucleotide sequence isolated from the Sargasso Sea
actgctaaagttaccatacttaatatttccaaatataaagtttgagccccaaggttttacaattttagctttattagcagaaagccatattagctttcacacttttccagaaaaaggcattattagctttgatttttttacatgtggaaaaataaatccatcagttgcagtggaaattataaaaaaagagtttgaacatacaagaatagttaaaaaagaatttaatagagatactaagtctctttatccagatatttacagctcaccaggcctacaaaaatcatatgtagtaaatgatgtattagaggactttaaatcaaaagtagggcaacatattgaaattttagaattggagcaatttggaaagtctctttttattgatggcgaaattcaagtagcaactacagatgaacatttgtatagctcaacatttgttggagcaggtttagatttaaatcagaataatgagcgagctgctataattggtggcggagatggaggagttgccagagaatgtatatctaaaaattttaattttatagattggtatgagttagatcctgaggttgtcgatgtatgcaataaacatcttggagatattggaaaaaaagcaactgaaaaaaattctgttaagtgtgtttggggagacgcttttgaaagcattaagtctgtgaatgatgatacttacgatcatatttatgttgatttaaatgatgatcaattctgtattgatttagcatcgaagaatatggactcgttagtaagaattttaaaaccaaaaggagttatcactgcacaagttggtagccaagataaaaaaccacagcaggttgaaaattggttgaatgtttttaatcaaaattttggaaacacaaaattatcaagagtttacatacccagttttgattgttcttggaatttctcttcctcaataaaccattga

SEQ ID NO: 240761 - DNA, 1006 bp, Unknown
  Bacterial polypeptide expressing nucleotide sequence isolated from the Sargasso Sea
ttgggtgtaaaaaaggactatacacccgatttttatgaaaaagtaatctacaagattgcaaaagctgcaaaagttgaaattctcaatgtatcatctcacaaatttgaaccccaaggatttactctagtagctttacttgctgagagtcattttagttttcatacttttcctgaaaagggcgtgataagttttgatttttttacttgttcaaaagttaacccgaaggttgctttaaaaatactaagaaaagaaatcgatcacaatagagtggtaactcactcttttgatagaagcagtgttggtttatatgacgatatttacagcactccaggtcagaaaaaattctatgttgtaaaagatgttttagaaaagtttacttctaaagtaggccaatttgttgaaataatggacctagaagaatttggacatgcattatttattgatcatgaaatccaagttgctgaaaaagatgaaaaaatttatagttcgaatttttttaagtctagctatgaacttagtaaaaaaaataataatgttgcaattattggtggaggcgatggaggtgtggccagagcatgcttagaaaacaattctagctatatagactggtttgaacttgatccagaaatagtagacgtatgttatcgtcatttaccgaaagtttgctcgaaagtaaaaaaaagcaataagataaaaactttctggggagatgcatttgagagtataaaaagtgtagaaaattcaaaatatgacaagatatttgtagaccttaacgatgatcagtattgtatcgatttagcgaaaaaaaatatgaaaaacttaaagagaattttaaaaaaaggtggaattataactgctcaagttggttgccaagataaaaaaccaaaacaggtaggtaattggcttaaggttttagaaaaaaatttcggcaatgtaaaactatcaggtgcttttattccaagttttgactgtaaatggaattttgcctcttcaattatgaagtaga

SEQ ID NO: 240762 - DNA, 853 bp, Unknown
  Bacterial polypeptide expressing nucleotide sequence isolated from the Sargasso Sea
aatgacagatattacaacatggatagatgaatatcataaaggctcaagattcggcctaaatgggaaaattctaattaaaaaaacctcaaaatatcaagaaattattgttattgaaaatgaatattatggtaaagctttaatgttagatggttgctggatgacatcattaaaagacgagaaatattatcatgagtgtcttgtgcatcctgcattaagtagcattgacgaaaaatctaatgtactaattattggcggtggtgacggtggtactgtaagagaatgcgttaaatattctcaaatatcaaaaattgatctagtagaaattgatgaggaggtaatcaaaatatctaaaaaatttctaaaagaaattgcaggcgaagcatggaatgacaaaagattagaaatacatattgatgatggcgttaaatgggtaaaaaaaacaaaagataatttttacgacgttatatttatagattgttcagatccctcagaattttcaaatttattattttcacattctttttataaagaatgtaaaagaatacttgcaccaagggggatattagcaactcaaagcgaatctcctgaatccttcaaaaatattcacataaatattttgaaaagcctaaaaaatatatttaaattttctgaaactatgtattcctttgtgcctatatatccaagcgggatttggagttggacatttgcttcttcagaagatctaagtttatcaaagcaaaattatgatgaagtcgtaaaaatagaaaaaggatgtgaaatttggaatttaaattttcaaaatgctgcattcaaaatgatgccaaacaaaattgtaaaagaactagattcataa

SEQ ID NO: 240763 - DNA, 892 bp, Unknown
  Bacterial polypeptide expressing nucleotide sequence isolated from the Sargasso Sea
atatacttgcttagcacttttagccgaaagccatatgagttttcatacttttcctgaaagaggtataattagctttgatttctttacttgtgcaaaaatttctccaacggcagctttagatatcttaaaaagtgaaattaaacatgaaagggcagtagtcagaaattttgatagaagcaataaaggtgtttacgaagatatatatagtacaccaggacaccaaaaatattatattgttaatgatgtgttggaaaattttgtatcaaaagtaggtcagcatatagaaataatgaaacttgaagaattcggtaatgctctatttatagatagtgaattacaggttgctgagaaagacgaaaaaaaatatagcggacaatttgttaattcagctcttggtttatcaaaggataattctagcgcagcaataattggcggtggcgacggtggtgttgcaagagaattattatcaaaaggatttgatttaattgattggtatgaattagatcctgaagtagtaaaagtatgtcaaaaacatcttccaaaaatatgtggtaatgtaaaagctaataataatgtgaaaacatattggggagatgcatttgaaagtattaaaaaagttaaagattctaaatacgataaaatttttgtggatctcaatgatgatcagttttgtatagatcttgcagcaaagaatatgaaaggtttgaagagaattctgaaacccggcggtgtaataacagcacaagttggaactttatccaaaaagcccaaacaagtgaataattggctaaaagttctttcagataattttggcaactccaaattggacgaagtaatgataccgagctttgattgtcgttggaatttcgcttcttccattatgaattcgtaa

SEQ ID NO: 240764 - DNA, 874 bp, Unknown
  Bacterial polypeptide expressing nucleotide sequence isolated from the Sargasso Sea
ttgttagcagagagccatataagttttcatacatttccggaaaaaggaattataagcttcgacttttttacttgcggcaaaatcagtccttctgttgcgatcgaaattgttaagaaagaatttaaacataaaagaattgttaagaaagaatttaatagagacactaaaggtttatatcatgacatttatagttcaccgggattacaaaaatcatatgttgtaaatgatgtattagaagattttagatcaaaagttggtcaacatattgaaattttagatctagaacaattcggaaaatcattatttattgacggtgagatacaagtagcctcttctgacgaacatttttacagctcaacatttgttggtgcaggattaaaattgaacaaatcaaatgaaagagcagcaatcattggtggtggtgatggcggagttgcaagagaatgtatttcaaaaaaatttaattttatagattggtatgagctagacccagaagttgtcaaagtatgtactaaacatttaggtaaaataggtaataaggctacagaaaaaaattcagttaaatgtgtttggggtgatgcttttgaaagcattaaatccgtaaaagatgacacatatgatcatatttttgtggatctaaatgatgatcaattttgtattgatttagcagctaaaaatatggagtcacttgtaagaattttaaaacctaaaggcgtaattacagctcaagtcggtagccaagataaaaagccacttcaagttgataattggctaaatgtatttaatcaccattttggaaacactaaattatcaagagtttatataccaagttttgattgttcttggaatttttcttcttcaattaatcactaat

SEQ ID NO: 240765 - DNA, 955 bp, Unknown
  Bacterial polypeptide expressing nucleotide sequence isolated from the Sargasso Sea
atgagtaaagtaggggagcacgttactttagacattattggaactagtaaagaatatgaaccaaaattctttgagaagttagtttataaaattgcaaaaaaagcaaaagtaactgtactagaaatttcaaaatataagtttcaacctcaaggttttactttagtagccttactagcagaaagtcatattagttttcacacttttccagaaaaaaatattattagttttgatttttttacatgtggaaaagtaagcccaacagtagcactagatattttaaaaaaagaaattaagcataaaagaattattaaaaaggaatttaatagagataccattagttattacgatgacatttacagctctccaggtcttaagaagttttatatggtaagaaatgttttagaagattttacatcaaaagtgggtcaacatatcgaaattttagatttagaacaatttgggaagtctttatttatcgataatgaactacaagtagctgaaagtgatgagcatttatatagttcaacatttgttaactctggtattaaacttaactctgcaaaagataaatcagcaataattggaggtggagatggtggggttgctagggagtgtatttcacaaggatttaatcttatagattggtatgaacttgaccctgaagtagttcatgtttgtgaaaaacatatttcaaaaattggagaaaaagctactgctaaaaattcagttcagtgtgtttggggcgatgcatttgaaagtattaagaaagttgaagataacaaatacgataaaatttttgtagatttaaatgatgatcaatattgtattgatcttgcagcaaaaaatataaattcattaaaaagaattttaaaaccaaacggaacaataacagctcaagtaggtagccaagacaaaaaacccaaacaagtagataattggcttaaatttgtttgaa

SEQ ID NO: 240766 - DNA, 1042 bp, Unknown
  Bacterial polypeptide expressing nucleotide sequence isolated from the Sargasso Sea
tatgagtaaggtaggggagcacgttactttagacattattggaacaagcaaagaatatgaaccaaagttctttgagaagttagtttataaaattgcaaaaaaagcaaaagtaacagtactagaaatttcaaaatataagttccaaccacaaggttttactttagtagccttactagcggaaagtcatatcagttttcatacttttccagaaaaaaatattattagttttgatttttttacatgtggcaaagttagtccagtagttgcattagaaattttaaaaaaagaaattaaacacaaaagaattattaaaaaggaatttaatagagatacagttagttattacgatgacatttatagctctccaggtcttaagaagttttacatggttagaaatgttttagaagattttacatcaaaagtaggtcaacatatcgaaattttagatttagaacaatttggaaagtctttatttatcgataacgaacttcaagtagctgaaagtgacgaacatttatacagttcaacatttgttaactctggcattaaacttaaccccgcaaaagacaaatcagcaataattggaggtggtgatggtggtgttgctagagagtgtatttcacaaggatttaatcttattgattggtatgaacttgaccctgaagtagtgcatgtttgtgaaaaacatatttcaaaaattggagaaaaagctactgctaaaaattctgtacaatgtgtttggggcgatgcttttgaaagtattaaaaaagttgaagataataaatatgataaaatttttgtagatttgaatgatgatcaatactgcattgatcttgcagcaaaaaatataaattcattaaaaagaattttaaaaccaaatggaacaataactgctcaagtaggtagccaagacaaaaaacctaaacaaatagataattggcttaatttgtttgataaaagttttggcaatacatctctagatagaatttatataccaagttttgattgttcatggaattttgcttcttcattaaataaataa

SEQ ID NO: 240767 - DNA, 1042 bp, Unknown
  Bacterial polypeptide expressing nucleotide sequence isolated from the Sargasso Sea
atgactaaagttggagaacatataactctagacattattggtacaacaaaagaatacgatcctggagtatttgaaaaaataattaatgatattgcaaaagctgcaaaagtaacaattttaaatatttcaaaatataaatttgaacctcaaggttttacaattcttgctttattagccgaaagtcacattagttttcacacattccctgaaaaaggaattattagttttgatttctttacatgtggaaaagtaaacccatcagtggcgatagatattataaaaaaagaatttgaacataaaagaatagtcaaaaaagaatttaatagagacacaaaatcactttatcatgatatttatagctcaccaggattacaaaaatcttacgtagtaaatgatgttttagaagattttaaatctaaagtaggtcaacatatagaaattttagatttagagcaatttggtaaatctttatttattgatggtgaaatacaagttgctgctacagatgagcatttatacagttctacattcgttggctctggtttaaatttaaacaaagataatgaaagagctgctatcataggtggtggtgatggtggagtagcaagagaatgtatttcaaaaaattttaactttatcgattggtacgaacttgatcctgaagttgtagatgtttgtaataaacaccttggagatattggaaaaaaagcaactgaaaaaaattctgtaaaatgtgtttggggtgatgctttcgaaagtattaaattagttggtgatgatacttatgatcatatatttgtagatctaaatgatgatcaattttgtatagatttagctgcaaaaaatatggactcattagtcagaattttaaaacccaaaggagttataacggctcaagttggaagtcaggataaaaaaccacagcaggttgaaaattggttaaatgttttcaatcaaaattttgggaatgcaaaattatcaagagtttacatacctagttttgattgctcttggaatttttcttcatcaattaatcattaat

SEQ ID NO: 240768 - DNA, 946 bp, Unknown
  Bacterial polypeptide expressing nucleotide sequence isolated from the Sargasso Sea
aaaaaagcaaaagtaacagttctcaacattgcaaaatataaatttgaaccccagggttttactttagttgctttattagccgaaagtcatataagttttcatacatacccagaaaaaggaattatcagctttgacttttacacttgtggaacagtcgctccttcaattgcattagacgtaattaaaaatgaaattgaacataagagaattattaaaaaagatataagtagagatacaatttctttatatcacgacataactagtacaaagggattgcaaaaaaaatatttggtaaaagaagttttagaagattttacctcaaaggtagggcagcacatagaaattcttgatcttgtggaatatggaaagtccttgtttatagataatgatttgcaagttgctgaaagggatgaacatatttacagtggaacctttgttaactcagctcttaaattaaataatagtaaagatcgagcagcaattattggcggtggcgatggcggtgttgcaagagagtgtatttcaaaaggttttggatttattgattggtatgaattggaccctgaagtagttgaagtttgtaaaaagcatattggttcgatagggaacaatgctactgaaaaaaattctgttaaatgtgtttggggagatgcatttcaaagtatcaaaaaagttgaggatgacagttatgataaaatctttatagatttaaatgatgatcaattttgtattgatcttgcagcgaaaaatatggactcattggttaggattttaaaaccaaatggagtaataaccgcacaggtaggtagccaagataaaaaacctaaacaagttgaaaattggctgaaagtttttaataaaaattttggtaatgctaccttagatagagtttatattccaagtttcgacagttcttggaatttttactcgtcaataaatcattaat

SEQ ID NO: 240769 - DNA, 856 bp, Unknown
  Bacterial polypeptide expressing nucleotide sequence isolated from the Sargasso Sea
tatgagttttcatacatttccagaaaagggaataattagttttgatttctttacttgtggaaaaatatcacctactgcagctctagatgtacttaaagaggaaattaaacacgatagagcagtagttagaagttttgatagaagcaacaaaggtgtttatgaagacatatacagtacccctggtcacaaaaaatattatgttgtgagtgatgtaatagaaaattttgtatcaaaagtcggtcagcatgttgaaatcttaaaacttgaagaatttggtaatgctctattcctagatagcgaattacaagttgccgaaaaagatgaaaaaaaatacagtggtcaatttgttaactcctctcttaatttgtctaaagataattccagtgcagctattataggtggtggagatgggggcgtagctcgagaactttcatcaaaaggttttgatctaatagattggtatgagttagatcctgaagtagtaaaagtctgtcaaaaacatctcccgaaaatctgtggagatataaaggctaataataaagtaaaaacttattggggagatgcatttgaaagtattaaaaaagttaaagattctaaatatgataaaatttttgttgatcttaatgatgaccaattttgtatagaccttgcagcaaaaaacatgaaaggtttaaaaaggattcttaaacctggaggggtaattacagctcaggttggttgtttatcaaaaaaacccaaacaaattaaaaactggatggagctactcaagaataattttggaaacgtagagttgacagaggtatttattccaagctttgactgcagatggaattttgcttcatcttcaaacaaataa

SEQ ID NO: 240770 - DNA, 1042 bp, Unknown
  Bacterial polypeptide expressing nucleotide sequence isolated from the Sargasso Sea
aatgactaaagtaggggatcacgtaactttagatataattggtactaaaaaagaatattcaccttctttttacgaaaaactcgtttacaaaattgcaaaaaaagcaaaagttacagttcttggaatttcaaaacataagtttgaaccacagggttttacattagtagctttacttgctgaaagccacattagttttcatacttttcccgaaaaaagcattataagttttgatttttttacttgtggaaaagtttcaccagtagttgctctcgatattattaaaaaagaaattgaacataaaagaattgttaaaaaagaatttaatagagattctttaggtttgtatgatgatatctatagcacacctggtcaaaaaaaatattatgtagttaaaaaatatcttgaaaattttacatctaaagtaggacaacatattgaaattatagatttagaagaatttggaaaatctttatttattgataatgaattacaagttgcagaaaaagacgaacatctttacagctctacttttgttaattcaggaataaaattaaataataaaaaagataatgccgcaataatcggaggaggtgatggaggagttgctagagaatgtataaacaaaaattttaattttattgactggtatgaattagatcccgaagttgttgaggtttgcgataaacatttatctaaagtcggacaacgagcaacaaaaaaaaattctgtaaaatgcatctggggtgacgcatttgaaagtataaaaaaagttgaagataataggtatgataaaatatttgttgatttaaatgatgatcaatattgtatagatcttgctgccaagaatataaaatcattaaaaaggatattaaaatcaaatggcacgataacagctcaagttggaagccaagataaaaaaccaaaacaggtaaaaaattggttaaatttatttaataaagaatttggtaatgctgaattagatagaacatatatacctagttttgattgtaattggaattttgcctcatcaataaacaattaa

SEQ ID NO: 240771 - DNA, 584 bp, Unknown
  Bacterial polypeptide expressing nucleotide sequence isolated from the Sargasso Sea
tagctctccaggattacgtaagtcatatgtagttaataaagttttagaaaattttaaatctaaggcagggcaatatgttgagattttagaattagaacaatttggaaaatctttgtttatagatcatgaaatacaagtagctgaaagcgatgaacatttatatagctcaacatttgtaaattcaggattaaaattaaatcccaaaaaagaaaaagccgcaataattgggggaggagatggcggtgtcgcaagagaatgtatatcaaaaaattttggctttattgattggtatgaattggatcccgaagtagttgaagtttgtgatgagcatctaagcaagattggtgaaaaggcatctgaaaaaaattcagtgaagtgtgtttggggagatgcatttgaaagtataaaatcagttaaagatgatacttacgatcaaatctatgttgatttaaatgatgaccagttttgtatagatcttgctgcaaaaaatatagattcacttgttagaatattaaaacccaaaggtgttattactgcccaagtaggaagtcaggataaaaaaccaaaacaagtagaaaattaga

SEQ ID NO: 240772 - DNA, 481 bp, Unknown
  Bacterial polypeptide expressing nucleotide sequence isolated from the Sargasso Sea
aacgatagagctgcaataattggtggaggtgatggtggtgttgcaagagaatgtatttctaaaaaatttaattttatagattggtttgaacttgatcctgaagtagtagaagtttgtagtaaacatcttggagatattggaaaaaaagctacagaaaaaaattcagtcaaatgtgtttggggagatgcttttgaaagtattaaatcagttaaagacgatagttacgatcatatatttgttgatttgaatgacgatcaattttgtattgatttagcagcaaaaaatatggactctttagtaagaattttaaaacctaaaggagtaattactgcacaagtaggtagccaagataaaaaaccccatcaagttgaaaattggctgaatgtatttcaccatcattttggaaatactaaattatcaagggtttatgtgcctagttttgattgttcgtggaatttttcctcatcgataaatcattagt

SEQ ID NO: 240773 - DNA, 725 bp, Unknown
  Bacterial polypeptide expressing nucleotide sequence isolated from the Sargasso Sea
ttttgatagaagtagcataggtctttatgatgacatttacagtacgccaggacaaaagaaattttatgttgtcaaagatgttttagaaaaatttacttctaaagtcggccaatttgttgaaataatggatttagaagaatttggacacgctttgtttattgatcatgaaattcaagtagctgaaaaagatgaaaaaatttatagctcaaattttttcaaatctagttatgatttaagtaaaaaaaataataatgttgcgattattggcgggggagatggaggagtagctagggcatgtttagaaaataattctaattacatcgattggtttgaattagatcctgagattgtagatgtttgctatcgtcacttaccaaaagtttgctcaaaagtaaaaaaaagcaataaaattaaaacgttctggggagacgcatttaaaagtataaaagaaatagaagactcaaaatacgataaaatttttgtagatttaaatgatgatcagtactgtattgatttagctaaaaaaaatatgaaaggtttaaaaagaatacttaaaaaaggcggtgtaattactgctcaagtcggaagccaggataaaaaacctaaacaagttgataattggtgtaaggttttaggaaaaagctttggaaacgttaaattatctggggcttatatccctagttttgactgtaaatggaattttgcttcatctataatgaggtgat

SEQ ID NO: 240774 - DNA, 1042 bp, Unknown
  Bacterial polypeptide expressing nucleotide sequence isolated from the Sargasso Sea
atgattaaagttggggagcatattactttagatattataggcactacaaaagagtacgatccttcagtttatgagaaagttatatataaaatagctaaagcagctaacgtaactattttgaatatttcaaaatataaatttgaaccacagggctttaccattttagctttattggctgagagtcatattagttttcatacatttccagaaaatggaataattagttttgatttttttacctgtggaaaaataagcccatcggtggcaattgatattattaaaaaagaatttgaacacaaaagaattgtaaaaaaagaatttaatagagatacccgatctttgtatcatgatatttatagctcacctggtttacaaaaatcatatgttgtgaatgaggttttagaagattttaaatcaaaagtgggtcaacatatagaaattttagaattagagcaattcggaaaatctttgtttattgatggagaaatacaagtagcggcatcagatgaacatttatacagctcaacttttgttggagctgggcttaagttaaataaaaaaaatgaaagagcagcaataattggcggtggtgatgggggtgttgcaagagaatgtatttcaaaaaaatttaactttatagattggtatgaattagatcctgaagttgttgaagtttgcaataaacatcttggtgatattggaaaaaaaactacagaaaaaaattctgtaaaatgtgtttggggagatgcctttgaaagtataaagacagtgaacgaagatacatatgatcatatttttgttgatttaaatgatgaccagttttgcatagaactagccgctaaaaatatggactctttagtaagaatactcaagcctaaaggtgttattagtgcacaagttggaagtcaggataaaaaacctctgcaagttgaaaattggctgaatgtattcaaccatcattttggaaatactaatttatctagagtttacatacctagttttgattgttcttggaatttttcttcatcaataaatcattaat

SEQ ID NO: 240775 - DNA, 439 bp, Unknown
  Bacterial polypeptide expressing nucleotide sequence isolated from the Sargasso Sea
aatgactaatatttcaaaatggatagatgaatatcataaaggctcaagattcggtctaaatggagatgttttaattaaacaaaaatcacaatatcaagaaattattgttatcgaaaatgaatactatgggagagctttaatgcttgatggttgttggatgacatcactaaaagacgagaaatattatcatgagtgtcttgtgcatccagcattaagtagcattgacgaaaaatctaatgtactaattattggtggaggagacggcggtacagcaagagaatgcgttaaatattctcaaatatcgaaaattgatctagtagaaattgatgaggaggtaatcaaaatatctaaaaaatttttaaaagaaattggaggcgaagcatggaatgacaaaagattagaaatacatgttgatgatggtgttaaatgggtaaaaaaa

SEQ ID NO: 240776 - DNA, 860 bp, Unknown
  Bacterial polypeptide expressing nucleotide sequence isolated from the Sargasso Sea
tcacataagttttcatacatatcccgaaaaaggaataataagttttgatttttatacttgtgggacagttgcaccatcaattgctttagaggttataaaaaaagaaattgaacataaaagaattatcaaaaaagaactaaacagagacacaatttctttttattacgacaatacaagcacaaaaggattacaaaaaaattatttagtaaaagaaatcttggaagacttcaaatcaaaagtaggccagcatgttgaaatattagatttagtagaatatggaaaatcactttttatagatggagatttacaagtcgctgagagtgatgaacatttatatagcggtacatttgtaaattctgcaatgaaactaaataaaagcaaagatagggcagcaattattggcggaggtgacggaggagttgcaagagaatgtatagcaaaaggttttggatttattgattggtacgaattagacccagaagtggtagaagtttgtaaaaaacatattggatctattggcaaaaatgcaactgaaaaaaattctgttaaatgtgtttggggtgatgcttttgaaagtattaaaaaagtagaagatgatagttatgataaaatatttattgatttaaatgacgatcagttttgcatagatcttgcagctaagaacatgaattcgttggtaagaattcttaaacctgatggagtgattacagctcaagttggaagccaagacaaaaaaccgaagcaagtgaataattggctagatgtgtttaataaaaattttggtaatgctaccttggatagagtatatataccaagctttgatagttcttggaatttttattcatcaattaaccattaat

SEQ ID NO: 240777 - DNA, 1042 bp, Unknown
  Bacterial polypeptide expressing nucleotide sequence isolated from the Sargasso Sea
atgactaaggttggggagcacataacactagatattattggtactaaaaaggaatatgaaccttcattttatgaaaagttagtttataaaattgctaaaaaagcaaaagtaactgttttagaaatatcaaaatataaatttaagcctcagggttttactatggttgcgcttttagctgaaagtcacataagttttcatacatttcctgaaaaaagtattattagtttcgatttctttacttgtggaaaagtgtctccatcaattgctttggatataataagaaaagaaatagagcataaaagaatagtaaaaaaagaatttaatagagatactattgctctttaccatgacatttacagttccccaggtttaagaaaatcctatgtagtaaaaaatgttcttgaagattttacatccaaggtaggacaacatattgaaatcttagatctagaacaatttggaaaatctttatttatagataatgaaattcaagtagctacatcggacgaacatctttacagcggcacatttgttaatgctggtttaaaattgaataaagataaagaaacagcagcaattattggtggaggagatggaggagtagctagagagtgtatatcaaaaggttttggatatatagattggtttgaattggatcctgaagttgttgatgtttgtgagaagcaccttgggtctataggaaataaatctaccagaaaaaattcagttaaatgtgtttggggtgatgcatttgaaagtataaaaaaagttgaagatgacaggtatgataaaatttttgtagatttaaacgatgatcagttttgtattgatttagcagcaaagaacatggactcattagtaagaattttaaaaccaaatggagttataactgcgcaggttggaagccaagataaaaaacccaaacaagtagataaatggttaaaagtttttaataaaaattttggaaatgctaccctagatagagtttatatacctagtttcgactgttcttggaatttttcttcttcaataaatcactaga

SEQ ID NO: 240778 - DNA, 674 bp, Unknown
  Bacterial polypeptide expressing nucleotide sequence isolated from the Sargasso Sea
cctaaaaaaatattacatggtaaaaaatattctcgaggattttacatcaaaggtaggacagcacatacaaatattagacttagagcaatttggtaaagctttatttatagataatgaattacaagtagcagagaaagatgaacatctttacagctctacttttgtaaattctggattgaaactaaatccaaataaaaataattctgctataattggaggtggcgacggaggagttgcaagggaatgtattaatcaaggtttcaattatgtggattggtttgagcttgatcctcaagtagttgatgtatgcgaaaaacatttgagtaaagttggacaaaaagcaacaaaaaagaactccgttaagtgtgtatggggagatgcttttgaaagtataaaaaaagttgaagataacaaatatgataaaatttttgtagatttaaatgatgatcaatattgtatcgatcttgctgctaaaaatattaagtctttaaaaagaattctaaaacctaatggtacaattaccgctcaagtaggtagccaagacaaaaaaccaaaacaagttgaaaaatggttaaatttatttagaaaaagttttggtaattcttccctagatagaatttacataccaagtttcgattgttcttggaattttgcttcatcattaaataaataat

SEQ ID NO: 240779 - DNA, 1042 bp, Unknown
  Bacterial polypeptide expressing nucleotide sequence isolated from the Sargasso Sea
tatgattaaagtaggggagcatgttactctagatataattggtacaaagaaagaatacgattcatctttctttgaaagccttgttcataaaattgcggaaaaagcaaaagtaactgttctaaatatagcaaagtataaatttgaaccgcagggttttactttagtagctttattagcagaaagtcatattagttttcatacatatcctgaaaaaggaataataagttttgatttctatacttgtggaacagttgcaccatctattgcattagatgttataaaaaaagaaattgaacataaaagaattatcaaaaaagaattaaacagagatacaatttctttttattacgacaataccagcacaaaaggattacaaaaaaattatttagtaaaagaagttttagaagattttaaatcaaaaatgggtcagcatattgaaatattagatttagtagaatatggaaaatcattgtttatagatggtgatttgcaagttgctgagagtgatgaacatatatatagcgggacatttgtaaattctgcaatgaagttgaataaaagcaaagatagagcggcaattattggaggaggtgacgggggagttgcaagagagtgtatagcaaaaggttttggatttattgattggtacgaattagacccagaggtagtcgaggtttgtaaaaaacatattggttctattggtaaaaatgcaactgagaaaaactctgtaaaatgtgtttggggtgatgcctttgaaagtattaaaaaagttgaagatgatgcttatgataaaatatttattgatttaaatgacgatcagttttgcatagatcttgcagccaaaaatatgaattcattagtaagaattcttaaacccgatggagttataactgctcaagttggaagccaagataaaaaaccaaagcaagttgataattggttagatgtttttaacaaaaattttggcaatgctaccttagatagagtatatatcccgagttttgatagttcttggaatttttactcatcaattaaccattaa

SEQ ID NO: 240780 - DNA, 1735 bp, Unknown
  Bacterial polypeptide expressing nucleotide sequence isolated from the Sargasso Sea
atgcacgaatcccaaacaactggctcggcgactcaagcggtaaaaacgagtcgcctaagctggttcgatgatgtcctactattgggcattatggccgtgctcgctgggtgcggcctgatctacgaatacctgttgtcccactatgcaggccggatcttaggcgcgttagaagccgccatttacactatgatcggcctgatgatcgtctccatgggtcttggcgcctttgccgcacgcaaaattaaagatgcctttaccggctttgtggtgctcgaactcacggtcgcgctctgtggctcgctggcgattttaattaccgcagccgtgataggttttggtcagcagctgccgatgcttatcgcctccaccttaggcttaccaccggatcaactgcccgaaggtggcatgattggctcgctgcagaagctgagcgaatatctgccctatgtctggggcgtgctgctcggcttgatgatcgggatggaaattccgctgatcgcgagagtgagacaatccctgtctgatgaacacttactgcataatgccggtactatttatggcgccgactatattggcgcagggattggcgcggccatttgggtcggctttatgctggccatcgatattcaactcgccgccgcgctgaccgctagctttaacttgctcgccggctttgtgtttatctggcgtttttggcccaagatccaaagggcaaaattattgctcgcggggcattttgtggtcacgggcgtattattgctgctcgccattcaagggccgagctgggagcaacagttcaacaatctgctctataaagacaaagtggtttacgctaaggccacgcgctttcaacaactcacctttaccgaacgcttacgcggcaatggcctctcccccatatattccttgtatatcaatggccgattacagttctcgagtatcgatgaacatatctaccatgcgtttttagttcacccaacgcttgcagccagcgctcgccacaacaaggtattaatcattggtggtggtgatggattgggcctaaagcaagtgctgcgttgggagcctgagcaagtgaccttactcgatcttgatgccgcattggtgcaactctttaaaacgcccgatacggatatgcctaagcgcctaagccaagccctgttagctctcaatggcaatgcctttaacgatcctcgcgttaacgtgatccacgacgacgcctttaatggtgtcgataaactgattgccgcaggggataaatacgatgccattattgtggacttgcccgatcctagccatcccgatttaaataagctctattcggattatttctatcgcaagctcaaggaactaatgagcagtgatggtgctctgactgtacagtcaacctcaccctatcacgcgcaaaaggcctttatctcagtcgcaaaaactttggccttagcaggatttgacgtaaaacagtatcaccataacgtcccaagctttggagaatggggctggagcattgccaccctatcgggaaaggatgctcagcatcgcctaggcgagctgacaacactaccgatagcggatgactggttaaccttaggtttagtcaaaggtgcctttgaatttcctgccaatttttatcaggacgccgccagtattaagcctaacgaactcggttcgttgcagttgtaccattatcatcaacaggcatggtccgaaacccaaggactggatcttttttaac

SEQ ID NO: 240781 - DNA, 1042 bp, Unknown
  Bacterial polypeptide expressing nucleotide sequence isolated from the Sargasso Sea
atgacaaaagttggtgaacacattaccctagatattattggaactacaaaagaatatgatcctgttgtatttgaaaaggtaattcacgatattgcaaaagctgctaaagtgacaattcttaatatttcaaaatataaatttgaaccacaaggttttacaattttagctttattagctgaaagtcacattagctttcatacatttccagaaaagggtattattagttttgatttttttacatgtggaaaagtaagtccatcaattgcaattgatataataaaaaaagaatttcaacacaaaagaatagttaaaaaagagtttaatagagacacaaaatctctttatcatgatatctatagctcaccaggtctacaaaaatcttacgtagtaaatgatgttttagaagattttaaatctaaagtaggtcaacatatagaaattttagatttagagcaatttggtaaatctttatttatagatggtgaaatacaagttgctgctactgatgagcatttatacagttctacattcgttggctctggtttaaatttaaacaaagataatgaaagagctgctatcataggtggaggtgatggcggggtagcaagagaatgtatttcaaaaaactttaacttcatcgattggtatgaattagaccctgaggtagttgatgtttgtaataagcatctcggagatattggaaaaaaagcaactgaaaaaaattctgtaaaatgtgtttggggtgatgcatttgaaagtattaaatcagtaactgatgatacatatgatcatatttttgtagatcttaatgatgatcaattttgtatagatttagctgcaaaaaatatggattcacttgtaagaattttaaagccaaagggagttattactgcacaagtcggtagtcaggataaaaaaccacagcaggttgaaaattggctaaatgtatttaaccaaaactttggaaatgcaaaattatctagagtttatatacctagttttgattgttcttggaatttttcttcatcaataaatcattaat

SEQ ID NO: 240782 - DNA, 1042 bp, Unknown
  Bacterial polypeptide expressing nucleotide sequence isolated from the Sargasso Sea
aatgactaaagtaggcgaacatattacacttgatattattggagcaaataaagagcacagtccagatttttatgaaaaaataatttataaaattgccaaactagccaaagtaacagttctaaaaatatcaaaatataagttcgaacctcagggatttacattagttgcattgttggctgagagtcatatgagttttcatacatttcctgagaaaggaattactagttttgattttttcacatgtggaaatatctctccttcagtagcaacggatgtaataaaagatgaaattgagcatacacatattattaaaaaattatttaatagagatactattgatttatatcatgataattatagttcccctggcttacgtaaatcatatgttgtaaaaaaggttttagaaaattttaagtcaaaggtaggtcagtatattgaaatcttagagttagagcaatttggaaaatcgctttttattgataacgaaattcaagtagcggaaagtgatgagcatttatatagttcaacatttgtaaattcaggattaaacttaaatccaaaaaaagaaaaatctgcaattattggcggaggggatggaggcgtagcaagggagtgcatttcgcaaaattttggattcattgattggtatgaattagatccggaggttgtagaagtttgtgataaacatctaagcaagattggtgaaaaagcttctgaaaaaaactcggttaaatgtgtttggggagatgcgtttaaaagtattaaatctgttaaggacgatacttatgatcagatttatgttgatctaaatgatgaccagttttgtataaatctagcagcaaaaaacatggagtctttaataagaatattaaaacccaaaggagttattacagcacaagtaggtagtcaggataaaaaaccaaaacaagtagaaaattggatgaatgtttttaacgaaagttttggaaatactaaattatcaagagtttatataccaagttttgattgttcttggaattttgcttcttcaattaaccattaa

SEQ ID NO: 240783 - DNA, 1042 bp, Unknown
  Bacterial polypeptide expressing nucleotide sequence isolated from the Sargasso Sea
tatgattaaagtaggggagcatattactctagatataattggaaccaagaaagaatatgatgcatctttctttgaaagcctagttcataaaattgcagaaaaagctaaagtaacagttttaaatattgcaaaatataaatttgaaccccaaggttttactctagtagctttgttagcagaaagtcatattagttttcatacatatccagaaaaaggaataattagttttgatttttatacctgtggaacagttgctccatcaattgctttagatgttataaaaaaagaaatagaacataaaagaataatcaaaaaagaattaaatagagatacaatttctttctattatgacaataccagtacaaaaggattgcaaaaaaattatcttgtaaaagaagttattgaggattttaaatccaaagttggacaacatatagagatattagatttagtagaatatggtaaatcgttatttatagatggtgatttacaagtggctgagagtgatgaacatttatatagtggaacatttgttaattctgcaatgaaactcaataaaagcaaagatagagctgcaattattggtggaggtgacggaggagttgcaagagagtgtatcgcaaaaggatttgggtttattgactggtacgaattagatcccgaagttgttgaagtttgtaaaaaacatattggatctattggtaaaaatgctactgagaaaaattctgtaaaatgtgtttggggagatgcctttgaaagtatcaaaaaagttgaagatgatagttatgataaaatatttattgatttaaatgatgatcaattctgtatagatcttgcagctaaaaatatggactcattagtaagaattcttaaacctgatggcgtaataacagcgcaagtaggcagccaagacaaaaaaccaaaacaagttgataactggttagatgtatttaataaaaattttggtaatgctaccttagatagagtatatatcccaagctttgacagttcttggaacttttactcatcaattaatcactaa

SEQ ID NO: 240784 - DNA, 958 bp, Unknown
  Bacterial polypeptide expressing nucleotide sequence isolated from the Sargasso Sea
atgaaaaaagttggagaacacgtaacaatagattttttaggagtaaaaaaggattacactcctgatttttacaataaagttatatataaaatagcaaaaaaggccagaattgaggtgctaaatatctctgagaaggtatttaaaccacaagggtatacttgtgtagctcttttagctgaaagtcatatgagctttcatacttttccagaaagaggcgtaattagttttgacttttttacatgtggaaaaatatctccaacaacagctttagatatattaaaaagtgaaattaaacatgaaagagctgtcgttagaagttttgatagaagcaacaaaggtttatacgaagatatatacagttcaccgggccatcaaaaatattatattgttaatgatgtattagaaaattttgtttcaaaagtaggtcaacatattgaaataatgaaacttgaagagtttggtaacgctttgtttatagatagtgaattgcaagttgccgaaaaggatgaaaaaaaatatagcggacaatttgttaattctgctcttagtttatccaaagacaattctagtgcagcaataattggaggtggagacggaggagttgcaagagaatgtttatcaaaaggatttgatttagttgattggtttgaattggatcccgaagtagtaaaagtctgtcaaaaacatcttccaaagatatgtggagaagtgaaagcaaacaacaatgtcaaaacatattttggggatgcttttgaaagcattaaaaaagttagagattcaaaatatgataaaatctttgtagatttaaatgatgaccagttttgtatagatctagctgcaaaaaatatgaaggggttaaaaagaattcttaaaccaggtggagtaattactgctcaggttggatgtctgtctaaaaaaccaagacaggtaaataattggatgaaagttctatctcaaa

SEQ ID NO: 240785 - DNA, 1042 bp, Unknown
  Bacterial polypeptide expressing nucleotide sequence isolated from the Sargasso Sea
aatgacaaaagtaggcgaacatataaccttagatattataggtacaactaaagagtatgatccatctttgtatgaaagagttattaaagaaattgcaaaagctgcagatgttacaattctaaatatttcaaaatataaatttgaacctcaaggttttacaattcttgctttgttagctgaaagccatattagttttcatacttttccagaaaaaggaattattagttttgatttctttacatgtggtaaggttaacccatcaattgcaattgaaattataaaaaaagaatttgaacatacaagaatagttaaaaaagaatttaatagggacactaaatctctttatcatgatatctatagttcaccaggattacaaaaatcctatgttgtaaacgatgttctggaggattttaagtcaaaagttggtcaacacattgaaattttagatttagagcaatttggaaaatctttatttattgatggagaaattcaagtagccgccactgatgaacatttgtatagctcaacttttgtaggtgcaggattagaattaaataaacaaagtgaaatagcaggtattattggtggtggagacggtggtgtcgcaagagaatgtatatcaaaagattttagttttatagattggtatgaattagatcgtgaagttgttgatgtttgtaataaacatcttggagatattggaaaaaaagctaatgaaaaaaattctgtaaaatgtgtgtggggtgatgcttttgaaagtataaagtcagtggaagatgatacatacgatcatatatttgttgatcttaatgatgatcagttttgcattgatcttgcagccaaaaatatggactcaatgattagaattttaaaacctaaaggggtaatcactgctcaggttggaagccaggataaaaaacctaaacaagttgatagttggttgaatgtatttaaccatcactttggaaacactaaattatcaagagtttatatccctagttttgattgctcttggaatttttcatcatcaataaatcattaa

SEQ ID NO: 240786 - DNA, 1042 bp, Unknown
  Bacterial polypeptide expressing nucleotide sequence isolated from the Sargasso Sea
gatgattaaagttggtgagcatattactttagatattataggtactacaaaagagtacgatccctcggtttatgaaagtgttatacataaaatagctaaagcagctaatgtaactattttaaatatttcgaaatataaatttgaaccccagggttttactatattagctttattggccgaaagtcatatcagttttcatacatttccagaaaatggaataataagttttgatttttttacctgtggaaaaataagtccatcggtagcaattgatattgttaaaaaagaatttgaacataaaagaattgttaaaaaagaatttaatagagataccagatctctttaccatgatatttatagttcacctggattacaaaaatcatatgtagttaatgaagttttagaagactttaaatcaaaagttggtcaacacattgaaattttagaattagaacaatttggaaagtctttatttattgatggtgaaatacaggtagcagcatcagatgaacatttatatagctctacttttgtaggagctggcttaaaattaaataaaaaaaatgaaagagcagcaataatcggtggtggtgatggtggtgttgcaagagagtgcatattaaaaaagtttaattttatagattggtatgaattagatccagaagttgtagaagtttgcaataaacatttgggtgatatcggaaaaaaagctacagaaaaaaattctgtaaaatgtgtttggggtgatgcttttgaaagtataaagtcagttaacgaagatacgtatgatcatatttttgttgatctaaatgatgaccagttctgtatagatcttgctgctaaaaatatggactctttagtaagaatactcaaacccaagggtgtaattactgcgcaagtaggaagtcaggataaaaaacctcttcaagttgaaaattggttaaatgtttttaatcatcattttggaaacactaatttatctagagtttacatacctagttttgattgttcttggaatttttcttcatcgataaatcattaa

SEQ ID NO: 240787 - DNA, 1042 bp, Unknown
  Bacterial polypeptide expressing nucleotide sequence isolated from the Sargasso Sea
tatgacaaaggttggggagcacatcactttagatattataggtacaactaaagaatacgaagcatctttatttgaaaaagtaattcacgatattgctaaagctgcaaacgttacaattttaaatatttctaaatataaatttgaaccacaaggatttacaattttagctttattggccgaaagtcacattagttttcatacctttccagagaaaggtattataagttttgatttttttacttgtggaaaaattagtccatcagttgcaatcgatataataaaaaaagaatttaaacatacaagaattgtaaaaaaagaatttaatagagatactaaagctttatatcacgatatttatagctctcctggtttacaaaaagcctatgtagtaaatgatgttcttgaagattttaaatccaaagtaggtcaacatattgaaattttagaattggaacaatttggtaaatctctatttattgatggcgaaattcaagtagcagcatctgatgaacatttatatagctcaacttttgttggagctggtttaaacttaaataaaaacaatgaaagagcagcaattattggtgggggcgatggaggtgttgctagagaatgtgttactaaaaaatttaattttatagactggtatgagcttgatcctgaggtagttgaagcttgtaataaacacctgggaaatattgcaaataaagctactgagaaaaactcagtcaaatgtgtttggggagatgcttttaaaagtattaagtcgatagaagatgatacttatgatcatatttttgttgatttaaatgatgatcaattttgtatcaatttagcagccaaaaatatggattcattggttagaattttaaaaccaaaaggagttattacagctcaagttggcagtcaggataaaaaacctctccaagttgaaaattggcttaatgtctttaaccatcattttggaaatactaatttagctagagtttacataccaagttttgattgttcttggaatttttcttcatcaataaatcattaa

SEQ ID NO: 240788 - DNA, 933 bp, Unknown
  Bacterial polypeptide expressing nucleotide sequence isolated from the Sargasso Sea
tatgagcaaagtgggggagcacgttactttagacattattggaactagcaaagaatatgagccaaaattctttgagaagttagtttataaaattgcaaaaaaagcaaaagtaacggtactagaaatttctaaatataagtttgaacctcaaggttttactttggtagctttattagcagaaagccatatcagttttcacacttttccagaaaaaggaattattagttttgatttttttacatgtggaaaggttagtccaacagttgcgttagatattttaaaaaaagaaattaaacacaagcgaattattaaaaaggaatttaatagggatacagttagttattatgacgatatttatagctccccaggtcttaagaagttctatatagtaaaaaatgttttagaagattttacatcaaaggtaggtcaacatattgaaattttagatctagaacaatttggaaagtctttatttattgataatgaacttcaagtagctgaaagtgatgagcatttatatagctcaacatttgttaactctggtattaaacttaaccctgcaaaagataaatcagcaataattggaggtggagatggtggtgttgctagagagtgtatttcacaaggatttaatcttatagattggtatgaacttgaccctgaagtagttcacgtctgtgaaaaacatatttcaaaaattggagaaaaagctactgctaaaaattctgtgcagtgtgtttggggtgatgcatttgaaagtattaaaaaagttgaagataataaatatgataaaatttttgtagatttgaatgatgatcaatactgcattgatcttgcagcaaaaaatataaattcattaaaaagaattttaaaacctaatggaacaataacagctcaagtaggtagccaagataaaaaacctaaacaagtaga

SEQ ID NO: 240789 - DNA, 1008 bp, Unknown
  Bacterial polypeptide expressing nucleotide sequence isolated from the Sargasso Sea
aatgaaaaaagttggagaacacgtaacgatagattttttaggcgtaaagcgagattacgctccagatttttataacaaagttatatataaaatagcaaaaaaagccaaaatcgaagttctaaatatagcagaaaaagtttttaaacctcaaggctatacttgcttggcgcttctagctgaaagtcatatgagttttcacacttttccagaaaagggtataattagttttgatttttttacatgtggtaagatttcaccaacagcagcattagatattcttaaagaggaaattaaacatgaaagagctgtagtaagaagttttgacagaagcaataaaggaatttacgaggatatttacagcactcctggacataaaaaatactatgtggttagtgatgttttagaaaattttgtttctaaagtggggcaacatattgaaattttaaaattagaagaatttggatcagctttatttatagatagcgaattacaagttgcagaaagggatgaaaaaaaatatagcggacaatttgttggatctgctttaaatttgtcaaaaaataattcaagtgctgcaataattggtggaggcgatggcggagtagctagagaactatcatcaaaaggttttgatttaattgattggtatgaattagaccctgaagtagttaaagtttgtcaaaaacatcttttaaaggtttgcggagatataaaggccaataataaagtaaaaactttttggggtgatgcttttgaaagtataaaaaaagttaaagattcaaaatacgacaaaattttcgttgacttaaatgatgatcagttttgtatcaaccttgcggccaaaaatatgaaaggcttgaagagaatcttaaagcccggtggagttataacggcccaagtcggttgcatgtctaaaaaaccgaaacaagtaaaaaattggatggaattgttaagaagtaactttgggaatgtggagttaagcgaagtttttatccgaagttttgattg

SEQ ID NO: 240790 - DNA, 1042 bp, Unknown
  Bacterial polypeptide expressing nucleotide sequence isolated from the Sargasso Sea
atgattaaagttggggaacatattactttagatattataggtactacaaaagagtacgattcttcagtctatgaaaaagttatacataaaatagctaaagcagccaatgtaactatcttaaatatttcaaaatataaatttgaacctcaaggttttactattttagcgttattggctgaaagtcatattagttttcatacatttccagaaaatggaataattagttttgatttttttacctgtggtaaaataagcccatcagtagcaattgatattgttaaaaaagaatttgaacataaaagaattgttaaaaaagaatttaatagagataccagatctctttaccatgatatttatagttcacctggattacaaaaatcatatgttgtaaatgaagttttagaagactttaaatcaaaagttggtcaacacattgaaattttagaattagaacaatttggaaaatctttatttattgatggtgaaatacaggtagcggcatcagatgaacatttatatagctcaacttttgttggagcaggtctgaatttaaataaaaaaaatgaaagagcagcaataattggtggtggtgatggtggtgttgcaagagaatgtatttcaaagaagtttaattttatagattggtacgaattagatccagaagttgtagaagtttgcaataaacatcttggtgatataggaaaaaaatctacagaaaagaattctgtaaaatgtgtgtggggtgatgcttttgaaagcataaagacagtgaacgaagatacttatgatcatatttttgttgatctaaatgatgaccagttttgtatagaccttgctgctaaaaatatggactctctagtgagaatacttaaacctaaaggagttattactgcccaagtgggaagtcaggataaaaaacctcttcaagttgaaaattggttgaatgtatttaatcatcattttggaaacactaatttatccagagtttacatacctagttttgattgttcttggaatttctcttcttcgataaaccactaat

SEQ ID NO: 240791 - DNA, 1042 bp, Unknown
  Bacterial polypeptide expressing nucleotide sequence isolated from the Sargasso Sea
atgattaaagtaggcgaacacatcacaatagatttcttaggtgttaaaaaagattattcaccagagttttacgaaaaagtaatttataaaattgctaaagctgcaaaagttgaaattttaaatgtttcttctcatagatttgaacctcaaggttttacattggttgcactacttgcagaaagtcattttagttttcatacatttccagaaaaaaatgtaattagctttgatttctttacatgtggtaaagttaatccaaaagttgctcttaagatccttagaaaagaaatcgatcatactagagtagttactcatacatttgatagaggtagcgtaggtttatatgacgatatttatagcactccaggtcaaaagaaattttacgttgttaaagatgttttagaaaaatttacttccaaagtaggtcaatttgtagaaataatggatctagaagaatttggacatgctttatttattgatcatgaaattcaagttgctgaaaaagatgaaaaaatttatagctcaaacttttttaagtctagtaatgatttaagcaagaaaaataataatgttgctatcattggaggtggggatggcggagtagcgagagctagtttggaaaataatgctaattatatagattggtttgagttagatcctgaaatagttgatgtatgttatcgtcatttaccgaaggtttgttctaaagttaaaaaaagcaataaggttaaaactttttggggtgatgcatttaaaagcataaaagaaatagaagattctaaatacgataaaatttttgtagacttgaacgatgatcagtactgtattgatcttgctagaaaaaacatgaaaggtctcaaaagaattctaaaaaaaggtggagttatcactgcacaagtaggcagtaaagataaaaagcctaagcaagtagaaaattggtgcaaagtgctcgataaaagctttggtaatgtaaaagtttcaggtgctcatattccaagttttgactgtaattggaattttgcatcttccatcatgaaataac

SEQ ID NO: 240792 - DNA, 1042 bp, Unknown
  Bacterial polypeptide expressing nucleotide sequence isolated from the Sargasso Sea
tatgacgaaagtaggggagcacgtcacttttgacattattggaactcaaaaagagtacgatccaaaattttatgaaaaattagtatataaaattgcaaagaaagcaaaagtagtagttctggaaatttcaaaatataaatttgaacctcagggctttaccttggtggcacttttagctgaatctcatattagttttcatacatttcctgaaaaaggaattataagttttgatttttttacttgtggcaagatatctccttctgttgcattagaggtattaaaaaaagagattaaacatacaaggattgtaaagaaagagtttaatagagatacagttgattattatgatgatatttatagctcacctggacttaagaaatattatattgttaaaaatattcttgaggattttacatcaaaagtaggacaacacattcaaattttagatctagaacaatttggtaaagctttatttatagataatgagttgcaggtagcagagaaagatgaacacctttatagctctacttttgtaaattctggattgaaacttaattcagaaaaaaataattcagctataattggaggtggggatggaggagtagcgagagaatgtattaatcaaggtttcaattatttagattggtatgagcttgatcctcaagttgttgatgtatgtgaaaaacatttaagtaaagttggacaaaaagctacaaaaaagaattctgttaagtgtgtatggggtgatgcctttgaaagtataaaaaaagttgaagataataaatatgataaaatttttgtagatttaaatgatgatcaatattgtatagatttagctgctaaaaacattaagtctttaaaaagaattctaaaaccaaatggcactattacagcccaagttggtagccaggacaaaaaaccaaaacaagttgaaaaatggttaaatttatttaaaaaaagttttggtaattcttctctagatagaatttacataccaagtttcgattgttcttggaattttgcatcgtcattaaataaataa

SEQ ID NO: 240793 - DNA, 1042 bp, Unknown
  Bacterial polypeptide expressing nucleotide sequence isolated from the Sargasso Sea
ttgaccaaagttggagaacatataactcttgatataattggaactactaaagagtatgatccatctgtttttgaaaaagtaattaacgaaattgcaaaagctgcaaaagttacaattttaaatatttcaaaatataaatttgaaccacaaggatttacaattttagcattattggctgaaagtcatataagttttcatacatttcctgaaaaaggaattattagttttgatttctttacatgtggaaaagtaagtccatcagttgcaattgatataataaaaaaagaatttaaacacaaaagaatagttaaaaaagaatttaatagagatacaaaatcactttatcatgatatttatagctcaccaggtctacaaaaatcttacgtagtaaatgatgttttagaagattttaaatctaaagtaggtcaacatatagaaattttagatttagagcaatttggtaaatctttgtttattgatggtgaaatacaagttgctgctactgatgaacatttatacagctctactttcgtcggttccggtttaaatttaaataaagataatgaaagagctgctatcataggtggtggagatgggggagttgcaagagaatgtatttcaaaaaattttaactttatcgattggtatgaattagatcctgaagttgtagatgtttgcaataaacatcttggagatattgggaaaaaagcaactgaaaagaattctgtaaaatgtgtttggggtgatgcttttgaaagtattaaaacagtaggtgacgatacttatgatcatatctttgttgatttaaatgatgatcaattttgtatagatttagctgcaaaaaatatggactctttagtaagaatattaaaaccaaaaggagttattaccgctcaagtggggagtcaggacaaaaaaccacaacaggttgaaaattggctaaatgtttttaatcaaaactttggaaatgctaaattagcacgagtttacatacctagctttgattgctcttggaatttttcttcatcaattaatcattaat

SEQ ID NO: 240794 - DNA, 850 bp, Unknown
  Bacterial polypeptide expressing nucleotide sequence isolated from the Sargasso Sea
ttccatacatttccagaaaaaggcattatcagttttgatttctttacatgtggaaaagtaaacccgtcagttgcaattgatattataaaaaaagaatttgagcataagagaatagtaaaaaaagaatttaatagagatacaaaatctctttattacgacatttatagttcaccaggtttgcaaaaatcatatgtagtgaatgatgttttggaggactttaaatctaaagtaggtcagcatattgaaattttagatttagagcagtttggaaaatctttgtttatagatggtgaaatacaagttgcttcaactgatgaacatttatacagctcaacatttgtaggatctggtttagatttaaataaagacaatgaaagagctgcgataattggtggtggagatggtggagttgcaagagaatgtatttctaaaaattttaactttatagattggtacgaactggatccagaagttgtggatgtttgtaataagcatcttggagatattggaaagaaagcaactgaaaaaaattcagtaaaatgtgtttggggtgatgcatttgaaagtattaaatcagtaggagacgatacttataatcacatttttgttgatctgaatgatgatcaactttgtatagatttagctgcaaagaatatggactctttgataagaattttgaagcctaaaggggtaattaccgctcaagtaggaagtcaggataaaaaaccacatcaggttgaaaattggttaaatgtttttaatcaaaattttggaaatgcaaaattatcaagagtttacgtgcctagttttgattgttcttggaatttttcttcttcaataaatcattaat

SEQ ID NO: 240795 - DNA, 817 bp, Unknown
  Bacterial polypeptide expressing nucleotide sequence isolated from the Sargasso Sea
ttttgatttttttacgtgcggaaaagtaaatcctaatgttgcattcgatattttaaagaaagaaattaagcataagagaattgttaaaaaagaattcaatagagacacaataagttattatgatgatatctatagctcaccaggtttaaaaaagcattacatggtcaaagatgttttggaaaactttacatcaaaagtaggtcaaaacattgaaattttggatcttgtacaatttggcaaatctctttttatcgatggtgaacttcaggtagcagaaaatgatgaacatttgtatagctcgacatttgttaactcaggtttaaaacttaatccatcaaatgataaaactgcaataattggtggaggcgatggaggagttgcgagagaatgcatatctaaaggttttaaattaattgattggtacgagttagatcctgaagttgtaacaatgtgtgagaaatatttatctaaggtaggtaagaaatcaactacaaaaaatcatgtgcaatgtgtatggggagatgcatttgaaagtattaaatcagttgaagacaataagtatgataaaatttatgtagatttaaacgatgatcaatattgtattgatttagcagcaaaaaatatcaaatctttaaaaagaattcttaaaccaaatggaactataactgcacaagttggtagccaagataaaaaacctaagcaagttgataaatggttaaatctttttgaaaaaagttttggcaacacatccttagacagagtttatattccaagctttgactgttcttggaattttgcttcctctttgaataaataa

SEQ ID NO: 240796 - DNA, 855 bp, Unknown
  Bacterial polypeptide expressing nucleotide sequence isolated from the Sargasso Sea
taagttttcatacatttcctgaaaaaggcattattagttttgatttttttacttgtggtaaagttaatccaattgttgctttagatattttaaaaaaagaaataaatcataaaagaattgtaaaaaaagaatttaatagagatacagttagtctatatgatgatatttatagttcgccaggtttaaaaaaatattacatggtgaagaatgttttagaagacttcacatcaaaagttggtcagcatattgaaattttagatttagaacaatttggtaaatcattatttatagataatgagttacaagttgctgaaaaagacgagcacttgtatagctcaacttttgtaaattcaggtttaaaattaagtcaaaaaaaagaaaaagcagctataatcggtggcggagatggaggagtagctagagaatgtataagcaaaaactttagttttatagactggtatgaattagatccagaagttgttgaagtttgtgataaatatttatctaaagttgggaaaaaagctacaagtaaaaattcagtaaaatgtatttggggagatgcttttgaaagtattaaaaaagtagaagataataaatacgacaagatatttgttgatcttaatgatgatcaatattgtattgatcttgcagctagaaatattaattcactcaagagaatattaaaaccaagtggaactattactgctcaagtaggaagccaagataaaaaaccaaaacaagttaataattggttaaaattattcgacaaaagttttggaaatactgcattagatagagtttatataccaagttttgattgttcttggaattttgccacgtcaataaacagataat

SEQ ID NO: 240797 - DNA, 118 bp, Unknown
  Bacterial polypeptide expressing nucleotide sequence isolated from the Sargasso Sea
atgggtgtaataaatatgacaccagatagtttctctgatggtggaaaatataataaaataaatttagctttaaaacgtgctaaatattttataaaaaaaaggttgtcaaataattgat

SEQ ID NO: 240798 - DNA, 526 bp, Unknown
  Bacterial polypeptide expressing nucleotide sequence isolated from the Sargasso Sea
tttgataatgggaataataaacatgacaccagattcatttagcgatggaggaaaatttaactcaattaatagcgctattgattatgcatataagctattggatactggtgcagatatacttgacattggtggagaatcttcacgacctggggcagacccagtttcaaatagtgaagaaattgatcgcatatcccctttaataaaggaattaggtaaaaatgctaattgcttgatttcagttgatacttataaatcatcaacagctaaatttggccttgataatggagcaacaattattaatgatatttctggactgacatatgattcagagatggcaaatgttatttccaatttcaatgcagcggttgtggtaatgcatatgaagggcactcctaaaaccatgcaaaaaaatccaaattattttgatttaattaaagaaattaaaagttttttttctaagcaaatagaatttgcaattaaaaatgggatcaatagaaaaaatattatactagaccctggtatagga

SEQ ID NO: 240799 - DNA, 765 bp, Unknown
  Bacterial polypeptide expressing nucleotide sequence isolated from the Sargasso Sea
attgcaaattatcaataagagaaatccatggccaaaaggctggggccaaaaaacatcaattatgggagttattaatttaactcctgattcatttagtgatggaggggaattaaattcttcaaaaaaagttttagatcaagtaaatcatttcttgagtaatggtgttgatgttattgatcttggtgctcaaagtacaagacctggggctgaagaagttggaactagtgtagaaatagaaagattgatcccatatctaaaattaataaaatctgaatttccagatgttttaatttctattgatacttttaattctgaagtggcttatgaagcacttttaaatggtgctaattggataaatgatgtaacgggaggaagaagagacataaaaattttggatgttgcatcaaaattcaagtgtccattcgtcataactcatagtcgcggtaatagtcaaaatatgaatcaactctctaattaccagaatgtattgagtgatgttaagtgctctcttgataatttaataaagaatgctttagaaaaaaatatatctgaaagaaatataatagtggatcctggaattggtttttcaaaggatatcaatcataatttggaaatcttgagaaacttagatgaatttaaaaaatggaatttgccaattttgataggtgcatctaggaagagatttataggagaaattttgaatgagaaaaatcaaaaagaaagggatataggaacacttgcaataagttgtctttgttctcaatt

SEQ ID NO: 240800 - DNA, 705 bp, Unknown
  Bacterial polypeptide expressing nucleotide sequence isolated from the Sargasso Sea
aaatcaataaattaattaatgatggagcaaagataatagatgtaggaggagaatctactagaccaggttcaaaagaaataaagcaattaaaagagtggaataggattaaaaattctatgaagtacttaaagaaaaataaattttttgtttccgtagacacaagaaaaagcttagtgatgaaaaaagcgttaaattataaattagacttagttaatgatatatctggtttaagttacgataaagatacaatagaatttttaaaaaaaactagactgccatttgttttacatcacattaaaggaacgcctaattctatgcaaataaagccaaattacaaaaatgttttattagatatatatgattattttgaagaaaaattgaagcaaataagaaaaaagggaattaagcacaataatataatattagatcccggcattggttttggtaaaaatttgaaacataatattaccctaattaataaaatttctatttttcattctctaggtttaccaataatgttaggggtttctagaaaaagatttataaaagatatatctggattaaatgacagtaaagaaagagttggcggaaccgttgcatcttgcatttatagcatgtcacaaggggtacaaatattaagagtgcatgacgttaatgaaatcaatcaaggaattaaggtatttaaaaaattaaattatcaataat

SEQ ID NO: 240801 - DNA, 565 bp, Unknown
  Bacterial polypeptide expressing nucleotide sequence isolated from the Sargasso Sea
ttgaataagaatttcagaaatagttcattcagaaaatggataaaaaaaacaaatagaaatactctaataatgggtattttaaacattacacctgattcttttagtgatggaggaaaatatttaaataaaaagacagctttaattcacgcaactaatttaatcaatagtggtgcagatattatagatgttggtggggagtcatctaggccgggagctttaccaattacaatagatgaagaaaaaaatagagttatacctattatttctgatttgaggaaaaaaaatcctgaaattctgatatctgtagatacttgcaaatcagaggtcgctaaagaagctatagaagttggagcagatattataaatgatatatctggtatgaaaaatgatagaaagatgtctaatgtaattcaagaaaataaaataccaattgtcataatgcatatgaaaggtcttccgataaatatgcaaaaaaatatttcatataataactttttagatgatattttatttttttttaaagaaagattagaatacgcgaaattatataacattcaaaaagatc

SEQ ID NO: 240802 - DNA, 715 bp, Unknown
  Bacterial polypeptide expressing nucleotide sequence isolated from the Sargasso Sea
ggaattaatcatgcgattagtttattcaattgtggtgcaaatttgattgatattggtggtgagtcgacacgccctggatcaaaagtaattaaagaaaatttagaatggcaaagaattgaaaaaattttaaaattattaattaagaaaaaaataccaatttctttagacaccagaaagtctagaattatgagtaaaggaatagatttaggagttaaattaattaatgatgtctcaggattagaatttgataccgaaactttaaatatattaaaaaaatataaagtaccatttgtaattcagcattcacaaggaactcctgaaaacatgcaaaaaaaccctagatataaaaatgagttactagacatatatgatttttttgaaaaaaaaataaaacttctaagatcgaagggtattaaacacaataaaattattctagatcctggtataggttttggaaaaaatttgaaacataatatgaatttaatacgcaatatttctattttccattctcttggttttcctatacttgtgggcaattcaagaaaaagatttattaaggagttatctggaaaaaatgatagtaaattcagaaacgggggaacaatagcatcatcaatataccttatgatgcaaggggttcaaattttaagaattcatgatgttaatgaaacaatacagggattaaagatctttaagaatattataaataattaat

SEQ ID NO: 240803 - DNA, 679 bp, Unknown
  Bacterial polypeptide expressing nucleotide sequence isolated from the Sargasso Sea
gcagatctaattgatataggtggagagtcgacaagaccaggatcaaaaggtatttctgaaagattagaatggaacaggattaataaaattttaaaattgttaactaaaaaaaaaataccgttgtctttagacactagaaaatcaaatattatggagaaaggaataaatcaaggtgtacgactgatcaatgatgtatcgggtctagatttcgatgttaacacaataagtgtacttaaaaaatataaagttccatttgtgatacaacatgcaaaaggtcttccagaaaacatgcaaaaaaaaccaagttataaaaatgtgttattagacatatatgatttttttgaggataaaattaaactattaagatcaaaaggtataaaacataataatataattttagatccaggcataggttttggaaaaaatttgaaacataatatgagtttaattcgtaacatttctatttttcattctcttggatttcctatacttgttggaaactcaagaaaaaggtttattaaagatttatctggaaaaaatgatagtaaatctagaattggaggaacgatagcatcatcaatttatttaatgatgcaaggagttcaaattttaagaattcatgatgtaaatgaagttacacaaagcttaaagatttttaaaaaaattatgaataattaat

SEQ ID NO: 240804 - DNA, 688 bp, Unknown
  Bacterial polypeptide expressing nucleotide sequence isolated from the Sargasso Sea
gatgggggttttgaatgtgactcctgactccttttcagacggaggaaaattctggtctttcgataaagccctggaacatgctcgaaagatgatttctcttggagcagattggctcgatatcgggggagaatcaagcggcccgggaagcagagagatttctctcgatgaggaattatccagggtgatgcctctgattgaagtccttcgcagggaaagtgagatctggctttctgttgatacctggaaatcagccgttgccgccgaagccattgatggcggggtcgattgtgtgaatgatgtgactgcgcttcggggggatcccaaaatggcttctctcatttccaggcaaggatgtgcgctggtgatgatgttttctaaggattcatccgcaagaaccacaaaaaaaatggttcattatgatgatgtgatcctgacggttcgtgattttttcatcgaacgccttggttatgcgagtgaaatgaaaatccctgctgatgcaatcatgctcgaccctgggatggggcattttatcagttccgacccaaaatacagttttgaaatcatccgcaggttttcagaattcagtgacttgcaaaaatccatgctgatcggtccttcaagaaaatcttttttggctaaggtttcttccgggatcgaattgtctcctcttgaaagggatttcccctgc

SEQ ID NO: 240805 - DNA, 799 bp, Unknown
  Bacterial polypeptide expressing nucleotide sequence isolated from the Sargasso Sea
atgctcttttctgataaagagcttaattttgatattcccaaagtcatgggaataataaatctgacccccgattctttttcagatgggggtaggtttatttctaaaaaatctcttaaagtagatagatcaaaggtgcttaaagaaattgaagcaatggagaactctggagcttcttttatagatataggcgctgaatcaactaggccaaattcgttgagaatttctgctcaagaagagatggatagattaatgccaatcttagaagaaataaaaaatattcgagcagttgtttcgatagattcttctaaaggagaagtaatatttgaggctataaaaaagggagtcaatttaattaatgacataaattctttagaagataaaaaatctttggaattagtaaaaaaatataatcttccggtatgcataatgcataaaaaagaaaacctattaaaaaatccaatttgtttagaaattgaaaattttttctataataagcttaaagaactttccgaaaagggtatttctaaagaaaaaatcattttagatcctggatttggttttaagaaaacttctatggagaatttagaaataataagcaaatttgactatacaaaatttgataatttaagtttgataggtatttcaagaaaaggatttttaaaaaaaattacaaaagatagtaatttagatcagacaagtattacaactggtataatttctttattaaatggagcaaagatacttagagtgcatgatgttccgtcaacagtactagcggtagaggaagtttttggctaat

SEQ ID NO: 240806 - DNA, 742 bp, Unknown
  Bacterial polypeptide expressing nucleotide sequence isolated from the Sargasso Sea
gatgggtggaaaattcaataaaaaaaataaagccattaaacatgcggttcatttatttaaatctggatcaaacttaatagatgttggtggagagtctaccagaccaggttcaaaaacaatcaatgaagatttagaatggaatagaattaataaaattttaaaattaattggaaaaaaaattccaatatctttagatacaagaaaatcaagtattatgaagaaaggtattcaattaggtgttaaattaataaatgatgtctctggattaaattttgataatgaaacaataaatgttttaaaaaaatataaaatcccatttgtcattcagcactcacaaggagttccttcaactatgcaaaaaaaaccaagttataaaaatgaattattagatatatacgatttttttgaacaaaaaataaaaataattagatctaagggaattaatcataataatattattttagatcctggaataggttttggaaaaaatttgaaacataatatgaacttaatacacaatatttctatttttcattcactaggttttcctatacttgtaggcaattctagaaaaagttttattaaagaattatcaggaaataatgatagtaaattaaggattggtggaacaatgtcatcttcagtttatttaatgatgcaaggagttcaaatattaagaattcatgatgtaaatgaaattatacaaggtataaaaatttttaaaaaaattataaataattaa

SEQ ID NO: 240807 - DNA, 688 bp, Unknown
  Bacterial polypeptide expressing nucleotide sequence isolated from the Sargasso Sea
aatgatggagcaaaaataattgatataggtggagagtcaactagaccaggagcaaaggatatatcagcaaaaatagaatggaatagattgaaatctgccttacagtatttaaaaaaacaaaattgttttatttctttggatacaaggaaagttttaataatgaagaaaagtttgccttataaaataaatttaatcaacgatgtttctggacttacatatgatgaagatacaattaattttctaaaaaaaagtaaaattccatttattttacatcatatgaagggaactccaaaaactatgcagataagacctaactataaaaatgttctccttgatttatatgatttttttgaaaaaaaattaagtttaataagagaaatgggtataaaacacaataatataattttagacccaggaattggttttggaaaaaatttgaaacataatattactcttataagtcaaatttctatttttcactcattaggttttccaataatgttaggattatctagaaaaaaatttattaaagaaatatcgggagtaaatgatagtaaagaacgaattggcggtacggtatcttcatgtatatactctgctttacaaggtgtgcaaattttaagagtccatgatgttaatgaagttaatcaggcacttaaagtatttaaaaaactaatatttaattaat

SEQ ID NO: 240808 - DNA, 132 bp, Unknown
  Bacterial polypeptide expressing nucleotide sequence isolated from the Sargasso Sea
catgacgccaaatcaccgcaccgcggtgatgggaatcctgaacatcaccccggattcctttagtgatgggggccgctttgaatccactgaaacagcattccgggcagccaagcgcatggccgcccaaggcgc

SEQ ID NO: 240809 - DNA, 134 bp, Unknown
  Bacterial polypeptide expressing nucleotide sequence isolated from the Sargasso Sea
gatgaatatcacccccgactcattttcagacggggggaaattttaccgccgtagtagcgtgatgctcgagcaagtgctcgcccagggcgcggcaatgattgccgatggcgcgcgcatactggatgtgggcggtg

SEQ ID NO: 240810 - DNA, 414 bp, Unknown
  Bacterial polypeptide expressing nucleotide sequence isolated from the Sargasso Sea
aatgaagaagtattatcgtcccatgatccgaactggcaaaaataactcagaaaattcgttcggcctgtgcaatacctctttctggtttgatcatttagaagtttttcaaaggggtaaatcctcctacatcacacctgcaaataaagtaccttcggaaattgttgataacatttgcgatgcgcgcaaaaatcgtttgctatctaaatttcccaaaccagcaattatgggaattctaaacctaactccagatagtttttccgatggaggcgcaaactcgaatgctgaagttgcaattaactcagcaatgtctatgacaaaatctggtgcgaacattatagatattggagccgaatctactagaccgggttccgaccccgttgaggcagaagaggaaatgaataggttggaaccagt

SEQ ID NO: 240811 - DNA, 484 bp, Unknown
  Bacterial polypeptide expressing nucleotide sequence isolated from the Sargasso Sea
gggaggcgccgacatggaagtgcgtgtgcatgatgtgcgccgaacaggttcagttgctatgttcgatggggctgaaagcgatattgagcacatcgctgtcaatcccgccttgccgcatttctttgtgagctcttcaagggatggcgtggcaagaatttatgatatgcggaggagtggcagtgggccggtagtacatgcaggcaaaaatattcatggcatcaatcaggcagcattttctctcgatggtcgatggctctatgtcgcgcttcaaaagaaagactggtctattttcgatgggtatacaggtcagctagtacaggaggtgaggggtcatgcagatgtcgtgacttcgatagcagtttcaggtaacggcgccgtctgtactggctcaaaagacaattcggttttgttgtgggatttatctcttccgagctatcacacgaaaactttaagagcatcaaaggttgagccggatgatttatag

SEQ ID NO: 240812 - DNA, 682 bp, Unknown
  Bacterial polypeptide expressing nucleotide sequence isolated from the Sargasso Sea
ttttaagtggtgccatttagtagatatcggtggagagtctacgagacctggttctaaagctgttaaatctaaaatagaatggaatagaataaaaaaggttttaaaaaagattgataaaaagaaaatgatatctttagataccagaaaatcagaaatcatgaaaaaaggaattaatcttggagtgaaattgattaatgatgtttctggattaaattatgacaaaaattcaataaatatactcaagcaatataaaataccatttgtgcttcagcattcactaagaaatcctaacacaatgcaaaataatcctagatatacaaatgtgttattagatatttatgatttttttgaagaaaagatcaaatttttaagaagtataggtattaatcataataaaataatcttagatccaggaatagggtttggaaaaaatttgaaacataatatgacaataatcaaaaatatatcaatttaccattctttaggattccctatattgctaggaatatcaagaaaaagatttattaaagaaatttcattagataatgatagttctttaagatcaggaggaactattagttcaagtatattcgcaatgatgcaaggtgttcagatattaagagttcatgatgtaaatgaagtaattcaaagtataaaagtatttaaaaagctagttagttaa

SEQ ID NO: 240813 - DNA, 524 bp, Unknown
  Bacterial polypeptide expressing nucleotide sequence isolated from the Sargasso Sea
attgcaaattatcaataagaaaaatccatggccaaaaggctggggccaaaaaacttcaattatgggagttattaatttaactcctgattcatttagtgatggtggggaattaaattcctcaaaaaaagttatagatcaagtagaccatttcttgaataatggtgttgatgttattgatcttggtgctcaaagtacgagacctggggctgaagaagttggatcttctatagaaataaaaagattgattccatatctaaaattaataaaatctgaatttccagatgttttaatttctattgatacttttaattctgaagtggcttacgaagctcttttaaatggtgctaactggataaatgatgtcacgggaggaagaagagatataaaaattttggatgttgtatcaaaattcaactgtccatttgtcataactcatagtcgtggaaatagtcaaaatatgaatcaactctctaattaccagaatgtattgagtgatgtaaggtgctcgcttgataatttaataa

SEQ ID NO: 240814 - DNA, 145 bp, Unknown
  Bacterial polypeptide expressing nucleotide sequence isolated from the Sargasso Sea
atgtcgattctgaatataactcccgattcgttttctgatggtggcacgttttacacgggtaaacaccgacttgatcgtgtgttgaaatacgctgaaggttccatttccgcaggaagcagcatcctagacgttggtggcgaaagct

SEQ ID NO: 240815 - DNA, 127 bp, Unknown
  Bacterial polypeptide expressing nucleotide sequence isolated from the Sargasso Sea
aatgggtatagttaatatgactccagatagcttttcagatggaggtaaatttaactcttatgaaaaagctattagtagaatagataatctaaaaaattccggggctgatattattgatataggagga

SEQ ID NO: 240816 - DNA, 493 bp, Unknown
  Bacterial polypeptide expressing nucleotide sequence isolated from the Sargasso Sea
atgggaattttaaatttaacgccagatagtttttctgatggtggaaaatttgataaaattatatcagcaaaaaaacaaattgataaactaattaaagatggagcaaaaattattgatgttggaggtgagtcaagtaaaccaggctctctagaaataaaaaaatccaaagagtggaatagaataaaaaatacaatgaaatatttaaaatcaaaaaagttttttgtttctttagatactagaaaaagttttataatgaaaaaagcttttaattataaattagatttgatcaatgatgtatctgggttaaatcatgataaacatacaatagactttttaaaaaaaactaaattaccatttgttttgcatcacatgagaggaactccaaaaactatgcaaattaaaccaagttacaaaaatgttttactagatatatatgaatattttgaagcgaaattaaaagaaattagaaacatgggtattaaacataataata

SEQ ID NO: 240817 - DNA, 548 bp, Unknown
  Bacterial polypeptide expressing nucleotide sequence isolated from the Sargasso Sea
tacaacaaagtccatggttgcacaaaaggcaatacaatctggtgctaacattatcaatgatattagcggattttcctatgataataaaatgattgatgttgttcaagaatcaaaagtccctataattattatgcatatgcaaggaaatccgctaaatatgcagaataatccagtctacgatgaccttataacagatatatcttctttttttaagagcaagattaaacttgctatagatgccggaattaaaaaaaagcagattattttagatcctgggattggttttggtaaaacagttggcgacaatttccaattgatcaatcaattgaatgaattttgcaaattaggatttcctgttatgattggcccaagcagaaaatcatttataggaacaaccctcaatctaccagttgatgataggttagaaggtacagctgccgctgtggcagtgggagttatgaatggagctaggattgttcgcgtccacgatgtaaaagaaataaaaagggtagtaaaaatagttgaaaagatcaggactgcagcatgac

SEQ ID NO: 240818 - DNA, 406 bp, Unknown
  Bacterial polypeptide expressing nucleotide sequence isolated from the Sargasso Sea
atgggccaatattacactagaccgtgtaatttttattttgggaaaaattcaataaacaaaatttacgagggtaaagcccttccacttcatgctaataaattaatttcatttagctctttagaaattttaaatagaaaaaaatctaaaattattggaattaatgatgttaaatttttatcagaaaagttaaaacataaaattaaaaaagacttaaaaaatattaccaaaaataaaaaatttaaaaatctaaaattttcaatctcaccagtattaatgggaattataaatttaacaccagatagtttctctgacggtggaaagtataataaaaaaaaattgtccatcactaggaaaaaaaatttaataaaaagtggcagtactattttggatattggtggtgagtcca

SEQ ID NO: 240819 - DNA, 307 bp, Unknown
  Bacterial polypeptide expressing nucleotide sequence isolated from the Sargasso Sea
atgaaggaatattttcgacctatactaagatctgattctgtgaagccaaaaaaagccttttatctggctggtcaaaatttgtggtttgatcagattgaagtactgagcagaaaaaaaaaaccacgtatcattagtgttactaatgtatctgagttggttataagtattttggttaaaagaagagtttgttcaatttttaataatttcgaacggcctctcgtgatgggaattctaaatttgacccctgacagtttttctgatggaggaacttatttcagaccacagtcagcttttatggcaattaaag

SEQ ID NO: 240820 - DNA, 177 bp, Unknown
  Bacterial polypeptide expressing nucleotide sequence isolated from the Sargasso Sea
attgcaaattatcaataagaaaaacccatggccaaaaggctggggccaaaaaacttcaattatgggagttattaatttaactcctgattcatttagtgatggtggagaattaaactcttcaaaaaaagttttagatcaagtaaatcatttcttgagaaatggtgttgatgttattga

SEQ ID NO: 240821 - DNA, 712 bp, Unknown
  Bacterial polypeptide expressing nucleotide sequence isolated from the Sargasso Sea
ggtggaaaatataataaaaaaaaagcaggactaattcaagctagaaaattgtttcatgatggatgtaaaattttagatattgggggagaatctactaggcctggatcaaatgatattaatcctataaaggagtgggaaagaattgctccaactttatttcaaataaaaaaaatgaaaaaaataatttctttagacaccagaaaaagtttagtaatgaaaaatggaataaaaaataaagtaaatattattaatgatgtttcaggttttcaatatgatcaaaatacgattaaagttttgagggaaagcaacacaccatttgttattcatcacatgcaaggtaaccctaaaacaatgcaaaagaagcctaagtataaaaatgttattttagatatttatgatttttttgaacataaaattaaatatgtaagatctaaaggaattaaacacaataatataatattagaccctggaataggttttggtaaaaacttgaaacataatattaccttattgagaaatatttctatttttcattcgttaggatttcctgtaatgttaggaacatcaagaaagagatttatcaaagatttatctggagtaaatgatagtaaagaaagattgggtggaactatatcgtcaagtttatttgcaatgatgcatggcatacaaattttaagagtacacgatgtaaatgaggttaaacaaagtataa

SEQ ID NO: 240822 - DNA, 743 bp, Unknown
  Bacterial polypeptide expressing nucleotide sequence isolated from the Sargasso Sea
agatggtggcaaatataataaaaaaaatttagcgttaaaacatgtaaataacttattatcaaatggcgcaaagataatagacgttggtggagagtctacaagaccaggtgcaaaagatattaatcctagaaaagaatgggatagagtaaagtttatcttaaaaattttaaaaaataaaaaaagttttgtttcattagatactagaaaaagttttgtgatgaagaatgcctctaaaataaaagtagatcttataaatgatgtttctggactaagttatgatcctgagactataaattatttaaaaaaaacaaaaaaaccttttgtcattcatcacatgaaaggaacaccaaaaagtatgcaattaaaaccatcttacaataatgtattgcttgatatttatgatttctttgaaaataaattaaaatatttaagaaacgaaggtattaagcataataatattatattagatccaggtatcggatttggaaaaaatttgaaacataatattactcttttaaagaatatttctatttttcattcactaggccttcctgtaatgttgggcttgtctagaaaaagatttattaaggatatttcaagagaaaatgatactaaagaaaggattggtggaactgtttcttcatgtattcaagcataccttcaaggagttcaaattctaagggttcatgatattaaagaaattaatcaagcatttaaagtatttaaagaattacaaaactaaa

SEQ ID NO: 240823 - DNA, 131 bp, Unknown
  Bacterial polypeptide expressing nucleotide sequence isolated from the Sargasso Sea
aatgggtattttaaacttaactccggatagtttttctgatggaggtaaatataataaaaaaaaggcggcactaatccaagctaaaaaattatttaatgatggatgtaaaattttagatattggaggagagt

SEQ ID NO: 240824 - DNA, 687 bp, Unknown
  Bacterial polypeptide expressing nucleotide sequence isolated from the Sargasso Sea
aaagtggtagcaccattttggatattggtggtgagtccacaagaccaggatctcatgaagtaaatgagatggttgaatggaaaagaattgaaggatttttaaaaaatagaaaaaaatttaatagtttaatttctttagatacaagaaaaaaaaatatcatggaaaaagcttttaagtacaaaatagatataataaatgatgtttcgggaatgacatataataccgatacaaccaattttcttaaaaaaacaaaaatcccatttatcattcatcatatgcaaggcacacctaaaactatgcagaaaaatccaaagtataaaaatgttgttttagatatttatgatttttttgataaaaaaattaatgaaataagagcaatgggaataaaacataataatattattttggatcccggaatagggtttggtaaaaacttgaaacataatattactattttaaatcaagtttctattttccactcattaggctttcctataatgttaggaatatcaaggaaaagatttatcaaggatttagcaggaaataatgatagtaaagaaagaataggaggaacagtctcgtccagtatttgggcaatgactcaaggtatacaaatacttagaattcacgatgtaaatgaggtaaatcaagcgataaagatatttaaatcattacactttatataat

SEQ ID NO: 240825 - DNA, 738 bp, Unknown
  Bacterial polypeptide expressing nucleotide sequence isolated from the Sargasso Sea
gaaaatttaacaaaaaagataagtcttttaaacaaatatcaaaaatgattaattctggagctaaaattattgatgttggtggggaatcaactagaccaggatcaaaaagtatagacacaataactgagtggaaaagagtaaaagaagttatcaaatcatttaaaaagaaaaataaaagaatttgtctatctttggatacaagaaagtcagatcttatgatgaaaggtataagatatggagtagatttaattaatgatgtttctggatttaagtatgataaagacagtttaaataaaatcaaacaacataaaagtgtcactaaggtagtacatcatatgaaaggaacccctaatacaatgcaaattaatccaaagtataataatgttttgttagatatttacgatttttttcaaaaaaaaattaataataaaattattggtaaaaagataatattagatccaggtattgggtttggtaaaactttgaaacataatttgagtttaatttctaatatttctctgtttcatagtttaggttttcctataatgattggaacttctagaaaaagatttataaatcagatatcaggaaaaaatgatagtgaggatcgaacaggaggcaccattgcatcagttctttatttgttatctcaaggagtgcagatttttagagttcataatgtaaatgaggtcaaacaaggaatactagtttttggaaaaatcttaaataatagatgaa

SEQ ID NO: 240826 - DNA, 352 bp, Unknown
  Bacterial polypeptide expressing nucleotide sequence isolated from the Sargasso Sea
atgattagcagtattaatatttttggtattttaaatattacccctgactctttttctgatgggggagcttatatagatgataaaaaagcatttaaacatgtggaacgtatgattaaaaatggtgctcaaggaatcgatgtaggtgcggaatcttctcggcctggctcagaacgtatttctataaaagaagaaattaaacgtttaaaaccagttattacaacatttaaaaaatattttgatgttacactttcggtggatactacgaagtcgcaagtcgcggaatttgcattgaactatggagcagatattattaatgatatctcagcttgtcgagatgatattaatatggctt

SEQ ID NO: 240827 - DNA, 598 bp, Unknown
  Bacterial polypeptide expressing nucleotide sequence isolated from the Sargasso Sea
attgcaaattatcaataagaaaaatccatggccaaaagggtggggccaaaaaacttcaattatgggagttattaatttaactcctgattcatttagtgatggtggggaattagactccacaaaaaaagttatagatcaagtagaccatttcttgagcaatggtgttgatgttattgatcttggcgctcaaagtacgagacctggggctgaagaagttggatctagtaaagaaataaaaagattgatcccatatctaaaattaataaaatctgaatttccagatgttttaatttctattgatacttttaattctgaagtggcttatgaagctcttttaaatggtgctaactggataaatgacgtcactggaggaagaagagatataaaaattttggatgttgtatcaaaattcaactgtccattcgtcataactcatagtcgtggtaatagtcaaaatatgaatcaactctctaattaccagaatgtattgagtgatgttaaatgctcgcttgataatttaataaaaaatgctttagaaaaaaatatatctgaaagaaatattatagtagatcctgggaatggtttttcaaagaatatc

SEQ ID NO: 240828 - DNA, 713 bp, Unknown
  Bacterial polypeptide expressing nucleotide sequence isolated from the Sargasso Sea
aaataagtcaataaatcatataacagacatgataaaatcaggagcaaatataatcgatgtgggaggagagtcaactagacctggttctaaaaatattgatcctatagttgagtggaaaagagttaaatatgtaattgaaaaatttaaaaaaaaatataaaaaaacttgtttgtctattgatacaagaaagtcttatttgatgaccaaaggagtcaaaagaggtgtcgatttgattaacgatgtttcaggctttagtcacgatcgtgatgctttacgtaaactaaaaaaatataatgttgctaaagtccttcatcatatgcaaggaacaccaaacacaatgcaaaaaaatccaaaatataaaaatgttttgcttgatatctatgattttttcgaaaaaagtttaaaaaaattcgataataaaaaaattattttagatcccggtattggatttggtaaaaatttgaaacataatttgactttaatttctaagatatctttgtttcatagtcttggattcccaattttgataggtacctcaagaaaaagatttatcaatcaaatatcagggaactttgatagtaaagatagaacaggcggaacaattgcttcagttctttttttactatcacagggagtgcagatttttagagtgcataatgttaaagaagtgaaacaaggaattttagtatttaaagaaatattatctaactaat

SEQ ID NO: 240829 - DNA, 562 bp, Unknown
  Bacterial polypeptide expressing nucleotide sequence isolated from the Sargasso Sea
ttgcaaattatcaataagaaaaacccatggccaaaaggctggggccaaaaaacttcaattatgggagttattaatttaactcctgattcatttagtgatggtggagaattaaactcttcaaaaaaagttttagatcaagtaaatcatttcttgagaaatggtgttgatgttattgatcttggtgctcaaagtactagacctggggctgaagaagttggatctagtatagaaataaaaagattgatcccatatctaaaattaataaaatctgaatttccagatgttttaacttctattgatacttttaattctgaagtggcttacgaagctcttttaaatggtgctaattggataaatgatgttacgggaggaagaagagataaaaaaattttggatgttgtatcaaaattcaactgtccattagtcataactcatagtcgtggtaatagtcaaaatatgaatcagctctctaattaccagaatgtattgagtgatgttaagtgctcgcttgataatttaataaagaatgctttagaaaaaaatatacccgaaagaaatataa

SEQ ID NO: 240830 - DNA, 794 bp, Unknown
  Bacterial polypeptide expressing nucleotide sequence isolated from the Sargasso Sea
gcgatgtcgcttgatgggcatcctcaatgtcaccccagactcctttcatgcagattctagagttgaacttgattcggcggttgaacgtgcgatggaaatgtggtccgatggcgcagattgggttgatattggtggtgaatcgactcggccgggtgcagaccctgtcaatctacaggaggagatagcccgcgtcattcctgtgattagggccattcgcaaggctaaccctacaggattgatttcaattgatacacgccgatttgaggtcgcacgtgctgcactcgaggcgggtgcaaacatgatcaatgatgtcagcggtttacgcgaccctgaaatggcagacctcgttttggagcaaggttgtgctgtttgtgtcatgcacatgcagggcgagccaggcaatatgcagcagaatcctcaatacgaggatgttcacaaagaggtctacgaaacactgaatgaaaccgcagcagccctagttgaaggtggacataaccctggtctcatctgtttagatccagggattggatttgggaaaacattgacccataatcttgagttgcttcactctcgcagtgattccgactatagcatattgtggggcgtcagccgaaaatcgatgtttggccaattgttgggtcggactggaaccgatgaacggttgtctggaacactggctgttgctgcccacgccatgctggaaggggtcgacattttgcgcatacatgatgtgcgagcacatgctgacttgctcaccacgttggcaacattgcgaccggaggtcgatgcttgac

SEQ ID NO: 240831 - DNA, 100 bp, Unknown
  Bacterial polypeptide expressing nucleotide sequence isolated from the Sargasso Sea
catgggaatactaaacgttacaccagactcttttagtgatggtggcaggtttactgatattaatatcgcagttgaccacactttaaaaatgatagatgat

SEQ ID NO: 240832 - DNA, 760 bp, Unknown
  Bacterial polypeptide expressing nucleotide sequence isolated from the Sargasso Sea
aacacctgatagtttttctgacggtggaaaatttaataatattttttctgcaagaaaacagattgataaattaataattgatggagccaaaataattgatgtaggtggagagtcttcaagaccaggttcaaaagaaattctaaaaacagaggagtggctgagggtacataaagttatgaattatttaaaatcaaaaagtttttttgtttctttagatactagaaaaagttttgttatgaaaaaggcttctaaatataaactaaatttaattaatgatatatctggactaagtcatgataaggagacaattaattttttaaaaaaaacaaagttaccattcgttcttcatcatatgaagggtaacacagaaacaatgcaaaaaaatcctagttataataacgttttgttagatatatatgactatttcgtagataagctaagattaattcgaaaaagtggaattaaacatgatcacattattttagatcctggattaggatttggtaaaaatatgaaacataatattaccctaattaacaatgtttcaatttttcattctttaggattaccagtaatgttgggaatttccagaaagagatttataaaagatatatctggaaataatgatagtaaagaaagaataggtggaactgtgtcctcaagtatctttagcatgttacaaggagtacaaatactcagggttcatgatgtcaatgaagtgaatcaaggaattaaagtttttaaaaagttaaatttttag

SEQ ID NO: 240833 - DNA, 787 bp, Unknown
  Bacterial polypeptide expressing nucleotide sequence isolated from the Sargasso Sea
attgggagttattaatttaactccggattcatttagtgatggaggagatttagattcctcaaaaaaagttttagatcaagtaaatcattttttgcgtaatggcgtggatgttatagatcttggtgctcagagtacaaggcctggtgctaaagaagttggtcctagtatagaaataaaaagattgatcccatatttgaaattaataaaatctgaatatccagaagttttaatctctattgatacctttaattctgatgtcgcttatgaagctcttttaaatggtgctaattggataaatgatgtcactggaggaagaagagatataaatattttggatgtcgtatcaaaatttaactgtccattcgttataactcatagtcgtggtaatagtcagaatatgaatcaactctctaattacaagaatgtattgagtgatgttaagtgctcgcttgataatttaataaagagtgctttagaaaaaaatatatctgaaagaaatataatagtggatcctggaattggtttttcaaaggatatcattcataatttggaaatcttgagaaacttagatgtatttaaaaaatggaatttaccaattttaataggtgcatcaaggaaaagatttataggagaaattttgcatgagaagaatccaaaagaaagggatataggtacacttgcaataagttgtctttgttctcaatttaatattgatattgtgagagttcacaacgttaaactaaattatcaaattctaaaagtagctgataggatttacagaaaataa

SEQ ID NO: 240834 - DNA, 733 bp, Unknown
  Bacterial polypeptide expressing nucleotide sequence isolated from the Sargasso Sea
aaaatttaacaaaaaaaataaaggtgttagtcatgcaattaacttgtataaaaatggtgcatctttagtagatgttggtggagagtctacaagaccaggatcgaaggaagtaaatgaaaagctagaatggtatagaattaataagatattaaaattaattgtaaaaaaaataccaatatctttagacacaagaaaatctagaattatggaaaatggtattagaatgggggttaaacttattaatgatgtttcgggattaagttatgatttcaaaacagtaaatgttttaaaaaagtataaaattccatttgtaatacagcattcagttgggacaccagaaaatatgcaaaagaatccgacatataaaaatgaattattagatatatatgattattttgaagaaaagattaagttaataaggtctaaaggtatcaaacacaataatataattttagatcctggaattggatttggaaaaaatttgaaacataatatgaatcttatcagagatgtttctatttttcattcattaggttttcctatattggtagggaattcaaggaaaagatttataaaagatatatcaaaaaaaaatgatagcaaaacaaggatcggtggaactatggcttcttcaatttatttaatgatgcaaggaattcagattttaagaattcatgatgttaatgaagttatgcaaggtattaaagtttttaatcagataatcaaaaattaa

SEQ ID NO: 240835 - DNA, 191 bp, Unknown
  Bacterial polypeptide expressing nucleotide sequence isolated from the Sargasso Sea
catgaatatcaaacaatttaatgattggctttcaaatgataaaaagcaatcattaatcatgggaattttaaatgttactcctgattccttttcagatggtggccaatacttcgacaaaaatgttgctgttgagcatgcattagcaatgattagaaatggtgcaaatataattgatattggaggtgaatcta

SEQ ID NO: 240836 - DNA, 609 bp, Unknown
  Bacterial polypeptide expressing nucleotide sequence isolated from the Sargasso Sea
aataaaacattttattaaaaaaggatcatcaattattgatatagggggagagtcaacaagaccaggatctaatgatgtaaatgaaaaaattgagtggaaaaggattaaggaagtattaaaaaaaataaaaaaattaaaaaatgtaatatctattgatactcgaaaaagtaccataatggaaaaaagtttaaaatatggtgcccatatcattaatgatgtttccggactcaattacgatcctaatacactaaaaatcctaagaaataaaaaaactccctttataattcatcacatgcaaggtaatccaaaaacaatgcaaattaaaccttcgtataaaaacgtcttgctagatatttatgacttctttcaaaataaaattttagaactagaggccaatggtataaatcataagaacattattttagatccaggaattggttttggaaaaagattgaaacataatattaccttattaagaaacatttctatttttcattcacttggatttcctataatgttaggcacttctagaaaaagatttattaaagacatttctgggataaacgatagtaaggaaagactacggggaactatatcatctagtttgtg

SEQ ID NO: 240837 - DNA, 568 bp, Unknown
  Bacterial polypeptide expressing nucleotide sequence isolated from the Sargasso Sea
atggcggtaaaatttgcagggtttaatctcgattccccgttgattatgggcatagttaaccttactcccgacagttttagtgatggtggagagacatttaaaacatcagatgctatatccagagctattaaatacattgactctggtgctaatataatcgatgtcggaggacaatctactaagccacattcgcagcctatttctgtaaggcaggaactagaacggattttgccagtagttaagtggttagtcagagagggagtaagtgtatccgtggatacatataaagcagaagttatggaagcggtgcttgatgaaggggttaagatcataaatgatgtgtctgctttaacagctgataaaaggtctctcgaggttgttgcctcagcaaaagcttcagtagttttaatgcatatgagaggtaatccgcataatatgatggcaaacactaattacaaagatgtcgtatgtgaagtatgggagtatttagataatcgaataaaagtatgtgttaatgcggggatcgatttggattgtatagctgttgatccgaggtattggttttagt

SEQ ID NO: 240838 - DNA, 258 bp, Unknown
  Bacterial polypeptide expressing nucleotide sequence isolated from the Sargasso Sea
attgcaaattatcaataagaaaaacccatggccaaaaggctggggacaaaaaacctcaattatgggggttattaatttaactcctgattcatttagtgatggtggagatttaaattcttcaaagaaagttttagatcaagttaatcaatttttttgtaatggtgttgatattgttgatcttggtgctcagagcacgaggcctggggctgaggaagttggatctaataaagaaattaaaagattgattccttacttgaa

SEQ ID NO: 240839 - DNA, 631 bp, Unknown
  Bacterial polypeptide expressing nucleotide sequence isolated from the Sargasso Sea
ttgggggttttaaatttgacacctgacagtttttcagatggaggaaaatttaataaaaaagataaagctattcaacaagccataaatttatttaaatcaggggcaaacttaattgatattggaggggagtccattaggccaggatctaaacctataaatgaaaagttagaatggaatagaataaataaaattttaaaactattgagcaaaaaaataccaatatctttggatacaagaaaatcaaatattatgaaaaaaggaattaaacttggagtaaagttaatcaacgatgtatcaggtttggaatatgacccaaaaactgcaaatgtattcaaacttaacaatattccgtttgtgttacagcattctcaaggccatcctgaagatatgcaaaataatccttcttatcaaaatgaattggtagatatttatgatttttttgtgaaaaaattaaaatttttaagatcaattggaataaatcataataaaataatcattgaccctggaatagggtttggaaaaaatttgaaacataatatgaatttaataaggaacatttctatttttcattcacttggttttcctatacttgtagggaactcaagaaaaaaatttattaaagatatatcag

SEQ ID NO: 240840 - DNA, 735 bp, Unknown
  Bacterial polypeptide expressing nucleotide sequence isolated from the Sargasso Sea
ttgttaaaaaggtttctgcaataaaacaaattaataaattaatattcgatggagcaaagataattgatgtaggaggagagtctacaagaccaggatctaaagaaattcttcaaactgaagagtggttaagagtaaataaaattatggattatttgaaatctaaaaaaatttttgtttctttagatactagaaaaagttttgtaatgaaaaaatctttaaaatataaactagatttaattaatgatgtatctggtttaagttatgatgaggagacgataaattttttaaaaaaaagtcaattaccctttgttttacatcatatgaaaggcactacagaaaatatgcaaaataatccaagttatagaaatgttttgttagatatatatgacttttttgaagataagttaaaaataattagagataggggaatcaaacataaccatattattttagaccctggaataggatttggtaaaaatatgaaacataatattaccctcatcaataatgtttctatttttcattccttgggattgccagtaatgttaggaatttctagaaaaagatttattaaagatatatctgggcaaaatgatagtgaacaaagaataggtgggactgtgtcttcaagtatttttagcatgttacagggtgtacaaatactaagagttcatgatgttaatgaagtcaaacaaggaattaaagtttttaaaaaattaaattgtaatttatgat

SEQ ID NO: 240841 - DNA, 706 bp, Unknown
  Bacterial polypeptide expressing nucleotide sequence isolated from the Sargasso Sea
cagtcatgctattaatttatttaaaactggtgcttcgttagtagatgttggtggagagtctacaagaccaggatcgagggaagtaaatgaaaatcgagaatggtatagaattaataagacattaaaattaattgtaaaaaaaataccaatatctttagacacaagaaaatctgcaattatggaaaatggtattagaatgggggttaaacttattaatgatgtttcaggattaagttatgatcctaaaacaataaatgttttaaaaaagtataaaattccatttgtaatacagcattcagttgggacacccgaaaatatgcaaaagaaagcgaaatataaaaatgaattattagatatatatgattattttgaagataagattaagctaatacgatctaagggtattaaacacaataatataattttagatcctggaattggatttggaaaaaatttgaaacataatatgaatcttataagaggtgtttctatttttcattctttaggttttcctatactagtagggaattcaagaaaaagatttattaaagatatatcaaaaaaaaatgatagcaaaacaaggatcggcggaactatggcctcttcaatatatcttttaatgcaaggaattcagattttaagaattcatgatgttaatgaagttaagcaaggaattaaagtttttaacgagatagtcaaaaattaa

SEQ ID NO: 240842 - DNA, 220 bp, Unknown
  Bacterial polypeptide expressing nucleotide sequence isolated from the Sargasso Sea
atgggtattttaaatattactccagacagtttttcagatggtggaaaattttttaattatgcatcagccaaaaaacaattaaattttcttttaaattctggcgcaaaccttgttgatattggagcagagtccactaaacccggatctaaagctgttaaatcaaaaatagaatggaatagactaaaaaatattttaagattaattgataaaaaaaatttta

SEQ ID NO: 240843 - DNA, 746 bp, Unknown
  Bacterial polypeptide expressing nucleotide sequence isolated from the Sargasso Sea
ttcagatggaggtaaattcaatcgtaaaaatagatcattaaaacatatatctgaaatgataaaatcgggtgcaacaattattgatattggtggagagtcaacaaggcctggatctaaaactgtaaattccaaagacgaatggaatagaattcaatatgtcttaaaaaattttaaaaaaaaatttaagaaaactaccttatctctggatactagaaagtctattttaatgctaaaaggaattgaacttggtgttgatataatcaacgatgtatctggatttaaatatgattcaaattctatttctctgttaaaaaagtatcaagtttcaaaagtactacaccatatgcaaggcacacctacaaccatgcaaactaacccacattatagtaatgtgcttttagatatttatgatttttttgaaaaaaatattaatagaaatttcaaggataaaaaaataattttagatccaggtataggtttcggtaaaactttgaaacataatttgactttgatttcgaagatttctttgtttcatagcctgggatttccaattatgataggtacttcaagaaaaaaatttattagccaaatatcaaataaatttgatagcaaggatagaacaggtgggacaatcgcctcagttctatatttattgtctcaaggcgttcaaatatttagagtccacaatgtacaagaagtaaaacaaggagtattagtatttaatagaattttaatgaataaatgaa

SEQ ID NO: 240844 - DNA, 307 bp, Unknown
  Bacterial polypeptide expressing nucleotide sequence isolated from the Sargasso Sea
atgaaattagggaaatataattttaaactaactagtccaacggtaatgggaatatgcaatgttactcctgactcttttagtgatggtggaaagagttttaaaagttcagatgcactaaaaaatatcaatgaaatgataaaaaacggagcaagtattattgatattggagcagaaagtacaagacctggttcagatccattaacacacaaagaagaagttaaaagattagagccgatattaaaaaaattgccaaaaaataaatttgtcatatcagttgatactaataaaattgaaactcaagaatatg

SEQ ID NO: 240845 - DNA, 610 bp, Unknown
  Bacterial polypeptide expressing nucleotide sequence isolated from the Sargasso Sea
aatgaaattaggaaagtataatttcaaacttaatagtcccgtagttatgggaatatgtaatgtgacacctgactcttttagtgatggtggtcaaagctttaagaaaaaagatgctttaaataacattaataaaatgtttaataatggagcccaaataatagatattggtgcagaaagtgctaaaccaggatctgatccattaagctataaagaagaaattaaaagattagatccaatattaaaaaaactaccaaaaaataaatttgtaatctctgtcgactcatataaaattgaaactcaagaatttgccttaaataatggcgcccatgtaattaatgatatatttggcggctctcaagatctttttgatttaaccaaaaaattcaaaacaggattaattttaatgcacaccccagcgccgcctaagactatgcaatcaatggtaaattcttatagtaatgttgtttctgatataaaaaaaatttttaaacagacaattaaaaaactagaaaagtctaaaatacctccatctaaagtatggtttgatccaggaattggttttggtaaaaaccttaaacaaaatatagaaattatgcagaaaataaatcag

SEQ ID NO: 240846 - DNA, 723 bp, Unknown
  Bacterial polypeptide expressing nucleotide sequence isolated from the Sargasso Sea
aaagaaacaaaggtataaaacatgcatttgaaatgattaaagatggagctaatttaattgatattggtggtgaatcaacaaggccaggatctaaaactattaactcaaaaaaggagtggagtagaatttataaaatacttagatcggtttgtaaaaaaattcctgtatcattagatactagaaaatcagaaatcatggagaaaggaattaaacttggtataaaaattatcaatgatgtgtctggattaaattacgataaaagaactctagatattcttagaaaataccaaattccttttgtgattcaacattcaaaaggaactccagaaaatatgcaaattaaacccacttacaaaaacgaattattagatatttatgatttttttgagaagaaaattaaaactttaagatctattggtattaaacataataacataattttagatccaggcataggttttggaaaaaatttgaaacataatatgaatttaattagcaaaatttcaatttttcatagccttggtttccctatacttgtaggaaattcaagaaaaagatttattaaagaaatagcaaaaaaaaatgactctaggaatagaattgggggaacagttgcatcttctatatacttgatgatgcaaggagtacaaattttaagaattcatgatgtaaacgaattgattcaaggagtaaaagtctttaaagagttattaaaaaactaat

SEQ ID NO: 240847 - DNA, 703 bp, Unknown
  Bacterial polypeptide expressing nucleotide sequence isolated from the Sargasso Sea
ataaataaactaattgacgatggagcaatgataattgatgtaggtggagagtctactagaccaggctccaaaggagtttctcaaacagaggagtggctgagagtaaataaagtcatgagttatttaaaatctaaaaaattttttgtctcgttagatactagaaaaagttttgtaatgaaaaaagcttcaaaatataaactagacctaattaatgatatatccggcctaagctatgacaaggagacaattaattttttaaaaaaaagtaaattaccatttgttcttcatcatatgaaaggagatacaaagactatgcaaagaaatcctgattacaataacgttttattagatatatacgatttttttgaggataggttgaagctcattagaaaaagtggaattaaacataatcatatcattttagatcctggaataggatttggtaaaaatgtgaaacataatattactctaattaataacgtttctatttttcattctttaggattaccagtaatgttaggaatttccagaaagaggtttataaaagatatatctggaaataatgatagcaaagaaagattaggtgggactgtgtcctcaagtatttttagcatgttacaaggagtacagatacttagggtccatgatgtaaatgaagtcaagcaaggaataaaagtttttaaaaaattgaattttaactaat

SEQ ID NO: 240848 - DNA, 712 bp, Unknown
  Bacterial polypeptide expressing nucleotide sequence isolated from the Sargasso Sea
aaaaaagcttttaagcagatatcgtatttaataagttccggtgcggatataattgatgtagggggcgagtcaactagacctggttcaaaaacaatagatacaaaaatagagtggaaaagagtaaaagaaataattaaaaaattcaaaaaaaattatccaaaaacttgcttgtctatagatactagaaagtctgatataatgatcaaatgtataagatatggagtagatttaattaatgacgtttcggggtttcagcacgacgaaaactctttacaaataataaaaaaatataagatatccaaagttctccatcatatgcaaggtaaccccaaaacaatgcaaaaaaatcccaaatactcaaacgtattgttagatatttacgatttttttgaggaaaaaattaataaaagaattaaagaaaaaaatataatattagatccaggcataggttttggtaaaactttgaaacataatttgactttaatttctaaaatatctttgtttcatagcttaggattaccgattttagtgggtacttcaaggaaaagatttataaatcaaatatctaaaaattttgatagcaaagaacgaataggtggtacggtagcttcagttctatatttattattacaaggaatacaaatttttagagtgcatgacgttcgtgaagttaaacaaggaattttaatttttaaaaaaattatatcataaa

SEQ ID NO: 240849 - DNA, 265 bp, Unknown
  Bacterial polypeptide expressing nucleotide sequence isolated from the Sargasso Sea
attgcaaattatcaataacaataatccatggccaaaaggctggggacaaaaaacttcaattatgggtgttattaatttaactcctgattcatttagtgatggaggagaattaaattcttcaaaaaaagttctggatcaagttaatcattttttgcatcatggtgtagatgttattgatcttggtgctcagagtacaaggccaggtgctcaagaagttggctctagtatagaaataaaaagattgatcccatatctgaaattataa

SEQ ID NO: 240850 - DNA, 346 bp, Unknown
  Bacterial polypeptide expressing nucleotide sequence isolated from the Sargasso Sea
atgaaattaggaaaaaataattttaaattatatagtccaattgttatgggcatatgtaatgtaacaccagattcttttagtgatggaggtaaaagtttcaaacaaaaagatgctcttaaaaatattaagaatatgcttaaagaaggtgcgcaaataattgatattggcgcagaaagtgcaagaccaggatctgatccactaagctacaaagaagaaattaaaagattagatccaatattaaaaaaactgccaaaaaataaatttattatttcaattgattcttataaaattgaaactcaagaatatgcattaaataatggtgtacatataattaatgatatatttg

SEQ ID NO: 240851 - DNA, 337 bp, Unknown
  Bacterial polypeptide expressing nucleotide sequence isolated from the Sargasso Sea
tatgaactcctatttcagaccaattgttagaactggttcaccaagatccaaaaacagtatttttttagctgaaacaaattattggatcagtgaagctgaagaaattaaatttggagagcctacaaagttaacttcaataaatgatgtccctgaatggtggaaaaaaagatggctaaaaaagcgatctgatatcttaggaatggagtttggttttccaaaattgatgggaatattaaatgttacgcctgacagcttttctgatggcggacagcatgtcaaattagaggcggccttaaatcaggctaaatttatggaggaaaatggagtagatatatcg

SEQ ID NO: 240852 - DNA, 541 bp, Unknown
  Bacterial polypeptide expressing nucleotide sequence isolated from the Sargasso Sea
aagtctatagttgcacaaaaggcgatacaatctggtgctaacattatcaatgatattagcggattttcctttgataataaaatgattgacgttgttcgtgaatcaaaagtccctgtgattattatgcatatgcaaggagacccatcaaatatgcagaataatccagtatatgatgaccttataatagatatatcttctttttttgagagcaagattaatcttgctatagaagccggaattaaaaaagagcagattatcttagatcctgggattggttttggtaaaactgttggcgataattttcaattaattaatcaattaaatgaattttgtaaattaggatttcctgttatgattggaccaagcagaaaatcatttataggaacaacacttaatctaccagttgatgataggttagaaggtacagctgccactgtggcagtgggagttatgaatggagctaggattgttcgtgtccacgatgtgaaagaaataaaaagggtagtaacaatagttgaaaagattaggactgcagcatgac

SEQ ID NO: 240853 - DNA, 667 bp, Unknown
  Bacterial polypeptide expressing nucleotide sequence isolated from the Sargasso Sea
tatgaaaacgttgtgtagtttcgctactcttctaaaaaaaaacaaacccctaattatgggtatattgaacactacaccagatagtttctctgatggtggaaagtttacgacacttgatttttcttctgcgcacgctttgcaaatgatcaatgaaggtgctgatttgatagatataggtggacagtctactcggccgggcgcggtggagatttcggcggaagaggaaattcgcagaatacttccggtgataaaatatcttaggaagaaggctccagaaagaatactgagcgtcgacacgagtaaggctgaggtggccgaaattgctttgaaagagggtgttgcagtaattaatgatgtctccggaggacagggaaaggctctgctagaggttgtgtcgaaatatgatgcaggattaataataatgcataaaaagggttcacctgagtcaatgcagttgaatcctagttataaggacgtggttggtgagattaaagcctatcttacacatatgtgtgatttggcctatagtgctggagtgtctaaagataaacttgttgtggatccggggattggctttgggaaactgctagagcataatatggccatactaaatgctttaactgaattcagtgagataggttatcctgtcatgataggaacaagcaga

SEQ ID NO: 240854 - DNA, 735 bp, Unknown
  Bacterial polypeptide expressing nucleotide sequence isolated from the Sargasso Sea
tttgcgtctcatatccaaaaaacgtgtactcgacctggaccgcccgaaattgatgggggttttgaatgtgactcctgattctttttcagacggaggaaaatactggtctttcgacaaagccctggaacatgctcgaaagatgatttctcttggagcagattggctcgatatggggggagaatcaagcgggccgggaagcagagagatttcgctggatgaggaattatccagggtgatgcctctgatcgaagcccttcgcaaggaaagtgagatctggctttctgttgatacctggaaatcagtcgttgcagctgaagcccttgatggcggggtcgattgtgtgaatgatgtgactgcgcttcggggggatccaaaaatggcttcgctcatatccaggcaaggatgcgcgctggtcatgatgttttccaaggactcatccgcaagaaccacacaaaaaaatgtccgttatgatgatgtgatcctatcgattcgtgattttttcatcgaacgccttagttatgcgagtgaaatgaaaatccctgctgatgcgatcatgcttgaccccgggatgggacattttatcagttccgacccaaaatacagttttgaaatcgtccgtaggttttcagaattcagcgatttgaaacaatccatgctgatcggtccttccagaaaatcctttttggctaaggtctcttccgagattgaattgtctcctcttgaaagggatttccc

SEQ ID NO: 240855 - DNA, 661 bp, Unknown
  Bacterial polypeptide expressing nucleotide sequence isolated from the Sargasso Sea
aatggctagatattacacaagggcgtgtaatttctactatggtaaaatatcaaaaaacttagtaaaaaataaaaaatctctaccattaaatggtaataaggagatttcttttgatcagattgagttaatctcaagaaattcaaaaaaaaaaattaaacttactaaattagtaaatttacctaaaatattaaaaaaacaagttacccaagatttaaaacatataatttcaaaaaaaaaaaattttgcaaatttaaattttaataagtctccaaacatcatgggggtattgaatcttacaccagacagtttttctgacggaggaaaatttaatagtaaaacaaaaggaattaaacaagcttttaaaatgtttgaatctggagctagcattatagatgttggtggtgagtcgacaaagccaggttcaaaagggataaatactaaactagaatggaatagaataaatgaaatattaagatctatttgtaaaaaaattcctatttctttggacactaggaagtcagaaataatgcaaaagggaatcaaactcggagttaaaattataaatgatgtatcgggattaaattatgatcctaaggctataaatattttgaataaatataaaattccatttgttcttcaacattcacaagggacacctgat

SEQ ID NO: 240856 - DNA, 346 bp, Unknown
  Bacterial polypeptide expressing nucleotide sequence isolated from the Sargasso Sea
aatgcccagatattacactagagtgtgtaatctctactacggcaaacattcaaaaaaattagtcagtaaaaaaaaaactataccattaaatcacataaaagaaatttcatttgatcaaattgaaatattgaccagacgatctaaaagaagagttttaataaatcaagtaaagaatttatcaaaatcacttaagaaaaaaataaatttagatttaaaaaagattaaatcaaaaaaaaataatttttcaaatttcaattttaaaaggttccctaatttgttaggtgtattaaatttaacacctgatagcttttccgatggtggaaaatttaacacaaagaaaagagga

SEQ ID NO: 240857 - DNA, 364 bp, Unknown
  Bacterial polypeptide expressing nucleotide sequence isolated from the Sargasso Sea
aatgataaaatattacactagagcgtgtaatttcaaatacggttcaatagcaagaaaattaattaacaacaagaaagccctacctttatgtggaagcaaaaatatatcttttgatgaaattgagataattaccagaggtaaaaaaaaaattcactctagaataattaattataaaaaagtaaataagctaagtacttttttgaaaaataaaataaaaaaagatttaaaaaacataacttctaagagaaaacaatttctaaaacacgtaaatttggctgagccttctatcatgggaattttgaacttaactccagatagtttttctgatggtggtaaatttaacaaaaataataaatccttaaaa

SEQ ID NO: 240858 - DNA, 829 bp, Unknown
  Bacterial polypeptide expressing nucleotide sequence isolated from the Sargasso Sea
catggcgatcctcaacatcacgccggactccttcagcgacggaggtctccatctgcagccgcagcaagcttgccgggctgctcgccgtatggcgacacaaggtgctgatctgttggacatcggggcgcagagcacccgccccggggcggtcgatgtcggacctgtagaggaactcaggcgcctgctacccgtgctggagcagctggtgagcgcgcgacgggacggtgatctgcccagtggactgctgctgtcgatcgatacattcctggcaccggtggccgctgctgccctcgatgccggggccgactggataaatgatgtctccggcggtcttggcgatgcagcaatgctgcccctcatcgctgagcgcaactgcccctacgtgctgatgcaccgccgcggcgatgcccgcacgatgaatgatctggcctcctacagcgcggtatccacggaggtggagcaagaactgatggagcgcactgatgcagccttgaaagctggggtcagcgccgatcagattctctgggatcccggccttggctttgccaagaccactgagcacaacctgacgctgctggaagcgctaccgcaactggccgcccatggtttccctctgttggtggggccctcgcgcaaacggttcatcggggatgtgctgaatgaaccccgccccaaagcgcgcgtgtggggtaccgcggccagcgtctgtcgcgcgattgccggcggagcgcgggtcatccgggtgcatgacgtggggcccatcagccagacctgccagatggccgatgcgctctggccgcgccgcgagccccttagcccaatcgcttga

SEQ ID NO: 240859 - DNA, 850 bp, Unknown
  Bacterial polypeptide expressing nucleotide sequence isolated from the Sargasso Sea
attgcaaattatcaatagggaaaatccatggccaaaaggctggggccaaaaaacttcaattatgggagttattaatttaactccagattcatttagtgatggtggggaattaaactcttcaaaaaaagttttagatcaattaaattatttcttgaggaatggtgttgatgttattgatcttggtgctcaaagtacgagacctggggctgaagaagttggctctagtatagaaataaaaagattgataccatatctaaaattaataaaatctgaatttccagatgttttaatttctattgatacttttaattctgaagtagcttacgaagctcttttaaatggtgctaattggataaatgatgtcacgggaggaagaagagatataaaaatattggatgttgtatcaaaattcaactgtccattcgtcattactcatagtcgtggtaatagtcaaaatatgaatcaactctctaattaccagaacgtattgagtgacgttaagtgctcgcttgataatctaataaagaatgctttagaaaaaaatatatctgaaagaaatataattgttgatcccggaattggtttttcaaaggatatctttcataatttggaaatcttgaggaacttagatgtatttaaaaaatggaatttgccaattttgataggtgcatctaggaagagatttataggagaaattttgaatgaggaaaatccaaaagaaagggatataggaacacttgcaataagttgtctttgttctcaatttaatattgacatcgtgagagttcacaacgtcaaactaaattatcaagttctgaaagtagctgataggatttacagaaaaaaataa

SEQ ID NO: 240860 - DNA, 451 bp, Unknown
  Bacterial polypeptide expressing nucleotide sequence isolated from the Sargasso Sea
atggagaaatattacactagagcgtgtaatttttattacggagatcagtcagttaaaaaagtcagacacaaaactgctttaccattaaataataataaatttatatcatttgatacagttgagataataactcgaaattataaaaaaaaaattcatttaaaagatattaatttacaaagtagaaatttaaaaaaaaaaattaaaagtgatttaaaattaattgtaaaaaaaaaatattttaaaaaattaaatttagaaaatcctccattattaatgggtattattaatttaactccagatagtttttctgatggaggtaagtataataaaaaaaataagggattcatttatgcaaaaaacttaataaaaaatggttgcaatattttagacataggtggtgagtcttcaagaccaggatcttttgaggttaaaaaaaatataagaatgaaga

SEQ ID NO: 240861 - DNA, 414 bp, Unknown
  Bacterial polypeptide expressing nucleotide sequence isolated from the Sargasso Sea
aatgcgaaaatattacacaagaccgtgtaatttctattatggaagttacgcaaaacatcttgttaaaattaaaaaagctttaccattagcaggtagaactaatatatcttttgatcagttagaaatttttgaaagaaaaaaaggaaaaaaaacaaaaagttatttttactctataaacgaaataaaaaaattaaataaaaatttaaaaaatatagttagtaaagatttaaaaaaaataacaagaaaaagaaacaatatattaaagataaaatttaataaccctcatataatgggagttcttaatataactccagacagtttttcggatggaggtttattttttgatgatcgaaaagcctatcagcaggcagaatcaatgattaacgctggagcatcaataatagatatggaggc

SEQ ID NO: 240862 - DNA, 800 bp, Unknown
  Bacterial polypeptide expressing nucleotide sequence isolated from the Sargasso Sea
tttgtctcttgtgcgtatcatatccaaaaaacgtgtactcgatctggaccgcccgaaattgatgggggttttgaatgtgactcctgactccttttcagatggaggaaaattctggtctttcgacaaagccctggaacatgctcgaaagatgatttctcttggagcagattggctcgatatcgggggagaatcaagcgggccgggaagcagagagatttccctcgatgaggaattatccagggtgatgcctctgatcgaagtccttcgcggggaaagtgagatctggctttctgttgatacctggaaatcagccgttgccgccgaagccattgatggcggggtcgattgtgtgaatgatgtgactgcgcttcggggggatcccaatatggcttcgctcatttccaggcagggatctgcggtggtgatgatgttttccaaggattcatccgcaagaaccacacaaaaaatgattcattatgatgatgtgatcctgacgattcgtgattttttcatcgaacgccttggttatgcgagtgaaatgaaaatccctgctgatgcaatcatgctcgaccccgggatggggcattttatcagttccgacccaaaatacagttttgaaatcatccgcaggttttcagaattcagtgacttgaaacaatccatgctgattggtccttcaagaaaatcctttttggctaaggtttcttccgggatcgaattgtctcctcttgaaagggacttcccctgcgcagccgtttgcagtattggggtttggaacggggcaaaagtgctgaggatgc

SEQ ID NO: 240863 - DNA, 882 bp, Unknown
  Bacterial polypeptide expressing nucleotide sequence isolated from the Sargasso Sea
ctctgaaggatggattgtggagatggggacgtcagatgatggtgatgggtattttgaacgtcactccggattcgttcagcgacggaggctcgtacgtcgacgtgaacgtcgctttgaatcacgcgcgcgagatggtggccgccggggcgacgatcatcgatgtgggtggacaatcgacgcgtccgggggcgactcgtgtgagtccagaggaggagagcgctcgagtcattcccgtcataagcgctctggcaaaggagtggcgccatcgagacgacgcgtacatttcggtggatacgttttacggaagcgtcgcgagcgccgccgcggacgctggggtcgatattatcaacgatgtcagcggagggtcgtgggatccagcgatgttaccgacggtggcagatatgaaaaagccgctgccgtacgtcgtcatgcacgtgagaggcgatcccagcaacatgcaagacgcttcgaacaccacgtacgaaggtcacgtgtgcgatgaggtgggcgacggactgttgcgaacggcgcgtcgatgcattcaacacggcatcgaaccgtggcgactctggattgatccgggaatcggtttcgctaagacgagtagagcgaacgtcgagatactgagagatttaccgcgggtacgaagccgtttagcgccgttgggaggcgctgtgatgaacgcgcccatgctagtcggtgcgtcgcggaagcgtttcttgggagagctttctggaaagtcggaggcgggtgagcgcgacgcggcctctgtcgccgcgctcgtcgcggccgttcacggcggcgcggacgtcatcagggtgcacaacgtcgtcgactcggcgagcgctgcggcggtatcggacgccttgtggcgaatgtaga

SEQ ID NO: 240864 - DNA, 733 bp, Unknown
  Bacterial polypeptide expressing nucleotide sequence isolated from the Sargasso Sea
aaattcataaaatttaaatctgcagaaagacaaataaataatttaataaaatctggagcaaaaataattgatattggtggtgagtctactcgcccaggtgctaaagaaatctcagtatctgatgagtggaaaagaatatctaaaaaactaaggctgattaaaaaaaaaaaagcgatcttctcactagatacaagaaaaagccaagtgatggaaaaaagtttaaattatggaataaatatcataaatgatgtttcgggtttggagtatgacaaaaaaacaataaattttttaaaaaaaactaaagtaccatttgtaatacatcatatgaaaggctcacctaaaacaatgcaaaatagtccaaaatataaaaatgttttgttagatatttatgattatttcgaagcaaaaattaaatatttaagatcaattggtattaaacataacaatatcatattagatccaggaataggctttggtaaaaacttgaaacataatattacattaattaaaaagatttctgtttttcatacattgggttttccaatattacttggtttatctaggaaaagatttattaaagatatatctaatgaaaatgatagcaaagacaggataggtggaactgtatcatcatgtatattctctatgttacaaggcgttcagattttaagagtacatgatgttaatgaagttaatcaatcaattaaagtttataaaaaattaaatttctaat

SEQ ID NO: 240865 - DNA, 541 bp, Unknown
  Bacterial polypeptide expressing nucleotide sequence isolated from the Sargasso Sea
aatgaaattaggaaagtgcagtttcaaactcaatagccctatagttatgggaatctgtaatgtgacacctgattcctttagcgatggagggcaaagctttaagaaaaaggatgctttaaataatattaatatgatgctgaaaaatggagcccaaataatagatataggtgctgaaagtgctagaccaggatccgacccattaagttataaagaggaaattaaaagacttcatccaatattaaaaaaattaccaaaaaataaatttgttatttccatcgactcatataaaattgaaactcaagaatttgccctaaataacggcgcccatataattaatgatatatttggtggctctcaagatctctttgatttaaccaaaaaattcaaaacaggattaattttaatgcatacaccagcaccgcctaaaactatgcaatcaatggtaaattcttatagtaatgttgtttctgacataaaaaaaatttttaaacagacaattaaaaaactagaaaagtctaaaatatctccttctaaagtatgg

SEQ ID NO: 240866 - DNA, 718 bp, Unknown
  Bacterial polypeptide expressing nucleotide sequence isolated from the Sargasso Sea
ctgacccatggaaaaaaattaattgctgatggttgtcaaattttggacataggaggagagtcaacaagacctggatcaaaaactgttgagccaaacaaggagtggaaaaggatattttcaacattatctcaaataaaaaaaataaaaaaaatgaaaaaaataatctcattagatactagaaaaagttcagtaatgagaaaaggaataaacaataatgtaaatttaattaatgatgtttcaggcctacaatatgatccaaatacaattatagttttaaaaaaaactaatattccatttgtaattaaccatacccaggataatccaactacaatgcaaaaaaatccaaaatacaaaaatgttgttttagatatttatgatttttttgatgaaaagattaaatatataagatctaaaggaattaaacataataatataatattagatcctgggataggttttggtaaaaacttgaaacataatattaccttgatgagaaatatttccattttccactctcttggatttcctgtaatgttaggtgcttcaagaaaaagatttataagagatctatctggagtaaatgatagcaaggaaagattgggaggaactatatcatctagtttatatgcaatgatgcaaggagtccaaatattaagagttcatgatgttaacgaagttaatcagagcattaaaatttttaattctttaaaattttaaa

SEQ ID NO: 240867 - DNA, 129 bp, Unknown
  Bacterial polypeptide expressing nucleotide sequence isolated from the Sargasso Sea
attgcaaattatcaataagaaaaatccatggccaaaagggtggggtcaaaaaacttcaattatgggagttattaatttaactcctgattcatttagtgatggtggggaattaaactcctcaaaaaaaag

SEQ ID NO: 240868 - DNA, 775 bp, Unknown
  Bacterial polypeptide expressing nucleotide sequence isolated from the Sargasso Sea
atgggaatatgcaatgttactcctgactcttttagtgatggtggaaagagttttaaaagttcagatgcactaaaaaatattaaagaaatggtgaaaaatggagcaagtattattgacattggggcagaaagtacaagacctggctcagatccattaacacacaaagaagaagttaaaagattagaaccgatattaaaaaaattgccaaaaaataaatttgtcatatcggttgatactaataaaattgaaactcaagaatatgcattgaatatgggagcacatattataaatgatgtcttcggcggctcagaagatttattctttttaactaaaaaatttaaaactggtttaattttaatgcacacacctgcaccacccaaaactatgcaaaagaaaatacactcatataataatgttgtacaagatattaaaaaaatatttcttcagaaaattaaacaattagaaaaaataaaaattccttcatccaaagtttggtttgacccaggtattggttttggtaaaaatttaaaacaaaatatagaaatcatgcaaaaaattaatcagtttaagtttaagggatatggattattattaggatcatctagaaaaagctggatcaacttcatagataagagtgaaacaaatcaaagattgggaggttcaatcgcttctgcattatattgttatcaaaagggagttgatatatttagagttcacgacataaaagaaacgtctcaatcattaaaaatttttgaaaaactatgttcaaagtaga

SEQ ID NO: 240869 - DNA, 628 bp, Unknown
  Bacterial polypeptide expressing nucleotide sequence isolated from the Sargasso Sea
actattgatcctttaattgaatggaaccgagtaaaatatgtaataaaaaactttaacaaaaaattcaaaaaaatttgtttatcaatagatactagaaaatcagacttaatgattaaaggaattaaaaatggtgttgatataataaatgatgtttctggttttgagtacgataagaatgcattagatcaaattaaaaaacacaaaatatcaaaagtttttcatcatatgcagggaacaccaaacacaatgcaaataaaccccaaatataaaaatgtcttacttgatatatatgatttctttgagagaagtattagtaaagatctaaaagataaaaaaattatactagatcctggaattggttttggtaaaaatttgaaacataatttgactttaatttctaatatatctttgtttcatagcctaggttttccaatattggttggaacttcaagaaaaagattcattaatcagatatctggaaaatatgatactaaggagagaataggtggaacgttggcatcagtactttttttattatcgcaaggtgtgcaaatttttagagttcataatgttaatgaggtaaaacaaggaattatgatatttgaaaaaatactatcaggtaaatgaa

SEQ ID NO: 240870 - DNA, 481 bp, Unknown
  Bacterial polypeptide expressing nucleotide sequence isolated from the Sargasso Sea
ttgcaaattatcaataagaagaatccatggccaaaagggtggggccaaaaaacttcaattatgggagttattaatttaactcctgattcatttagtgatggtggggaattaaactcctcaagaaaagttatagatcaagtagactatttcttgagcaatggtgttgatgtaattgatcttggtgctcaaagtacgagacctggagctgaagaagttggatctagtaaagaaataaaaagattgatcccatatctaaaattaataaaatctgaatttccagatgttttaatttctattgatacttttaattctgaagttgcttacgaagctcttttaaatggtgctaactggataaatgatgtcacgggaggaagaagagatataaaaattttggatgttgtatcaaaattcaactgtccattcgtgataactcatagtcgtggtaatagtcaaaatatgaatcaactctctaattaccaaa

SEQ ID NO: 240871 - DNA, 400 bp, Unknown
  Bacterial polypeptide expressing nucleotide sequence isolated from the Sargasso Sea
cttgataatgggaattgtaaatattactccagattcatttagtgatggaggcaaatattacaccttagaatctgcttataatcattcattaaagttaattgatgatggcgcagatatcattgatgttggtggtgaatcatctaggccaggagctttgcctataacacttaaagaggaactagatagaacaataccattaataactaaaattcataacaattttcctaatacaattatttctatagatacgacaaaatctgaagtagctgaagaagcaatattatctggcgcaaatattatcaatgatattagtggccttactaatgataatagaatggttagagttgtttcaaaatataatactcccagtagttattatgcatatgaaaggaaatcctaa

SEQ ID NO: 240872 - DNA, 829 bp, Unknown
  Bacterial polypeptide expressing nucleotide sequence isolated from the Sargasso Sea
tatgaataaattatccctaaatactaaaagtttattaattatgggaataataaatgcaactcccgattctttttcaggtgacggtatattcaaaaataataaattctctttagaaaaagaattagataatatgcttaaacagtctgtggatattattgatgtaggaggtgaatcaactagacctccttcggtttatgaaaatgttaaagaagtgactgaaaatgaagaactcgacagagttttaccaatcattgaatttataaagaaaaattttcctctttatatatctattgatacaaaaaaacctttagttgcaaaagaagctgtaaaattaggagtttctatagtaaatgatatttctatgtttgaagatgaatcaatcttagaatcaatctgtgaaaataatatattttatgtattaaatcactttagaaagaataaaaaccataaaaacattattcctgaaattattgatgacttatcaagcaagattgattctatactagaaaaaggctttaaaagagaaaatataatcttagatcctggaattggatttggtaaaaaatttgatcaatcaaaagatgctttatcaaatatagatattattaagagatcttttaatttaccaataatgattggaccgtccaggaaatcgtttatcggatattatactgacaaagaagttgatgatagaatttttggaactgctgcttccgttgcatatggaatcatgaatggagcaaatataataagagtacatgattactccgaaatgaatgatataaaaaaaatgataaatgttttggaagaatcaagattttcatcatga

SEQ ID NO: 240873 - DNA, 532 bp, Unknown
  Bacterial polypeptide expressing nucleotide sequence isolated from the Sargasso Sea
attgcgaattaccaaaccgcttgactcaggggtctggccccagggctggcgccaacgcacgacggtgatgggggtaatcaacatcacccccgactccttcagtgatggaggaaggttccttgcaagcgaacgtgccctcgctgaagcgcagcggcaactgaacaacggggccgacgtgttggatctgggcgcccaaagcactcgacctggcgcggaggaggtgggtgaagaggaagaattgcgcaggctcctgcccgcactgaaagccatccgggaacggtgcccagacgccctgatctccgtcgacacgtttctcgctccggttgccgccagagcactggaagcaggtgcaagctggatcaacgatgtgagcggtggcagacgtgaccccgatctgctgcgggtggtcgccgatgccgggtgtccagtggtgctgatgcacagccgaggcaacagtcaaagcatggatcaacttacgaactactccgatgtcgtagcggatgtgaaaaagggatttagtggagcgcagtga

SEQ ID NO: 240874 - DNA, 349 bp, Unknown
  Bacterial polypeptide expressing nucleotide sequence isolated from the Sargasso Sea
atgaaaaaatattacacacgcgcgtgtaatttttattatggatcaacttcaaaagaaaaaataaaaaaaaaactatcccttccattgaatggaaatagtttaatatcatttgatactttagaaattattactagaaaaagtaaaaaaaaaattcatataagtgaaataaaaaatcagagttttaatattaaaaagaaaattaaaaatgatattaaattaattacaaaaaaaaaaaaatttaaaggactaagctttttaaattttcccattttaatgggagtaattaatttaaccccagatagtttttcagatggtggaaaatataataaaaaaaattttaggatttgat

SEQ ID NO: 240875 - DNA, 340 bp, Unknown
  Bacterial polypeptide expressing nucleotide sequence isolated from the Sargasso Sea
atgagaaaatattacacgagggcgtgtaatttttatcatggaagtgaagcaacaagattaatccaaaaaaaaaaagcacttccattaaacggtaagaacaatattgccttcgatagtatcgaaattttttcgagagaaaaaaggggagtaaaagttaacttaataaatattaataaagtttctagattaaataaaaatatcagaaaaattgttaatgaagatctaattaaaattgcatcaaagagaaaggattttcttaaacatattaattttcaatccccatcaattatgggtattcttaatcttacccctgatagcttttcagatggaggaaaattta

SEQ ID NO: 240876 - DNA, 343 bp, Unknown
  Bacterial polypeptide expressing nucleotide sequence isolated from the Sargasso Sea
atgccaagatattacacaagagcgtgtaatttctactttggtaatcattctaaaattttagtaaataaaaaaaaatctattccgttacatcagattaaagaaatatcttttgaccatcttgagattattacaagaaaaaagataagaagaatttctataaatcaagttaagaaattaccaaataatttaaaaaaaaaaataaatgctgatattaaaaaaataaattcaaaaaaaaaaaatttttctaattttaattttaaaaaaattccaaatattttaggagtattaaatcttacacccgacagtttttcagatggaggaaaatttaataaaaaaaaataag

SEQ ID NO: 240877 - DNA, 271 bp, Unknown
  Bacterial polypeptide expressing nucleotide sequence isolated from the Sargasso Sea
tatgaatcatatagataaaaataaaccaactataatgggaattctgaatgtaactccggatagcttttctgatggaggttcatacccatcatcatcagatgctgtaaatagggcgatgattatgattgaacaaggtgcgaaaattattgacataggtggtgaatcaacaagacctggttcagaaagagttagcgctttagagcaaataaaaaggataagtgacgttattagtcaggtctgtaaggaaaaaccatctgatattattgtgagt

SEQ ID NO: 240878 - DNA, 775 bp, Unknown
  Bacterial polypeptide expressing nucleotide sequence isolated from the Sargasso Sea
gggtatcttaaatcttacccccgactccttttctgatggaggtcagtttgtagaccttgatcgtgctcaagagcatttccataagatgatttcagagggagcttcgataatcgatatcggtggtgaatccacccgacccggacatatgcctatatctgtagaagaagaaataaaacgagtccttccattcatagaaaaaatacgtggagaaacagattgtttaatttcagtagatacatctaaatctgaagtagcagaggtttgcttaaaagcaggagccgatattattaatgatatatggggagggcaaggagatcctgcaatggccacaacaattgccaagtatgatgctgcctgtattttaatgcacaatagtgaacaaggaatcagcgataaagggcaactagttgaacacataaaagattatttaaaacagtcactagatatcgctttaaaggctggagttcgtgcagagagtatctgctttgatccaggattaggatttggaaaatcatttgaagacaattgggaaattatgagaaatttagatgcttttaatgcatttgaaaaacccatcttattgggcgcatctcgcaaatcaatgattgctaaattacttaatttggaagatccgaaggataggctatcgggaactttagctacaactgctttagctgcgattcacgatgttgactttgtcagagttcatgatgttttagaaaatagtcactgtttaaaagtcattaatcactgcactcactatgaaaaaaactag

SEQ ID NO: 240879 - DNA, 733 bp, Unknown
  Bacterial polypeptide expressing nucleotide sequence isolated from the Sargasso Sea
aatggggataataaacatgacaccagattcatttagcgatggaggaaaatttaactcaattaacagcgctattgattatgcatataagctattggatactggtgcagatatacttgacattggtggagaatcctcacgacctggggcagatccagtttcaaatagcgaagaaattgatcgcatatcccctttaataaaggaattaggtaaaaacgctaattgtttgatttcagttgatacttataaatcatcaacagctaaatttggccttgataatggagcaacaattattaatgatatttctggactgacatatgactcagagatggcaagtgttatttccaatttcaatgcagcggttgtggtaatgcatatgaagggcacccctaaaaccatgcaaaaaaatccaaattattttgatttaattaaagaaattaaaagttttttttctaagcaaatagaatttgcaattaaaaatgggatcaatagaaaaaatattatcctagaccctggtataggatttggaaaagggttaaatgataattttgaaatcataggtaaattagatcaaatttgcgatatgggatatcctgttttagttggcccttccagaaagtcatttattggtgaagtactaaatttgtctgtaaatgaacgattagagggtagtttagcagctgctaatgcatgcttaatgaatggtgcaaaaatgattagagtcccacgatgttaa

SEQ ID NO: 240880 - DNA, 552 bp, Unknown
  Bacterial polypeptide expressing nucleotide sequence isolated from the Sargasso Sea
aatgggaattttaaacgtcacacctgatagcttttcagatggcggcaaatatttaaaaacaaatttagcaaataaacatataaaaaaacttaaaaaggatggagctgatattatagacattggtggagaatcaactcgaccaaactctaatacagttaatagtattgttgagtggaatagaattaaatccaaattaaaatttgctaaaaaaaataatatttttgtttctttagatactagaaaaagtttggttttaaaaaattcattaccatttaaaatagatttgctaaacgatgtatcgggcctaaactatgattacagaattataaatatattaaaaaaatcaaaaattccttttgttttacatcatatgagaggaacaccgaaaactatgcaaaataatcctaaatacaaaaatgtcctattagacatatatgatttttttgaaaaaaaattaaaatttataagagataataaaattaaacataagaatataatactagatcctggcattggtttcggtaaaaatttgaaacataatattactatatt

SEQ ID NO: 240881 - DNA, 431 bp, Unknown
  Bacterial polypeptide expressing nucleotide sequence isolated from the Sargasso Sea
aatgaaaaataattactcagttaaacctaaaattatgggcatcttgaatgtaactcccgatagtttttcagatggcggagaatttaataatcttgattctgcagtatcgcagggaaaaaaaatgattgatgaaggtgcagatattattgatatcggaggagaatcaacacgtcctggttcaaaacgtatttccagtcaagagcaaatagacagagtagttcatattattgaagcaataaatgaaactaaaccaggacatgttgaaatcagtattgatacaactcaatctgaagttgctgaagcagcactaagcgttggagctaatatagtaaatgatgtttcaggaggtaatgatgacccagagattattcagttgtgtgctgaaaaaaaatgtccatatatcattatgcatatgcaaggaactccggaaa

SEQ ID NO: 240882 - DNA, 474 bp, Unknown
  Bacterial polypeptide expressing nucleotide sequence isolated from the Sargasso Sea
gatgggcattttaaatatcacgccggactcattttctgatggtggccgttttattggtaaagatgctgcgatagcacaggctagagccatgcttgctgcaggcgctgctattttagatatagggggcgagtcgacccgccctggtgcagaagaagtctcagtacagcaagagctcgacagagtcttgcccgtgattgaagctattcgctctgaactggattgcgtcatctctatcgatacctgcaaatcacaagtgatgaaagaagccgtggctgctggtgctgacattattaacgatattaaagctctgttagatcatggtgcggttgaagtggctgccgctgcgcaagtgcctgtgtgtttaatgcatatgcaggggcaacccagaactatgcaacattcacctctgtatcaggatgtggtaaaagaggtgggggagtttttacagcaaagagcagaagtttgtatcgccgc

SEQ ID NO: 240883 - DNA, 670 bp, Unknown
  Bacterial polypeptide expressing nucleotide sequence isolated from the Sargasso Sea
tatgggggtattaaatcttacacctgatagtttttctgatggagggaaatttaataataaaaataaaggaacaaaatatgctttgcaaatgttcaaagctggcgcaaacataattgatattggtggtgaatcaactagaccaggatctaaagcaataagtgtaaaattagaatggaaaagaataaataaaatattaaaatttatctgtaaaagggttcctgtatccttagacacaagaaaagcagaaataatgaaaagaggcattggacaaggagtaaaaattattaatgatgtatctggtttaaattttgataaagaatctgcaaatattttaaaaaaacatagaaccccttttgtaattcaacattcaaaaggaatccctgaaaatatgcaaaataaaccaacttacaaaaatgaattattggatatatatgatttttttgaggataagataaaatttttaagatctattgggataaagcataaaaacataattatcgatccaggtataggatttggaaaaaatttgaaacataatatgaatttgattagcaatatttctattttccattcgcttggtttacctgtacttgttgggaattcacgaaaaaaatttataaaggatttatctggaaaaaatgactcgaaaaaaagaatagaggcactgtag

SEQ ID NO: 240884 - DNA, 395 bp, Unknown
  Bacterial polypeptide expressing nucleotide sequence isolated from the Sargasso Sea
tttgaaaagaaaaattaaaaaagatttaaaatcaattaaaaaaatcaagaaaattaaaaaattaaaaataaatagttttcctattttaatgggagttgtgaatttaactcctgatagtttttcagatggaggaaagtataataaaactgacaaagcatttaaatatgcaaaaaatttgataaatcaaggaagttcaattattgatattgggggagagtcaacaagacctgggtcgaaagaaataaaaaaagaaattgaatggaagagaatctcaaagacaattaaaaatataaaaaaaataaatatttttatttcagttgatacgaggaaaagctggataatgaaaaaagtaataaatgaaggagtaaatttaattaatgatgtatctgggttaa

SEQ ID NO: 240885 - DNA, 445 bp, Unknown
  Bacterial polypeptide expressing nucleotide sequence isolated from the Sargasso Sea
ctgcattttaataataaacctgttttaatgggagttttaaatttaacccctgatagtttctctgatggcggcaaatttaataatcaaaaaaaagcatttaaacatgcacaacttctaattaaaaatgggagtgaaattttagatattgggggtgagtcaacaagacctggatctagagatattttacaaagcttagaatggaaaagattaagtaaaattttaaaacatagaaaaaaattcaaatgtttattttctttggatacaagaaaaagtgaaattatgaaaaaagcaatgaagtataatataaatataataaatgatatttcaggttttagttatgatcaaaatactttaaattttttaaaaaaaagtaaagtaccattcattataaatcatataaaaggcaatccatctaatatgcaaaaaaatccaaaatataaaaatg

SEQ ID NO: 240886 - DNA, 193 bp, Unknown
  Bacterial polypeptide expressing nucleotide sequence isolated from the Sargasso Sea
tatgttattgcagttaccccgtcagcggcagttggatttatctcgccctaaagtgatgggtattttaaatatcacgccggattcattctccgatggtggtcgttttattggaaaagaagctgccatcagacaagctaaggctatgctggacgctggcgctgctattttggacataggcggagagtctacccgc

SEQ ID NO: 240887 - DNA, 511 bp, Unknown
  Bacterial polypeptide expressing nucleotide sequence isolated from the Sargasso Sea
ttgggtgttttaaatttaactcctgatagtttttcggatggaggaaaatttaacaaaaaaaataaaggagtcagtcatgctatcaatttatataaaaccggtgcttcgttggtagatgttggtggagagtcaacaagaccaggatcgaaggaagtaaatgaaaatcgagaatggaatagaattaaaatgatattaaaattaattgtaaaaaaaataccaatatctttagacacaagaaagtccagtattatggaaaatggaattagaatgggtgttaaacttattaatgatgtttcagggttaacttatgatcctaaaacaataaatgttttaaaaaagtataaaattccttttgtaatacagcattcagttgggacaccagaaaatatgcaaaagaaagcgaaatataaaaatgaattattagatatttatgattattttgaagataaaattaagttaataagatctaagggtattaatcacaataatataattttagatcctggaatag

SEQ ID NO: 240888 - DNA, 243 bp, Unknown
  Bacterial polypeptide expressing nucleotide sequence isolated from the Sargasso Sea
tttgaatttaattaaaaaaaagaaaagttttaaaaaattaaatttttctaattatcctttattaatgggtgttataaatttaactcccgatagtttttccgatggtggaaaatataataaaaagaataaaggttttgatcatgctaaatatttaattaaaaagggatgtaaaattattgatattggtggagagtccacaagacctggatctaaagaagtaaaaaaaaaaatagagtggagaag

SEQ ID NO: 240889 - DNA, 718 bp, Unknown
  Bacterial polypeptide expressing nucleotide sequence isolated from the Sargasso Sea
atgggcatattaaaccttacgcctgatagtttttctgatggaggaaaattcaataataagaagaaagcaagtaagcaaattgcttatatgattgactccggggcaaaaattattgatgtagggggcgagtcaacacggccagggtcaaaaactattgacccaaatgtagaatggaaaagagtagaatacattattaaaaattttaaaaaaaaatataaaaaaatttgtctatcaattgatactaggaaatccgacataatgattaaaagtataaaacatggtgcagatattattaatgatgtgtcaggttttagttatgatccatatgcaattctaaaactaaaaaatttaaatatttcaaaagttttacaccacatgcagggtacaccaaatactatgcaaaaaaatcctaagtaccaaaatgtattgttagatatttacgattttttcgaaaaggaaattttaaatatatcaaataacaaaaaaaccattttagatcctggaattggttttggtaaaactttgaaacataatttgactttaatttctaaaatatctttgtttcatagtcttggtctacctattttgattgggacctcaaggaaaaggtttataaatcaaatatctggagattatgatactgaagatagaatagggggaactttagcttctgttctctatttattatctcaaggagtacaaatttttagagtgcata

SEQ ID NO: 240890 - DNA, 764 bp, Unknown
  Bacterial polypeptide expressing nucleotide sequence isolated from the Sargasso Sea
tctcacacctgatagtttttcagatggaggacaatataatcaaattggtttagcattaaaaagattgaaatcactattaaaagctggttgtaaaattgttgatgtaggaggagagtcaacccgaccgggatctaaagatatagataaaaatgttgaatggaaaagaataaagaatttactcaaaaaaattagaaattataaattttttttatctttagatactagaaaaacttttgttatgcataaagctttaagatataaacttaatattgttaatgatgtttctggcttttcatacgataataaaactattgatttccttaaaaaaacaaaacttcctttgatcattaatcattcaaaaggagaaccaaggacgatgcaaagaaaaccttcttacaagaatgttcttttcgaaatatatgatttttttgaaaaaaaaattgaacttttgagaaaagctggaataaagcataacaatattattttagatccaggaataggttttggaaaaaacttgaaacataatattaccataatgaacaatatttctatcttccactctttaggttttcctgtaatgttaggctcttctagaaaaagatttataaaatatatttctggtaagaatgatagcaatattagacttggaggcacattagcatcatccattcatgctatgatgaatggggttcaaataatgagagttcatgactttaatgaaatttctcaaggattaaaggtctttaaatctattaacaaataaa

SEQ ID NO: 240891 - DNA, 608 bp, Unknown
  Bacterial polypeptide expressing nucleotide sequence isolated from the Sargasso Sea
aatgtctagatattacacaagggcgtgtaatttctactatggacctaaatcaaaatcttatgtaaaacaaagtaaagcactacctttaaacggtattaacgaaatttcttttgataaaatagaaataatttctagaaaatcaaataaaaaactttcaattaaagaaataaacaccttacctaaattaataaaaaaaaaggttaaaaaggatttaataactttaacttcaaaaaaaaaagattttgccaatctaaatttttcaaaaataccaaatattatgggtattcttaatttaacaccagatagcttttctgatgggggaaaatttaataaaatgagtaagggaattataaaagctcatcaaatgtttaaatttggagcaagtatcattgatattggtggtgagtccacaagaccaggtgcaaaaacaataaattcaaaaactgaatggaaaagaattaataaaacattaaaatctatttgtaaaaaaattccagtatcattagatactagaaaatctgagataatggaaaaaggtataaagcttggtattaagattattaatgatgtctcaggattggaatatgatgataaatctaaaaatattt

SEQ ID NO: 240892 - DNA, 316 bp, Unknown
  Bacterial polypeptide expressing nucleotide sequence isolated from the Sargasso Sea
atgggtatattaaatttaacaccagatagtttttctgatggtggaaaatataataaaaaaaaagtgggattaattcatgcaagaaaattattcaatgatggatgtaaaattctagatattggaggagagtctactagacctggatcaaataatgttgaacctaaaaaagagtgggaaagaattgctccaacattgttgcaaataaaaaaaatgaaaaaaataatatctttagacactagaaaaagtttagtcatgaaaaaaggaataaagaacaaaataaatattatcaatgatgtttccggtcttcaatatgatt

SEQ ID NO: 240893 - DNA, 377 bp, Unknown
  Bacterial polypeptide expressing nucleotide sequence isolated from the Sargasso Sea
gatagaaaaaaaagaaagattattaatctcaaagatattactaaacttaataataaactaaaaataaaagttaatagagatttaaaaaatataaaaaaaaagaaaactttaaaaaaattaaacttgtccaatataccaattttaatgggtataattaatttaaccccagatagtttttcagatggtggtaaatacaataaaaaaaatttagctgaaaaacgtgtgaatagtttattatctagtggcgcaaaaataatagatataggtggagaatccacaagaccaggtgcaaatgatattcaccctggcagagaatggaatagaatcaagtcaattttaaaaattttaaagaataaaaaaagttttatttcgttaca

SEQ ID NO: 240894 - DNA, 752 bp, Unknown
  Bacterial polypeptide expressing nucleotide sequence isolated from the Sargasso Sea
actgcgatcccgaagccttgagttaccacaccataacagctctctacaacgtcctcttgtgatgggaatcgttaatgtcacacctgacagcttctctgatggaggccgtcacacgactgtggagcaagcagttcaacatggactcaaactagtagccgatggagctgatgtactagatgtcggtggagaaagtacgcgaccatactcgtcacctgtgtcactcgatgaagaactacgacgagtcaatgatgttgttcgatgcctcgctgcagaatctggtgtaccggtttccgttgatacctccaaggcttcagttgcaattcgtgcactcgaacatggtgctgaaatcattaatgatgtcacgggcttggagggcgaccctgatatgatctctgttgcacgtgaaagtggagctggcatctgtgccatgcatatgcagggaacaccacagaccatgcaggataatccctcgtatgatgatgtcgtagccgatgtccatgcgtatcttttggcacgtcgagataatcttgtcaggcatgggattgccctcgaaaaaatctgtcttgatcctggtatcggttttggcaaaacacacgcccacaaccgagaactgatggctcatgctgagcgatttctcaatctgggaacaccgattctcatcggtcattctcgcaagggttttattggtcaaacaatcaaaaatgccctagggagaaagggcacccaagatgaaattgatactgcgacggctc

SEQ ID NO: 240895 - DNA, 529 bp, Unknown
  Bacterial polypeptide expressing nucleotide sequence isolated from the Sargasso Sea
gatgggtattttaaatgctactcctgatagtttttcagatggaggaaaatttaataaatttggtttagcaaaaaaacaaatagagtatctttttcaaagtggtgcagagatagtcgatataggtggagagtcaacaagaccaggagctaagtcaattagtccaaaaactgaatggagtagaataaaacatgttttaaaaaaatttggaaaaaaaaaaattatatcattagacactagaaaatcagagataatggaaaaaggaataaaattaggagttaagttaattaatgatgtttctggtcttaattacgataaaaaaacaatcgatattttaaaaaaatataaaacctcatttgttcttcaccactcccttggaaatcctgatgtaatgcaaattaatccaaaatataagaatgtattattagatatctatgatttttttgaagaaaaaataaattttttgaagagcgttggtataaatcataataacattattctagacccaggtattggttttggaaaaatttga

SEQ ID NO: 240896 - DNA, 537 bp, Unknown
  Bacterial polypeptide expressing nucleotide sequence isolated from the Sargasso Sea
tatgaccgctgcgcgtaaacttgttaagtattacgttagacccatacttaataatattaaaaaaaaggactctctaaatcttggctcttcaaaactttattttgatagaattgaattaataaaaagaaatggtgaaaatatatcatcaaaatatcttcatataaaagaggtcaatggactttcaggagacattagtaagatcatcaatatccaattaaaaaaaataacaaaaactagaaagaaaatcaaaaatttaaattttaataaacctttaataatgggaatattaaacatcactccagatagcttctctgatggaggagaatttttatcagttgatgatgcatttgcacaatataaaaagttaaagaaagagggcgctgcaatagttgacattggaggtgaatctacacgaccaggttcaaaaacagttccagctaaaaaagaacttcagagaataatgccagttattgatcaaatcaaaagcagttcaaaaaatactttagtttcagttgatacaagaaaatctacagtaat

SEQ ID NO: 240897 - DNA, 784 bp, Unknown
  Bacterial polypeptide expressing nucleotide sequence isolated from the Sargasso Sea
atgggaattttaaatctcactccagatagtttttctgatggagggaagtttaataaaaaaaataaatcaataaagcatttatcttttatgattaaatctggagctgaaattatcgatgttggtggagagtcaacaaggcctggttcaaaaaccgtaccaaacaaaattgagtggaaaagagttgagcacgtaattaaaaattttaaaaaaataaataaaaaaacttgcttatcaatagataccagaaaatctgatataatgctaaaaagtattaagtttggagtagatttaataaatgatgtttctggatttagttttgatcaaagttctttgtataaattgaaaaaatataaaattccaaaagtacttcatcatatgaaaggtacacccaatactatgcagaaaaatccaaaatataaaaatgttttattagatatttatgatttttttgaaaaaaatattaatatgaaattatatgacaaaaaaattattttagatcctggtattggatttggtaaaactttgaaacataatttgactttaatttccaaaatatcattgtttcatagtttaggttttcctattttagttggaacttcaagaaaaagatttataaatcaaatatcaaataaatatgatagcagcgatagaataggtgggactttagcatcagttgtatttttactatcacaaggagttcaaatttttagagtacataatgtaaaagaagttaaaaagggaattttggtatttaacgaaaattttattaaactaatgaaaaata

SEQ ID NO: 240898 - DNA, 808 bp, Unknown
  Bacterial polypeptide expressing nucleotide sequence isolated from the Sargasso Sea
ctgtcagtgcggcgccccctaattatgggaatcgtgaatgtcacgcccgatagcttttctgatggtggcgatcactatgatgctggcctggcaatcacccgggcgctggaacatgcggaggccggcgccgacatcgtcgatatcggtggggaatcgactcgtcccggcgccaccgaaattcccatcgccgacgaaattgaccgtgtcctgccggtcgtcgaagcagccgtggattctggcatctgcgtgtccgtggatacccgacatgttgatgtcatgcaggcggcgattgaagctggcgcgagcattatcaatgacgtgacggcatttaccgacgatcatgaatcgctagaaatcgtcgcgggctctggtgccggtattgttctgatgcatatgcagggaacgccaaaaacgatgcaacatgcaccggcctatcgtcttgcatctgccgacatctatgactggcttagcaagcgagtatccgtttgtatcgcagccggtatcccgctaaatcgtattgcggtcgatcctggcatcggctttggaaagaatgactgggacaacatggaaattctaaaccgggcggcgatctttcacggtctcggttgccctgtcgctattggtgtttcccggaagagctttattggccgcttggcggctgtggatgatcccaaacaaaggctgcctggcaccatagccgcaacattgatggcattagatcgtggcgttcaaattcatcgcgttcacgatgttgcagaagtcaaacaggcggtttcgatctgggacgcgcaatctcacaaccgatgaa

SEQ ID NO: 240899 - DNA, 736 bp, Unknown
  Bacterial polypeptide expressing nucleotide sequence isolated from the Sargasso Sea
aatgaaaaaatattacactagagcgtgtaattttttttatggttccaattcatcaaaaaaagttaagaaaaagatttcacttcctttaaatggaaacaatttaatttcatttgatagtattgaaattttaagcaaaggacaaagtaaaattttaaatataaaaaaaattaaatttttaaataaagatttaaaaaaaaaaattgaaaaagacctacgagagatcacaaaaaaaaaatcttttaaaaaattaaacttttcaaagataccaattttaatgggtgtaattaatcttactcccgacagtttctcggatgggggaaaatataataaaaaaaaacaggcttataatcatgctaagaatctagttaccgaaggttgtaaaataattgatttaggaggagaatctaccagacctggtgcaaaagatgtaaaagaagaagaagaatggaaaagaatttttccatcactaaaaagaattaataaattaaataagtacatttccttagatactcgaaaaagtttaattatggataaaggcattaaaaataatgtaaatttaattaatgatgtttctggtttaagttatgattctaatacattaaatattctgaaaaaaactaaaataccttttgtcattcatcacacaaaagggagtccaaaaacaatgcaaaaaaatccaaaatataaagatgttttgattgaaatatttgatttctttgaaaataaaattaaaaaa

SEQ ID NO: 240900 - DNA, 472 bp, Unknown
  Bacterial polypeptide expressing nucleotide sequence isolated from the Sargasso Sea
atgttaagatattacacaagagcgtgtaatttctactttggcaatcaatcaaaaattttagtaaataaaaaaaaatcaatttcattacataagattaaagaaatatcttttgatcatgttgagattattacaagaaaaaagatcagaagaatttctataaatcaagtcaagaaattaccaaatagtttaaaaaaaaaaataaatgcagatattaaaaaaataaattcaaaaaaaaaaaatttttctaattttaactttaaaaaaattccaaatattctgggtatattaaatcttacacctgacagtttttcagatgggggaaaatttaataaacaaaataagggcatcagtcatgccattagtttatacaaaagtggtgcatctataatagatgttggtggggagtcaacaagaccaggatcgaagcctataaatgaaaagctagaatggaataggattagcaagatataaa

SEQ ID NO: 240901 - DNA, 423 bp, Unknown
  Bacterial polypeptide expressing nucleotide sequence isolated from the Sargasso Sea
tttgcctaaattaattagaagaaaaattaattccgatttaaaaaaaattaaatcaaaaaaaaaaaatttttcaaatttaaattttaaaaaaatacctaatattatgggtgtcttaaatttgacacctgatagtttttcagatggtggaaaatttaattcaaaaaaaaagggaattgatcatgcaattagtttactaaactgtggtgcaaatttgattgatattggtggcgagtcgacacgtccaggatcaaaagtaattagagaaaatttagaatggcaaagaattgaaaaaattttaaaatcattaattaagagaaaaataccaatttctttagataccagaaagtctaaaattatgggtaaaggaataaatttaggagtcaaattaattaatgatgtttcaggattagaatttgactctca

SEQ ID NO: 240902 - DNA, 775 bp, Unknown
  Bacterial polypeptide expressing nucleotide sequence isolated from the Sargasso Sea
atgggtatattaaatattacaccagatagtttttcagatggtggaaaattttatcaaaaaaatttagcagaaaaacaaatgaagtatttatttaagtgtggagctgatttagttgatgttgggggagagtcaacaagacctggatcaaaatctataagttcaaaagaagaatggaatagaattaagaatattttaaaaaagataaataaaaaagatgtaatttcactcgatactagaaaatcagaaattatggaaaagggaataaaaattggagtaaaactaattaatgatgtttccggattgagttatgacaagaactcaataaatattttaaaaaaatataaaacaccttttatattgcaacattctttaggaaatccagacgtgatgcaaaataatccaaaatataaaaatgtaatattagatatttatgattatttcgatgaaaaaattaaacttttaagaagcaaggggattaaacataacaatataattttagatcctggtattggatttggaaaaaatttgaaacataatatgacgattattaaaaatatatcgatttaccattctttaggattgcctatattactcggaatatctagaaaaaggtttattaaagaattatcaaaaaataatgatagttcttctagaataggggggacaataagctcttctatttttgcaataatgcagggtgtgcaaatgttgagagtacatgatgttaatgaaattaaccaaagcataaaagtttataaatatctgattgaataaa

SEQ ID NO: 240903 - DNA, 649 bp, Unknown
  Bacterial polypeptide expressing nucleotide sequence isolated from the Sargasso Sea
tatgggtattctaaatctgactcctgatagcttttcagatggaggaaaatttaatagctataataaagcatttaaacaaatttctaacatgataaaatctggagcaaacattattgatgttggtggagagtctactcgaccaggttcaaaaacgattgatccaaaaattgagtgggagagaattaagtatgttttaaataactttaaacaaaaatataaaaaaatttgtctatcagttgatacacgaaaatctgatattatgataaaaagtgtaaattgcggcgcagatctaatcaatgatgtgtcaggttttagtcatgatccctttgcacttattaaattaagaaattttaatattccaaaagttttacatcatatgcaaggaaccccaaaaacaatgcaaaggaatccaaaatacaaaaatgttctactagatatttacgatttttttgaaaaagaaatttcaaatattacagataataaaaaaatcataatagatccagggattggttttggtaaaactctgaaacataatttgactttaatttccaatatatctttgtttcatagccttggctttccgattttggttgggacttcaagaaagagattcattaatcaaatatcaggcgagtacgatagtaaagat

SEQ ID NO: 240904 - DNA, 583 bp, Unknown
  Bacterial polypeptide expressing nucleotide sequence isolated from the Sargasso Sea
atggatagatattacacaagagtgtgtaatttcttttatggcaatcaatctaaaaatttagttagcaaaaaaaaagcaattcctttacaccaaattaaagaaatttcatttgatcagatagaaataatctctagaaaatcaaaaaaaagaatctttataaatcaaattaagtatttaccaaatttaattcaaaaaaaaataaaattagatttaaataaaattaaatcaaaaaaaaaaaacttttcaaatctagattttaaaaaaattccgaacatattaggtgtcctaaatttaacacctgacagtttttctgatggaggtcaatttaacaccacattgaaagctattaaacatgcaaaacatttattaaactctggagcagacttaattgatgttggtggtgaatcaaccaggccaggatcaaaagcaattaaagaaaatttagaatggaaaagaatttctaaatttttagaattaaaaagtaaaaaaattccaatatctctagatacaagaaaatcaaatgtaatgaagaaagggatagaattaggtgtaaggttaataaatgatgtttcaggcttaaatc

SEQ ID NO: 240905 - DNA, 781 bp, Unknown
  Bacterial polypeptide expressing nucleotide sequence isolated from the Sargasso Sea
atgggcattttaaatataacaccagacagtttttcagatggaggaaaatttaataaaaaaatttctgcaataaaacagattgaaaaattaataatcgatggagcaaatataattgatgtgggtggagaatctactagaccaggatctaaagcaattcttcaaaaagaagaatggttaagagttaataaagttatgagatactttaaatctaaaaattttattgtttctttagatacgagaaaaacatttgttatgaaaaaagcttctaaatataaactgaatctagtaaatgatgtgtctggcttaagttatgataaggatacaattaattttttaaaaaatagtaaattaccttttgttttacatcatatgaaaggttcaccagaaaccatgcaaaaaaatccaacttataataatgttttgttagatatatatgactattttgaggataagttaaaattaattagacaaaagggaattaaacataatcacattattttagatccaggaataggttttggtaaaaatatgaaacataatattaccctaattaataatatttctatttttcattcattaggattgccattaatgttgggtacttctagaaaaagatttataaaagatatatctggtcaaaatgatagtaatcaaagaataggagggactatttcttcaagtatttttagtatgctgcaaggggttcaaatacttagagttcacgatgtcaatgaagtaaaacaagggataaaagtttttaaaaaactaagttacgattgat

SEQ ID NO: 240906 - DNA, 778 bp, Unknown
  Bacterial polypeptide expressing nucleotide sequence isolated from the Sargasso Sea
atggacggtccccagatcatggggatcgtcaacgtcacgcccgattcattttctgatggcggggagttcgcttctcatcagacggcaatccgccacggccgtagactggtagcagaaggggctgatattgtcgatgttggcggcgagtctacgcggccgggcgcagagccaatcaccccggaagttgaaattgcacgggtcctgccggttatcgacacactcgcgaaagacggcatcagggtatcggtagataccagcaatcccgaggtcatggaagccgcagtgggtgccggtgcctgcatggtaaatgatatctatgccttgagaaagccgggggcactggcagcagtggcacgcctggatgtgccagtctgtctaatgcatatgcaaggcaccccggcgacgatgcaggacgcacctttttaccaggacattggccgggacatcagagaatttttccggtctcggattcatgcctgtggtcgagccggcgtcgatcgggggcgaattgtcattgaccccggatttggatttggcaaaacccgccaacataaccacactctgctgagtaaggtggggtggttgaccgagctgggagtgccggtcctgatcggcgtctcacgtaaggggtttgttcgttcgcttacacaggttaaatcaagacaagccttagacgaaaccagtgccttactggcgctgatggctgtagagcaaggtgcacgagttgtacgcgttcacaatgtcgaagtcactcgtaaattattgacccaggttacgg

SEQ ID NO: 240907 - DNA, 321 bp, Unknown
  Bacterial polypeptide expressing nucleotide sequence isolated from the Sargasso Sea
aatgggtgtcttaaatttgacacctgatagcttttcagatggtggaaaatttaattcaaaaaaaaaaggaattgatcatgcgattagtttactaaactgtggtgcaaatttgattgatattggtggtgagtccacacgccctggatcaaaaagaatcagagaaaatttagaatggcaaagaatagagaaaattttaaaatcattaattaagaaaaaaataccaatttctttagataccagaaagtccaaaattatgagtaaaggaataaatttgggagtaaaattaataaatgatgtctcaggattagaatttgactctca

SEQ ID NO: 240908 - DNA, 808 bp, Unknown
  Bacterial polypeptide expressing nucleotide sequence isolated from the Sargasso Sea
gctgatctcatttgataaaatagaattaattacaagaagctctaaaggaacttctctaaaagttatagggataaaaaatatcaactcaattaaaggtgctgctaaaaaaaaagttaaaaaagatataaaaaatattacttcaaaaaggagaaatttcctaaaaaatataaatttttctaaaccttctataatgggtatattaaatttaacgcctgatagtttttcagatggcggtttatacaataaaaaaagttcagcagaaaaacatattaaaagattaataaaatcaggcgcagatattatcgatgttggtggtgagtcaactagacctggctctaaaactataccaattaaaactgaatggagaagagttgagcatgtaataaaaaactttaaaaaaaagtttccgaaaatttgtctgtcattagacacaagaaaatctgaaataattaaagaaggttatagatacaaagtaaacataatgaatgatgtatcaggatttgaatatgatccacttactttgagcactcttaaaaaaatgaaaatttcaaaagtagttcatcatatgcaagggacaccaaatacaatgcaaaaaaacccaaaatataaaaacgttttacttgatatttatgacttttttgaaaaaaaaataaatagtgttgatgataaaatgttaatattagatccgggaattggttttggaaaaactttgaaacataatttgactttaatttcaaaaatttctttgtttcatagtcttggattacctattttagttggatcatcaagaaaaagatttatttcgcaa

SEQ ID NO: 240909 - DNA, 706 bp, Unknown
  Bacterial polypeptide expressing nucleotide sequence isolated from the Sargasso Sea
atgagaaaatattacacgagggcgtgtaatttttatcatggaagtgaagcaagaaaattaatccaaacaaaaaaagcacttccattaaacggtaaaaacaacatagccttcgatagtatcgaaattttttccagagaaaaaaggggagtaaaaactaatttaattaatgttaataaagttttaaaactaaataaaaaaattagaaaaattgttaaagaagatttaagcaaaatcgtttcgaagagaaaggattttcttagacatattaattttcaatctccatcaattatgggcattcttaaccttacccctgatagtttttcagatggaggaaaatttaacaactacaataaagcatttaagcaaatttctaacatgataaaatctggagcaaatattattgatgttggtggagaatctactcgaccaggttcaaaaacgattgaaacaaaaattgagtggaagagaataaggtatgttttaaataattttaaaaaaaaatataagaaaatttgtttgtcagttgatacacgaaaatctgatataatggttaaaagcattaactgcggcgcagatctagtcaatgatgtgtcaggttttaaatatgatccctttgcacttgttaaattaagagatttaaatattccaaaagttttacatcatatgcaaggtaccccaaaaacaatgcaaaggagtccaaaataca

SEQ ID NO: 240910 - DNA, 562 bp, Unknown
  Bacterial polypeptide expressing nucleotide sequence isolated from the Sargasso Sea
atgggggtagttaacttaactcctgatagcttttctgacgggggaaaatataataagagaaatttagggtttacccatgcaaaaaaattacttgaaaaaggatgtaaaattttagatatcggcggagagtcaaccagaccaggttccaacacagttaaaaaagaaattgaatggaaaagaataaatcaaactctaaaacaacttaaaaaacttaaaaaattcgtttcaatagatactagaaaaagctggataatgaaaaaagcagttgaacaaaaaataagtttaattaatgatgtttcaggacttacctacgataaatattcaattgatatattaaaaaaatttcaaactccttttgtacttcaccatatgaaaggtagtccaaaaaatatgcagaaatatccaaaatataaaaatgtacttttagatatttatgatttttttgagaacaaaattaaagaaattagaaataaaggaattatgcataataacattattttagacccaggaataggatttggtaaaaacttgaaacataatattactttaattcgtaatattt

SEQ ID NO: 240911 - DNA, 461 bp, Unknown
  Bacterial polypeptide expressing nucleotide sequence isolated from the Sargasso Sea
cttgcttgttggcattcttaatgtcacaccagatagttttagtgatggtggtcaattcgttgacgtagaatctgcgatggagcacgcattgcgactcgtcgaagagggggcaggaatgattgatgttggtggagagtcaacgaggccgggtgccacccgcataagcgaagcagagcaaatcaaaagggttgtgccagtcattgaatgcatccgcgagcaatcaaacatcccaatttcggtagacacaacattagccaaagtagcaagtgcagcaatttatgctggtgcaaacgtcattaatgatgttgcttctggaacagaagatgaagcgatttttgcattggcaagcaattctggtgctggtcttgtattgatgcaccgacgacttcctccagagagggatatctacagccatcagtatgacaaagcgcctgaaagcgaaaacatcgttgccgatatct

SEQ ID NO: 240912 - DNA, 514 bp, Unknown
  Bacterial polypeptide expressing nucleotide sequence isolated from the Sargasso Sea
atgaaaaaatattacacaagagtgtgtaatttttattatgggaacttatcaaaaagacttgttaaacaaaaaaaagctttaccattaaatggaaatcataaactttcttttgatcatatagaaatattatcccgaaactttgaaaaaaaaatacatattgaagagataaaaaacttatcaaaatttttaaaaaaaaaaattaataaagatttaaatttaattattaaaaaaaaaaaaaacttttgtaatttcaattataaccacaatccaaatctcttaggaattttgaatttaactccagatagcttttcagatggtggtaaatttaacaaagaccacctaggttacaaacaagctctaaatttatttaactcaggagcccaggttatagacataggaggagagtctactagaccaggttccaaagaagttaaagcagatatagaatggaaaagagttaaaaaaataataaaaaaattatcaaaaaaaattaccttatctttagatactagaa

SEQ ID NO: 240913 - DNA, 775 bp, Unknown
  Bacterial polypeptide expressing nucleotide sequence isolated from the Sargasso Sea
tggggtgttttaaatttaaccccagatagtttttctgatggaggcaagtttaataagagaagcaagtcattcaaacacatatcaaacatgattcaatttggtgctaatattattgatgtaggaggagagtcgacgagaccaggttctaaaacaatagatccaaaaacagaatggaaaagaatccagtacgttttaaagaattttaaaaaaaaatataaaaaaacttgtttatcaatagatacaagaaaatctgatttaatggtgaaaggcattaaatgtggagttaatttaataaatgatgtatcgggattcaattatgatcaaagttctttatccaaattgaaaagatacaacatatcaaaagttatacatcacatgcagggtacacctaatactatgcaaaaaaatcctaaatataaaaatgttctcttggatatctatgatttctttgaaacaagtataaataaaaaatttaaagacaagaaaatcatcttagatccaggtatcggttttggtaaaactttgaaacataatttgactttaatttcaaaaatatctttgtttcatagtcttggttttcctattttggttggaacttcaagaaaaagatttataaatcaaatatcaggaaaacatgacagcaaagacagaacaggaggaacattagcttcagttctttttttgttatcacaaggtgtgcagatttttagagtgcataatgttaatgaggttaagcaaggaattcttgtatttgaaaaaatattattagattaat

SEQ ID NO: 240914 - DNA, 619 bp, Unknown
  Bacterial polypeptide expressing nucleotide sequence isolated from the Sargasso Sea
ttgattggaatattaaatctcacacctgatagtttttcagatggaggacaatacaatcaaattagctcagcattaaaaagagtgaaattactattaaaagctggttgtaaaattattgatgtaggaggagagtcaacccgaccgggatctaaagctatagatgaaaatactgaatggaaaagaatagagaatttactaaaaaaaattagaaattataaatttttgttatctttagatactagaaaaacttttgttatgcataaagctttaaaatataaacttaatattgttaacgatgtttctggcttttcatacgataccaaaactatcgatttccttaaaaaaacaaaacttcctttgatcattaatcattcaaaaggagaaccaaggacgatgcaaagaagaccttcttacaagaatgttcttcttgaaatatatgatttttttgaaaaaaaaattaaactattaagaaaagctggaataaagcataacaatattattttagatccagggataggttttggaaaaaacttgaaacataatattaccataatgaacaatatttctatcttccactctttaggatttcctgtaatgttaggctcttctagaaaaagat

SEQ ID NO: 240915 - DNA, 622 bp, Unknown
  Bacterial polypeptide expressing nucleotide sequence isolated from the Sargasso Sea
atgcaaagattttacacaagagcgtgtaatttctattttggaaatcaatcaaaaaatttagttaaaaaaaaaaaatcgattccgttacataagattaaagaaatatcttttgatcaggttgagattattacaagaaaaaagattagaataatttctataaatcaaattaagaaattaccaaataacttaaaaaaaaaaataaatgcagatataaaaaaaataaattcaaaaaaaaaaaatttttctaattttaattttaaaaaaattccaaatattttaggagtattaaatctcacacctgacagtttttcggatggaggaaaatttaataaaaaaaataagggcatcaagcatgctattagtttatataaaagtggtgcatctataatagatgttggtggggagtctacaagaccaggatcgaagcctgtaaacgaagagcgagaatggaatagaattaataagatattaaaattaattgtaaaaaaaataccaacctctttagacacaagaaagtcaagaattatggaaaatggtattagaatgggagttaagcttattaatgatgtttcaggattaagctatgatcctaaaacaataaatattctaaaaaaagtataaa

SEQ ID NO: 240916 - DNA, 520 bp, Unknown
  Bacterial polypeptide expressing nucleotide sequence isolated from the Sargasso Sea
ttgggggtattaaatttaacacctgatagtttttctgatggaggacaatttaattcaaaaaaaaaaggtgttgaacatgcaatttttttattaaattctggagcagacttaattgatattggaggagagtcaactagaccaggatcaaaagcaattaaagaaaatttagaatggagcagaattagtaaaattttaaaattaattagtaaaaaaatacctttatctttagatacaagaaaatcaaatattatgaagaaaggtataaaattaggagtaaggttgataaatgatgtttctggattaaaatatgataaagaaactattaacgttttaaagaaatataaaactccatttgttattcagcattcacaaggatctccagaaaacatgcaaaaaaaaccaagttataaaaatgaattattagacatatatgatttttttgaggaaaaaataaaatttttaagatcaatgggtataaatcataacaatataattatagatcctggaataggtttggaaa

SEQ ID NO: 240917 - DNA, 853 bp, Unknown
  Bacterial polypeptide expressing nucleotide sequence isolated from the Sargasso Sea
aatgagaaaatattacacaagaccgtgtaatttttattatggaaattatgctaaaaatctcattaaaaataaaaaagcattacctttagccggaaatacaaatatatcgttcgatcaactagaaatttttcaaagaacaaagaaaaaaggcgttaaaagttccatttattcaattaaatctattaaaactttatcaaatcaaataaaaaatgatttaaaaaaaataacttctaaaagaacaagtatttgtggacttcgatttgatagtccgcagattattggagtgcttaacgttacaccagatagtttttctgacggtggtctattttttaaaacttccaaagcctatgagcaggcaaatttaatgattaaaaatggagcaaagatcattgacattggaggtgagtcgactagacctggttctaaaattgtacaggataaagaagaatggaacagaataaaaaatactattagtaaaataaaaaaattttttccaaaaatacctatatcattagatacaagaaaatcttttataatgaaaaaaggcatagaacttggagttagtataattaacgatgtttcaggtttaaattttgataaaaaatcatttgatactattaattcaaataaaattccatttattttacatcatatgcaaggcaccccggacacaatgcaaaaaaatcctaaatacaatgatgcgttacttgatatttatgacttttttgaagaaaaaattaatttttgtttaaaaaaaggatataaaaaagaactcatatttttagatcctggcattggctttggtaaaaatctaaatcacaatttaagaatattatcaaagatttcgaccttc

SEQ ID NO: 240918 - DNA, 735 bp, Unknown
  Bacterial polypeptide expressing nucleotide sequence isolated from the Sargasso Sea
aatggaaaaatattacacaagagcgtgtaattttttttatacttcaaaattcagtaaaataaaaaaaaatcatttacctttaaatggaaattctggtattaaatttagatctatagaacttttaacaaggaaatcagaaaagataataaatttagaggagataaaaaaactcccagttagattacaacataaaataaaaaaagatttaaaaaatatatccaaaaaaaaaaaatttaaggatttaaaatttgacaattccccaataataatgggaattttaaatttaacacctgatagcttttctgatggtggaaaattcataaaatttaaatctgcagaaagacaaataaataacttaataaactctggagcaaaaataattgatattggtggtgaatctacccgcccaggtgcgaaagagatccctgtatctgatgagtggaaaagaatatcaaaaaaactaaggctgattagaaaaaaaagggtgatcttctcactggatacaagaaaaagccaggtgatggaaaaaagtttaaattatggaataaaaattataaatgatgtttcaggttttgagtatgacaaaaaaacaattaattttttaaaaaaaactaaagtaccatttgtaataaatcatatgaaaggctcacctagaacaatgcaaaatagcccaaaatatgaaaatgttttgctagatatttatgattatttcgagacaaaaattaaatatttaag

SEQ ID NO: 240919 - DNA, 442 bp, Unknown
  Bacterial polypeptide expressing nucleotide sequence isolated from the Sargasso Sea
atgaaaaaatattacactagagcgtgtaatttttattatggtgtaaatgcaaaaaaactaatcaaaaaaaaaatagctttacccctttgtggtaaccagaatatagcttttgataaaattgaaattattgtaagaaaaaaaaataaagttatatcaaagatcattaaccttaaaaaaattcatactctaaatacttcttgcaagaataaagttaaatatgacctaaaaaaaatagttaagaaaagaaaaaattttttaaataatgtaaattttttagagccatcaattatgggaattttaaatttaaccccagatagtttttctgatggaggcaaatttaataatcagaaaaaagcaaaaagtcatatatataatatgataaaagatggggcaaacattatcgatataggaggagagtccacaagacctggtcaaaaacagt

SEQ ID NO: 240920 - DNA, 897 bp, Unknown
  Bacterial polypeptide expressing nucleotide sequence isolated from the Sargasso Sea
aaaatgataaaatattacacacgagcgtgtaatttttattacggaaaaatttcaaaacaaaaagtaaataaaaataaaagtctcccacttaatggaaataaattaatctctttcgataccatagagttaattagcagaaagaataagaaaattattaaaattaatgatattaaaaatctttccacaaaattaaaaaaaaaaatttataaagatttaaaagaaataactaaaccaaaaagtctacaaaatctaaaaattaaatcatttcctgttttaatgggtatattgaatgctacaccagatagtttctctgatggaggaaaatatattaaatcaaaatctgcatataaacaaattacaaaattgataaaagatggtgctgatattttagatataggtggagagtctacacgtccaaattcaaatcctattgatgaacaaatagaatggaatagagttaaatcaaagttaaaatttgcaaaaaaaaataaagtatttgtatctttagatacaagaaaaagtttagttttaaaaaaatccttactcttaaaagttgaccttctaaatgatatatctgggttgagctacgataaagaaataataaatgtattaaaaaaaactaaaattccatttgttataaatcatattcaaggaattccaaaaactatgcaaaaaaaccctaaatataaaaatgcagttctagatatatatgattattttgaagaaaaattaaaatttataagggataataaaatatcacataacaatataattttagacccaggtattggttttggtaaaaatttgaaacataatattactatattaaatcaaatatctatttatcactcacttggatttccaagtaatgttaggtatatcaaaaaaaagattata

SEQ ID NO: 240921 - DNA, 667 bp, Unknown
  Bacterial polypeptide expressing nucleotide sequence isolated from the Sargasso Sea
aatgaccagatattacacaagagtgtgtaatttctatcatggatcaaaatctaaattattaattaaacaaaaaaaaacattaccattaaacggtaatgtagatatttcttttgataaagtagaagtaataacaagaaaatctttaaaaaaaatttctatccatcaaattaatattctatctaataaaattaaaaaaattgttaaaaaagatattaaagttattacaaaacgtaaaaaaaaattcaagaacctaagtttaaaaaatactccaattatcatgggagttttgaatattacacctgatagtttttctgatggaggaaaatataataaaaataatttagcaaaaaaacaattgaagtacctttttaaaaaaggtgccgatttagtcgatataggtggagagtcaactagacctggttctaaacccattagctcaaaagttgagtggaatagaataaagaatattttaaaaaagattaacaaaaaaaaagtaatatctttagattcaagaaaatctagtataatggaaaaaggaattaaatctggagtaaaattgataaatgatgtttcaggtttaaattatgataaaaattcaattcatattttaaagaaatataaggtaccttttgttattcaccattctcttggaaatcctgatgtcatg

SEQ ID NO: 240922 - DNA, 778 bp, Unknown
  Bacterial polypeptide expressing nucleotide sequence isolated from the Sargasso Sea
atgggtatagttaatttaaccccagatagtttttcagacgggggtaaatataacaaaagaaaattagccagaaatcatattaataaattattatcaagtggagcaaaaataattgatgttggtggagagtctacaagaccaggagcaaatgatattagctctaataaagaatgggatagaattaagacagtcttaaaatttttaaaaaataaaaagtgtattgtatcattggatacaagaaaaagttttgtaatggagaaagcttccaaaataagaatagatcttataaatgatgtatctggattaagttacgatcctgaaactataaattatttaaaaaaaacaaaaaaaccttttgttattcatcatatgcaagggacaccaaagaatatgcaaattaaacccacttataaaaatgtgctacttgatatctatgacttctttgaaacaaaattaaaatatttgagaaaaaaaggtataaaacataataatatcatattagatcctggaattgggtttggaaaaaatttgaaacataatattaccctcctaaagaatatttctatttttcattcattaggacttcctgtaatgttaggtttgtctagaaaaagatttattaaagatatttcaaaagaaaatgataccaaagatagaattggtggaactatatcttcatgcattcaagcatatcttcaaggtgttcaaattttaagggttcacgatgttaaagaaattaaccaggcatttaaagtttttagagaattacaaaattaaa

SEQ ID NO: 240923 - DNA, 451 bp, Unknown
  Bacterial polypeptide expressing nucleotide sequence isolated from the Sargasso Sea
ttgcctaaattaattaggggaaaaattaattccgatataaaaaaaattagatcaaaaaaaaaaaatttttcaaatttcaattttgcaaagatacctaatataatgggtgtattgaatttaacacctgatagtttttcagatggaggaaaatttaattcaaaaaaaaaaggaattaatcatgctattagtttactcaactgtggtgccaatttgattgatattggtggtgagtcgacacggccaggatcaaaagtaattagagaaaatttagaatggcaaagaattgaaaaaattttaaaatcattaattaagaaaaaaataccaatttccttagataccagaaagtctaaaattatgagtaaaggaataaatttaggagtaaaattaataaatgatgtctcaggattagaatttgacactcaaactttaaatatattaaagaaaatataaa

SEQ ID NO: 240924 - DNA, 204 bp, Unknown
  Bacterial polypeptide expressing nucleotide sequence isolated from the Sargasso Sea
tatgggtattttaaatttgacacctgatagtttttcagatggcggtgaatttaatagcaaaaataaatccctaaaacacatttctcaaatgataaaatctggagctgatatcatcgatgttggaggtgagtctactagaccaggttctcaaacaatttctccagatagagaatggaaaagaatagagtttgttgtaaaaaattt

SEQ ID NO: 240925 - DNA, 707 bp, Unknown
  Bacterial polypeptide expressing nucleotide sequence isolated from the Sargasso Sea
aatgactaaatattacacaagagcgtgtaatttttaccatggaaatacatcaaaagaaaaaattagatacaaattatctttaccattacatggcaattcgttaatttcttttgatactgttgagattattagcagaaaatcaaaaagaaaaattaacattaaaaatataaaaaatttacctcttaaaattaaaaacaaagttttatttgatttaaaaaaaatttgtaaaaaaaaattattttctaatttaaattttaaagacgtacctattttgatgggagttttaaatataactccagatagtttttccgatggaggaagatttttaagtaaaaaaaaatctgaaaaacatattgagaatttattaaaatctggggcaaaaataatagatattggaggagaatcaacaaggcctggttcaaatgatataaatcctctgaaagaatggtctaggattaaaaataaaattaaatatttaaagaaaaaaaaatgtttaatttctttagattctagaaaaacttttgttatgaaaaaggcttatgatgttggaataaatttagtaaatgacgtttctggactcgcttatgataagaaaacaataaattttttaaaagacagcaaaattccttttattttacaccatattaaaggaactccaaaaactatgcaaaataaaccattttataaaaatgtactcttagatattt

SEQ ID NO: 240926 - DNA, 379 bp, Unknown
  Bacterial polypeptide expressing nucleotide sequence isolated from the Sargasso Sea
atgaaaaatcctttaaaacccttaattatgggaatagttaataccactccagattcatttagtgatggcggggttcacagctcggctggtgagttgatagattttgcgtatgagcttatcgatcagggtgcagatattattgatattggcggcgagtctacaagaccgggagcagaaaaagttagtagcgaagaagaaattcgtagaatttcccccttagttaaagaattatcaaaaaactgtgattgcgctatttcagtggacacatataaatcctctacagctaaatttgcccttgaaaatggtgtgagtattataaatgatatttcgggattaacatttgatccctctgtagctagtacagtttcagatcacaatg

SEQ ID NO: 240927 - DNA, 586 bp, Unknown
  Bacterial polypeptide expressing nucleotide sequence isolated from the Sargasso Sea
tatgggcgtcttgaacttaaccccagacagtttttcagatggtggtatatacttaaaaaaaaacttaggtgaaatacatgcaaaaagattagttagggatggatgtgatattatagatattggtggagaagcaacaaatcctggatcaaatgaagtacacattaaagatgaatggaaaagaatttttccaactttatcaaaaattggaaatttaaagtcttttatttcacttgatactagaaagagtgaaataattaaaaaagctttaaaatataaaataaatctcgttaacgacatctcaggtctagattatgatccttacactttagaagttttgaaaaaaaccaaaattccatttgtaatccatcacatgcgaggagatccgaagacaatgcaaaaaaatcccaaatataagaatgttcttttagacatttatgatttctttgaaaaaaaaattaattttattagatcaaatggcataaaacataataatataattttagatcctggtataggatttggtaaaaacttgaaacataatattactttgattagaaacatttctatttttcactcccttaggttt

SEQ ID NO: 240928 - DNA, 784 bp, Unknown
  Bacterial polypeptide expressing nucleotide sequence isolated from the Sargasso Sea
ctgccacttcacggtattaaagaaatttcttttgatcaaattgaaataattacaagaaaatctaaaaaaataatattcataaaaaaaataaatagattaccaaagactttaaaaaaaaaaattaattttgatttaaaaaaaattacagcaaaaaaaaaatctttttgtaacttaaagtttaacttaattcctaattttttaggagtgttaaatttaacacctgatagtttttcagatggtggaaaatttaataaaaaagataaagctattcaacaagctaaaaatttatttaactcaggtgcaaacttaattgatattggaggggagtctactagaccaggatctaaaactataaatgaaaagttagaatggaaaagaataaataaaatattaaaactattgagaaaaaaaataccaatatctttagatacaagaaaatcaaatataatgaaaaaaggtattcaacttggagtgaagttaatcaacgatgtgtcaggtttagaatatgacccagaaactgtaaatgttttaaagcttaataatactccatttgtattgcagcattcccaaggccgtcctgaggatatgcaaaataatccatcttataaaaatgaattgctagatatttatgatttttttgagaaaaaattaaaatttttaagatcaattggaataaatcataataaaataatcattgatcccggaataggttttggaaaaaatttgaaacaaaatatgaatttaataaagaatatttctatttttcattcacttgttttcctat

SEQ ID NO: 240929 - DNA, 739 bp, Unknown
  Bacterial polypeptide expressing nucleotide sequence isolated from the Sargasso Sea
tctgccattatgcggaaataaaaatatttctttcgatactattgaaatttatacccgtcaaaaaaacaggcaaatcacctctgagacgataaaaattaaagacataaaaaaattaaaatatcaaaagaaaagaaaaattattttagacttaaaaaaaatttctttaaaaagaaaaaactttttagaaaaaatcaattttctagaaccaagtattatgggaatattaaatatgactcctgacagtttttcagatggtggaatgtacaacacaaaaaaaaaatcaaaagatcatataaaaaatatgataaaaaatggggcaaacataattgacattggtggtgaatcaactagaccggggtcaaaagaagtcaaaatagccgatgagtggaaaagattggaaaaagtaataataaatttcaaaaaaaattttaaaaatattttattatctatagactcgagaaaatcagaaattattgaaaagtcttctgcctttggagttgacataattaatgatgtatcaggttttagctacgataagaaaactttaagtttggtaaaaagtttagataaatctaatataattcatcatatgcaaggcactccaaatacaatgcaaaaaaatccaaaatattttaatgttttattagacatctatgatttttttgaaaagaaaatcgaggaaattaaagaaaatcaaaaaatcataattgacccaggaataggttttggtaaaaactga

SEQ ID NO: 240930 - DNA, 743 bp, Unknown
  Bacterial polypeptide expressing nucleotide sequence isolated from the Sargasso Sea
tatgggaatattaaatgttaccccagactcatttagcgatggaggtgagttttatagtcaaaagcaagctattcggcatgcgacccaattaattaataatggtgtggatattttagatgtgggaggtgaatcatccaggccaggtgcagatgaagtatctgaaaaagaagaattaaatagaacaatacctgtaattcaagaaatacgatctatttcatcagatattctaatttcaattgacaccacaaaatccagagttgctttggaggcaattcaatctggtgctgatatcattaatgacattagtggtctatcttttgatcctaaaatggcagatatcgttaaggatttaagagttcctgtaattattatgcacatgcagggggttccctctaacatgcaaaataatcctacctacaataacctcatagaggacatatcttcctttttcaagagaaaaataaagtttgttttgagtgtcggaatagataagaaacaaattattcttgatccggggattggttttgggaaaacagttgataataattttcaaattataaaaaaattaaatgaattttgtaaactaggattaccagtcatgattgggccaagtagaaaatcatttattgggactgctctagatttaccagtggatgataggttagagggtactgctgctacggtagcagcaggcattctgaatggtgcacgaattgtgcgcgttcatgatgtaaaagaaataa

SEQ ID NO: 240931 - DNA, 423 bp, Unknown
  Bacterial polypeptide expressing nucleotide sequence isolated from the Sargasso Sea
tctggaaaataaaaatttacaaaaaaaaattaaatcagatttaaaattaatcacgaaaaaaaaaaattttgataagctaaaatttaaaaatctccctatactaatggggatacttaatttaacacctgatagtttttcagacgggggcaaatataacgacatagaaaaagcttttttacgtgcaaaagaacttaaaaaaaatggctgtaaaattttagatatcgggggagagtcgactagaccaggttccgaagaagtaaaagaaaatattgaatgggaaagaattaaagaaactataaaccaacttaagaattcaaatttttttgtttcgttggataccagaaaaagtcggataatgaaaaaaggattgcttaataatgtaaatctaataaatgatgtatccggtttgagttatgatccaaa

SEQ ID NO: 240932 - DNA, 472 bp, Unknown
  Bacterial polypeptide expressing nucleotide sequence isolated from the Sargasso Sea
aatgcaaagatattacacacgtgcgtgtaatttctattttggtagtcattcaaaaattctagtaagaaaaaaaaaatcaattcctctacatcaaataagcgaaatatcatttgatcacattgaaataataaccagaaattcaaaaaaaaaaattcctatagatcaaatcaaatatttaccaaaaaacttaaagaaaaaaataaatttagatattaagaagattacttcaaaaaaaaaaaatttttctaatttaaactttaaaaaaataccaaatatattgggtgtattaaacataactcctgatagtttttcagatggaggaaaatttaattcaaaaaaaaagggaattagtcatgctgtaaaactctataaggctggagccgatttagtggatattggtggagagtctacaagaccaggatcaaagtcagttaatgaaaaacttgaatggaatagaattaacaagattcta

SEQ ID NO: 240933 - DNA, 406 bp, Unknown
  Bacterial polypeptide expressing nucleotide sequence isolated from the Sargasso Sea
aaaaaaaaaaaatttaaaaaaatcaaatttagtatcaaccctattattatgggaatattaaatgctacaccagatagtttttctgatggaggaaaatatttaaaatcaatgtcagcaaaaattcaaataaaaaaacttaaaaaggaaggtgcagatatagttgatataggtggagagtcaacaaggccaaattcagatgaggttgaaagcaagatagaatggaaaagagtcaaatctaaaataaaatatgcaaaaaaaaataaattttttgtttctctagatacgagaaaaagttttgtcttgaaaaaatctttgccgatgaaaattaatctgctaaatgatgtatctggtcttaattatgataataaaattttaaatatattaaaacaaagtaaattaccttttg

SEQ ID NO: 240934 - DNA, 604 bp, Unknown
  Bacterial polypeptide expressing nucleotide sequence isolated from the Sargasso Sea
atgcaaagatattacacaagagtgtgtaatttctattatggtaatcagtcaaaaattttagttaataaaaaaaaaactataccattacatcaaattaaagaaatatcttttgatcatattgaaataattacaagaaaatcaaagagaaaaatttctataagtcaaatcaaatatttaccgaatgatttaaaaaaaaaagttaatttagatattaaaaaaataaaaaataaaaaaaaaaatttttctaatttagaatttaaaaaagttccaaatatattaggtgttttaaatattactcctgacagtttttcagatggaggaaagtttaatacaaaaaaaaaaggaataaatcatgctattaaattatacaaagaaggtgcagatttaattgatattggaggtgagtcaactagaccaggttcaaaggaagtaaataaagaagatgaatggaatagaattaaagatattttaaaatctatcgtaaaaaaaattccaatttctttagacactagaaaatctgaaataatgaaaaatggaattaaagtaggagtaaaactaattaatgatgtttcaggtttaagttttgacccccgagaccaataaa

SEQ ID NO: 240935 - DNA, 506 bp, Unknown
  Bacterial polypeptide expressing nucleotide sequence isolated from the Sargasso Sea
gatgggagttttaaatttaactcctgatagtttttctgatggtggtatgtttaacaaaattaaactagcaaaaagacaaataaataaactaattcaggatggagcaaatatcattgatattggaggcgagtctaccaggccaggttcaaaagaaattaaacaatcaaaagaatggaatagaataaaagattccatgcaatatttaaaaacaaaaaaagtctttgtttccttagactctagaaaaagttttataatgaaaaaagctctaaaatataaattaaatttgattaatgatgtatctggtttatgctatgataataatacaattgactttttaaaaaaaactaaaataccatttattttacatcatattaagggaacacctaaaactatgcaaattaatcctagttataaaaatgttttgcttgatatatacgattattttgaaaaaaaaataaaacaaataagaaaaaaaggaattaaacataataatataatattagacc

SEQ ID NO: 240936 - DNA, 498 bp, Unknown
  Bacterial polypeptide expressing nucleotide sequence isolated from the Sargasso Sea
catgattaaatattacactagagcgtgtaatttttattatgaaaaccaggcaaaatctttaataaaacaaaagcttgctttaccgctttgtggaagcactcggattgcatttgatagtattgaaatatttagaagagagaaaaaaaaaatcatttctaaaaagttaaatctaaaaaaaataaaatttcttaagtcaaaagagcaaaaaaaaattaaaattgatttaaaaaaaataacctctaaaagaagaaattttctttctaatgtacgtttttcgcatccgtcaattatgggaattcttaatttaactccagatagtttttccgatgggggaaaatttaattcaagtaaagaatctgcattacaaattagtaacttgattaaatcaggagctaatataatagatgttggcggagagtctacaagacctggctctaaagatataaaatcaaaaatagagtggaatagagtcaagaatgtaataaaaagatttaaaaa

SEQ ID NO: 240937 - DNA, 691 bp, Unknown
  Bacterial polypeptide expressing nucleotide sequence isolated from the Sargasso Sea
aatgggtattttaaatattacaccagatagtttttctgacggtggaaaatttaataataaaatttctgcaagaaaacagattaatacattaataaatgatggagctaaaataattgatgtaggtggagagtccacaagaccaggctcaaaagaaattcttcaaacagaggagtggctgagattaaataaagttatgaagtatttaaaatctaaaactttttttgtttccttagatactagaaaaagttttgtaatgaaaaaagctttgaaatataaactagacttaattaatgatgtatctggtttaagctatgacaacgagacaattgattttttaaaaacaactaagttaccatttgttctacatcacatgaaaggtaacacagaaacaatgcaaaaaaatcctagttacaataatgttttattggatatctatgactattttgaagataagctgagattaatcagaaaaagtggaattaaacataatcacattattttagatccaggagtaggatttggtaaaaatatgaaacataatattaccttaattaataatatttctatttttcattctttaggattgccagtaatgttggggctttccagaaaaaaatttataaaagatatatccggaaataatgatagcaaagaaagaatagggtggaactgtgtcctcaagtatctttag

SEQ ID NO: 240938 - DNA, 564 bp, Unknown
  Bacterial polypeptide expressing nucleotide sequence isolated from the Sargasso Sea
gatgaagaaaatagcgtcgctcttgcaagagaaccgtccactaatcatgggagttgtaaatgtgactccagattcattttcagacggtggtgagttcctttcattagccgccgcacttgagcatgctaattatcttcaggaatgcggtgccgacattatcgatattggaggagagtcaactaggcctggagcaaagccgatatctagtagcgaggagctccagcgagtgatgcccgttattgaaaggcttagatatgcatctgacgttcccatttcggttgacactagtaaagctgtagtaatggaaaaagcaatagagtgcggcgcgaccttgattaacgatgtttatagtctgcgtaagccgggaacccttgacgtggtagcaggttcggacgcttatgtttgcttgatgcacatgaaagggagcccgcaaaatatgcaagacagaccaaattataaggatctgttattggaggtgcgagcatttttgagtgatagagttgtagactgcgaaaaaaaagggataagtgcagatagattaatcgttgatattggctttggatt

SEQ ID NO: 240939 - DNA, 583 bp, Unknown
  Bacterial polypeptide expressing nucleotide sequence isolated from the Sargasso Sea
aatgcaaaaatattacacacgtgcgtgtaatttttattatggttcattttcaaaagagaaaattaaaaaaaaacaatcattaccgttaaacggaaatcatttaatatcttttgatacagtagaaattataaatagaaaatataaaaaaaaaattcatataaaagaaattgaaaatcagaataacaaaattaaaaaaaaaattaaacaagatataaatttaattataaaaaaaaaaaaatttaaaggattaaactttttaaattttcctattttaatgggtgtgattaatttaacgccagatagcttttcagatggaggaaaatataataaaaaaaattcaggatttaatcatgcaaaatatttaataaaaaaaggatgcaagattctagacataggtggagaatcaacaaggccaggagctaaagatattaataaaatcatagagtggaagaggattaatgaaactttaagaaaaattaagaaactaaacaaatttatttctttagatactcgaaaaagtttaattatggaaaaaggaattaaaaacaaagtaaatttaataaatgatgtttctggacttgaa

SEQ ID NO: 240940 - DNA, 521 bp, Unknown
  Bacterial polypeptide expressing nucleotide sequence isolated from the Sargasso Sea
aatgactagatattacactagagtgtgtaatttctattatggaaaaaaatcaaaaagtttattaattaaaaaaaaaacaatccctttaaatcaaaataaagaaatttcatttgatcaaattgaaattattagtagaaaaaccagaaagaaaatttcaattaaacaaataagaaatttatctaagcttctcagaaaaaaaattaattctgatttaaaaaagattaaatctagaaaaaaaaatttttctaatttagattttaagaaaattccaaatttaataggtgtattgaatttaacaccagatagtttctcagatggaggaaaatttaattcaacaaaaaaaggaatcttacattcgaataacttaatcaagtctggtgcaaaattaattgacattggaggagagtcaacaagaccaggatcaaattctgtaaaagagaatttagaatggaaaagaattagtaaagttcttaaattaataggtaaaaaaatacccatatcattagatacaagaaaatcaa

SEQ ID NO: 240941 - DNA, 715 bp, Unknown
  Bacterial polypeptide expressing nucleotide sequence isolated from the Sargasso Sea
attggaaatcttttatagaaaaaaaagaggaattactaagagcaatatttactcaattaatgaggtaaaaaatttaaataaaaaactaaagtatataattaatgaagatttaaaaagaataacattaaaaagaaaaagtatttgtggacttaaatttaacaatccacaaattatgggagttcttaatgttacaccagatagtttttcagatggtggtttatttttaaataaatcaaaagcttataatcaaactaaatcgatgattaataatggggcaactataattgatgtaggaggtgaatcaactagacccggcgcaaaaactgttaatgaaaaaaaagaattaaatagaattaaaaatattattattaaaataaaaaaacaatttcctaaaattcctttatcactagacacaagaaaatcatatgtaatgaaaaaaggaattgaattaggcgttaatattataaatgatgtatcaggattaaattttgataaaaaatcatttaatattataaatttaaaaaaagttcctttcgtattacatcatatgcaaggcactcctaatactatgcaaaaaaatcctaattacgatgatgctatattagatatttttgatttttttgaagaaaaaattaatttttgtttaaaaaaaaattataaaagggaattaattttattagatccaggaataggttttggtaaaaatttggatcac

SEQ ID NO: 240942 - DNA, 687 bp, Unknown
  Bacterial polypeptide expressing nucleotide sequence isolated from the Sargasso Sea
gtgctcatattattgatatcggaggcgagtctacgagaccgggatcaatgcctatatgtgaaaatgtagagtgtgaaagagttctacccgtcatagaatcaatcaaaaaaataaacggtaaaatcactatatcggtggatacttacaaggcaagtgtggctaaaaaggcaattgaagtaggtgcagatatagttaatgacataagcgggcttacgtttgactcagatatgctacctttgttatcaggaaaggatatacctataattataatgcatattaatggcaagccaaaaacaatgcaaaaaaatcctgcttatggcgatttagtcaaggatgttaaaaacttcttacatcagcaatctaaaattgctgaggaaggtggaataaaaaacaaccatattatcttagatcctggtattggttttggcaaaacttttgaccataattttacattattaagaagactggatgagatttgtagtctcggatatccagtaatgattggaccaagtcgtaaagcatttattggtgatgtacttggtttacctcctgatgatagattagagggaactcttgcgactgttgtttctgggattatgaatggggctaaaattgtgagagtgcatgatgtaaaagaggtaagtagagtagtgaaaattactgaaaagattatagcctcagcgtgat

SEQ ID NO: 240943 - DNA, 732 bp, Unknown
  Bacterial polypeptide expressing nucleotide sequence isolated from the Sargasso Sea
tatgggtgtattgaatttaaccccagatagtttttcggatggaggaaaatataataaaaaaatttctggatacaagcgtgcaattaatttatttaattcaggatctgatattgtagatattggaggtgaatcaactcggccaggcgcaaacccagttaatgaaaaaaaagaatggagcagaattagtcctgttataaaaaaattaaaaaaaaaaattccattatctttagatactagaaagtctgttataatggaaaacggtattaagactggtgtaaaattaataaatgatatttcaggattaaaatttgataaaaactctgtgaatattataagaaaatataatattccttttgttattaatcacattcaaagcgatccttcaataatgcaaaaaaatccaaaatataaaaatgtattatttgatatttatgattattttgaagaaagaataaaatatgttcgttttaaaggaataaaacataacaatataataattgatccaggaataggttttggtaaaaacttgaaacataatattacattaatttccaaaatttctctttttcatagtttaggatttcctatattaattggcgcttctagaaaaagatttataaaatatatttctggaaaaaatgatagtaaacaaagactaggtggtactataggatcaattttatttgctttaatgcaaggggtccaggtattaagagtacatgatgttaatga

SEQ ID NO: 240944 - DNA, 508 bp, Unknown
  Bacterial polypeptide expressing nucleotide sequence isolated from the Sargasso Sea
ctggaaaataaaaatttacaaaaaaaaatcaaatcagatttaaagttaatcacaaaaaaaaaaaaattttataaactaaaatttaaaaatatccctatactaatggggatacttaatttaacacctgatagtttttcagacgggggcaaatataacgatagagaaaaagcttttttacgtgcaaaagaacttaaaaaaagtgggtgtaaaattttagatattgggggggaatcgactagaccaggttccgaagaagtaaaagaaagcattgaatgggaaagaattaaaggaactataaaccaaattaagagttcaaatttttttgtttcattggataccagaaaaagtcagataatgaaaaaaggattacttaataatgtaaatctaataaatgatgtatccggtttgagttatgatccaaaaacattaaatatattaaaaaaaacaggtgtaccttttgtattgcatcatatgaaaggaaatcccaaaacaatgcaaaaaaatccca

SEQ ID NO: 240945 - DNA, 427 bp, Unknown
  Bacterial polypeptide expressing nucleotide sequence isolated from the Sargasso Sea
aatgtctagatattacacaagggtgtgtaatttctactatggaaatcattcaaaaaaattagttaataaaaaaaaatctattccgcttaacggaattgaggaaatttcatttgatcaaatagagataataacaagaaattcaaaaaaaaaaatctttataaatcaaataaattatttgcctaaattacttaaggcaaaagttaatttggatttaaaaaaaattaaatcaaaaaaaaaaaatttttcaaatttaaattttaaaaaaatacctaacatattgggtgtattaaatctaacacctgatagcttctcagatggtggaaaattcaattctaagaaaaaaggaattaatcatgcaattaatttacttaatagtggtgcaaatttaattgatgtcggtggtgagtctacacgaccaggatcaaaa

SEQ ID NO: 240946 - DNA, 730 bp, Unknown
  Bacterial polypeptide expressing nucleotide sequence isolated from the Sargasso Sea
atgaaaggacattacacaagagcgtgtaatttctattttggcaaacagtctaaaattttagtacataaaaaaaaatcaatacctttacaccatattaaggaaatatcttttgatcatattgaaataattacaaggaaatcaaaaaaaaaaatttcattaaatcaaatcaaatatctaccaacaaatttaaagaaaaaaataaatttagatattaaaaaaattaaatcgaaaaaaaaaaatttttctaattttaattttaaaaaaattccaaatatattgggtgtcttaaatcttactcctgacagtttttcggatggaggaaaatttaatacaaaaaaaagtggagttagtcacgccataaatttatacaacaaaggagctgatttaatagatgttggcggagaatctacaagaccaggatctaagtcagtagatgaaaaaaaagagtggaaaagaattaataaaattttaaagataattattaaaaatttaccaatatctttagacacaagaaaatctaacgttatgaaaaatggtatagagttaggagtaaagctaataaatgatgtttcaggattaaattatgatcctaaaactataaccattcttaaaaaatataaaattccatttgttattcagcattgtattagtacacctgaaaatatgcagaaaaatacaaaatataaaaatgaattgttagatatatatgatttttttcaggaaaagatta

SEQ ID NO: 240947 - DNA, 580 bp, Unknown
  Bacterial polypeptide expressing nucleotide sequence isolated from the Sargasso Sea
tatggaaaaatattacactcgtgcgtgtaattttttttatggttctcattcaaaaaaactagtcaaaaataaggtcgctttacctttatgtggcgaaagctccatatcttttaatcaaattgaaattttttctaaaaacaaaaaaaaagtaaattcaaaaattattaaagtaaaacatataaataaactacctcagaaaatcaaaaaaaaggtatttgaagatatcaaaaaaattaccgcaaaaagggaatttttaaaaaaaaaaagtcatatccttatgggagtcttaaatttaacgcctgatagtttttctgatggtggtaaatttaatacacttaaaaaatcatcaaagagaattgaaaatatgattaattctggagcagaaattattgatataggaggagagtcaacaaggccagggtcaaaaattgtttcacaaaaaaatgaactttttagagtaaaacaagcaataaaaaactttaaaaaaaaatatccaaaaactttactatcaattgatacaagaaaatcccttgtcatgaatttttcaataaaacacaatgtagatattgtgaatgatgtg

SEQ ID NO: 240948 - DNA, 429 bp, Unknown
  Bacterial polypeptide expressing nucleotide sequence isolated from the Sargasso Sea
attgtgtaatttctactatggaagtagctcaaaaaaattagttaaaagaaataaagctgtaccacttaacggaataaaagaaatttcatttgatcaaatagagatattaacaagaaattcaaaaaaaaagatatttgttaatcaaataaaatatttgcctaaattaattaggaaaaaaataaattccgatttaaaaaaaattaaatcaaaaaaaaaaaatttttcaaatttgaattttgcaaagatacctaatataatgggtgtactaaatttaacacctgatagcttttcagacggtggaaaatttacttcaaaaaaaaaaggaattaatcatgcgattaatttactcaactgcggcgccaatttgattgatattggtggtgagtcaacacggccaggatcaaaagtaattagagaaaatttagaatg

SEQ ID NO: 240949 - DNA, 861 bp, Unknown
  Bacterial polypeptide expressing nucleotide sequence isolated from the Sargasso Sea
gccggtggctggagccgctttgacgagctggatgtggtgcagcgtgacagcggcggggcctacagtgtggcgcggatgacgccggaccagcttctggcgactgcagaggatcccgatctggccgccgcagcacttcaccggattactgacacacgcgccgatttcgccggcctgtcgatggatcatccgcggatcatgggcattctgaacgtcacgccagacagtttttccgatggtggccggcataacgcgccggcgcgcgccgtggcggctggacgtgcgatgggcgacaacggtgccgacattatcgatatcgggggagaatccacccgccccggcgccgcgccggtgacccgcaatcaggaactggcgcgcgtgctgccaccgattgccgggctgaagagctgtgacgcggttctgtccatcgacacccgccatgccgaggtgatgacacgcgcctgcgacgctggtgccggcatcatcaatgacgtgagtggtcttcgtggtgacggcgcggttgcagctgccgctgctgccggtgtgccggtgatcatcatgcatatgaagggcacgccggagaccatgcagcaggatcctgtctatggatttgcgccggtggagatctatgaatatctggaagagcggatcgccgttgccgaggcggctggcattccgcgccgcatgctggcggttgatcccggtttcggctttggcaagacggtggcgcataatatggagctgatgggctgggcggcgctcttccacggccttggcgtgccggttctgatcggtgccagtcgcaaatccagcattgcccgtatttccaatggcgaggacgccgaccaccggcttcccggctcg

SEQ ID NO: 240950 - DNA, 511 bp, Unknown
  Bacterial polypeptide expressing nucleotide sequence isolated from the Sargasso Sea
gcaaaaattaatttagatttaaaaaaaattaaattaaaaaaaagaaatttttcaaatctaaattttaaaacaatacccaatattttgggagtattaaatttaacacctgatagtttttcagatgggggaaaattcaattcaaaaaaaaagggaattaatcatgcgattgaattattaaatagtggtgcaaatttaattgatattggtggtgaatcaacacgaccaggatcaaaaccaattaaagaaaatttagaatggcaaaggataaataaaattttaaaattactattaaaaaaaaaaataccaatatccttagatacaagaaagtctaaaattatggagaaaggaataaatttaggtataaatttgattaatgatgtttcaggattagattttgacactgaaactttgaatgtgttaaaaaaatataaagttccatttgttattcagcactcattaggcgctccagaaaacatgcaaaaaaaccccaagtataggaatgagttattag

SEQ ID NO: 240951 - DNA, 840 bp, Unknown
  Bacterial polypeptide expressing nucleotide sequence isolated from the Sargasso Sea
ggttaaaaaaacgatctgatatcctgggaatggagtttggttttccaaaattaatggggatattaaatgttacgcctgatagcttttctgatggtggaaattatgtcaaattagatgcggccttaaataaggctaaatttatggaggaaaatggagtagatattattgatatcggtggtgagagtacgaggccaggggcattaactcttccaatttcggaagaaatcaagcgtattgaaccggttattaatggtatttcagccagatcaagaattcctatttcggttgatacgcgtaaggcggacgtggcatctgcagcgcgtaaagctggagcatctatggtaaatgatgtgtctggctttacttttgatcctaacctgctgacttattgttcaaaatacaaattaccagtttgtgttatgcatatgaaaggatcgccagaaaatatgcaaaataaccccaaatatgaaaatattttgatcgaagtgtttgactttctggaaaatcaaatagggacgttggttcaggctggcatttccagagatcaaattatagctgacgtaggtataggttttggcaaaaatatagggcataatcttgctctaataaaaaatatttcgctttttcatggtcttggtgttccattacttcttggtgtatcaagaaaaagtattattagtaatgtagcaaaggtagaaaaaccgcatgatcgtatgcatggctctatttcacttgccatcagtgcacttgggcagggcgtacaagtattcagggtacatgatgtcgcagaaactagacaagcttttgatctttgggtggctgtaaattttggagagtagt

SEQ ID NO: 240952 - DNA, 892 bp, Unknown
  Bacterial polypeptide expressing nucleotide sequence isolated from the Sargasso Sea
gcaataaaattaatcaaaccaaaaagagcacttccattaaacggtaagaacaatattgccttcgatagtatcgaaattttttcgagagaaaaaaggggagtaaaaactaatcttattaatattaataaagtttttaagttaaataaaaaaattagaaaaatcgttaaagaagatctaagtaaaattgtatcgaagagaaaagattttcttaagcatattaattttaaatccccatcaattatgggtattcttaatcttactcctgatagcttctcagatggaggaaaatttaataactacagcaaggcatttaaacagatttctaagatggtaaaatctggagcaaatattattgatgttggtggagagtctactcgaccaggttcaaaaacgattgatccaaaaattgagtgggagagaattaagtatgttttaaataactttaaaaaaaaatataaaaaaatttgtctatcagttgatacacgaaaatctgatataatggttaaaagcgttacctgcggcgcagatctaatcaatgatgtgtcaggttttaatcatgatccctttgcacttattaaattaagagattttaatattccaaaagttttgcatcatatgcaaggaaccccaaaaacaatgcaaaaaaacccaaaatataaaaatgttttactagatatttatgacttttttgaaaaagaaatttcaaatattacagataataaaaaaatcataatagatccagggattggttttggtaaaactctgaaacataatttgagtttaatttccaatatttctttgtttcatagcctaggctttcctattttggttgggacttcaagaaagagattcattaatcaaatatctggcgagtatgatagtaaagatagaa

SEQ ID NO: 240953 - DNA, 486 bp, Unknown
  Bacterial polypeptide expressing nucleotide sequence isolated from the Sargasso Sea
attgcatggtaataaagaattatcttttgataaaattgaaattttatccagaaaaaaaaaaagaaaaataaacattaatattatcaattcgttaagttttgatctaaaaaaaaaaataaaagaagacttaaagaaaatcacaaaaaaaaaatcattttgtaaaattagcttaaaagaaccattattgattggaatattaaatctcacacctgatagtttttcagatggaggacaatataaccaaattggctcagcattaaaaagagtgaaatcactattaaaagctggttgtaaaattattgatacaggaggagagtcaacccgaccgggttctaaagatatagatgaaaacattgaatggacaagaataaagaatttacttaaaaaagttagaaattataaatttttgttatctttagatactagaaaaacttttgttatgcataaagctttaagatataaacttaatattgttaatgatgtttc

SEQ ID NO: 240954 - DNA, 670 bp, Unknown
  Bacterial polypeptide expressing nucleotide sequence isolated from the Sargasso Sea
aatgaataaatattacactagagcgtgtaatttttattacggaactacatcaaaaacttatattaaaaaaaaaaaatcagttcctcttaatggtaacaatcaaatctcttttgataaaatagaaattattaacagaaaaaaaaaaaaaattatcaattttaaagatattagtaaactttcaactaaattaaaaaacaaagttaacaaagatttaaaaaatataaaaaaaaagaaaacgtttaaaaatttaaatttatctcatattccaattttaatgggtgtagttaatttaactccagatagcttttcagatggtggtaaatataacaaaaaaaacctagcgataaaacatgtagacaacttaatatcaggtggagcaaaaattatagatgtaggtggtgaatctacaagaccaggggcaaatgatattcatcctaggaaagaatgggataggataaagtttattataaaaattttaaaaaataaaaaaagttttatttcattagatactagaaaaagttttgttatggagaaagcttctaaaataaaaatagatcttataaatgatgtatctggactaaactatgatcctgaaacaataaattatttaaaaaaaacaaaaaaaccatttgtaattcatcatatgaaaggtttaccaaagaatatgcaa

SEQ ID NO: 240955 - DNA, 555 bp, Unknown
  Bacterial polypeptide expressing nucleotide sequence isolated from the Sargasso Sea
aatgaataaatattacactagggcgtgtaatttttattacggaacagcatcaaaaataaatattaaaaaaagtaaatctattcctcttaacggccataatgatatatcctttgataaaatagaaatcttacacagaaaaaaaagtaaaattattaatctcaaagatattagtaaacttacaaataagctaagaagtaaagttaacaaagacttaaaaaatattaaaaaaaaaaaattttttaaaaaattaactttatctaataccccaattttgatgggtataattaatttaaccccagatagcttttctgatggcggcagatataacaaaaaaagtttagctgaaaaacgtgttaaaaaactattatcaagtggtgcaaaaataatagatgtgggtggagaatctacaagaccaggtgcaaatgatattcatcccaggaaagaatgggatagaattaagtttatttttaaaatattgaaaaataaaaaaagtttagtttcattagacactagaaaaagttttgtgatggaaaaagcctctaaaataaaaataga

SEQ ID NO: 240956 - DNA, 820 bp, Unknown
  Bacterial polypeptide expressing nucleotide sequence isolated from the Sargasso Sea
tttgaaaaatataacttccactagaaaaaactttataaaaaatataaatttttcaaaacccattataatgggcattctaaatatgacaccagatagtttttcagatggtggaaaatttaataataaaaaagattcgctaaatcacattgaatacatgattgagtctggcgcagatattattgatgttggtggagagtccactagaccaggctcaaaaacaattgaaccaagtatagaatggaacagagtaaaatacgtaattaaaaatttcaaaaaaaaatttaaaaaaacatgtttatcaatcgacacaagaaaatctgatgtaatgattaatagtttaaaatttggtactgatttgataaatgatatatcaggatttagttttgacaaaaattctttaaaaaaaatcaggctgtataatattcctaaagttttacatcatattcaaggaaatccgagcaatatgcaaaagaatccaaaatataaaaatgttttattagatatttacgatttttttgaaaaaaatataaatatcataaaagataaaaaaattattttagaccctggaatcggttttggtaaaaatttgaaacataatttgactttaatttctaaaatatctttgtttcatagtttaggatttcctattttagttggaacttcaagaaaaagatttattaaccaaatatctgaaaaatatgatagcaaagatagaacaggtggaacattggcctcagttatttatttgttgtcacaaggagttcaaatatttagaattcataatgttaatgaaattaagcaaggaattttagttacgaaa

SEQ ID NO: 240957 - DNA, 142 bp, Unknown
  Bacterial polypeptide expressing nucleotide sequence isolated from the Sargasso Sea
aatgggtattttaaatttaactccagatagtttttctgacggcggtaagtttaataataaaatctctgcaagaaaacaagttagtaaattaatagttgatggagccaaaataattgatgtaggtggggagtccacaaggcca

SEQ ID NO: 240958 - DNA, 790 bp, Unknown
  Bacterial polypeptide expressing nucleotide sequence isolated from the Sargasso Sea
cgatttaaaaaaaattaccgctaaaagaaaaagtatatctaaactaaaatttaatactgccaaaattatgggtattcttaatgttaccccagatagtttttcagatgggggattattttttgatgaaagcagtgctttaagccaagctaaattgatgattgatagtggagcagccgtaattgatgttggaggagaatctactaggccaggatcaaaagttgttaacgaagtagaggaatggaaaagaatagaaaaaattattataaaattaaaaaaaaattatcctaaaataattttgtctttagatacaagaaagtcctatgtaatgaaaaaaggtattattaatggagtgaatattattaatgatgtttctggtatgaattttgataaaaaatcttttaatcttattaactctaaaaaaattccttttatcttgcatcacatgcaaggaactccagatacaatgcaaaaaaatcctaaatataacgacgtgctactagatatttttgacttttttgaaaaaaaaattaaattttgcttaaaaaggaattttaaacaggaaaatattatagttgatcccggaataggatttggcaaaaatttgaatcataatttaagacttatttcaaaaatttcaacttttcatagcttgggatgtccaatattaattggaacttcaagaaaaagatttatagaacatatagtaacaaaatttgatactaaagatcgaactggaggaacattagcatcagtgttgtatggactttcacaaggagttcagttattcaga

SEQ ID NO: 240959 - DNA, 473 bp, Unknown
  Bacterial polypeptide expressing nucleotide sequence isolated from the Sargasso Sea
aatggagaaatattacacaagagcgtgtaatttctactacggtaatcagtcaaaacaaaaagtaaaaaataaattagcccttcccctaaatggttgtagccacatttcatttgacaacatagagataattactagaaaagataaaaaaaaaattcatattaaagatataagtcatcaaaataaaaaattaaaaaaaaaaatcagaaaagatctgaaattaataacaaaacgaaaaaaaattaaaaaattaaatttaaataattcaccattattgatgggagttttaaatttaacacctgatagcttttcagatggaggaaaatatataaaaaaaggaaagggttatgagtatgcaaaatatttaataaaaaaaggatgtgcaattttagatattggtggtgagtcaacacgtcctggttctagtgaaattaaaaaagaagtcgaatggaatagaattgtaaaaactttaaaaa

SEQ ID NO: 240960 - DNA, 535 bp, Unknown
  Bacterial polypeptide expressing nucleotide sequence isolated from the Sargasso Sea
atgggcataatcaatactactccagattcattcagcgatgggggtatgttaaattcagtgagcaaagaaattgattatgcatacaaactcttaagccaaggcgcagacattatcgatattggtggtgaatcaacaaggcctggctctcaaaaaattaccagcacggaggaaattcaaagaatttcacccttaattaaggaattatcaaataattgtgactgtgctatctctgttgatacatacaaatccccaacagtaaagttcgctcttgacaatggtgtagacattataaatgacatttctggcttaacttttgacccttcaatggcgaacttgattgcaaagtatgatgcaagcttagttcttatgcatataaaaggtcgtcctgaaacaatgcaacaagataccaaatatgacaatttaatcaacaatatatgcacttttctgcgtaatcaaattgaatttgctatcaatatgggtattgataaagaaaaaataattgttgatccaggaatagggtttgtaaggctctaga

SEQ ID NO: 240961 - DNA, 820 bp, Unknown
  Bacterial polypeptide expressing nucleotide sequence isolated from the Sargasso Sea
gcaaaaaaacttattaaagggaaaaaagcattacctttagcaggtaatttaaacatagcttttgatcagctagaaatattttataggaaaaaaaagggatccataagaagcaaagtatactcaattgcagaaataaaagatttagataaaaaaatattatctttagtcaaaatcgatttaaaaaaaatagtatccaaaagaaaaagtatttgtggaattaaatttagcaatccacaaattatgggagttcttaatataacaccagacagtttttctgatggtggtttatattttggtgagtcagaagcttacgatcaagtaaatttaatgttaaatgatggagcaaaaattatagacgttggtggagagtcaactagaccaggatcaaaaacagttagagataaagatgaatgggatagaattaaaaatactattattaaattaaaaaaaaatttttcaaacaaaattttatctttagacacaaggaaatcatacgtaatgaaaaggggaatagaatgtggagtggatattattaatgatgtgtcaggtttaaattttgacaaaaaatctattaatattattaaatctaaaaatactccttttattttacaccatatgcaaggaacacctaatactatgcaaaataatccaaagtatgatgatgcattacttgatatttatgatttttttgaaaaaaaaattaatttttttattaaaaaaaaaattaaaaaggaatcaatcattatagatccaggcataggttttggaaaaaatttgaagcacaatcttagaatcatgtctaaaatttctacatccatag

SEQ ID NO: 240962 - DNA, 358 bp, Unknown
  Bacterial polypeptide expressing nucleotide sequence isolated from the Sargasso Sea
ttgaaaaaaagaaaatttaaaaaattaaattttttaaatttaccaatattgatgggggttgtaaatttaacaccagacagtttttctgatgggggaaagtacaataaaaaaaatttaggatattttcacgctaagtcgttagttaagatgggttgtaaaattttagatataggtggtgagtcaacaagacctggagcaatcgatattagagaaaaaattgaatggaaaagaattaatccgactttaaaaaaattaaaaaaatttaaattttttatatcattagatactagaaagtctcaaatcatggaaaaaggtattaaatataaaattaatttaattaacgatgtttcaggtttaa

SEQ ID NO: 240963 - DNA, 349 bp, Unknown
  Bacterial polypeptide expressing nucleotide sequence isolated from the Sargasso Sea
atgggagtactaaatatcacacctgatagtttttctgatggtggtgaatttattaaaatacattcagcaaaaaaacaaattgaaaaattaattactgatggtgcaaaaataattgatgttggaggagagtctacaagaccgggttctaaagaaatccttcaatctaaggagtgggatagaattaaaaatgttataaaatttttaaaactcaaaaaaatttttgtttcattagacagtagaaaaagttttgtaatgaaaaaagctacaacttttaaaattaatttgattaatgatgtgtcaggtttaaattatgacaaaaatacaatcactttcttaaaaaaaaagtaaa

SEQ ID NO: 240964 - DNA, 652 bp, Unknown
  Bacterial polypeptide expressing nucleotide sequence isolated from the Sargasso Sea
tatgggtgttttaaatattactccagatagcttttctgatggtggaaaatttaatgaaaaaagttctgcaaaaaaacagattaataaattaatagtcgatggagcaaagataattgatgtaggtggtgagtctacaaggccaggctctaaagaaattcttcaaacaaaggagtggttaagagtaaataaagttatgagttatttaaaatctaaaaaactttttgtttctttagatactagaaaaagttttgtgatgaaaaaagctctaaagtataaactagaccttattaatgacatatctggccttagttatgacaaggagacaattaattttttaaaaaaaacaaaattaccatttgttctacatcatatgaaaggtagcacagagacaatgcaaaaaaatccaaggtataataatgttttgttggatatatatgattattttgaaaataagcttagactaattagaaaaagtggaattaaacataatcacattatcttagatcccggagtgggatttggtaaaaatatgaaacataatattaccctaataaataatgtttctatttttcattcttttggattgccagtaatgttgggaatttccagaaagaaatttataaaagatatatcggaaataatgatagtaaag

SEQ ID NO: 240965 - DNA, 697 bp, Unknown
  Bacterial polypeptide expressing nucleotide sequence isolated from the Sargasso Sea
atgggagtattaaatcttactcctgatagtttttcagatggaggaaaatttaataataaaagcaaggcagtaaatcatgctattcaaatgtttgaagctggtgctaacataattgatgttggaggtgagtcaacaaggccagggtctaaagcggtaagtgtaaaactagaatggaaaagattaaataaaatattgaaatatatcagtaagagagtttctgtatcattagatacaagaaaagcagaaattatggaaaagggtatcaagcagggagtcaaaatcattaatgacgtatctggcttaacttatgataaagagtctataaggattttaaaaaaatataaaattccttttgttattcaacattccaaaggaattcctgaaaatatgcaaaataaaccaacttataaaaatgaactattggatatttatgatttttttgaagataagataaaattattaagatctattggaataaaacataacaatataattattgatccgggtataggatttggaaaaaatttgaaacataatatgaatttaatcagtaatatttctattttccatacacttggtttacctgtacttgtaggaaactcacgaaaaagatttataaaggaattatctggaaaaaatgactcaaaaaaaagaattggaggaactgtcgcttcatcaatatatttaatgatgcaag

SEQ ID NO: 240966 - DNA, 823 bp, Unknown
  Bacterial polypeptide expressing nucleotide sequence isolated from the Sargasso Sea
atttgtgggctgaaatttgaaaaacctcaaattatgggagtgctcaatgtaacacctgatagtttttctgacggtgggttatttttagatcattcaaaagctcttgagcaagtaaatttaatgatcaaaggtggtgcttcacttattgatattggaggagaatctactagacctggatcaaaaatagttaatgacagaaaagaatggaaaaggattgaaaaaataattttaaaaataaaaaaaaattttcctaaaatgcttttatcactagatactagaaaatcttatgtgatgcaaaacggtataagtttaggaattgatattattaatgatgtatctggtttaaattttgataaaaaatcctttgatacaatttgttcaaataatattccttttattttacatcatatgcaaggcacaccagacactatgcaaaaaaatcctaagtatgaagacgcattgttagatatttatgatttttttgaagaaaaaattaatttttttttgaaaaaaaaatataaaacagaaaatatttttttagatcctggtatcggttttggtaaaaatttagatcataacttaagaataatgtctaaaatttcaacttttcacagtttaggatgtccaattttaattggaacatcaagaaaaagatttatagaacatatcgtaacaaaatttgatactccagatagaactggaggcacattagcatcagtgttgtatggacttttacaaggagttcagttattcagagttcataatgttaaagaaatttatcaagggattttggtttttaataaaattttaaagacaaattaat

SEQ ID NO: 240967 - DNA, 400 bp, Unknown
  Bacterial polypeptide expressing nucleotide sequence isolated from the Sargasso Sea
ctgaatggtaaaaaagatatagcctttgataaaattgaaatttttacaagaggcaaaacaaaaataacaagcaatcttattcatattaaagacataaaaaatgctaaaaaaaatattaaaaaaattattcaaaaagatttaaagaaaatcatctcaaaaagaaaaaattttcttaaaaatataaatttttctgaagcttctatcatgggtattttaaatttaacccctgatagtttttcagatggaggtaaattcaattcaaagaaaaaatcttttaaacgtatatctagcttaattcattctggagcagatataattgatattggaggagagtcaactagaccaggatctaaaacgatagatccaaaaattgaatggaaaagagtcgaatatgttttaa

SEQ ID NO: 240968 - DNA, 565 bp, Unknown
  Bacterial polypeptide expressing nucleotide sequence isolated from the Sargasso Sea
gttgttcaataatcttaattataaaaataaaattcttaaaaaattagtttttaaaaataagaaaatttcaatatttgggatattaaacgttacgcctgacagtttttctgatggaggaacaaatctaaatttatcagcagcagttttaaatgctcaaaaaatggtaaatgatggtgcttcatttattgatgttggtggggaatcaacaagacccggggcaaagccagtaactgcacatgaagaaatttcaagagtgattcccgtggttcagaggttaaattttaagaaaatagatttatccttagacactagaaattcttcaacaatggagtttggtatagcatcgggtgtaaagataattaatgacgttagtggtttgacaaatgacagtaaaagtttggatgtagtaaaaaaatattctaccccagttgtcgttatgcacatgcctggaaccccacagacaatgatgaaaaaaaataaatatcatgacgttattttagatgtttacgattttttaaaagatagaattcaatgtcttaccccaatctggattaaaaaaaagaat

SEQ ID NO: 240969 - DNA, 822 bp, Unknown
  Bacterial polypeptide expressing nucleotide sequence isolated from the Sargasso Sea
gatgagagtaaagatttcaaaacagattagaaatattgaaatctcacgaaaaaaaattgctggcttaagttttaaaaaacctttgataatgggtatcctcaatgtaactccagacagtttttctgatggtggaatgtatacctcaaaaaggacggctatggagcatgtcaaaaaaatgataaaatctggagcggatttaattgatataggtggtgagtcaacaagaccaggctcagaaaaagtcaagatagaagaagagctaaaaagaataatgcctgttctaaataatatttctgatcttaaaaataaagttccaatttctcttgatacaagaaaacctgaagtaatgaagaaaggtttaaaaaaaggagtagatattattaatgatgtatcgggcttaagatatagtaatgatacaattccactactgaaaaaaactaaatctccaataattataatgcactcaataagtacaccaaaacttatgcaaaaaaaaattaattacaaaaatgtcttaatagacatttatgattttttagaaaaaaaaattaatcaatgtgagaaaaataatattgatcgttcaaggattattattgatccaggaattggatttggtaaaaatctgaaacaaaatttgaatcttatcaaaaacatatctttctttcattctctaggtgtaagcattcttcttggggcatcaagaaaaactttcattagcaagatttcaaaaaatgtattagaaaatgaaaggcttggtggatctatttcctcagttatatttgctttaaatcaaggtgttcaagtatttagagttcatgatgt

SEQ ID NO: 240970 - DNA, 586 bp, Unknown
  Bacterial polypeptide expressing nucleotide sequence isolated from the Sargasso Sea
atgggagtaattaatttaacaccagatagtttttctgacggaggaagatatatcaagagaaattcaggttttaatcatgcaaaacacttagtaaaaaaagggtgtaaaattttagatgtaggtggagagtcaacaaggccaggagctatagatgttaatgagataattgagtggaaaaggattaataaaactttaaaaaaactaaaaaaactaaatacatttatttctttggatactagaaaaagttgggttatggaaaaaggaataaagaataaagtaaatttaataaatgatgtttctggtttaaaatatgattcaaatactttaaatgttttgaaaaaatataaaatcccatttgtaatccatcatatgcaaggaacaccaaaaaatatgcaaaaaaaaccaatttataaaaatgtcgttttggatatttatgacttttttgaaaataaaataaaaaaaataagatctttaggaattaaacataataatataattctagatccaggtattggttttggtaaaaacttgaaacataatatgaccttaattaataatatttctatttttcactcgttaggatttc

SEQ ID NO: 240971 - DNA, 784 bp, Unknown
  Bacterial polypeptide expressing nucleotide sequence isolated from the Sargasso Sea
atgggtattataaatattacaccagacagcttttctgatggtggtaaatttaataaaaaagtttctgcgataaaacagattaaaaaattaatagttgatggagcaaagataattgatgtaggaggtgagtctacaagacccgggtctcaagaaattcttgaaacggaagagtggcttagagtaagcaaagttatgaactattttaaatctaaaaagatttttgtttctttagacactagaaaaagttttgtaatgaaaaaagctttcaaatataaactagacctaattaatgatgtctctggcctttgttatgataaggaaacaattaattttttaaaaaatagtaaattaccttttgttatccatcacatgaaaggtaccccaaaaattatgcaaaaaaacccaagttataaaaatgttattctggatatttatgactattttgaagataaattgaaattaataagaaaaaagggaattaagcataatcacattattttagatccaggaataggatttggtaaaaatatgaaacataatattaccctaatcaataatatttctatttttcattccttaggattaccagtaatgttgggaatttctaggaagagatttataaaagatatatctggacaaaatgatagcatagagagaataggtgggactgtatcttcaagtatctttagtatgttacaaggagttcaaatactaagaattcatgatgttaatgaaattaatcaaggaattaaagtttttaaaaaaataaattttaaacaatgat

SEQ ID NO: 240972 - DNA, 772 bp, Unknown
  Bacterial polypeptide expressing nucleotide sequence isolated from the Sargasso Sea
atgagaaagtattacactagggcgtgtaatttttatcatggaagagccgcaagagttctcatcaaatcaaacaaagcttttccattaaatggtaaaaaagatatagcctttgataaaattgaaattattacaagaaataaaaaaggtatatcaagtaactatattcatattaaagatataaaaaaacttacaaaaaatatcaaaaagattgtaaatcaggaccttaaaaaaattacttcaaaaaagaaaaattttttaaaaaatattaattttttagaaacatcaataatgggcattcttaatctaacgcctgacagtttttcagatggaggtaaattcaataaaaaaaataaatcctttaaacatatatccaaaatgatttattctggagcaaacatcattgatattggaggcgagtctacaaggccaggatcaaagacagttgatacaaaaaatgaatggaagagaatagaatatgttttaaaacgttttaaaaagagatataaaaaaatttgtttatctatcgatactagaaaatctgaaataatgattaaaagtataaaatatggagcagatttaataaatgatgtatctggttttgaatatgatcaaatggctctatcaaaattagaagattataaagtatcaaaagtccttcaccacatgcaaggaactccaaatacaatgcaaataaatcctaaatataaaaatgtattattagatatttatgatttttttgaaagaaaaattgagagtcaattaaaagataaaa

SEQ ID NO: 240973 - DNA, 789 bp, Unknown
  Bacterial polypeptide expressing nucleotide sequence isolated from the Sargasso Sea
ttaaagaaaaaagttattttagatttaaaaaaaattaaaattaaaaaaaaaaatttttctaatttagaatttaaaaagattccaaatatactaggtgtcttaaatcttacaccagatagtttttctgatggaggaaaatttaatacaaaacaaagaggaataagtcatgcttttaaactatataacgatggtgctgatttaatagatgttggaggagagtcaacaagaccaggatcaaagacagtaaataaaaaagatgagtggaaaagaattaatcaaattttaaaatctattgtaaaaaaaattccaatttctttagatactagaaaatctgaaataatgaaaaatggaattaaattaggagtaaaactaataaatgatgtttcaggtttaagttttgactcagaaacaattaatgtattaaaaacatataaagttccttttgtcattcagcacaagcttggaacaccagaaaatatgcaaaaaaatccaaaatataacaatgaattactggatatttatgatttttttgaggagaaaataaaatttctaagatctaaaggtattaaacataacaatataattttagatcctggaatcgggtttggaaaaaaactgaaacataatatgaatttaatcagaagtgtttctatttttcattcactaggatttcctatacttgtaggaaattctagaaaaaaatttattaaagatatttcaaaaaaaaatgatagctttactagaattggaggaacaatatcatcatcattatatttgatgtcaccaagg

SEQ ID NO: 240974 - DNA, 824 bp, Unknown
  Bacterial polypeptide expressing nucleotide sequence isolated from the Sargasso Sea
attgccactttgtggtgataaaaatattgcttttgataaagttgaaattattacaagaaaaaaaaataaagttctatcaaaaattattgaattaaaaaagatcgataatttaaatacttcctgtagaaaaaaaattaaacaagatctgaaaaagatagttttgaaaagaaaaaattttttgaagaatataaactttttaaaaccatcaattatgggaattttaaatttaacgccagatagtttttcagatggaggcaaatttaataatcagaaaaaagcaacaaaacatatccatgaaatgataaaatctggggcaaacattattgatgttggaggtgagtctactagacctggttcaaaaacagtttcatcaaatatggaatggaaaaggatcgaaaaaattataaaagcttttaaaaaaaaacataagaaaacatgtttatctatagacacaagaaaatcagaagtaatgattaaggcaattaaataccgagcagatttaataaatgatgtttcaggttttaattatgacagtctatctttatcaaaattaaacaattacaacatagcaaaagtgcttcatcatatgcaaggcacacccaatactatgcaaaagaatccaaagtacaaaaatgttttattagatatttatgatttttttgaaaaaggtataaaaaaaatcgatgataaaaaaattattatagatccaggtattggatttggtaaaaatttgaaacataatttgactttaatttctaagatatctttgtttcatagtcttgggtttcctattttgattggaacttctagaaaaagatttataa

SEQ ID NO: 240975 - DNA, 778 bp, Unknown
  Bacterial polypeptide expressing nucleotide sequence isolated from the Sargasso Sea
ttgggtgttttaaatttaactcctgatagtttttctgatggaggaaaatttaataaaaaaaataaaggcgttagacatgcaattaatttatataaaactggtgcatctttagtagatgttggtggagagtctacaagaccaggatcgaaagaagtaaatgaaaagctagaatggtttagaatttataagatattaaaattaattgtaaaaaaaataccaatatctttggatacaagaaaatctggaattatgaaaaatggtattagtatgggggttaaacttattaatgatgtttcgggattaagctatgatcctgaaacaataaatgttttaaaaaagtataaaactccatttgtaatacagcattcattagggacaccggaaaatatgcaaaagaacccaaaatataaaaatgaattattagatatatatgattattttgaggagaagattaagttaataaggtctaaaggtattaaacacaataatataattttagatcctggaattggatttggaaaaaatttgaaacataatatgaatcttataagaggtgtttctatttttcattcattaggttttcctatactagtagggaattcaagaaaaagatttattaaagatatatcaaaaaaaaatgatagcgaaacaaggattggtggaaccatggcttcttcaatttatttaatgatgcaaggaattcagattttaagaattcatgatgttaatgatgttatacaaggtataaaagtttttaatcagataatcaaaaattgat

SEQ ID NO: 240976 - DNA, 868 bp, Unknown
  Bacterial polypeptide expressing nucleotide sequence isolated from the Sargasso Sea
taaaaaaaaaatttcactcccgataagtggcaacaaatcattttcttttgatactattgaaattattactaggactaataaaaaaaaaataaatataaaaaatattgaatttctaccgttaaaaattaaaaaaaaagtattaattaatatagataatatatcaaaggctaaaaaaattcctaaattaaaatttgataatttaccaatatttatgggtattttaaatatcactccagatagtttttctgacggtggaaaatttaataataaaatttctgcaaaaaaacagattaataaactaataactgatggagccaaaataattgatgttggtggggagtccacaagaccaggctcaaaagaaattcctcaaacagaggaatggctgagaataaataaagttatgaattatttaaaatctaaaagttttttagtttctttagatactagaaaaagttttgtgatgaaaaaagcttcaaaatataaactagacttaattaatgatgtatctgggctaagctatgacaagaagacaattggttttttaaaaaaaacaaagttaccatttgttcttcatcatatgaaaggtaacacagaaacaatgcaaaaaaatcctagttacaataatgttttgttggatatatatgactatttcgaaagtaagctaagactaattagaaaaagtggaataaagcataatcacattatcttagatcctggagtaggatttggtaaaaatatgaaacataatattaccttaatcaaaaatgtttctatctttcattctttaggattaccagtaatgttgggaatttccagaaagagatttataaaagatatatctggaaataacgatagcaaagaaaga

SEQ ID NO: 240977 - DNA, 661 bp, Unknown
  Bacterial polypeptide expressing nucleotide sequence isolated from the Sargasso Sea
tatgggtgtcttaaatattacaccagacagtttttcagatggtggaaaatttattaaaaaagtttctgcaataaaacaaattgacaaattgatatttgatggcgcaaagataattgatataggtggagagtctactagaccagggtctaaagaaattcttcaaactgaagagtggttaagggtaaataaaattatgggctatttaaaatctaaaaagttttttgtttctttagataccagaaaaagttttgtaatgaaaaaagctttaaaatataaactagatctaattaatgatgtatctggcttaagttatgataaggagacaataaattttttaaaaataagtcaattaccatttgttttacaccatatgaaaggcacaacagaaactatgcaaaaaaatccgagttatagaaatgttttattagatatatatgacttttttgaagataagttaaaaatgatcagagataagggaattaaacataatcatattattttagatcctgggataggatttggtaaaaatatgaaacataatattaccctaataaataatgtttctatttttcattccttaggattgccagtaatgttaggaatttccagaaagagatttattaaagatatatctgggcaaaatgatagtaaactaagaata

SEQ ID NO: 240978 - DNA, 751 bp, Unknown
  Bacterial polypeptide expressing nucleotide sequence isolated from the Sargasso Sea
ttgaccagaagatctaaaagaagagttttcataaatcaaataaagaacctatcaaaatcactcagaaaaaaaataaattttgatctaaaaaaaattaaattaaaaaaaaaaaatttttcaaatttcaattttaataagttccctaatttattaggtgtattgaatttaacgcctgacagcttttctgatggtggaaaattcaatacagagaaaagaggagtaattcatgcaattaatttgataaattatggagctgatttaattgatgttggaggagagtctacaaaaccaggatcaaaagcaattagtgaaagtttagagtggaaaaggattaataaaatattaaaattgttaattaaaaaaaaaataccactatctttagatactagaaaatcaaaaattatggagaaaggtattaatcaaggggtacaattaatcaatgatgtttcgggtctagagtttgacgtaaatagtgttaaaatactcaagaaatataaaacaccattcgtaatccaacacacacaaggtttaccagagaatatgcaaaaaaaaccaagttataaaaatgaattattagatatatacgatttttttgaagaaaaaataaaactaattagatcaaaagggatcaaacataataatataattttagatccaggcataggttttggaaaaaatttgaaacacaatatgaatctaattcaaaatatttctatttttcattctcttggttttcctttacttgtaggaa

SEQ ID NO: 240979 - DNA, 411 bp, Unknown
  Bacterial polypeptide expressing nucleotide sequence isolated from the Sargasso Sea
attgcatggtaataaagaattatcttttgatacggttgaaattttatcaagaaaaaaaaaaagaaaaataaacattaatattatcaattcattaagttttgatctaaaaaaaaaaataaaaaaggacttaaagaaaatcaccaaaaaaaaatcattttgcaagattaacttaaaagaaccattattgatcggaatattaaatctcacacctgatagtttttcagatggaggacagtataatcaaattggcacagcattaaaaagagtgaaatcactattaaaagctggttgtaaaattgttgatgtaggaggagaatcaacccgaccaggatctaaagatatagatgaaaatattgaatggaaaagaataaaaaatttactaaaaagaattagaaattataatttttttgt

SEQ ID NO: 240980 - DNA, 559 bp, Unknown
  Bacterial polypeptide expressing nucleotide sequence isolated from the Sargasso Sea
aatgcaaaaacattacacaagagcgtgtaatttttattataacaatacatctaaagaatacgtaaaaaaaaaaatttcactcccaattagtggtaataaatcattttcgtttgatactattgaaatcattacaaggactaataaaaaaaaaataaatatcaaaagtattaataaacttccattaaaaataaaaaaaaaagtcttaattgatataaataatatttctaagcctaaaaaaattccaaaattaaaattaaacaatttaccaatattaatgggcgttttaaatattacaccagatagtttttcagatggtggaaaatttaataataaaaatgctgcaagaaaacagattaataaattaatagttgatggagctaagataattgatataggaggtgagtctactagaccaggatctaaagaaattaaacataaagaagagtggcaaagagtgaataaagttatgggttatattaaatctaaaaaagtttttgtttcgttagatactagaaaaagttttgtgatgaaaaaagctgcaaaatataaactaaatcta

SEQ ID NO: 240981 - DNA, 694 bp, Unknown
  Bacterial polypeptide expressing nucleotide sequence isolated from the Sargasso Sea
tatgggcgtgcttaatataacacctgatagcttttccgatggaggtatcttttttgataaaacaaaagcgtttgaccatgcaaattccatgaggaaaagtggcgcagcaattattgatgttggcggtgagtcaactagaccagactcaaagattataaaagaagaagaagaatggaatagaataaaagaaacaataataaatttaaagaaaagacaccccaagataattttatctttggatacaagaaaatctcaaataatgagaaaaggaatagaaaatggcatcaatattataaatgatgtttctggtttagaatttgataaaaaatcttttgatttaataaatttaaaaaaaattccttttattttacatcatatgcagggcactcctgaaacaatgcaaaaagatccaaaatataacgatgctctattagatatttatgattttttcgaaaaaaaaattaacttctgtttaaaaaaaaaatataaaaaagaatttataatactagatcctggaataggttttggaaaaaacttagatcataatttaagaattatgtctaaaatttctacatttcatagtttaggatgcccaatgctaataggaacttctagaaagagatttatagaacatatcgtaacaaaatttgatacttcagatcgcattggaggaacactatcatcagtgttgtat

SEQ ID NO: 240982 - DNA, 930 bp, Unknown
  Bacterial polypeptide expressing nucleotide sequence isolated from the Sargasso Sea
gcaggcaatccaaatatagcctttgatcaattggaaatttttcagcgaaaaaaaaaacgaattaccaaaagtgatttttattccattaatgaaatagaaaccttgaacaaatcaatattacctacagtcaaaagtgatttaaaaaaaataattaaaaagagaaaaagttttttaggacttaattttaatatacctcaaattataggagttcttaatataactcctgatagtttttcagacggcggtttgttttttgatgaatttaatgcctataaacaagctgatttaatgttaaaaaatggagcaaacattattgatgttgggggagagtctactagacctggttcaaatactattaattataaagaagaatggaatagagtaaaaaatactataattaaattaaaaaaaaaattcccaaaaattattctatctttagatacaagaaaatcttacgtgatgaaaaaaggtattgaaaaaaaaattgatattattaatgatgtatcaggattaaaatttgataaaagagcttttgatactattaataaaaaaaaaattcctttcattttacatcacatgcaagggacaccaaaaacaatgcaaaagaatccaaggtatgatgatgcgttattagatatttttgatttttttgaaaaaaaaattaatttttgccttaaaaaaaaatataataaaaaatttattgtcatagatccaggtattggatttggaaagaatttagaacataatttaagaataatgtccaaaatttcaacatttcatagtttaggatgtccaattttaattggaacatcaagaaaaagatttatagaacatatagtaacaaaatttgatactccagatcgaacaggaggaactttggcttcagtgttatatggactttccctaaggagttcagctattcagagttca

SEQ ID NO: 240983 - DNA, 421 bp, Unknown
  Bacterial polypeptide expressing nucleotide sequence isolated from the Sargasso Sea
tatgggtatactaaatgtaactcctgattcatttagtgatggtggtaaattttataaattagataaagctattgaatattcattagaattaattaatcaaggagttgatataattgatgttggaggtgaatcaactcgtcctggctctaatccaatatctgtagatgatgagattgatcgcgttatacctgttattaaaggtatacgttctgtttcttctataccaatttcaattgacacctataaatcggaagttgcaaaagaagcattaaaatctggtgcaaatattgttaatgatattagtggtcttacttttgatttaaagatgattgatatagttaaggagtttaatgttcctataattataatgcatattaaaggaacaccaaagaatatgcagcaaaatcctcaatatgataac

SEQ ID NO: 240984 - DNA, 549 bp, Unknown
  Bacterial polypeptide expressing nucleotide sequence isolated from the Sargasso Sea
catgagaaaatattacacacgagcgtgtaatttttatcacggtaaaatagctgaaaatcttatcaaatcaaaaaaagcacttcctataaatggaaaaaaaaatattgcttttgacaatattgaaatatttataaggggaaataaaaaaattaaaactaagcttattcatataaaggacttaaaaaaacttagcagaaatatcaagtggacgatttataaagatttaaaaaaaataacctcaaaacgaactaacttcttaaaaaatgttaacttttccaaaacaaacattatgggaattctcaatttaaccccagatagtttttcagatggaggccaatttaatacaaagaataaatcattaaaacatatttcaaaaatgatcgactccggtgcaaatattattgatattggaggtgagtcaactagaccaggctccaaaactgtcagtaataaaaaagaatggaaaaggattgaatatgttgtaaaaaatttcaaaaaaaaatataaaaaaatttgtttttcattagacaccagaaaatcatatttaat

SEQ ID NO: 240985 - DNA, 773 bp, Unknown
  Bacterial polypeptide expressing nucleotide sequence isolated from the Sargasso Sea
gcgtgtaattttaattatggtttttcatcaaggcagttaataaagaaaaaaaaagctctacccttatgtggaaataaagatatatccttcagcaaaattgaagtttttactcgaaacaaaaataaagttctttctaaaagaattagcttaaaggaaataagctcgttatcaactaagcaaagaaaaaagattaaaaaagatttgaaaaagataactagtaaaagaaaaaatttcttgaaaaacgtaaatttttcatcaccaagtgtaatgggaattttaaacttaactccagatagtttttctgatggcggcaagtataacaaaaaatcaaaatcatttaagcatatttcatcaatgattgatcaaggcgcagacattattgatgtaggaggagagtctactagaccaggttcaaaaacaattaatcctaaaaatgaatggaaaagagtcaaatacgttttaaaaaattttaaaaaaaaatttaaaaataattgtttatctttagacacaagaaagtccgaagtaatgcttaaaggaattaagtataatatagatttgattaatgatgtttcaggttttaaatatgatgttaactctctgtcaaaaataaaaaaatataatatttcaaaagtacttcatcatatgcaagggacaccaaattctatgcagaataatccgaaatataaaaatgttttacttgatgtttacgatttctttgagaagaatattaaaaaaatgaataataataaaattatattagatccaggaattgg

SEQ ID NO: 240986 - DNA, 277 bp, Unknown
  Bacterial polypeptide expressing nucleotide sequence isolated from the Sargasso Sea
ctgttttacgtgattgaccgctacgtgccgaaagtcgaaatcccctctcttcccattcccgaaccgctgcaatgcggccgcttcaagctgaccttcgaacgcccgttggtcatgggcatccttaatgtcacccctgattctttttccgatggcggccagtacgcgatgcgcggcgaagcgctgcgccaggccgagcgcatgctgctcgccggcgcggacatcgtcgacatcggcggcgagtcgacgcggccgggggcaccgcccggccgctcgagaa

SEQ ID NO: 240987 - DNA, 688 bp, Unknown
  Bacterial polypeptide expressing nucleotide sequence isolated from the Sargasso Sea
atgggggtattaaatcttacaccagatagtttttcagatggtggaagatttaataaaataagcaaaggcataaaacatgcacttgaaatgactagtgcaggagctaatttaattgatgttggaggtgaatcaacaagaccaggatctaaaactgtaaatccaaaaaatgaatggaatagaatttatagaatacttagattagtctgtaaaaaagttcctgtatcgttagatactagaaaatcagagataatggaaaaaggtattaaactaggtgttaaaattataaatgatgtatccggattaaattacgataaaaaaacattagatattctgaaaaaatatcaaattccttttgtaattcaacactcaaaaggtaccccagaaaacatgcaaattaagcccacttacaaaaatgaattattagaaatttatgatttttttgaaaagaaaatcaaaactttaagatctattggtataaaacatagcaatataatcttagatccgggcataggttttggaaaaaatctgaaacataatatgaatttaataagtaaaatttctattttccactccttgggctttcctatacttgtgggaaattcaagaaaaagatttattaaagaagtttcaaaaaataatgactctaagaaaagaataggtggaacagttgttcttctatatacttgat

SEQ ID NO: 240988 - DNA, 248 bp, Unknown
  Bacterial polypeptide expressing nucleotide sequence isolated from the Sargasso Sea
aatgggagttttaaatattacacctgatagtttttcagatggaggaaaatattataaaaacaaattagcatacaagcatgcaaaaaatttaataaaatctggaagttcaataattgatgtgggtggtgaatcaactagaccgggagcaaaagaaatagatttaaaaaaagaatggaaaagaatttcaaaaatcttaaaaaaattgaaaaataataaatgcttaatatctttggatacaagaaaaagta

SEQ ID NO: 240989 - DNA, 167 bp, Unknown
  Bacterial polypeptide expressing nucleotide sequence isolated from the Sargasso Sea
tatgggtgttttaaatattacacctgacagtttttctgatggtggaaaatttaatgaaaaaagttctgcaaaaaaacagattaataaattaattctcgatggagcaaagataattgatgtaggtggtgagtctacaagaccaggctctaaagaaattcatcaaacaa

SEQ ID NO: 240990 - DNA, 754 bp, Unknown
  Bacterial polypeptide expressing nucleotide sequence isolated from the Sargasso Sea
tcagatagtttttcagatggtggaaaatttaatagtaataaaaaagctcttaaacaaatttctcatatggttaagtctggagcaaaaattattgatataggtggagagtcaacacgaccaggatcaaaaacagtgaaaccaagggctgagtggaaaagaatcgaacatgttgtaaaaaaatttaaaaagaaacataaaaaaatctgtctatcaattgatacaagaaaatctgatataatgattgaaagtataaaattcggggcagatctaattaatgatgtatcaggtttcaattatgatccaaatatgattttaaaacttaaagattataatataccaaaagttttacaccatatgcagggtacaccgaatactatgcaaaaaaatcctcgataccaaaatgtattgttagatatttacgacttttttgaaaaaaaaattacaaatatatctaataataaaaaaattattttggatccaggaataggtttcggtaaaactttgaaacataatttgactttaatttctaaaatatctttgtttcatagtcttggctttcctattttggtcggaacttcaagaaaaagatttatcaatcaaatatccggagagtatgatagcaaagatagaacaggaggcactttagcttcagtcctatttttattatctcaaggagtgcaaatttttagagtgcataatgtcagagaaataaaacaaggaattttggtatttgaaaaaatcaatgaaaaataaa

SEQ ID NO: 240991 - DNA, 607 bp, Unknown
  Bacterial polypeptide expressing nucleotide sequence isolated from the Sargasso Sea
catgaggaaatattacactagggcgtgtaatttttatcatggaagtgaagcaataaggttaatccaaacaaaaaaagcacttccattaaacggtaagaaaaatatcgccttcgatagtatagaaattttttcgagggaaaaagggggagtaaaacttaatttaattaatattaataaagtttttaaactaaataaaaaaattagaaaaattgttaaagaagatctaattaaaattatatctaagagaaaggattttcttaaacatattaattttcaatccccgtcaatcatgggtattcttaatcttactccagatagcttttcagatggaggaaaatttaataattacaacaaagcatttaagcaagtttctaatatgataaaatctggagcaaatattattgatgttggtggagaatctactcgaccaggttcaaaaacgattgatccaaaaatagagtgggcaaggattaagtatgttttaaataattttaaaaaaaaatataataaaacttgtttgtcagttgatacgcgaaaatctgatataatggttaaaagtattgcttgcggtgcagacctaatcaatgatgtgtcaggttttaatcat

SEQ ID NO: 240992 - DNA, 673 bp, Unknown
  Bacterial polypeptide expressing nucleotide sequence isolated from the Sargasso Sea
atgggtgttttaaatgctactcctgatagtttttcggatggtggcaaatatttaaattcgaaaaatgcaaatacgcaaataaaaaaattaataaacgatggtgcttcaattatagatattggtggagagtcaactcgtcctaattcaaatacagtaaatagtaaagttgagtgggaaagagttaaatcaaaaataaaatatgcaaaaaaaaataaaatttttgtttctttggatacaagaaaaagttatgttttagaaaagtcattaccactaaaaatagatatattaaatgatgtatctggactcgaatatgattataaaattataaaaatattaaaaaaaagtaaaattccatttgttttgcatcacatgctcggaacacctaaaactatgcaaaaaaatccaaaatacaataatgttttactagatatatatgatttttttgaaaaaaaattaaaatttctcaaagcaaataaaataaatcacaaaaatataattttagaccctggaattggttttggtaaaaatttgaaacataatattactttaataaataaaatatctatttttcacacgttaggatttccagtaatgttagggatatcaaaaaaaagatttattaaagatatttcggttaataatgatagtaaagaaagaatcggaggaacaactt

SEQ ID NO: 240993 - DNA, 295 bp, Unknown
  Bacterial polypeptide expressing nucleotide sequence isolated from the Sargasso Sea
atgaatatcaaacaatttaatgattggcttttaagtgacaataagcaatcattaatcatgggaattttaaatgttactcctgattccttttcagatggtggccaatacttagataaaaatgttgctgttgagcacgcattagctatgataagaaatggtgcaaatataattgatattggaggtgaatctactagaccattttcagatcctgttagtttagatgaagaaatttcaagagtaattcctgttattaagggtataagagaaaaatctgatgtttgtatatctattgata

SEQ ID NO: 240994 - DNA, 763 bp, Unknown
  Bacterial polypeptide expressing nucleotide sequence isolated from the Sargasso Sea
gatgggagttttaaatttaactccagatagtttttctgatggaggtaaatataataaagatttaaaagcaaaaaaacaaattaataaattaattaatgacggtgcaaagataatagatgtaggaggagagtctactagaccaggttcacaagaaataaaacaattaaaagagtggaataggattaaaaattccatgaagtacttaatgaaaaataaatttttcgtttccgtagacacaagaaaaagcttagtgatgaaaaaagcgttaaattataaattagacttagttaatgatatatctggtttaagttacgataaagatacaatagaatttttaaaaaaaactaggttgccatttgttttacatcacattaaggggacgcctaaaaatatgcaaataaatccaaattacaaaaatattttactggatatatatgattattttgaagaaaaattgaggcaaataagaaagaagggaattaagcacaataatataatattagatcctggtattggttttggtaaaaatttgaaacataatattaccctaattaataaaatttccatttttcattctttaggtttgccaataatgttgggcgtttcaagaaaaaaatttataaaagatatatctggattaaatgacagcaaagaaagagttggaggaactgttgcatcttgcatttatagtatgtcacaaggtgtgcaaatattacgagtgcatgacgttaatgaaatcaatcaaggaattaaggtattaaaa

SEQ ID NO: 240995 - DNA, 421 bp, Unknown
  Bacterial polypeptide expressing nucleotide sequence isolated from the Sargasso Sea
aatgacagaatatttccgtccgatactcaacactgatctttccattccagataatgcacaagtcatgcgaggtacgcatttttggtttacccatgcggaaaagctagcaagaaatacggagcctcagatagttatggcgaaaaatattcctgataatatcttgcagaatattactaacgagagagtgaatatttgtagactttcttttgatgttcctagggttatgggtatattaaatgtcacgccagacagtttttccgatggtggaaagtactcttctgttgaaacagccgaagtgcatttaaaatctatgatttccgatggagcagatataattgatataggcggggaaagtactcggcccggtgctgttgaggttgaaatttcagaggaaatatcgagggtaataccgattattgat

SEQ ID NO: 240996 - DNA, 859 bp, Unknown
  Bacterial polypeptide expressing nucleotide sequence isolated from the Sargasso Sea
aatgcgaaagtattacacaagaccgtgtaatttctattatggaaattacgcaaaaaagcttattaaaaagaaaaaagctttatctttagcaggaaatcaaaatatagcttttgaccaattagaaatttttaaaagaaaaaaaagaaaaattatacaaagcaatatatattcaatttcatcaataaaaactttacctaaagaaatacaattaataattaaaaatgatataaaaaaaattacttctaaaagaaagaatattagtggagttaaatttgatgccccaagtattatgggcgttcttaatataacaccagatagtttttctgacggggggttattttttgatgaatcgaaagcttatgatcaagcaaatttaatgataagtcatggcgcaacgattatagatattggaggcgagtcaaccaggccgggttcaaaaattattaatgaaaaagatgagtgggatagaataaaaaatactattataaaatttaaaaaaaatttttctaatatacctttatcattagatacaagaaaatcttatataatgaaaaaaggtttagaatgtggagttaacattatcaatgatgtgtcaggtttaaacttcgacaaaaaatcttttgatgttataaaatcaaaaaacattccttttgttttacaccatatgcaaggaacacctgatataatgcaaaaaaatccaaagtatgaagatgctttattggatatctttgatttttttgaggaaaaaattaatttttgtgtaaaaaaaaattttaaaaaagaatttattatcattgatcccggaataggcttcggaaaaaatttagagcataacctaagaattagtctaaaatttcta

SEQ ID NO: 240997 - DNA, 394 bp, Unknown
  Bacterial polypeptide expressing nucleotide sequence isolated from the Sargasso Sea
atgggaattttaaatgtaactccagatagtttttcagatggaggtaaatttaataaaatccatctagcaaaaaaacaaataaaaaatcttattaagaatggagcaaatattattgatgttggtggagagtctacaagaccaggttcggaagaagtaatggagtttaaagaatggaatagaataaaaaatattatgaaatatttaaattcaaaaaaattttttgtttctttggataccagaaaaagttttgtgatgaaaaaagctataaagtataaattaaatttgattaatgatgtttcaggttttaaccacaataaagatacaatagaaattttaaaaaaaactaaacttccatttgttttacatcacatgaaggggacgactaaatcaatgc

SEQ ID NO: 240998 - DNA, 808 bp, Unknown
  Bacterial polypeptide expressing nucleotide sequence isolated from the Sargasso Sea
atgggtatactaaatacaactcctgactctttttcagatggaggtaagtacgatgaccttcagttggcttatattcgagcaacattaatgatagaacaaggtgcagatattattgatgttgggggagaatcaacacgaccaggtgcagaatcagttcctgaaatagaagaaattcgcagaactaaagatgtgattgcagaaataaaaaacaatttccctaaccaattaatctctattgatacaacaaaatcgagggttgccaaggaagcaattgatgctggagccaatattattaatgatgtttctgccttacagaacgatcccgatatgggcaagattgcagctaaattcgaaacaggagttgttcttatgcacaaacaaggctctccaaaaaatatgcagataaatccaaattataaaaatgtaacacaggatgtacacgactatctaaaccaaaggctgtcagcagctgcaaatttcggcatcaaaaaacatgcttgcgttatagatcctggtattggcttcggaaagactttgtctcacaatttacaacttttaaaacacttgtctgtttttggagatgccgcacctatcttaattggcgcatcaagaaaaaagtttattggagaaatttatgataagccagacccagctgatagattacagggaagtcttgcggcggcggcttatgcactatctcaaggagcgcatattttaagagcacacgatgtattagaaacttgcgaactagcccgaatgttcgatacaataaatggaagttatgacacgactaatggaacaatttaac

SEQ ID NO: 240999 - DNA, 660 bp, Unknown
  Bacterial polypeptide expressing nucleotide sequence isolated from the Sargasso Sea
tatgggaatattgaatttaaccccagacagtttctctgacgggggcaaatttaataaaaataacaaatctataaaacatatatccaaaatgataatgtcaggtgcagatattattgacgtaggaggagagtctactagaccaggttcaaaaactattaatccaaatgtagagtggaagagagttaaatttgtacttaaaaaattcaaaaaaaaattcaaaaatacttgtctttcaattgatacgagaaaatctgaattaatgattaaaagcgtcaaatacggagttgatttgataaatgatgtttcaggttttaaatacgatcaagactcattgcctaaattaaaaaaatataatatcgcaaaaatacttcatcatatgcaaggaacaccaaaaataatgcagaagaatccaaagtataaaaatgtattgttagatatatatgatttttttgaaaaaaatattaatagcaatctcgataacaaaaaaattattctagacccaggtattggttttggtaaaaatttgaaacataatttgactttaatttctaatatatctttgtttcatagccttggatttcctttattgattggaacctcaagaaaaaggtttataaatcaaatatcagggaaatatgatagtaacgatagaactggggg

SEQ ID NO: 241000 - DNA, 775 bp, Unknown
  Bacterial polypeptide expressing nucleotide sequence isolated from the Sargasso Sea
atgggagttttaaacatgacaccagatagtttttctgatggaggaaaatataatagagattattcagcaaaaaaacgactaaactatctatttgacagtggtgccaatatagttgatattggtggggaatctacaagacctggttcaaaacctgtaaattctaaaattgaatggaatagaataaaatatattttaaataagtttaataaaaaaaattttttatctctcgacacaagaaaatctgaaataatgaaaaaagggattaatttgggtgtatctctaatcaatgatgtttcaggtctaaattatgacaaaaattccatcaatgttttaaaaaaatataaaacaccttttgtattacagcattctctaggaaatccagatataatgcaaaataatccaaaatataaaaatgtgttattagatatttatgatttttttgaaaaaaagataaaacatttaagaattaatggaattaaccataataatattatcttagatccaggcataggatttggaaaaaatttgaaacataatttgaaattaattaaagatatatcgatttatcattccttgggattgcctatattgcttggaatatcgagaaaaaagtttattaaagaattatctgaaaaaaatgacagttcatctagagtaggaggaacaattagttcaagtatttatgctatgatgcaaggtgtccagttattaaggattcatgatgttaatgaaataaatcaaagtcttaaagtttttaaagagctaattaaataat

SEQ ID NO: 241001 - DNA, 182 bp, Unknown
  Bacterial polypeptide expressing nucleotide sequence isolated from the Sargasso Sea
tatgggtatattaaatttaacaccagatagtttctcagatggaggtaaatttaatacaagagataagtccttcaaacaaatatcaagaatgttaaaatcaggtgcagacataatagatgttggaggagaatctactagacctggatctaaggaggtgcatcctaaaaatgagtggaagagaa

SEQ ID NO: 241002 - DNA, 643 bp, Unknown
  Bacterial polypeptide expressing nucleotide sequence isolated from the Sargasso Sea
aatgcgaaaatattacacaagaccgtgtaatttctattatggaaattacgctagaaagcttattactaagaaaatagcccttcctttagctggcaataaaaatatagcttttgacaagcttgaaattattcatagaaaaaataaacgaaatatcgtcagtgaatactgttctatcaataatattaaaaagtttaataaaatattattatcttcaataaaaaaagatttaaaaaatatagtagctaaacgtaaaagcatatgtggtttaaaatttaataaacctgaaattatgggtgtactaaatataacaccagatagtttttcagatggaggattattttttaaacaatcaaaggcctacgatcaagcaaagttgatgattaaaaatggagcctctataatagatgtaggaggagaatcaactagaccaggatctaaaacaatcaatcaaaaagaagagtgggaaagaataaaaaaagtaattatcaaatttaaaaaggaattttcaaggatacctttatctctagactctagaaaatcatatgtgatgagcaaaggtatagaaaatggaattaatattattaatgatgtttcaggattaaattttgataacaaatccatttgctcttataaattaaaaaaa

SEQ ID NO: 241003 - DNA, 629 bp, Unknown
  Bacterial polypeptide expressing nucleotide sequence isolated from the Sargasso Sea
tatgacctcatacttcagaccaattgttagaactggctcaccaagatctaagaatagtatttttttagctgaaacaaattattgggtcagtgaagctgaaaaaatcaatcttggaaagaaaaaaaaattagtttcaataaatgatgttcctgattggtggaaaaaaagatggttaaaaaaacgatctgatatcttaggaatggagtttggttttccaaaattaatggggatattaaatgttacgcctgatagcttctctgatggtggaaatcatgtcaaattatatgcggccttaaatcaggcaaaatttatggaggaaagtggagtagatattattgatatcggtggtgagagtacgaggccaggggccttaattgttccaattttggaagaaatcagtcgtattgaaccagttattaatggtatttcagccagatcaaaaattcctatttcggttgatacgcgtaaggcggacgtggcatctgctgcgcgtaaagctggagcatctatggtaaatgatgtgtctggctttacttttgaccctaacttgctgccctattgttcaaaatacaaattaccagtttgtgttatgcacatgaaaggatcgccagaaaatatgcaaaataacc

SEQ ID NO: 241004 - DNA, 499 bp, Unknown
  Bacterial polypeptide expressing nucleotide sequence isolated from the Sargasso Sea
tatgggaataatgaatactactccagattcattcagtgatggtggaaaatataattcagcgaataaggcaattgaccgtgcctatgatttattggataatggagcagatataattgacattggaggagagtccactcgtcctggagcaaaacctgtttcaccagctgaagaaataaaaagaatatctcctttactcattgagttagctaaaaatacagattcaacgatatccattgatacttataaatcttctacagcaatctatgctttagacaatggagctcatttgattaatgatatttcaggaatgactcatgataaaaaaatggtaaatattgtatcaagatataaggtgccaatagtgattatgcatatgaaaggcacacctaagactatgcagcaaaatccaacctacgataacattattaatgagattagtgacttcttagttaagcaggctaatattgtgcatagtgctggggtgtctagtgataaataa

SEQ ID NO: 241005 - DNA, 948 bp, Unknown
  Bacterial polypeptide expressing nucleotide sequence isolated from the Sargasso Sea
catgagtttttctcatggttcagatgcttataatttaattaaaataaaaaaagcattacctatttgtggaaataaaaaattagcttttagtagtattgaaattatttatagggcaaaaaaaaataaaaaaaaaaatatttatattactcaaattaaaaagttgcctccaaaagtaaaaaagagtgtattaaaaaaaattaaaaatattacttctaaaagaaagaaaatttcaggtttagattttgataaatttaatattttcggtgttttaaatatgacacctgatagtttttcagacggtggaaaatttaataaattaaaacttgctaaaatatatagtaaaaaaatgattaatgatggggcaaattttattgatataggaggagagtcaacccgacctggagcaaagcttattccaagtgaaaaagaaaaacaaagagtcctaccaattatttctaaaataaaaaaatataatatttcaattgatactaggaaatcagatgtgatgattgcggctattaaaaaaggagctaatattatcaatgatgtatcagctctagattttgaccagaattccttaaatgtagtatcaaaacttcaaaaaccagtaattttaagtcattcacaaggaaccccagatattatgcaaaataacccaaaataccaaaatgttttgttagacatttatgattattttgaaaataaaattaaccaattaacgaaaagaaaatttttgagaaaaaatatcattttagatccaggcattggatttggaaaaaatctaaatcataatctcaatttaatttccaacattggattatttcatagtttagggtgttctattatgcttggaccatcaagaaagagttttataggtaaagtgatgaaacgaaaagatagcaaatatcgattaggtggaactttatcatcagttattacagggtataa

SEQ ID NO: 241006 - DNA, 637 bp, Unknown
  Bacterial polypeptide expressing nucleotide sequence isolated from the Sargasso Sea
atgggcgtagttaacttaactccagatagtttttctgatggaggtaaatataataaaaaaaatttagccatgaaatacataaataaaatgttattagatggtgctaaaataattgatattggaggggagtccacaagacctggggcaaatgatattagttccactaaggagtggaatagaattaaattagttttaaaaatgttaaaaaataaaaagtgttttatctcattggatacaagaaaaagtctagttatgaaaaaagcctctagaataaaagttgaccttattaatgatgtatctggtcttacttacgacccccaaactgtaagttatttaaaaaaaacaaagaaaccttttgtcattcatcacataaagggaacgccaaagaatatgcaaattaaaccatcatataaaaatgtattacttgatatctatgatttttttgaagcaaaattaaaatttgtgagaaaacaaggcattaaacataataatattttattagatccaggaattgggtttggaaaaaatttgaaacataatattactcttcttaagaatatttctattttccattcattaggtcttcctgtaatgttaggtctatctagaaaaagatttattaaggatattcaaaaga

SEQ ID NO: 241007 - DNA, 520 bp, Unknown
  Bacterial polypeptide expressing nucleotide sequence isolated from the Sargasso Sea
aatgggaattttaaatttaacacctgatagtttttctgatggaggaaagtttaataatgaaaaaaaatcttacctacatataagcaatatgattaaagcgggtgcaaatattattgacgttggcggggagtccaccagaccgggttcgaaaactgtccccgtgaaatcagaatggaaaagaatagaaaaagtaataaaaaattttaaaaaaaaacataaaaatatttgtctatctttagatacaagaaaatcagaaattatgcttaaaggaattaaatctggagtaaatttaataaatgatgtttctggatttaattatgatgaaacttctttaattaaattaaaaaaatttaatattgctaaagtaatacatcacatgcaaggaacacctaataatatgcaaaaaaatcctaaatacaaaaatgttttgttagatatctatgatttttttgaaaaagtaataaaaaaaattaataacaagaagatagttttagatcctggaattggttttggtcaagat

SEQ ID NO: 241008 - DNA, 388 bp, Unknown
  Bacterial polypeptide expressing nucleotide sequence isolated from the Sargasso Sea
aatgcaaagatattacacaagagcgtgtaatttctattttggcaatcaatcaaaaattttagtaaataaaaaaaaatcaattcctttacataatattaaagaaatatcttttgatcatatagaaattattactagaaaatcaaaaaaaataatttctataaatcaaattaagcagttaccaaaaaagttaaagaaaaaaataaaagctgatatcaaaaaaattaaatcaaaaaaatttaatttttcaaactttaattttaaaaaaattccaaatgttctaggagtgttaaatcttacccctgatagtttttctgatggaggaaatttaataaaaaaaataaaggtattagccatgctgttaatctttataaaaatggtgcatctgtag

SEQ ID NO: 241009 - DNA, 1054 bp, Unknown
  Bacterial polypeptide expressing nucleotide sequence isolated from the Sargasso Sea
tatgataaaatattacacaagagcgtgtaatttttattatggttcaatatcaaaagaaaaaattaagaaaaaattatcactaccattaaatggaaatgattcaatatcatttgataatatagaaattattactagaaaatttaaaaaaaaaattcatattaaagaaatatcaaatcaaaaaattaatattaaaaataaaattaaaaaagatatcaaattaattattagtaaaaaaaaatttaagggactaaattttttaaattttcctcttctaatgggggtaattaatttaactcctgatagtttttcagatggaggaaaatacaataagaaaagttctacatttaaacatataaattatttaataaaaaaaggatgttcaattatagatataggcggagaatcaacaagaccaggagcaaaggatattagcacactagtagaatggaaaagaattaaaaaaactttagaaaaaactaaaaaattaaataaatttatatctttagatacaagaaaaagctggattatggaaaaaggaataaagaacaaagtaaatttaataaatgatgtttctggactagaatatgatcccaaaactaaaaatgttttaaaaaaatataaaacttcttttgttgtccaccacatgcaaggaaatccaaaaaatatgcaaaaaaatccaaagtataaaaatattcttttggatatttatgatttttttgaaaaaaaaatagaaaaaatcagatctttaggaattaaacataataatattattttagatcctggaattggatttggtaaaaacttgaaacataatatgaccttaattaataatatttctatttttcactctcttggatttcctgtaatgttaggaatttctagaaaaagatttattagagatttatctggaaaaaatgatagcaaagaaaggttgggtggcacgatatcatctagtttatatgcaatgacacaaggtgttcaagtattaaggattcatgatgttaatgaagtgaatcaaagtataaaagtatttaaatcattaatttttaaataa

SEQ ID NO: 241010 - DNA, 490 bp, Unknown
  Bacterial polypeptide expressing nucleotide sequence isolated from the Sargasso Sea
gatgggcgacaccatcgcctgtggcgcgcgcacgctagacctcagccgtccgcgcatcatgggggttcttaacgtcaccccagactctttttccgatggcggacagctttaccgcgatggacgggttgataccgacgcgctgctcacgcgcgccgaacaaatgctggtcgagggtgctgacattctggatgttggtggggaatcgacgcgtccgggcgccgctgcggtcagcgaagccgaggagttggaccgggtcgtcactgcggtggaagccctcgcccggcactgcgacacaatcatttcagtggataccagcacccccagcgtgatgagggcgtccgcacgctgcggggcggggctcctgaatgatgtgcgcggcttccaacgcccacaggcactccaagctgcggcggataccggtctggcgctctgcgtgatgcatatgcagggggagccagacacgatgcaaacggcacccacctatagcgat

SEQ ID NO: 241011 - DNA, 710 bp, Unknown
  Bacterial polypeptide expressing nucleotide sequence isolated from the Sargasso Sea
aataaaactattaagtgatggcgcaaaaataatagatattggtggtgagtctactcgccctggtgcacagacagttagccttgatgatgagcttgaacgagtggtgccaataataaaagcaatacgcgctcagagtgattgtgttatttctgtcgatacgagtaaagctgaggtgatgaggcaagctattttagctggtgcagatatggtaaatgatgttcgcgcattacaagagcctgacgcactgaatgttgttgcgcaatttgaaaacatcgcaatttgcttaatgcacatgcagggtcagccccgaagtatgcaaacgtctcctcagtataatgatttaatgggcgatattaatgagttttttaaaagtcgtattaatgcctgtgagacaatggggataaaagctcaacagcttattcttgaccctggctttggatttggaaaaacattaagccataactacgaaattttaaccaagtttaatgattttaataaattaggtttgccattattagcggggttatctcgtaagtcgatgattggcaatctgttaaacagagacacgagtgaacgaatggccggtagtttagccggcgctcttattgccgcacaaaatggcgcaaaaataattcgtgttcacgacgtaaaagaaactgcagatgtactcggtgtttaccaagcgtgcataaaaggaataatagaatgaa

SEQ ID NO: 241012 - DNA, 1021 bp, Unknown
  Bacterial polypeptide expressing nucleotide sequence isolated from the Sargasso Sea
tcgggcaaatcaattaattagagaaaaacgggctctacctttatgcggaaataagtatattgctttttctggtatcgaagtatttgagagaaaaaacgaaaaaattaaaaaaaaatttttagatattaaaaaaatcaaaaaacttaataaaattgagaaaaaaaaagttttaaaagatataagaaaaatttccgaaaaaaggaaaaactttcttaaaaatgtaaattttacaaatccatcaatcatgggaattctgaatcttacccctgatagtttttctgatggaggaaaatttaataaatttgataaatcaataggtcagatcgcacagatgattcagtctggagcaaatataatagacttaggcggagagtccacaagacctggctcaaaaacaatagacccaaaaactgaatggagaagattagaaaaggtattaaaaatatttaaaataaaatttaagcaaacttgtctttcaattgatactagaaaatctatgataatggataaaagcatcaaatttggtgcagatgtaattaatgatgtttccggatttgattatgactccgactctctatcaaaattaaaagataaaaatatttcaaaagttcttcatcatatgcaaggaactccaaataccatgcaaaataatccgaaatatcaaaacgttttacttgatatttatgattattttgaaaatggaattaacaacaaatttaaagataaaaaaattattttagatcctggtatcggttttggtaaaactttgaaacataatttgactttgatttctaatatatccttgtttcatagtttaggcttacctattatgattggaacatcaagaaaaagatttataagtcagatatcaggcaaaaatgacagcgtagagagaataggtggtacactagcttcaattttgtttttgttatctcaaggcattcaaatttttagagttcataatgttaatgaggttaaacaaggtattttggtatttgaaaaaatattaatgaataaatga

SEQ ID NO: 241013 - DNA, 781 bp, Unknown
  Bacterial polypeptide expressing nucleotide sequence isolated from the Sargasso Sea
tatgggaatattaaacgtcaccccagatagtttttctgatggaggagaatttttatcagttaatgacgcattttcacaatacaaaaagttaaaaaaagagggcgctgccatagttgacgttggaggagagtctacacgacctgggtcaaagacagttccagctaaaaaagaacttcagagaataatgccagttattgctcaaataaaaagtaattcaaaaaattctttagtttcggttgataccagaaaatctacagtaatgaaagctgtaatgaaatataatattgattttatcaatgatgtctcgggattaaggtacgacagcgaaactattagttttttaagtaattataaaattcctttcattataatgcattcaatttctaatcctacgaaaatgcaaaaatcaattaaatataacgacgttttacttgatgtttatgattttctagaaaatcaaataagaaaatgtaaattaaaaggcatatctgaaaataaaattataatcgatccaggcatcggcttcggtaagactctgaaacaaaatttgactcttataaaaaagattagtttacttcactcgcttggtctgccagtgatgctaggcagttctcgaaaaagttttattggaaagatacaaaaaaatgaattatacgatgatcgtaaagggggatcgatagcttcagttttatacggtctgtctcaaggtattcaaatatttagagtgcatgacgtatatgagacaaaccaagcaataaaagtctatacgaaattaatatga

SEQ ID NO: 241014 - DNA, 778 bp, Unknown
  Bacterial polypeptide expressing nucleotide sequence isolated from the Sargasso Sea
atggggattataaacttaactccagatagtttttcagatggtggtaaatataaaaatactaactctgcttacgaacattcaaaatttttaatacaaaaaggttgtaaaataattgatgtaggaggagagtctacaagaccaggatcctcagacataaatgtggatttagagtggaaaagaattcaaaacttttttaaaaaaagtagaggcctaaaaagtttaatctcagtagatactagaaaaagtaaaattatgtacaaagcaaataagtataaattaaatcttgtaaacgatatatctggattgagttacgatgcaaatactctagaatttctaaaaaaaacaaataaaccgtttgtattaaatcatataaaaggcgaaccggtaaatatgcaaaaaaatcccaaatataacaatgttgttttggatatatatgatttttttgaagaaaaattaaaaataataagaaacaaaggtattaaacataataatattattttggatccaggaattggatttggtaaaaacttgaaacataatattactattttaaaagatatttctatttttcactcgcttggttttccattactattgggcatatcaagaaaaagatttattaaagatttatcagatatgaatgatagtaaagagagaataggtggaactatatcagcaagtttgtggtctatgatgttgggtgttcaattattaagagttcatgatgtaaatgaagttaatcaagccataaaagtatttaaaaaacttaatttttaat

SEQ ID NO: 241015 - DNA, 1048 bp, Unknown
  Bacterial polypeptide expressing nucleotide sequence isolated from the Sargasso Sea
tatgccgaaatattacacaagagtgtgtaatttttattttggcaaatcatcgttaaaaaaaataaaagaaaagaaatcattacctttaaatggaaatccattaatttcatttgatagttttgaattaataacaaaaacaaaaaaaaaaattgttcaattagatcaaataaatcgtcttagacatgatattaaaaaaaaggtaaaaaaagatcttgaattagttattaaaaaaaaaaaatttaaaaaactaaatttaaacaatcagcccattataatgggagttctaaatttaacacctgacagtttttctgatggaggacaatataataataagtcgagtggatatacacgtgccatttatttatttaataaaggttgtgatatcttggatattggaggtgagtcaacaagaccaggatcaaaagaagttaagatagatatcgagtggaaaaggataaaagctattttaaaaaaattaagtaaattaaataaatttatctcagtagataccagaaaaagtgaaataatgagcaaatctttaaattataaaattagtttaattaatgatgtttctggtttatctcatgatccagatacaattgatttacttagaaggtctaatagccctttcgtgatccatcatatgaaaggagttccagaaaatatgcaaaaaaaaccaaaatataagaatgtagttttggaaatttatgatttttttgagagaaaaattaaacaattaagagagaatggcattaaacataataatataattttagatcctggaattggttttggtaaggatttgaaacataatattaccattcttaacaacatttctatttttcacacattgggctttcctgtaatgttaggtgtttcaaggaaaagatttataaaagatatttctggaaataatgatagcaaagaaagattgggaggcacgatatcagcttgtttaagttcaatgatgcaaggagttcaaattctaagagtgcacgatgttaacgaagttaatcaggcaattaaagtgtttaaatcattaaactaa

SEQ ID NO: 241016 - DNA, 796 bp, Unknown
  Bacterial polypeptide expressing nucleotide sequence isolated from the Sargasso Sea
catgggaattttaaatgtcacccccgattctttttcagacggaggaaaatactttaaaaaaaatactgctattgagcatgcattagagttggtcaagaatggtgcagatataattgatataggcggtgaatcaaccaggcctttctcagatccagttagtttagatgaagaaatttcaagagtgatacctgtaattgaaggtataagaaaaaaatctgatgtttgtatatcaattgatactactaaatcaattgtagcaagcaaggctcttgatgttggtgcttcaataataaatgatattagtgctatggagattgatccgctaatggctgatgttgcagtaaaatttgattgtcccttaattataatgcatatgaaaggaactcctaaaaatatgcaagataatccccagtatgaatctctaataccagatatcaaagattatcttgtagacagaatagattttgctatttctaaaggagtaaatcgaaaaaaaattataattgatccaggaattggttttggtaaaactgtagaaaataattttgaaatcataaataatttaaatcacttcgttgaattgaattttccagttttgctaggcgcatcaagaaaatcctttattggaatatctttaaatcttcctgaaaatgataggttagaaggttcattagcggctaacgttattggattacaacaaggtgtaaagattttcagggttcatgacgtttctgaaactaataaagcccttttcattgcaaataaaatttttaattcaaaccatttaattagctaa

SEQ ID NO: 241017 - DNA, 853 bp, Unknown
  Bacterial polypeptide expressing nucleotide sequence isolated from the Sargasso Sea
tatgtctcaagcgcaacacctgagccggctaccctgtggtagccggcttcttgatttgtcccgtccgcaggtgatgggcatactcaatgttacccctgattctttctccgacggtgggcgctttacggcgcgcgatgctgcattgcgtcacgccgagcagatggtcgccgcaggtgcgacgctgatcgatatcggcggtgagtccacccgtccgggcgctcgggccgtttctccgaccgaagagctggagcgggttgcgccagtggtcgaggccatcgcccgtcagctcgacgtgatcatttccgtggatacctcgacgcccgcagtcatgcgcgaaagtgcaaggctgggtgcggggctgatcaatgatgtgcgttcgttgcagcgtgatggtgctctggatgcggcggcagatactggtctgcctgtatgtctgatgcatatgcgcggcgagcccggcaacatgcaggatgatccgcagtatccggatatcgtcgctgaggtgcgtgattttctcgccgagcgcatggccgtctgcacgacagccggtattcccgctgagcggatcctgctcgatccgggctttggttttgccaagaccctggagcacaatctcgccctgttcaagcgcatgagtgagctctctgcgttggggcggcccttgctggttggtgtctcacgcaagagcatgatcggcaaggtgctcggccacgaggtgggcgggcgcctctacggcagtctggcattggctgctctggcattgaccaagggcgcacatattttgcgtgtgcacgatgtcgccgaaacggtggacgtggtgcgcatgatcgctgcggttgaagcggcgcaatag

SEQ ID NO: 241018 - DNA, 790 bp, Unknown
  Bacterial polypeptide expressing nucleotide sequence isolated from the Sargasso Sea
tttgataatgggaataataaatatgacaccagattcatttagcgatggaggaaaatttaactcaattaatagcgctattgattatgcatataagctattggatactggtgcagatatacttgacattggcggagaatcttcacgacctggggcagacccagtttcaaatagcgaagaaattgatcgcatatcccctttaataaaggaattaggtaaaaacgctaattgcttgatttcagttgatacttataaatcatcaacagctaaatttggccttgataatggagcaacaattattaatgatatttctggactgacatatgactcaaagatggcaagtgttatttccaatttcaatgcaccggttgtggtaatgcatatgaagggcacccctaaaaccatgcaaaaaaatccaaattattttgatttaattaaagaaattaaaagttttttttctaagcaaatagaatttgcaattaaaaatgggatcaatagaaaaaatattatactagaccctggtataggttttggaaagggattaaatgataattttgaaatcataggtaaattagatcaaatttgcgatatgggatatcctgttttagttggtccttccagaaagtcatttattggtgaagtactaaatttgtctgtaaatgaacgattagagggtagtttagcagctgctaatgcatgcttaatgaatggtgcaaaaatgattagagttcacgatgttaatgaaacaaagaaaagcctatctattattgaaaaaattatcggaagcgcataa

SEQ ID NO: 241019 - DNA, 775 bp, Unknown
  Bacterial polypeptide expressing nucleotide sequence isolated from the Sargasso Sea
tatgggcatattaaatttaacacctgacagcttttcagatggaggaaaatataataagaaaaataaatcattcaaacacatatcaaaaatgatttactcaggagcagaaattattgatgttggcggtgagtctacgagaccaggttctaaaactatacaccctaaaattgaatggaaaagaattgataatgtaattaaaaaatttaaaaaaaaatataaaacaacttgtctatccttagatacaagaaaatctgaaataatggttaatggtattaaacatggagtaaatttaataaatgatgtttcgggattcaattatgataagaatagtttactaaaattgaaaaaatataaaatatccaaggttcttcaccatatgcagggttcacctaataacatgcaaaaaaacccaaagtataaaaatgtactattagatatttatgattttttcgaaaaatccattaatcacaaatttaaagacaaaaaaattatattagacccaggtattggttttggtaaaactttgaaacataatttgactttaatttctaaaatatctttgtttcatagcttaggccttccaattttggtaggaacttctagaaaaaggtttattaaccaaatatctggaaagtacgacagcaacgatagaattggtggaacacttgcttccattatatttttgttgtcacaaggtgtgcaaatttttagagtgcataatgttaatgaggttaaacaaggtattcttgtatttgataaaattttgttaaactga

SEQ ID NO: 241020 - DNA, 767 bp, Unknown
  Bacterial polypeptide expressing nucleotide sequence isolated from the Sargasso Sea
gacaccagatagtttttctgatggaggagattataatacttttaagaaggctaaccaaagaattaaaaaacttatcaagtccggtgcagatataattgacataggaggcgagtctactagacctggttctaaagttattaatccaaaaaatgaacttgaaagagtaaaaaaagtaattaaaaaatttaaaaacagtttttctaaaacattgctttctgtagatacaaggaaaagccaggtaattgattatgctataaaagtaaaagcagacattataaacgatgtttcatgttttaaatttgatcaaaattctcataaatctgtaagaaataagaatatttggaaaattattcaccatatgcaaggaacaccacaaacaatgcaaaaaaatcctaaatatcatcatgtcttattagatatttatgatttttttgaaaaagaaatttcaaattttaaaaatgataaatataaaaggaagttaattttagatccaggtattggttttggaaaaaagttgaaacataatttgatgatattaaataagatttcaatatttcattctttaggatttcctatattaattggcacgtctagaaaaagatttattaatcaaatttctggaaaatatgatactaaagaaagaattggaggaaccttatcttcaataatgtattcactttcgcaaggagtaaaaatttttagagttcataatgttgaagaggttaagcagggtatattagtatttgaaaaattattaaataaatgaa

SEQ ID NO: 241021 - DNA, 787 bp, Unknown
  Bacterial polypeptide expressing nucleotide sequence isolated from the Sargasso Sea
tatgggtattttaaatgtaacaccagattcttttagtgatgctggtaaatattttaacctagataaagctgttgaatattcattagacctaattaatcaaggtgcagatataattgatataggcggtgagtcaactcgcccaggtgctgatgaaatatctattaatgatgaacttaaacgtgtaataccagtaattgaagggatacgctctaattcttctattccaatctcaattgatacttataaatctgaagttgcaaaagaagccttaaattcaggtgcaaacatggttaatgatataagtggactaaattttgattctaaaatgattgatgtagttaaagattataatattcctattgtcattatgcatattaaaggaaccccaaaaaatatgcagattaatccaacttatgataatataattaaagaaataattacctatttcaaaactcaaattaatctttgtctggattatggaatccctaaatctaatattattcttgacccgggcattggttttgggaagctgaagaatgataattttttattaattaaagaattaaaaacttttgcaaacttaggttatccaatcttaataggcccatcacgtaaatcatttattggtcttactttagacttgccagttgaagaaaggttagaaggtacagctgccgcaataactgcatcaataattaatggagctagaatagttagagtacatgatgtattacaaatgaagcgtgttcaaattatttctgataaaattaaaggagcgactgcttag

SEQ ID NO: 241022 - DNA, 628 bp, Unknown
  Bacterial polypeptide expressing nucleotide sequence isolated from the Sargasso Sea
atgggaatactaaatgtgacaccagactctttcagtgatggtggcagatttactagaactaatatcgcagtagaccacgcttttaaaatgatagacgaaggtgcgaatattattgacatcggaggtgagtctacaaggccaggctcggtacctgtttcagaagatgaagagtgcaaaagaattttaccggttattgaatcaatcaaaaaaataaacagtaaaattacaatatctatcgacacttataaagctagcgtggcaaaaaaagcaattgaagcaggtgcagacatagttaatgacataagtgggcttacgtttgatccaaatatgttacctttattatcaggaaaggacatattcgtaattataatgcatataaatggtaaaccaaaaacaatgcaaaaaaatcctgtatatgctaatttaattgaggatattaagagttttttaatccaccaatctaaggttgctgagaaaagtggaataaaaaaagaccatattatattagaccctggtattggttttggtaaaacatttgaccataattttacattattaagaaggttggatgagatttgtagtcttggatatccagtaatgattggacctagtcgtaaagcatttattg

SEQ ID NO: 241023 - DNA, 784 bp, Unknown
  Bacterial polypeptide expressing nucleotide sequence isolated from the Sargasso Sea
atgggaatattgaatactacccctgatagcttttcagatggaggaaaatatctaaataatcattatgctaaaaatcaaataaataaatttataaatgagggagcaagtataattgatgttggtggagagtctacaagaccaggttcagacgatataaactataaaatagaactcaagcgagttgagccaaaactaaaatatttaatgaaaaaaaaatgtttcatatctatcgacacaaggaaaagtgaaataatgaaaaaaagtattaaatataatgtaaatttgataaatgatgtttcaggtttgagctacgataataatactattaatatactaaaaaaattcaatatacctttcgtaattcatcatatgcaggggacaccaaaaacaatgcaagctaatccaaagtataaaaatatacttctggatgtttatgacttttttgaaaaaaaaataaattttattagatcaaataatattaaacacaacaatattattttagatccaggaattggttttggaaaaaatttgaaacataatattactttaattagaaatatttctattttccactctcttggttttcctgtaatgttaggaatatctagaaaaaaatttataaaagatttgtcgaaaaataatgacagtaaagaaagaataggtggtactctagcaaccagtatatattgtgcctcacaaggaattcaaattttaagggttcatgatgtgaatgaaatatatcagggattaaaagtctttgagaaattgaaatttttaagatgag

SEQ ID NO: 241024 - DNA, 616 bp, Unknown
  Bacterial polypeptide expressing nucleotide sequence isolated from the Sargasso Sea
atggagaaatattacacaagggcgtgtaatttttattttggtaaaacttctaaagaaaaagttaaaaaaaagatatcattaccagtaggtggaaatactcttatatcttttgatagtgtagagataattactcgaaattctaaaaaaaaaataaatataaaaaaaatcaaccaacttccattaaagataaaaaaaaaaatttcaattgatataaaaaatatttgtaaaaataaaaaaattcttggtttaaaatttaaaaatttacctttattaatgggaattttaaatataacaccagatagtttttctgatggcggaaagttcaaaaatttaaagtcggcaaaaaaacaaattaataaacttataaatgatggcgcgaacataattgatgttgggggagagtctactagaccaggatcaacaaaggtattgcaatcaattgaatggaatagaataaaaaagtctttaaaatatctaaaaactagaaatttttttacatctttagacactagaaaaaattatgtaatgaagaaagctttaaattttaatataaatctaattaatgatgtctcaggtttaacctatgacaaggatacaatcgactttttaaataaaa

SEQ ID NO: 241025 - DNA, 580 bp, Unknown
  Bacterial polypeptide expressing nucleotide sequence isolated from the Sargasso Sea
tatgactggtacacgtaaacttgttaagtattacgttagacccatattaaataatagtaaaaataaagactctctaaaacttggctcttctaaactttattttgatagaattgaattaattaaaagaaatggtaaaaaaatttcatcaaaatatctctgtttaaaagaggtcaatggactatcaagagacattagtaagacaatcaatattcaactcaaaaagataacaaaaaccagaaagaaaattaaaaatttaaattttaataaacccttaataatgggaatattaaacgtcaccccagatagtttttctgatggaggagaatttttatcagttaatgacgcatttgcacaatacaaaaagttagagaaagagggcgctgccatagtcgacgttggaggagagtctacgcgacctgggtcaaagacagttccagctaaaaaagaacttcaaagaataatgccagttattgatcaaattaaaagtaattcaaaaaattctttaatttcagttgatacaagaaaatctacagtaatgaaagctgtaatgaaattatatgttgatttttatcatgatgtc

SEQ ID NO: 241026 - DNA, 796 bp, Unknown
  Bacterial polypeptide expressing nucleotide sequence isolated from the Sargasso Sea
catgggaatcctaaatattacaccagactctttttcagatggtggagatttttttgaaaaaaatattgctatagaacgtgcactagaaatggtggaacaaggtgctgatataatagatataggaggagagtcaactagaccattttcagattcagtaagtttaaaggaagaaatttcgagagtaattcctgtaattgagggtatctgcaaagaatctgatgtgtgtatatcaatcgatacaacaaaatccaaagttgccagtgaagctttagaggcaggtgcttcagttataaatgatataagcgctatggaaattgactctttgatggttgacgttgctttaaaatttaattgtccgattgttttaatgcatatgaaaggaataccaaaaaatatgcaagataatcctcagtatcagtcacttatttctgatatcaaagaataccttcttgctcgaattgattttgttgtttctaaaggaattgatagaaataaaataataattgatccaggaattggttttggaaaaacagttgaaaataattttgaaataattaataatttagaccagtttgttaaaatgaattttcctgttttgcttggtgcatctagaaaatcttttattggagtatctttaaatcttccggaaaacgataggcttgaaggttcaatagctgcaaatattattggactacaaaaaggagctaaaatttttagagttcacgatgtagttgaaacaagtagagctatggtaattgcaaataaaatttttaattcaaacaatataattagctaa

SEQ ID NO: 241027 - DNA, 970 bp, Unknown
  Bacterial polypeptide expressing nucleotide sequence isolated from the Sargasso Sea
atgataaaatattacacaagagcgtgtaattttatatatgggcatcgcgcaaatcaattaataaaagaaaaacgggctctacctttatgcggaaataagtatattgctttttctagcatcgaagtatttgaaagaaaaaaaaataaaattaaaaaaaaatttttagaaattaaaaaaattaaaaaacttaataaaattgagaaaaataaagtttcaaaagatataaaaaagatttccgcaaaaagaaaaaactttcttaataatgtaaattttagcaatccatcaatcatgggaattctgaatcttacccctgatagtttttctgatggaggaaaatttaataaatttaataaatcaatagcacagatatcacgaatgattgagtctggggcaaatattatagatttaggtggagagtctacaagacctggttcaaaaacaatagacccaaagactgaatggagaagattagaaaaggtcttaaaaatattcaaaaaaaaatataagcaaacttgtctttcaattgatactagaaaatctataataatgattaaaagtataaaacttggtgcggatttaattaacgatgtttctggatttaattatgactccaactcacttttaaaagtaaacaataaaaatatttcaaaagttttgcatcacatgcaaggaacaccaaacaccatgcaaaataatcctaaatatcaaaacgttttacttgatatttatgattattttgaaaatggaattaacaccaagtttaaagataaaaaaattattttagaccccggtatcggttttggtaaaactttgaaacataatttgactttgatctcaaatatatccttgtttcatagtttaggcttacctattatgattggaacatcaagaaagagatttataggtcagatatcaggtaaaaatgacagtgtagagagaataggtggttcactagcttcaattttgtttt

SEQ ID NO: 241028 - DNA, 901 bp, Unknown
  Bacterial polypeptide expressing nucleotide sequence isolated from the Sargasso Sea
ttgctcgtgtccgattccgctgtttccccattcattcccgcgccactccagtgcggccgcttcgaactgacgttcgaacgcccgctcgtgatgggcattctcaacgccacgcctgattcgttctccgatggcggccgcttcctcgcgcgtgacgatgcgctgcgccaggccgagcggatgattgccgaaggcgtcgaccttctcgatatcggcggcgaatcgacgcgccccggcgcgccgcccgtgccgctcgacgaggagctcgcgcgcgtgattccgctcgtcgaagcgctgcggccgctgaacgtgccgctgtcgatcgatacctacaagccggccgtgatgcgtgcggcgctggccgcaggcgccgacctgatcaatgacatctgggggttccgccagccgggcgcgatcgacgcggtgcgcgacggcaactgcggattgtgtgcgatgcacatgcttggtgagccacagacgatgcaggtcggcgaacccgattacggcgacgtcgtgaccgacgtgcgcgattttctcgccgagcgcgcgcaggcgttgcgcgatgcgggggttgcgccggagcggatctgcgtcgatcccggtttcggattcggcaaggcggttgtcgacgacaactatgcgctgctggccgcgttgcccgacacggcacccgtgcggcccgacggcctcgcgtatccgatcctcgcgggcatgtcgcgcaagtcgatgctcggcgcggtgatcggcggcaagccgccgatggagcgcgtcgcggcgagcgtggcggccgcagtgtgcgcggtcgagcgcggggcggcgatcgtgcgcgtgcatgacgtcgcggcgacggtcgacgcgctgaaaatctggaatgccgtgcgcgaagccgcgcggcaacgataag

SEQ ID NO: 241029 - DNA, 962 bp, Unknown
  Bacterial polypeptide expressing nucleotide sequence isolated from the Sargasso Sea
gatcaaagaaatatcttttgaccatcttgagattattacaagaaaaaagataaaaagaatttctataaatcaagtcaataaattaccaaataatttaaaaaaaaaaataaatgctgatattaaaaaaataaattcaaaaaaaaaaaatttttctaattttaatttcaaaaaaattccaaatattttaggagtattaaatcttacacctgacagtttttcggatggaggaaaatttaataaaaaaaataagggtatcactcacgctattagtttgtacaaaagtggtgcatctataatagatgttggtggagaatctacaagaccaggatcaaagcctgtaaatgaaaagcaagaatggaatagaattaataagatattaaaattaattgtaaaaaaaataccaatatctttagacacaagaaagtctaggattatggaaaatggtatcaggatgggagttaaacttattaatgatgtttcagggttaagttatgaccccaaaacaataaatattttaaaaaagtataaaattccatttgtaatacagcattcagttgggataccagaaaatatgcaaaagaaggcgaaatataaaaatgaattattagatatatatgattattttgaagataagattaagttaataaggtccaagggcattaaacacaataatataattttagatcctggaattggatttggaaaaaatttgaaacataatatgaatcttataagaggtgtttctatttttcattcattaggttttcctatactagtagggaattcaagaaaaagatttattaaagatatatcaaaaaaaaatgatagcaaaacaaggatcggtggaactctggcttcttcaatttatttaatgatgcaaggaattcagattttaagaattcatgatgttaatgaagttaagcaaggtattaaagtttttaacgagatagtcaaaaattaat

SEQ ID NO: 241030 - DNA, 859 bp, Unknown
  Bacterial polypeptide expressing nucleotide sequence isolated from the Sargasso Sea
atgagaaagtattacactagggcgtgtaatttttatcatggaaaagccgcaacgagtctcattaaatcaaacaaagcttttcctttgaatggtaaaaaagatatagcctttgataaaattgaaatttttacaaggggaaaaaaaaagataacaagcaatgttattcatattaaagatataaaaaatatcaaaaaaaatattaaaaaggttatcaagaaagatttaaagaaaatcatctcaaaaagaaaaaatttcctaaataacataaatttttcagagacttctattatgggtattttaaatcttacccccgacagtttttctgatggaggcaaatttaatgcaaagaataaatcctttaaacgtatatctagtttgattcaatctggagcaaatattattgatatcggaggagagtcaacaagacctggatctaaaacgattgatccaaaaattgaatggaaaagggttaaacaagttttaacaaaatttaaaaaaaaatataaaaaaacttgcctatctcttgatacaagaaaatctgatttaatgattaaaggcatcaaagggggcgtagatttaataaatgatgtttcgggtttcgagttcgatccaaatacattaataattttaaaaaattataatatctctaaaattcttcaccacatgcaaggaacaccaaatactatgcaaaaaaatcccaaatatagaaatgttttattagatatttacgatttttttgagggaaaaattgaaaacaaattaaaagataaaaaaattattctagatcctggaattggttttggtaaaactttgaaacataatttgactttaatttctaaaaatatctttgtttcatagt

SEQ ID NO: 241031 - DNA, 1063 bp, Unknown
  Bacterial polypeptide expressing nucleotide sequence isolated from the Sargasso Sea
catgagaaaatattacaccagggcgtgtaatttttatcatggaagtgacgcaacaaaactaatccgattaaataaggcacttcctttaaatggtaaaaaaaatattgcctttgatagaattgaaatttattctagagaaaaaaatggtgtgaggattaatttaatccatataaataatataaacaaacttagtaaaaacatcaaaaaagttataaagagggatttaaagaatattgtttcaaaaagaaaaaattttcttaaaaatattaattttaataacccaactatcatgggcattctcaatctaactccagacagcttttctgacggtggaaaatttaatagcaagtctaaggctttaaaacaaatctataatatgattaatgatggagcaaaaattattgatgtaggaggagagtcaactcgacctggatcaaagactattgaccccaaaattgaatggagaagagttgaatatgtcattagtaattttaaaaaaaaatataaaaaaatttgtttatcaattgatacacgaaagtctgatgtgatgacaaaaagtataagacatggagtagatctaataaatgatgtatctggtttcaatcatgatccttatgcattatttaaactaaagaattataatatttctaaagttttgcaccatatgcagggcacgccaaatacaatgcaaaaaaatcctaaatataaaaatgttttattagacgtatatgatttttttgagagtagaatttcaaatatatctaatgataaaaaaattatattagatcctggaattggttttggtaaaaatttgaaacataatttgactttaatttctaagatatctttgtttcatagtcttggctttcctattttgattggaacatcaagaaaaagattcatcaatcaaatatctggagagtatgacagtaaagatagaacaggtggaacattagcatcagttctttacttgttgtcccaaggtgtacaaatttttagggtacacaacgtaagggaagtcaatcaaggaataatggtgtacaaaaaaattaatgaaaaataa

SEQ ID NO: 241032 - DNA, 988 bp, Unknown
  Bacterial polypeptide expressing nucleotide sequence isolated from the Sargasso Sea
aatgataaaatattacacacgagcgtgtaatttttattatggttcaacatcaaaagaaaaaataaaaaagaaattagcacttccgttaaatggaaataatttggtatcatttgatagtatagaaataataactagaaaatataaaaaaaaaattcatattagagatattaaaaaacaaagtaataaaatcaaagaaaagatcaaaaaagatattaagttaattatacaaaaaaaaaaatttaaaggtttaaattttttaaactttcctattcttatgggagtagttaatttgactccagatagtttctcagatggtggaaaatataataaaaataataaaggattcaatcattcaaagtatttaattaaaaaaggatctgaaattttagacattggcggagaatcaacaaggccaggagctaaagatattaataaaattgtagaatggaaaagaataaataaaactttaaaaaaaattaaaaagttaaaaaagtttgtttctttagatactagaaaaagctgggttatggagagagggattaaaaataatgtaaatttaataaatgatgtttcgggcctaagttatgacaataaaactatttttattttaaaaaaatataaaattccttttgtaattcatcatatgcaaggaaatccaaaaactatgcaaaaagatccaaaatataaaagtgttgttttagatatatatgatttttttgaaaaaaaattaaaaaaattgagatctgcaggaattaaacataacaatattattttagacccaggaattggttttggtaaaaacttgaaacataatattaccttgttaaataatatttctatttttcactcacttggatttcctataatgttaggtatttctagaaaaaaatttattaaagatttatctggaaataatgatagcaaagaaaggataggtggtacaatttcatctagtttatatgcaatgacacaaggggttcaaatatta

SEQ ID NO: 241033 - DNA, 662 bp, Unknown
  Bacterial polypeptide expressing nucleotide sequence isolated from the Sargasso Sea
aatggagaaatattacacaagagcgtgtaatttctattatggtcaaaattcagtagcaaaaattaaaacaaaaactgcccttcctctaaacggcaataaattcatttcatttgatagccttgagattataaacaaaagtggaagtaaaatttatcattttaaaagtataaaaaaactaaataaaaaacttaaaaaaaaaataaattttgatttaaaaaaaattacaaaaaaaaaatttttgaaaaaaataagttttttagaatccccaattttaatgggggtaataaatatgactcctgacagtttttctgatggaggaaagtataaaaaaaaattagcttttgaacatgcaaaatatttagttagtagaggttgcaaaataattgatattggaggagagtctacaaggccaggagctaaagatgttaaggcaaatatagaatggcaaagaatttcaggagcgttaaaaaaaataaaaaaattaaataaacctatttcgattgataccagaaaaggttttgtcatggagagggctattaaaaataaaattaatataataaatgatgtatctggattaagatatgatgcaaaaacaattcaaatcttaaaaaaaactaaaataccgttcgttattcatcatatgcaaggcactcccttaacta

SEQ ID NO: 241034 - DNA, 741 bp, Unknown
  Bacterial polypeptide expressing nucleotide sequence isolated from the Sargasso Sea
aatgcaaaaatattacacaagagcgtgtaatttttattataacacaacatcaagagaaaaagttaaaaaaaagatttcacttccaattggaaataacaaatccctttcgtttgatactattgaaattatttccaggactaataaaaaaaaaataaatattagaagtattaaaaatcttccatcaaaaattaaaaaaaaagttttaaatgatatcaataatatattaagagctaggaaaattcccaaattaaaatttaataacctgccaatacttatgggtatattaaatattacgccggatagtttttctgatggtggaaaatttaataaaaaaaattctgcaatagagcagattaataaactaataattgatggagcaaagattattgatgtaggtggtgagtctacaagaccaggctctaaagaaattcccaaaacacaggaatggttgagagtaaataaagtgatgagttatttaaaatctaaaaatttttttgtttctttggataccagaaaaagttttgtgatgaaaaaagcttcaaaatataaactagggctaattaatgacgtatctggcctaagctatgacaaggacacaattaattttttaaaaaaaactaaattaccatttgtcctacatcacatgaaaggtatcacagaaacaatgcaaaaaaatccaagttataataatgttttgttagatatatatgactatttcgaagacaagctgagattgattag

SEQ ID NO: 241035 - DNA, 1045 bp, Unknown
  Bacterial polypeptide expressing nucleotide sequence isolated from the Sargasso Sea
atgcaaaaatattacacaagagcgtgtaatttttattttaataaaatatctaaggaaaaaataaaaaaaaaattatcttttacaattggaggcaatagttcaatatcttttgactctatagagttaatttctcgaaaatcaaaaaaaataataaatatcaaaaaaattaataaacttccattaagaattaaaaaaaaaattttaattgatataaaaaatatttctaaaaataaaaaaattcctggtctcaaattaagtgaattgcctatattaatgggagttttaaacttaactccagatagtttttctgatggaggaaaatttaacaaaacaaatttagcaaaaaaacaaatcaataaactaattagggatggtgcaaatattattgatatcggaggcgaatcatctagaccaggctcaaaagagataagtcaatcaaaagaatggaataggataaaaaattctttaaaatatttaaaaaacaaaaatttttttatttccttagattctaaaaaaagttttataatgagaaaagcatttgattataaattagatttgattaatgatgtctctggtttaagttatgataaaaatacaataaattttttaaagagaactaaacttccatttgttttgcatcacatgaaaggaactcctgataatatgcaaatcaatccaagttataaaaatgttttgctagatatatatgacttttttgaagaaaaactaaaagaaattagaaaatatggaattaaacataataatataatattagacccagggattggatttggtaaaaatttgaaacataatattactcttattaacaatatttctatttttcattctctaggtttgccaataatgttgggcctatcaagaaaaagatttataaaagatatatctggattgaatgatagtaaaaaaagaatagggggcacaatttcatcttgtatttttagtattttgcaaggtgtacaaatattaagagtacatgatgttaatgaagtaaaacagggaattaaggtatttaaaaaattatata

SEQ ID NO: 241036 - DNA, 1057 bp, Unknown
  Bacterial polypeptide expressing nucleotide sequence isolated from the Sargasso Sea
aatgcttagatattacacaagagtgtgtaatttctattatggtaatcattcaaaaaaactagtcgaccaaaagaaagcaataccacttaatgggattaaggaaatttcatttgatcaaatagaaataataacaagaaattcaaaaaaaaaattttttattaatcagataaaatatttacctcaattaataaggaaaaaaattaattttgatttgaaaaaaattaaaccgaaaaaaaaaaatttctcaaatttagatttcaaaaaaataccaaatattctaggagtattaaacttaacacctgatagcttttcagatggtggaaaatttaattcaaaaaaaaaaggaattaatcacgcgatacatttagtaaacagtggtgcaaatttaattgatgttggtggtgagtcgactcgtccaggatcaaaaatgattagagaaaatttagagtggcaaagaattaataaaattttgaaattattacttaagaaaaaaataccaatatctttagataccagaaagtcaagaattatgagtaaaggaataaatttaggggtaaaattaattaatgatgtttcagggttagattttgactctgaaactttgaatgtattaaaaaaatacaaaattccatttgtaattcagcactcacaaggagttccagaaaatatgcaaaaaaatcccaaatataaaaatgaattattggacatatacgatttttttgaaaaaaaaataaaactattaagatcaaaaggtattaaacatgataaaattattctagaccccggtataggttttggaaaaaatttgaaacataatatgagtttgatacgtaatatttccattttccattctcttggttttccgatacttgtaggcaattcaagaaaaaaatttattaaggagttatctggaaaaaatgacagtgaattgagaaacggtggaacaatagcatcatcaatatatcttatgacgcaaggtgttcagattttaagaattcatgatgttaatgaaacaatacaaggcattaaaatctttaagaatataatagacaattaa

SEQ ID NO: 241037 - DNA, 1057 bp, Unknown
  Bacterial polypeptide expressing nucleotide sequence isolated from the Sargasso Sea
atgataaaatattacacaagagcgtgtaatttttattacggcagtatatcagaatataaagtaaaaaaaaaatttagccttccccttaatggaaataaattaatttcatttgatacaattgaattgataagtaggaaaacaaaaaaaaaaattaaaattaaaaatattaaaaaacttccagtaaaactaaaaaaaaaagtaattaatgatttaaataaaattacaaaagtaaaaagaatttcgaaaataaaatttaaatcttttccattattaatgggtatattaaatgctaccccagatagtttttctgatggaggaaaatatctaaaatcttctttagctttcaagcaaataaaaaaacttcacaaagatggtgcagaaataatagatataggtggagagtcaactcgaccaaattcagatacaatagatagcgtaacagagtggaatagaattgcatcaaaattaaagtatgcaaaaaaaaataatattattgtttcactagataccaggaaaagttttgtattaaaaaaatctttaccacttaagattaatctccttaatgacgtgtcaggattaaaacatgatagtaaaatgataaatatattaaagacatcaaaaattccatttgttttacatcatatgcaaggaacacctaaaacaatgcaaaaaaatccaaaatataaaaatgtaattctagatatatatgatttttttgaaaaaaaattagaatttttaaaaataaataaaattaaccataaaaatattattttagatccaggcattggttttggaaaaaatttgaaacataatattactatattaaatcaaatttctatttttcacagcttaggctttccagtaatgttaggcttatcaaaaaaaagatttataaaagaattatcaggaagtaatgatagtgaacaaagaataggtggaacaacatcttcatgtatatatgcaatattacaaggagtacaaattttaagagtacacgatgttaatgaaataaaacaagcaatgaaagtatttaataaacttatttttaataaatgag

SEQ ID NO: 241038 - DNA, 412 bp, Unknown
  Bacterial polypeptide expressing nucleotide sequence isolated from the Sargasso Sea
atgtcaaaatattacacaagagcgtgtaatttttattacggtaaatcatcattagaaatgcttaagaaaaaaaaagcactttcattacatggtaataaagaattatcctttgatacagttgaaattttattcagaaaaaaaaaaagaaaaataaacattaataatatcaactcgttaagttttggtctaaaaaaaaaaataaaagaagacttaaagaaaatcacaaaaaaaaaaacattttgtaagataagcttgaaagaacctttattgattggaatattaaatctcacacctgatagtttttcagatggaggacgatacaatcagattggctcagcattaaaaagagtgaattcactattaaaagctggttgtaaaattatagatgtaggaggagagtcaactcgaccgg

SEQ ID NO: 241039 - DNA, 958 bp, Unknown
  Bacterial polypeptide expressing nucleotide sequence isolated from the Sargasso Sea
taacaattctatatcttttgacagtatagaaataatttctagagcctccaaaaaaaaaataagtgtcaaaaatataaatacacttccattaaaaataaagagaaaagttttatttgatttaaaaaatatatgtaaaaataaaaaaattttaagtttaaaattaaaagatttacctatattaatgggagttctaaatttaaccccagatagtttttctgatggcgggaagtataataaaaatttattagcaaaaagacaaataaataaattaattaaggatggatcaaagataatagatgttggaggcgagtctactcggccaggctcaaatgaagtaatgaaattaaaagagtggaataggataaaaaactccatgaagtatttaaaaaaaaaaaaaatttttgtttctttagacacgagaaaaagttttgtgataaaaaatgctttgaattataaattagacttaatcaatgatgtttcaggtcttagtcatgataaagatacaataaagatattaaaaaaaaccaagaaaccttttgttttgcatcatatgaaaggaacgcccaaatctatgcaaattaatcctagttacaaaaatgttttactagatatttatgattatttcgaagaaaaattgaaacaaattagaaaaataggaattaaacataataatataatattagatccaggaattggatttggtaaaaatttgaaacataatattactcttattaacaatatttctatttttcattctttaggtttgccaataatgttagggctatctagaaaaagatttataaaagatatttctggagtaaatgacagcaaggagagaattggtggcacagtttcatcttgcatttatggtatgttacaaggagtacaaatattaagagtccatgatgttaatgaaataaatcaaggaattacaatttttaaaaaattatattattaa

SEQ ID NO: 241040 - DNA, 1048 bp, Unknown
  Bacterial polypeptide expressing nucleotide sequence isolated from the Sargasso Sea
aatgtctagatattacacaagggtgtgtaatttctactatggttctaaatcaaaagcattaattaaaaaagcaaagtctttgccattgaacggaaataatctaatttcttttgatgaaattgaaataatttcaagaaaatcgataaaaaaattatcaattaaaaagattaatgacttacctcatctattaaaaaaaattgtaaaaaaagatatcaatcttattacaaaaaaaaaaaaatttaaaaatttaaattttaaaactttacctaaaattatgggagttttaaacatgacaccagatagtttttctgatggaggaaaatataataaaaattatttagcaaaaaaacgattaaactatttatttaatagtggcgctaatatagttgatattggtggggagtctacaagacctggttcaaaacctataagttctaaaattgaatggaatagaataaaatatattttaaataattttaataaaaaaaattttttgtctcttgatacaagaaaatcacacataatggaaaaagggattaatttgggtgttaatttaatcaatgatgtttcaggtcttaattatgacaaaaattctataaaagttttaaaaaaatacaagataccctttgtattacagcattctctaggaaatccagatgtaatgcaaaatagtccaaaatataaaaatgttttattagatatttatgatttttttgaaaaaaaaatagattatttaagaatgaagggaattgaccataataatataatcctagatccaggtataggatttggaaaaaatttgaaacataatttgaaattaattaaaaatatatcgatttaccattccttgggattgcctatattgcttggaatatcaagaaagaagtttattagagaattatctggaaaaaatgatagttcatcaagagtaggaggaacaattagttcaagcatttatgctatgatgcaaggtgttcaattattaaggattcatgatgttaatgaaattcatcaaagtcttaaagtctttaaagagctaattaaataa

SEQ ID NO: 241041 - DNA, 937 bp, Unknown
  Bacterial polypeptide expressing nucleotide sequence isolated from the Sargasso Sea
atgaataattattacacaagagcgtgtaatttttattttggaaaaatttcaaaagaaaaagttaagcttaaaagttcactacctttaaatggagatccattaatatcatttgattgtattgaaattatttctagaaataaaaaaaaaaaaattaatattaaaaaaattaataaacttccaaaaattttaaaaaaaaaagtttacaatgatttaaaaaatattactaaaaaaaaaatttttttaaatttaaattttaaaaatagtcctattattatgggcgtcttgaatgtaaccccagatagtttttctgatggtgccaaatttaataaaaaaaaattagctaaagctcatataaaaaaacttttaaataatggagctgagataattgatataggtggagagtcaacaaaaccaggagcaaaagacatatcaacaaaagtagaatggaatagattgagatctataataaaatatctaagcaagcaaaattgttttgtttcgctggatactagaaaaagtttaataatgaaaaaaagtttgtcttataaaataaatctaattaatgatgtttcaggacttaattacgatgaaaatacaattaattttcttaaaaattccaaaactccatttgtcttacatcatatgaagggaaccccaaaaacaatgcaggtaagaccaaactataaaaatgttcttcttgatatatacgatttttttgaagaaaaactgcatttaataagaaaaatgggaataaaacacaataatataattttagatcctggaattggttttggaaaaaatttgaaacataatattactcttattagccaaatttctatttttcactcattaggttttccaataatgttaggtttgtctagaaaaaaatttattagagatatgtcgagatcaaatgatagtaaaacaagaattggtg

SEQ ID NO: 241042 - DNA, 1009 bp, Unknown
  Bacterial polypeptide expressing nucleotide sequence isolated from the Sargasso Sea
aatgccaagatattacacaagagcgtgtaatttctacttcggtaaacaatcaaaaattttagtaaataaaaaacaatctatccccttacatcagattaaagaaatatcttttgaccatgttgagataattacaagaaaaaaaattagaaaaatttcaataaataaaattagaaatttaccaaaaaaactaaaaacaaaaatcaatttagatttaaaaaaaattaggtcaaaaaaaacaaatttttcaaatttaaattttaaaaaaattccaaatatattgggtgttttgaacctaactcctgatagtttttccgacggaggaaaatttaacaaaaaaaataaaggcgtcagtcatgcttttaatttatataagactggtgcatcacttgtagatgttggtggagagtctacaagaccaggatcgaaggaagtaaatgaaaatcgagaatggtatagaattaataagacattaaaattaattgtaaaaaaaataccaatatctttagacactagaaaatctgcaattatggaaaatggtattagaatgggcgttaaacttattaatgatgtctcgggattaagccatgatcctaaaacaataaatgttttaaaaaagtataaaattccatttgtaatacagcattcagttgggacaccagaaaatatgcaaaagaatccaatatataaaaacgaattattagatatatatgattattttgaagataagattaagttaataaggtctaaaggtattaaacacaataatataattttagatcctggaattggatttggaaaaaatttgaaacataatatgaatcttataagaggtatttctatttttcattcattaggttttcctatactagtaggaaattcaagaaaaagatttattaaagatatatcaaaaaaaaatgatagcgaaacaaggatcggtggaactatggcttcttcaatttatttaatgatgcaaggaattcagattttaagaattcatgatgttaatgaa

SEQ ID NO: 241043 - DNA, 1051 bp, Unknown
  Bacterial polypeptide expressing nucleotide sequence isolated from the Sargasso Sea
atgccaaaatattacacaagagcgtgtaatttttattttggccaaatatctaaagaaaaagtaaaaaaaaaaaactcgcttccattaaatggagacagttcaatctcgtttgacatgattgaacttataactagaaaaagttcaagaaaactaagaatttctgaaattaaaaagattaaaggcaagattaagaataagattttatctgatttaaagaaaatttctaagaaaaaaaaaatcaaaaatcttaattttaaaaaattaccaattttgatgggagttctgaatttaactccagatagtttttctgatggaggaaaatatattaaaaataaaaacgggttattacatgcaaaaaaattaattaatgatggatgtagaattttagatgttggtggagagtctaccagaccaggatctaatgaaatttctttgagtgaagaatggaaaagattacatccaacactatcaaaaatcaaaaaatttaaaaaatttatttctttggatacaagaaaaagttatataatggaaaagggtataaaaaataaaattaatttaattaacgatatttctggtcttgaacatgatgcaaaaactctggaactattaaagaaaacaaaaataccttttgtaattcatcatatacagggaaacccagcaactatgcaaaaaaatccaaaatataaaaatgtgatcttagatatttacgatttttttgagaataaaataaaatatttaaggtcgatgggtataaagcataataatatcattttagacccaggtattggttttggtaaaaacttgaaacataatattaccttattgagaaagatttctattttccactcaattggttttcctgtaatgttggggacttcaagaaaaagattcataaaagatttatctggagtaaatgacagtaaagaaaggctaggtggtacaatagcatcgaatttatttgtaattatgcaaggtgttcaaattttaagagtgcatgacgttaatgaggtaaatcaaagtataaaggtctttaaatcactcaaattttaaa

SEQ ID NO: 241044 - DNA, 1063 bp, Unknown
  Bacterial polypeptide expressing nucleotide sequence isolated from the Sargasso Sea
aatgagaaactattacaccagggcgtgtaatttttatcatggaaaagtcgcgagaaggctggtcaaattaaacaaagcttttccactaaatggtaaaaaaaatattgcctttgatcaattagaaattttttcaagggaaaaaagaaaagttaagaccagattcattcatataaaagaaattaatacacttaataaaaatataaaaaaaattgttaaatacgatttaaaaaaaattatatcaaaacgaagaaacttccttaaaaatataaattttaaccatactacagtaatgggtatattaaatcttactccagatagtttttctgatgggggaaaatttaataacaataaaaaagcccttagacaaatttcttatatgattgagtccggggcaaaaattattgacataggaggggagtcaacacgcccagggtccaaaacaattgatccaagcaaagaatggaaaagagttaaatatattgtagaaaattttaaaaaaaaatataaaaaagtttgcctatcaattgatactaggaaatctgacataatgattaaaagtataaaaaatggagcagatattataaatgatgtatcaggctttaattatgatccatatgcaattttaaaactaaaaaattgtaatattccaaaagttttacatcatatgcaaggtactcctaatactatgcaaaaaaacccaagataccaaaatgtattattagatatttatgattttttcgaaaaaaaaatttcaaatataaaaaataataaaaaaattattttagaccctggaattggttttggtaaaactttgaaacataatttgactttaatttccaaaatatcattgtttcatagtcttggcttacctattttgattgggacttcaagaaaaagatttattaatcaaatatctggtgagtatgataccgttgatagaacagggggaactttagcttcgatactttttttattatcacaaggagtgcaaatttttagagtacataatgttaaagaaataaaacagggaattttagtatttgaaaaaataaatgaaaaataa

SEQ ID NO: 241045 - DNA, 1063 bp, Unknown
  Bacterial polypeptide expressing nucleotide sequence isolated from the Sargasso Sea
atgagaaagtattacaccagggcgtgtaatttttatcatggaagagccgcgagaagtctcattaaaacaaacaaagcttttcctctaaatggtaaaaaaaatattgcctttgacaaactagaaattttttcaagagaaaagggcaaagttaaaaccagattaattaatatcaaagatattcatacactcaataaaaatataaaaaaaatcattaaacatgatttaacaaaaattgtatcaagaagaaaaaattttcttaaaaacgtaaattttaatcatacgacaataatgggtgtattaaatcttaccccagacagtttttctgatggaggaaaatttaataataataataaagctctcaagcaaatttctaatatgatcgagtcaggagcaaaaattattgatgtaggaggagagtcaactcgaccaggatcaaaaacaattaatccaagtattgaatggaaaagggttaaatatattgtagaaaattttaaaaaaaaatataaaaagatttgcttatcaattgataccaggaaatctgatataatgattaaaagtataaaaaatggagcagaccttataaacgatgtatcgggcttcagttacgatccatatacaattctaaaattaaaaaattatgatattcccaaagttttgcatcatatgcagggtactccaaattctatgcaaaaaaatcctagataccaagatgtgttattagatatttatgatttttttgaaaaggaaattacaaatatatcaaacaataaaaaaataattttagatccaggaattggttttggtaaaactttgaaacataatttgactttaatttccaaaatatctttgtttcatagtcttggctttcctattttgataggtacttctagaaaaagatttatcaatcaaatatctggagagtacgacactgatgatagaacaggaggaactttagcttcagtcctttttttattatctcagggagtacaaatttttagaatacataatgtaaaagagataaagcagggaattttagtatttgaaaaaataaatgaaaaataaa

SEQ ID NO: 241046 - DNA, 1054 bp, Unknown
  Bacterial polypeptide expressing nucleotide sequence isolated from the Sargasso Sea
atgcaaagatattacacaagagcgtgtaatttctatattggaattcagtcaaaaattttagttaataaaaaaaaagctataccattacatcaaattaaagaaatatcttttgatcatattgaaataataactagaaaatcaaaaaaaaaaatttctataaatcaaatcaaatatttaccaaatgatttgaagaaaaaaatttacctagatattaaaaaaattaaatctaaaaaaaaaaatttttctaatttagaatttaaaaaaattccaaatatattaggtgttttaaatcttactcctgacagtttttcagatggaggaaagtttaatacaaaaaaaaaaggaataaatcatgctattaaattatataaagaaggtgcagatttaattgatgttggaggtgagtcaacaagaccaggttcaaaggaagtaaataaagaagatgaatggaatagaattaatgatattttaaaatctatcgtaaaaaaaattccaatttctttagatactagaaaatctgaaataatgaaaaatggaattaaagtaggagtaaaactaattaatgatgtttcaggtttaagttttgatcccgaaacaataaacatattaaaaaaatataaaattccttttgtcattcagcacacacttggaacaccagaaaatatgcaaaaaaatccaaaatataagaatgagttattggatatttatgatttttttgaggaaaaaataaaacttctaagatctaaaggtattaaacataataatataattttagatcctggtatcggatttggaaaaaaactgaaacataatatgaatttaattagaggtgtttctatttttcattcattgggatttcctatacttgtaggaaattctagaaaaagatttattaaagatatttctaaaaaaaatgatagctatactaggattggaggaacaatatcgtcttcattatatttaatgatgcaaggagttcagattttaagaattcatgatgttaatgaagttgtgcaagcaattaaagtttttaaagaggtaataaataaataat

SEQ ID NO: 241047 - DNA, 919 bp, Unknown
  Bacterial polypeptide expressing nucleotide sequence isolated from the Sargasso Sea
atgccaagatattacacaagagcgtgtaatttctacttcggcaaacaatcaaaaattttagtaaagaaaaaacaatctatccctttacatcagattaaagaaatatcttttgaccatgttgagataattacaagaaaaaaaattagaaaaatttcaataaataaaattagaaatttaccaaaaaaactaaaaacaaaaataaattcagatttaaaaaaaattaggtcaaaaaaatcaaatttttcaaatttaaattttaaaaaaattccaaatatattgggtgttttaaatctaactcctgatagtttttccgatggaggaaaatttaacaaaaaaaataaaggcgtcagtcatgctatcaatttatataaaactggtgcttcgttagtagatgttggtggagagtctacaagaccaggatcaaaggaagtaaataaaaatcgagaatggtatagaattaataagacattaaaattaattgtaaaaaaaataccaatatctttagacacaagaaaatctgcaattatggaaaatggtattagaatgggggttaaacttattaatgatgtttcgggattaagccatgatcctaaaacaataaatgttttaaaaaagtataaaattccatttgtaatacagcattcagttgggacaccagaaaatatgcaaaagaatccaatatataaaaatgaattattagatatatatgattattttgaagataagattaagttaataaggtctaaaggtattaaacacaataatataattttagatcctggaattggatttggaaaaaatttgaaacataatatgaatcttataagaggtgtttctatttttcattcattaggttttcctatactagttgggaattcaagaaaaagatttattaaagatatatcaaaaaaaaaatgat

SEQ ID NO: 241048 - DNA, 1051 bp, Unknown
  Bacterial polypeptide expressing nucleotide sequence isolated from the Sargasso Sea
atggagaaatattacactagagcgtgtaatttttattatggggaacagtcagtaaaaaaagtcagaaacaaaactgctttaccattaaataataataaatttatatcatttgatacagttgaggtaataactcgaaattataaaaaaaaaatttattttaaagatattaatttacaaagtaaaaatttaaaaaaaaaaattaaaagtgatttaaaattaattataaaaaaaaaatattttaaaaaattaaatttagaaaatcctccattattaatgggtattattaatttaaccccagatagtttttctgatggaggtaagtataataaaaaaaataagggatttatttatgcaaaaaacttaataaaaaatggttgcagtattttagacataggtggtgagtcttcaagaccaggatcttctgaagttctaaaaaatatagaatggaaaagaattcacaaaacaataaaaaaaataaaaaaattaaacagttttgtttcattggatacaaggaaaagctggataatggaaaaagcaatcgattataaagttgatttaattaatgatgtatctggtctaaactatgactctaatacaataaatattctcaaaaaaacaaatattccttttataataaatcattcaaaaggaactcccaaaaatatgcaaaagaatccaaaatataataatgttattttagatatttatgatttttttgagaaaaaaattaatctaattagatctgaaggaattaaacataataatattattttagatccaggaattggatttggaaaaaacttgaaacataatattaccttaataaataatatttctatttttcactcacttggatttcctataatgttaggtgcttctagaaaaaaattcattaaagatttatctggaaatagtgacagtaaagaaaggctaggtgggacagtagcatcaaatttatacgcaatgatgcaaggagttcaaatattaagagtgcatgatgtcaatgaagttaatcaaagtattaaagtttttaaatcattaaattattaaa

SEQ ID NO: 241049 - DNA, 1051 bp, Unknown
  Bacterial polypeptide expressing nucleotide sequence isolated from the Sargasso Sea
atgttaaaatattacactagagcgtgtaatttctattatggtgaccattcaactctgatggtcaataaaaaacttgctctcccacttaatggaaatgataaaatttcttttgatacaatagaacttataacaagaaaaaagaaaaaaaaaatccacatttcaaaattaaattttttaagtaaaattttaaaaaaaaaagtaaaattagatataaaaaatataactaaaaaaaaaaacttttctaaactaaagtttaagtctttacctctaataatgggagttgttaatttaactcctgatagtttttcagatggtggaaaatataataatcataaagatgctttaaaaagaataaaacattttattgaaaaaggatcatcaattattgatatagggggagagtccacaagaccaggatcaaatgatgtaaatgaaaaaattgagtggaaaaggattaaggaagtattaaaaaaaacaaaaaaattaaaaaatgtaatatctattgatactcgaaaaagtgccataatggaaaaaagtttaaaatatggtgcccatatcattaatgatgtttccggactcaattacgatcctaatacactaaaaatcctaagaaataaaaaaaccccctttataattcatcacatgcaaggtaatccaaaaacaatgcaaattaaaccttcgtataaaaacgtcttgctagatatttatgacttctttcaaaataaaattttagaactagaggccaatggtataaatcataagaacattattttggatccaggaattggttttggaaaaagattgaaacataatattaccttattaagaaacatttctatttttcattcacttggatttcctataatgttaggcacttctagaaaaagatttattaaagacatttctgggataaacgatagtaaggaaagactagggggaactatatcatctagtttgtgtgctatgatgcagggcattcagattttaagagttcacgatgtaaatgaagttaatcaaagtatcaaagtttttaaatcactaaaattttaaa

SEQ ID NO: 241050 - DNA, 1054 bp, Unknown
  Bacterial polypeptide expressing nucleotide sequence isolated from the Sargasso Sea
atgataaaatattacacacgagcgtgtaatttttattatggttcaatatcaaaagaaaagataaaaaaaaaactatctcttccattaaatggcaatagttttgtatcttttgataacattgaaattataaccagaaaatataaaagaaaaatccatatcaaagaaataaaaaatcagagcaataaaattaaaaaaaaaataaaaaaagatatcaaattaattacacagaaaaaaaaatttagtaagttaaattttttaaattttccaattttaatgggaataataaatttaacacccgatagtttctcagacggaggaaaatataataagaaaaattcggggctcaatcacgcaaaatatttaataaaaaaaggatctgaaattttagatatcggtggagaatcaacaagacctggagctaaggatattaacaaaaaaatagaatggaaaagaataaataaaactttaaaaaaaattaaaaaacttaatacatttatttctttagatactagaaaaagttggattatggaaagaggaataaaaaataaagtaaatttaataaatgacgtttcaggtttcaattatgatagtaaaactatttttattttaaaaaaatacaaaattccttttgtaattcatcatatgcagggcacaccaaaaattatgcaaaaaaaaccgagttataaaaatattcttttggatatttatgacttttttgaaaaaaaaataaaaaaaatgagacatataggaattaagcataataatattattttagatccaggtattggttttggtaaaaacttgaaacataatattaccttgttaaataatatttctatttttcactcacttggatttcctataatgttgggtacttctagaaaaaaatttataaaagacttatctagaaataatgatagtaaagagaggataggtggtacaatttcatctagtttatatgcaatgatgcaaggagttcaaatattaagggttcatgatgtaaatgaagtgaaacaaagtataaaagtttttaaatcattaaattttaaataat

SEQ ID NO: 241051 - DNA, 1054 bp, Unknown
  Bacterial polypeptide expressing nucleotide sequence isolated from the Sargasso Sea
atgtctagatattacactagagtgtgtaatttctattatggtacaaaatctaaattattagttaagaaaaaaaagactttaccacttcataataatcctgaaatttcttttgataaaatagaaataataacaagaaattcaaaaaaattaatttctctaaatgaggtgaagaaattacatgtaaatttaaagacaaaagtaaaaaaagatctaagattaattacaaaaaaaaaaagaaatattaaaaatttaaattttcaaaatattcctcaaataatgggtattttaaatattactccagacagtttctcagatggtggaaaattttttaattatgcatcagccaaaaaacagttaaattttcttttaaattctggcgcaaaccttgttgatattggagcagagtccactaaacctggatctaaagctattaaatcaaaaatagaatggaatagactcaaaaatattttaaaattaattgataaaaaaaattttatatctctagatactagaaaatcagaaatcatggaaaagggaatcaaactaggagtaaaattaatcaatgacgtttctggtcttaattttgataaaaactcaatcaagattttaaaaaagtataatatacctttcgtactccaacactcacttggtaatcctgacgtaatgcaaaaaaatccaaaatataaaaacgtattattagatatttacgatttttttgagaaaaaactaaataatttacgccaaaatggaatttatcataataatataatcttagaccctggtataggttttggaaaaaatttgaaacataatatgacgataattaaaaatatatcaatttaccattctttgggtttgcctatactgcttggtatttctagaaaaagatttataaaagatttatctggaaataatgatagctctttaagaattggaggaacaataagtagcagtatttttgcaatgttacagggtgtacaaatgttgagagttcatgatgtcaacgaagtaaatcaagctataaaagttttcaaagcactaataaataattaat

SEQ ID NO: 241052 - DNA, 902 bp, Unknown
  Bacterial polypeptide expressing nucleotide sequence isolated from the Sargasso Sea
aataaatattagaagtattaaaaatcttccttcaaaaattaaaaaaaaagttttaattgatataaataacatatcaaaacctaaaaaaattcctaaattaaaatttgataatttaccaatatttatgggtgttttaaatattactccagatagcttttctgatggtggaaaatttaatgagaaaagttctgcaaaaaaacatattaataaattaatagtcgatggagcaaagataattgatgtaggtggtgagtctacaagaccaggctctaaagaaattctacaaacaaaggagtggctgagattgaataaagttatgagttatttaaaatctaaaaatttttttgtttctttagatactagaaaaagttttgtgatgaaaaaagctttaaaatataaactagacctaattaatgatgtatctggacttagttatgacaaggagacaattaattttttaaaaaaaacaaaattagcattcgttctacatcatatgaaaggtaacacagaaacaatgcaaaaaaatccaaggtataataatgttttgttagatatatatgattatttcgaaaataagctgagattaattagaaaaagtggaattaaacacaatcacattatcttagatccaggaataggatttggtaaaaatatgaaacataatattaccctaatcaataatgtttctatttttcattctttaggattgccagtaatgttgggaatttccagaaagagacttatacaagatatatctggaaataatgatagtaaagaaagaataggtggaactgtgtctttaagtatctttagcatgttgcaaggagtacaaattcttaggattcatgatgttaatgaagtgaatcaaggaattaaagtttttaaaaaaactaaattttaat

SEQ ID NO: 241053 - DNA, 1051 bp, Unknown
  Bacterial polypeptide expressing nucleotide sequence isolated from the Sargasso Sea
atgaataaatattacactagagcgtgtaatttttattacggaacaacatcaaaaacatacattaaaaaaaaaaaatctattcctctcaatggttgcaatcatatttcttttgataaattagaaatcatagatagaaaaaaaaacaaaataatcaatattaaagatattagcaaactttcaactaaattaaaaaaaaaagttaatagagatctaaaaaatataaaaaaaaagaaaatttttaaacaaataaatttatcagataaccctattttgatgggcatagttaatttaactccagatagtttctcagatgggggcaaatataataaaaaaaatttagcgttaaaacatataaataatttattatcaaatggcgcaaagataatagatgttggtggagagtctacaagaccaggtgcaaaagatattaatcctagaaaagaatgggatagaataaagtttatcttaaaaattttaaaaaataaaaagagttttgtttcattagatactagaaaaagttttgttatgaagaatgcctctaaaataaaagtagatcttataaatgatgtttctggactaagttatgatcctgagactataaattatttaaaaaaaacaaaaaaaccttttgtcattcatcacatgaaaggaacaccaaaaaatatgcaattaaaaccatcttacaataatgtattgcttgatatttatgatttctttgaaaataaattaaaatatttaagaaacgaaggtattaagcataataatattatattagatccaggtataggatttggaaaaaatttgaaacataatattactcttttaaagaatatttctatttttcattcactaggccttcctgtaatgttgggcttgtctagaaaaaggtttattaaggatatttcaagagaaaatgatactaaagaaaggattggtggaactgtatcttcatgcattcgagcataccttcaaggagttcaaattcttagggttcatgatgttaaagaaattaaccaagcatttaaagtatttaaagaattacaaaattaaa

SEQ ID NO: 241054 - DNA, 1054 bp, Unknown
  Bacterial polypeptide expressing nucleotide sequence isolated from the Sargasso Sea
atgaaaagatattacacaagagtgtgtaatttctattatggtgctaagtctaaaaatcttgtagagaaaaataaatcactaccacttcatggtattaaagaaatttcttttgatcaaattgaaataattacaagaaaatctaaaaaaatagtatttatcaatcaaattaataaattatcaaactcattaaaaaaaaaaattaatactgatttaaagaatattacttcgaaaaaaaaaaattttagtaatttaaaatttaacttaattcctaatttgctgggagttttaaatttgacacctgacagtttttcagatggaggaaaatttaataaaaaagataaagcagttaaacaagctataaatttgtttaactcaggggcaaacttaattgatattgggggagagtctaccagaccaggatctaaacctataaatgaaaagttagaatggagtagaattaataaaattttaaaactattgagtaaaaaaataccaatatctttggataccagaaaatcaaatataatgaaaaaaggaattcaacttggagtgaagttaatcaatgatgtatcaggtttggaatatgacccagaaaccacaaatgtattaaagcttaataatactccatttgtattgcagcattcccaaggccgtcctgaggatatgcaaaataatccttcttataaaaatgaattgttggatatttatgatttttttgaaaaaaaactgaattttttaagatcaattggaataaatcacaataaaataatcattgacccaggaataggttttggaaaaaatttgaaacataatatgaatttaattaagaacatttctatttttcattcacttggttttcctatacttgtgggaaactcaagaaaaaggtttataaaagaaatatctaaaaataatgatagtaaattaagaattggaggcacagtagcttcttcaatttatatgatgacccaaggtgttcaaattttaagagtccacgatgttaatgaaattatgcagggtataaaagtttataaagagatatttaaaaattaat

SEQ ID NO: 241055 - DNA, 799 bp, Unknown
  Bacterial polypeptide expressing nucleotide sequence isolated from the Sargasso Sea
tctgtcacagcctcaggtaatgggcattttaaatgttactcctgattcattttctgacggcggcaagcacacaaatgtgtctcaagcccttgaccatgcgcttcgcatgattgaagaaggggcaacttttattgatataggtggtgaatcgacaaggccaggcgcgcccgacgtatcgctgcaggaagagcttgatcgtacaatacccattattgaagccgtagctaaaaataccccatgtgttatttctattgataccagcaaggccgacgttatgcgggaagcggtgaaagctggcgcggggctaatcaacgatgtacgcgcgttacaagagcctggtgcattgcaagtagcagctgaagcacaagtacctgtttgtttaatgcatatgcaggggcaacccagaaccatgcagcaaagccctgagtatgatgatgtagtgaatgatgtgggtcagtttctactcgcgcgtaccaaagtgtgtgaagaagcgggcattgctaaagacaagattttgttcgaccctggctacggtttcggaaagtcactggaacacaattatacgctggtgaaacacttgccatcgcttatgaagctgggttacccagtgttagtaggcatgtctcgcaagtcgatgattggcaatttgctaaatagaaaagtggatgagcgcttggcgggaagcataagcctcgctacaattgtcgcccaaatgggcgcacagataattcgcgttcacgacgtgaaagaaacagctgatgctgtcaatatcgtgaaaatgctgaattcagtaaaataa

SEQ ID NO: 241056 - DNA, 871 bp, Unknown
  Bacterial polypeptide expressing nucleotide sequence isolated from the Sargasso Sea
ttggatcaagctttaactgtaaaatcattttatgactggtgtcaagatcctaatcgagagacactagttatgggaattttaaatgttactcctgattcatttagcgatggaggtctattttataatactgatgaagcagttagccatgcttttcagttgattgaaaatggtatagatattatagatataggtggtgaatcgactaggccaggtgctaagaagatttctgaagaagaggaaattcaaagaataataccagtagtcaaacagattagagagttatctccagaaattattatatcaatagatacaacaaagtccatggttgcccaaaaggcaatacaatctggtgctaacataatcaatgatattagcggattttcttttgataatagaatgattgatgttgttcgagaatcaaaagtccctgtgattattatgcatatgcaaggagacccgtcaaatatgcagaataaaccattttacgatgaccttataatagatatatcttctttttttaagagcaagattaaacttgctacagatgcagggattaaaaaaaaacagattattttagatcctgggattggttttggtaaaacagttggcgacaatttccaattgatcaatcaattgaatgaattttgcaaattaggattccctgttatgattggaccaagcagaaaatcatttataggaacaacccttaatctaccagttgatgataggttagaaggtacagctgccgctgtagcagtgggagttatgaatggagctaggattgttcgcgtccacgatgtgaaagaaataaaaagggtagtaacaatagtgaaaagattaggactgcagcatgacacttttcaagctaggc

SEQ ID NO: 241057 - DNA, 847 bp, Unknown
  Bacterial polypeptide expressing nucleotide sequence isolated from the Sargasso Sea
atgcagctaaccagcaaggggctcagcctctccctcgaacgtccccacgtgatggggatcctcaatgtgacaccggactccttctccgacggtggtcatttcaatcagctggagcgggcgatgacccatgcgcgccagatggtggcggagggggcgaccctcatcgatatcggtggcgagtcgacccgtcccggagcgcccgatgtgagcgagcaggaggagctggacagagtcattcccgtggtggagcgcatggtcgccgagctggaggtgatgatttccctggatacctccaaggcggcggtgatgcgggaaggctgcgcggcgggtgcccatcttatcaacgacgtacgagccctgctcgagccgggggctctggccgcggccgccgttgccgacgttccggtgtgcctgatgcacatgcagggacagcccagaaccatgcaggcagagccgcattatgacgatctgctgggggaggtgagggctttcttcgacgagcggatcgccgcctgcctggcagcgggaatacggagggagcagttgttgctggaccccggttacggttttggcaagacgctcgcacacaactatcagctgcttgcccagcaggagaagttgctcgattaccagcttccgctcttggtcggtatgtcgcgaaagtctatgataggcaacctgcttggctgcccggttgatgaacggctggccggcagtctggcctgtgcgctcatcgggatgcagcgcggtgcccggatcattcgggtgcacgatgtgcgagcgaccatggatgccttgcgtaccggctggatggtcatgacgggacaagatttcatatccaaataaa

SEQ ID NO: 241058 - DNA, 657 bp, Unknown
  Bacterial polypeptide expressing nucleotide sequence isolated from the Sargasso Sea
tatgtcgggcgacaacaaatggttcaccgaaatttttgcggccagtggtagtgcttttggtttggccatcaccaaaaaactggatgaggtgcagtcgccttttcaacatatcgaaatgtttgagaccacgcattttggtaatctgatggtgattgatggcgtgattatgctgagcagccgtgacaatttcctttatcacgaaatgttaagccacccggttttatttactcacccggcgccacaacaagtggtgattataggtggtggtgactgtggtactttgcgcgaagtattaaaacaccctgatatcgaacaagtcacccaaattgatatcgacgaacaagtcacccgcatggcggaaaaatacttcccagagctttgtgcatccaacaacgatccacgcgcgaccttaaaatttgccgacggtattcagtttatgcgtgacgctgaaccagaatctttagacgttgtgatcgtcgactccacagaccctataggcccgggagaaggattatttaacagagcattttatgaaagctgtttaaaagcactgcgcccaggcggtattttagtgcaacaaagtgagtcgcctcttattcatatgccgttactcaaagccatgcgtgatgccatgacagacgctggttttgctgattt

SEQ ID NO: 241059 - DNA, 709 bp, Unknown
  Bacterial polypeptide expressing nucleotide sequence isolated from the Sargasso Sea
tatgcttattctagatggagcagttcagacgacagaaagagatgaatttatatatcacgaaatgctcgttcatgttccgatgctctcgcatcctgatccaagaaaaattctggtaattggaggaggcgatggtggttgcgtgagggaaattctaaaacataagtctgtagaaaaattaacaatggtcgaaattgacaaactagttgtcgattgttctaaaaaatatttgccgggcatttcttctaaactaaatcatcccaaattagatttatgcatagaagatgctgttgaatttgtgaaaggtaggtcttcgaattttgatgtaataatcgtagactcgacagatccggttggttttgcgagtcctctcacgacggaatctttttttcgatctgcaaaaaaaatattaaaagaaaatggtatatatgccgctcaaacacaaggacctttttttgaatcaaaatctatgagcgtaatatcaaaaaggttaaagaaaatttttccactgacctctttttatttggcaaatacgccaacttatcctggaggaatatggtcttttgctctttcttataaaaattcaaaaaatgactttaaaattactcctcgaattttaaagcgtaaagatctgaaatattattctcaagaaattcataatgcttcttttgcgctcccaccttatgtgaaaaaaattttgggtgaaaaatga

SEQ ID NO: 241060 - DNA, 413 bp, Unknown
  Bacterial polypeptide expressing nucleotide sequence isolated from the Sargasso Sea
gggctacgatgtgattattgtggactcttcggatcccgtaggaccggctgaaactttatttgcgccggccttctacgactcgatgaaggccgcattggcaccgaacggcatcgtctgcacgcagggcgagtgcttgtggctgcatttgcctcttatagcgaaagtagtgaccgcgtgccgcgcgacgtttccgtccgtcgagtatgcctacaccacggtgccgacgtatccttccggccagatcggctttgtgctctgttcgttggacgacggcgagcgggcgctgatccggccgacgcgggcacctacaacagcactccagaaattattgaggtactacaaccccgacgtccacgcggcgtccttcattctgccggagttcgcggcgcgcgagctgcggaagtcgcggtgag

SEQ ID NO: 241061 - DNA, 670 bp, Unknown
  Bacterial polypeptide expressing nucleotide sequence isolated from the Sargasso Sea
tatggggctccagctctcggctgattctgaatctgaattactcttggatcaaaagtctgatttccagcacgtccaggttttcgaatcccgaaactggggcaaggtccttctcctcgatggcgtcatccaggtcaccgagcgcgacgagtgcagttaccaggagatgctgacgcacatcccgatgttctcggccgactcggccccgaggagagtgctgattgtgggcgggggcgatggtggcgtgctgagagaggtttgcagacataggtctgtggaaagggtggtgcagtgcgagattgatgggttggtgattgcagcagctaagaagtggtttccgaagctgagctgcaaatacccgaggaaaatagaaggggagaaggagctggcgcaatgtaaagtactaaatttatcggaggagagtcagactgagaaaatcaatgactctgagactgtccctgacgatcctcgtgtcgagatccgcgttgcggacgccttccatttcatcaaaaccgcggctgacaactctttcgacgtggttatcgtcgactcctccgaccctgttgggcccgccgaaaagctgttcaccgaggagttctatcaagacctcgctcgcgtcgtcgcgccggggggcgttgtcgggacacagggcgagtctctgtggctgcatcaa

SEQ ID NO: 241062 - DNA, 796 bp, Unknown
  Bacterial polypeptide expressing nucleotide sequence isolated from the Sargasso Sea
gtatcacgaaaagaccgatcaccaggatttgatcatttttgagaacgccgcctttggccgcgtgatggcgctggacggcgtggtccaaaccaccgaacgcgatgagtttatctatcatgagatgatgacccatgtgccgctgatggcccacggccaggcgaaacatgtgctgattatcggcggcggcgacggcgcgatgctgcgagaagtctctcgtcaccgcaccatcgaaaccatcaccatggtcgaaatcgacgctggcgtggtctcattctgccgccagtatctgccaaatcacaacgccggcgcctatgacgatccgcgctttacgctggtgattgacgatggcgtcaattttgttaaccagacgacgcaaacgtttgatgtgatcatctccgactgcaccgaccctattggtcccggcgagagcctgttcacctcggccttttacgaaggctgcaaacgctgcctgaatcccggcggcatttttgtggcccaaaacggggtctgctttctgcagcaggatgaagcgatcgacagccaccgcaagctcggccactatttcagcgatgtcagcttctaccaggccgcgattccgacctattatggcggcattatgaccttcgcgtgggcgaccgataatgatgccctgcgcgacctgtccaatgaaattatccaggcgcgttttcacaaagcgaacctgaagtgccgttactataatccggctattcacaaggcggcatttgccctaccgcaatatttacaggatgcgctgtccgccagcgatcttcagtaa

SEQ ID NO: 241063 - DNA, 727 bp, Unknown
  Bacterial polypeptide expressing nucleotide sequence isolated from the Sargasso Sea
catgacctacaccgtggcggtgcgcgagctgtgcgagttcaccgccaagcagggcgacctggacctgcgctttacgcccgcgcccaccgcgctggagggtatcgcgggccatgccgtcgccgcgtcacgccggggctcaggttattgcgccgaagtggcactcagcggcagctaccaaagcctgcgcgtgcggggccgggccgatggctatgacccggcccagcagcgcatcgacgaggtcaagaccttcaaaggccggctggaccgccagcccgcatcgcaccgccacctgcactgggcgcaagccaaggtgtacggctggctgctgtgtgagcaggaacagttgcggcacatcgatgtggccctggtgtacctggacgtgggcacgcagcaggaaacggtgttcaccgagcgctgtagcgccgacgacctgcgccagcacttcgaggcccagtgccagcgcttcatcgcctgggccgaacagcaggtcgcccaccgcacggcacgcgatgcggcactgaacaccttggcatttccgtttggcggctttcgcaccggccaacgcccgctggccgaggccgtgtacaaggcggccgtcgccggtcgctgcctgctggcccaggcgcccacgggcatcggcaagaccatgggcacgctgtttccgctgctcaaggcctcaccggcccagcgcatcgacaaggtgttctttctggccgccaaaacctcg

SEQ ID NO: 241064 - DNA, 556 bp, Unknown
  Bacterial polypeptide expressing nucleotide sequence isolated from the Sargasso Sea
aatgctgaagcaaaatattgaggcgataaaaattgatttaaaaaatggtgaccaaaataagcctgagtttttaaaaattaatcctaaagggagggttcctgccttggtcacgaaaaaaggtattttaactgaaaatcctgcaatcatgtattatatatgtcagttatttccagaaaaaaaacttgcgccttcagatccttatgaattagctaaagcccaagcctttaatatgtatttatcatcaacagttcacgttggacatgctcacaaacatcgtggacacagatggacgaatgatgaaagtgcgttagattcattaactgcaaatgttaaaaagaatatgactgactatgcagaatacatcgaaaataacttaattagtggaccgtgggtgttaggggataattattctatttgtgatccttaccttgctttggttactcgttggtttcgtgatgacggcgttgatttggccccttttcaaaagataaaagatcataatataaaatttcatgaaagggcaaacgtgaaaaaagttatggagttacaccaataa

SEQ ID NO: 241065 - DNA, 700 bp, Unknown
  Bacterial polypeptide expressing nucleotide sequence isolated from the Sargasso Sea
ggcctctgcgagcctctgcgctgcatccttgccgccgcgggtgtcgagttcatggatgtgttccttacggcagagaccggccgcgacgagctcgcacgactccgatcggcggggaagctgcagttcgatcagctccctctcgtggagatagacggactcaatcttgtgcagacgagggcgaccgccaactacctcggtgctcgcttcgggctgctgcccggatcaccgaggcaggcctacctcgtcgagtgcgtgtacggttcgagccaagatgcgcgtgggccgatggtgggtctcccgtttgcacagtacccaaaggcgccgacggatgccgacttcgaaaagaggctcagcgacatgcgtggcaacaccggtctgcttggccggcacgcgcccaagtgggaggccatgctgaccgatgccgggccgtttctgttgggcgcacgggcctcgatcgccgacgtggggatcttcgagtgtgttgacctgttcctatcgatcttcggctcggaggagtttgatgcatcgtttgcgcccttcccgcgcgtccgcgccctcgtggcagcgacgcgctcgcttggccgtctcgccgagcactgcgatgtcagccgcaagaagcacgccacctgggacgcggcgacgggcaaacagtccaacttggtcaagtacgcgaccgctgtgagatcgactctcgcgtgaa

SEQ ID NO: 241066 - DNA, 1013 bp, Unknown
  Bacterial polypeptide expressing nucleotide sequence isolated from the Sargasso Sea
ggtgcagtggcgcgatatagtgctggcaaaagctgcagaaaatccacaactgcaaatgctggatcacgactacaaagagactgtgcctcaagtactggtggaaattaacagtgagcgggctgccgatttagggatttctgttggcgctgtaggtcaggcattggaagctatgctgggcggtcgcagagtcaccactttcctcgaccggggtaaagaatacgacgtgatactcgaaggcgcagacaaagactttgccaagcctggcagtatcagtaatgtctacgtgcgggcgaaagagtctggcaagcttattccactggataacctggtggtgcttaaagaagaagccactacatccagcttaaaccgctacaacaggatgcgtagtatcaccattaccgctaacctggcgcctggctacagtctgggtgaagcgctggagtttttagaacaaacggtgaaagacaatatcgaaggtacagtcggtattgactacaaaggtgaatcactgctgtttaaagaaagcggcgagtcgacagtgctgatttttgcattagctttgcttattacctttttggttctggcggcgcagttcgaaagttttgtccatccttttgtcattatgctgacggtgccgctgggcttagtcggtgctttggctggtttatatttggctggtatgacgctgaatatatacagccagataggcttagtgatgctgataggtttggtggcgaaaaacggtattttaatagttgaatttgctaaccagttgcgtgacgctggcgtcgagtttgaagaggcgattaagcgggcttccgctttacgattacggcctattgtgatgaccgcttttactaccgtattcagtgctattccactgatcatcaccacaggccctggctctgaaagccgtatggtgataggtatggtgatcttcgcaggtgtaggtgttgccaccttgctaaccatttatgtcgtgcctgtggcttatatggtattgggcccgtaat

SEQ ID NO: 241067 - DNA, 331 bp, Unknown
  Bacterial polypeptide expressing nucleotide sequence isolated from the Sargasso Sea
aatgaagttttattatgcgccaatgtcatgtgcttttgctacccacgttgtactagaggatgctgaagcaaaatatgaggcgataaaaattgatttaaaaaatggagaccaaaataagcctgagtttttaaaaattaatcctaaaggtagggttcctgcattggtcacggaaaaaggtattttaactgaaaatcctgcgattatgtattatatatgtcagttatttcctgaaaaaaaacttgcgcctacagatccttatgaattagctaaagaacaagcctttaacatgtacttgtcatcaacagttcacgttggccatgctcacaaacat

SEQ ID NO: 241068 - DNA, 1588 bp, Unknown
  Bacterial polypeptide expressing nucleotide sequence isolated from the Sargasso Sea
aactgaatcggggtatcgcaatcaactcaatgcagtgatgaactatcgctggccaacgctggctgtgttagtgctgagttttgtcgctactgtcatgctactgaaattaatcccttcagagctggcgccacaagaagacaggggcacattttttgtcaacatgagtggcgctgaaggcgcaagctatggcaataacagccgtaatatgcgactgattgaagatttgctgatgccctactacgaaaaaggtgagtttaaccgcttgctgatccgcgtacctggttggggcaattcaggaggcgtagctattgttggcactgaaaactggaacaatggcaaaagacgcacttctgagttaatgcaggaagtcagtaccaaactgaacgaactgccagatgtaaaagcattcacctttatgcgcagtggtttaggtggaggtcgaggtggtggtcgtcctgtgcagtttgttattcagggcaatacctatcaggaactggtgcagtggcgcgatatagtgttggcaaaagcagcggaaaatccaagcttgcaaatgctggaccatgactataaagaaactgtacctcaggtactggtggaaattaacagcgaccgcgcagcagatttaggtatctctgtgggtgctgtgggtcaggcgctggaagccatgctgggcggacgtcgggttacgactttcctcgacagaggcaaagaatatgacgtgatactcgaaggtgaagataaagacttcgccagacctggcagtatcagcaatgtatatgttcgttctaaagagtcgggcagattggtgccattagacaacctggttacattaaaagaagaagcaaccacctccagcttaaaccgttacaaccggatgcgcagtattactattaccgccaatctggcacctggttacagcttaggtgaagcactggagtttttagagagcacggtcagagaaaatatcgaagcgcctgttggcatagactacaaaggggaatcgctgctgtttaaggaaagtggagagtcaaccgcattaatttttgcgctggctttgcttattacctttttggttttggccgctcagttcgaaagttttgtccatccttttgtcattatgctgactgtgccactgggcttagtcggagctttggcaggcttgtatttatcgggcatgacgctgaatatttacagccagataggcctggtgatgctgataggtttggtagcaaaaaacggtattttaatagtcgaatttgccaaccagttgcgtgatgcaggcgtagagtttgaagaagccattaaacgcgcatcagctttacgtttacgtcctatcgtcatgacagctttcactacagtgttcagcgctattccgctgattgtcaccactggcccgggttctgaaagccgtatggtgattggtatggtgatcttcgctggtgtgggtgtagctaccctgctgaccatttacgtagtaccagtggcttatatggtactggcccgcaatacaggctcaccactggccatcagtaagcaattggaacagctggataaggacaatccggagaagtctgaggaaccacattaa

SEQ ID NO: 241069 - DNA, 289 bp, Unknown
  Bacterial polypeptide expressing nucleotide sequence isolated from the Sargasso Sea
tattaaagaatctaatagactagctgcaatttgtgatggttttgatgcaatagggattaaatatttttctgatagaaagagttcaataaaattatatggaaatcaaaatgaagatattaatggagctgaaattgactcatatggggatcatagaattgcaatgagttttttaatagctggcatgagatcaaaaaatggcatcactgttaagaattgtaagaatatagaaacttcttttccaaatttcaaagatataatgaattcattaggtatgaatattaatgaataa

SEQ ID NO: 241070 - DNA, 937 bp, Unknown
  Bacterial polypeptide expressing nucleotide sequence isolated from the Sargasso Sea
tatacttccggcactactggaaatccaaaaggtgtagtttatcatcatagaggagcttatttaatgtctacaggaagttctgtggcatggaatatgcctaaccaattaaatttcttaacaattgtcccaatgtttcattgtaatggttggtgctacccatggacgatcccaatgctgaatggaaggaccgtttgcctaagaaatatagatgttaaaaaaatattcgagctaattgataaatatgatgtaacgcattttggtggagcgccaattgttcttaatatgattactggtgccccagaagctgatagaaaaaaattaaaacataaagttcatgttttaactgcaggcgcaccacctccaagtataatctttaaaaagatgaaagccctagggtttgaagtcatgcatgtatacggtttaacagaaacttacggacatgttacccaatgtgcttggaatgatgaatggaatgattttgatgaagataaacaaaatgaaattaaagcaagacaaggagtaagatatcctaatactgaaggtgtaacaattttagatcctgaaactatgaaagaagttcccaaagatggcaaaacaattggagagataatgataagggggaatgtagtaatgaaaggatattttaaagacaaagaagctaccgataaagcgatgaagggtggttggtttcacactggagatttagctgttatgcaccctgatggatatgtaaaaatacaagatagatctaaagacataattatttctggaggagaaaatatatcttcaattgaaatagaaaatactctttctaaacacccttcagtttctatcgcagctgtggttgcaaaacctgatgaaaaatggggtgaagttccatgcgcttttatcgaaatgattaaagacaaaccaaccagtgaaaaagaattaatagatt

SEQ ID NO: 241071 - DNA, 214 bp, Unknown
  Bacterial polypeptide expressing nucleotide sequence isolated from the Sargasso Sea
cccggacggcatcatcatcgacggcggcagctatggcggcggcgaagtctggagccacggcgaccaccgtatcgccatgtccttcagcgtggcttccctgcgcgccggtgcgcctatccgcatccacgactgcgccaacgtcgcgacctccttcccgaacttcctcgggctggcgtccggcgcgggcatccgcgtcgccgaggagaaaaactga

SEQ ID NO: 241072 - DNA, 805 bp, Unknown
  Bacterial polypeptide expressing nucleotide sequence isolated from the Sargasso Sea
ctgcgtccgaattacgtgacgctggagcggaatcgcgtcaatgcccgctccaacctcaatcaaccggttgagacctacaggggcttacctccagtcgacgccctgccgagcgacatcgttctcgatcccggctggcgctggcgtaaggcgtggaaggcgcccaccttcgttcaacacgcgttcacgcgctaccccatcatcgagggagagcacaaactgcagccttcgccatggtttctgtggtgtcagctgcggggaagctggcgtttctggctgtatcgctggcgggaacgaccgctcaaacgtcggcttctcgagcatgcgtcctatttcctggctgtccttcaggtctccagtgacagccagatccagatgggatcgccctatcgcggcatgcatgacttcatcgaggacgtgattcgttccttcgccgctcatgcgcacgcttcggaccgtctggccttcaagcaccatccccgagaccgcggctacaacaattacgaaagcctgatcgatctgttggctcgtcgctatggggtcagtggtcgtgtgcattatttccatgacggtgcgctcagccgctttctgcggacatgccgcggtgtgatcaccgtcaacagcaccgtggggcttcaggcgctgtttcatgcggtgcctactaaaacgatgggcaacaccttctacaacctgcctgggctgacagatcagaagcccttggatgagttctggagagatcctcaacccagtgagaggccacttttttaccgcttctacaaccacctggtgaagacgacccagggaacgg

SEQ ID NO: 241073 - DNA, 193 bp, Unknown
  Bacterial polypeptide expressing nucleotide sequence isolated from the Sargasso Sea
aaaagaaaaaatagattcagaagagaaaattaattcttttgatgatcatagaattgcaatgagttttttaatagcaggaattagatcaaaaaaaggaatatctgtagaaaactgcaaaaatattgaaacctcatttccaaattttaggaatataatgaattctttaggtatgaaaattgatgaaaaaaattaa

SEQ ID NO: 241074 - DNA, 241 bp, Unknown
  Bacterial polypeptide expressing nucleotide sequence isolated from the Sargasso Sea
ttaaacacgccaggtctcacaataataaatgcaaaaaaatcgagaaatcatactgaactgatgttagactcatttaaatacccaattaaaatatttaaaactaggaaatttgataaaatattaattcaaggacataatcaatacaaatcttttaattatagtattccaggggacataagctctgcagcattttttattgtattaactcattctatcaaaaaattcagaaataaaaattaaa

SEQ ID NO: 241075 - DNA, 637 bp, Unknown
  Bacterial polypeptide expressing nucleotide sequence isolated from the Sargasso Sea
ttcaattccttcagatccatcttctgctgcatttttttctactttatgtttgttaactaaaaactctaaaattataattaaaaatgtttgtttaaatcaaaaaagattaggtttttacaatctgctaaaaaaatcaggtgcaaggataaaaatggtaaatgttaaaaaaaaaaataatgaacttgttggagatattttggtaagaagtagtaaaattagacctattaaaagtggatctaaacattatctttcagccacagacgaatatccaattatgtttataattgctgcacttactaaaggaatttcaaaatttaccggaataaaagagctagcaaacaaagaatcaaatagaattttagaaatgaaaaaaatattgaaaaaaattggtgtaaaatgtaaatcaaataaagactcgatgactatatctggaaacgttatttcaaacaaaaaaaaacatattattaaagttaacagtatgcacgatcatagaatagcaatgtcctgtgccgttctagctttgataactggaattaaattttctataaaagggtttgagactgttgatacatcttttccgtcttttctaaagatagtaaaaaatttaggtggtaaatatgaaattaaaaaaaagtga

SEQ ID NO: 241076 - DNA, 817 bp, Unknown
  Bacterial polypeptide expressing nucleotide sequence isolated from the Sargasso Sea
tggtttcttacatggagaagatccgctttcaactatgaatgcattgaatcaaataggcgcaggcatttctattgatgaggatggtcgggttcacctacgtaaaagaaatcaaagttttcataattgtgaaaaggcacttaattttggtaattctggaactggcttgcgtcttatgcttggcctaacttcaggcataggtttaaaagcctctttttgtggagatgaatccttatcatctcgaccaatggacagggttataaacccattaactcaaatgggcgctaatattgagtcaaacaagggaaagttgccaatttcaatattacccactaaatttaaaaagcaatataaatatgagttaccagtggctagtgcgcaggttaaatctagtatcttattggctggtttgactgcaggaacagacattgaaattattgagccgattcagaccagggatcataccgaaagaatgttaaaaaactttggagcaaatatagaaaccactttactggatggcaaaaatattattaaacttgcatcaactaatattttgcatgccaaaaactataccgtggtcggtgacatttcttcagccgccttcttaatagttgcagctttaattagtaattccccaggactagaaattacgaatgttggaatgaatccttcaagaactggagtacttgaagcattacaacaaatgggtgcaaatattgaagttaaaaatcaaaggttagagtcaggagagccctgcgctgatctaatagtaaaaaaatctaaattgaagggagtaaagctttcaggaaaaatcatccca

SEQ ID NO: 241077 - DNA, 867 bp, Unknown
  Bacterial polypeptide expressing nucleotide sequence isolated from the Sargasso Sea
gatgaagcaaaggcctattgcaattttagtagatgccttaaaagacttaggttgtgatatcgagtatattgaaaaaagtggatttcctcctttaaaaattaatggaaaaaacattttaactaattcggttactttacctgcaaatgttagctcacaatatatttcatctctaatgatgttgggtgtttcacttgaaaatggactaaagattaagttgtcttcagagattacatccttaccatatattttgatgacaaaaaaaatcattgagagaataggcggtacttcaaagattcatcatagggagattactattgagccattaacagaaaaagttattccagaacaatttgttgaatctgattggagctcagcctcttatttctttagtattgctgccctgtctaaatcagcaagattaaccttatctaccttctttaaagacagtttacaaggggattcaacacttgttgatatttataaaatattaggaattgaaacaatatttgagaaagatcatattattttaagtaagaataaaattgatcttcctaaaagtattaacttaaatttaaaagatagtccagatctagctcagactataattgttacttgtctaggacttggagttgactgtactttggaaggcttacatactctaaagataaaagaaacagataggttgattgctctgaaaaatgaaattgaaaaatttaatgtagataaagttgaaataacagaaaattcaataactcttgaaaataattcaaatctaaagcatgaagtagttattgatacatataatgatcatagaatggccatgtcttttgctcttttatcacttatagtccctatcaaaataaataa

SEQ ID NO: 241078 - DNA, 802 bp, Unknown
  Bacterial polypeptide expressing nucleotide sequence isolated from the Sargasso Sea
atttggagtaaagtttaaaggtaataatggtaaacttccaatttcaattaagggttcaaaccttacaaaaccgattaattataatgaaaatttaggttctgcacaatgtaagtcagctataatgattgcagctttgaaaacttctggaattactaaaatcaaaagtttaccatctagaaatcatacagagatattgttcaaaaatgttttaaatgtgccaataaaagtttataaaaaaaaaaaatatgattttattgagataaaaggaaaaaatgaaataaggccatttgaatataagattccaggggatatatcttcagcagctttttttatagttctcacaatattatcaaaaaattctcaattaattttaaagaatataaacataaatccttcaagagtcggagtcattaaaatacttaaaaggatgggagcaaacataaaatttttaaataaaaaaaactataagggtgaaattaatggagatatttttgtaagaagcactcaaaaattaaaagcaattaaacttgatcccttacttaatacttcagctatagatgagtttttgttaatttttttagttgcaagtaggtgtaaaggtgtcagtaaatttgtaaatttatctgaattaaataaaaaagaatcaaagcgtctagattggggtataaaaattttaaaaatgatgaatgtaaaagtagtgaagataaaaaatcacgggataaaaatttggggtaataaaaattttccaactaaaaaaaattatataattaaaaactttttaaaagatcatagagtatttatg

SEQ ID NO: 241079 - DNA, 646 bp, Unknown
  Bacterial polypeptide expressing nucleotide sequence isolated from the Sargasso Sea
atttcgatcatttaaatataatgttccaggagatattagttctgctgctttttttattgttttgacacttttatcaaaaaaatccaacatcctaattgaaaatgtaaatgtaaacccaagtagagctggaattataaatattttaaacaatatgggagctaatattaaactaagaaatactaaaatatataatggggaaaaaatttcaaatatttccgtgagaagtaatcaaaaattaaagtctgtaaattgttctcctctgcataatacttcagcaattgatgaatttttaataatattcttagttgctgcaaaagcaaaaggtgtatctaaatttaaaaatttaggagaaatgaataaaaaagagtctaaaagattagatatagcagtcaaatttttaaaactaataggaataaaagtaaaaagatttaatgatgatataagtatttatggcaatccttcattagagttatctagtagttttgaaataaaaaattttctaaaagatcacagaatattttttttatctactattgcagcattaactttgggaggtaagtggaaaattcatgataaagattcaatcaatacttcatttccaagttttttagataaattaaaatctataggagctaaaattaattga

SEQ ID NO: 241080 - DNA, 415 bp, Unknown
  Bacterial polypeptide expressing nucleotide sequence isolated from the Sargasso Sea
gatgggacaaaatgctgtgacccctattgaagtatcctccaataacaacttgtgcggtgtcctttccggttcaggcgataagtcaatttcccatagggccttgataatagccgccttatcggctggatgcagtcgactgacagggcttttagtgtcagacgatgtcaggtgcactatcgaagcattaaggcagcttgggatccggatttctgaatctaatggaaatagtgttcttgttcatggtgtaggtataggcggcctaacggacccagtgggccctttgaaccttggcaatagtgggactgctgcgcgcctactaatgggggtggtggcagggaatccaataacggctgtctttattggtgatgagtctctgagtggtcgacccatggaccgcgttgttaagcccttaagc

SEQ ID NO: 241081 - DNA, 589 bp, Unknown
  Bacterial polypeptide expressing nucleotide sequence isolated from the Sargasso Sea
catgttttttatagttgcagctctgataagtaaaaattcacaaattactataaaaaatgtttgtctaaataaatatagaactggagctattgagattctaaaatgtatgggaggaaaaatttttattgaaaatattaaatcctctagttttgagactacaggagatattacagctaaatcttcatcattagtgggaattgaaatacctaataataggatctcggatgctatagatgaatttccaatcatatttattgctgcggctaatgctaagggagtaactactttaaaagacgcacaagagttaagggttaaagaaagcgatcgactgttagcaatgtcaaacggcctaaataactgtggaatacaaaataaattattcaaggatggtattagcattaggggcggggaatttaagggaggcgaagtgaatgcatatggtgatcatcgtattgcaatgtcgtttgtaatatcaagcttaatatcaaaggatactatcaaaataattgatacaaaaaatattgatacctcttttccaaattttatagaacttgctaaacaatgtggatttataattcatgaatactaa

SEQ ID NO: 241082 - DNA, 754 bp, Unknown
  Bacterial polypeptide expressing nucleotide sequence isolated from the Sargasso Sea
atggcagttaaaagctactccgttctaatcaataataaaattaatgaattcaataaagttataaacgtagacccggataagtctatatctataagagcatttttgattggatcaattagtcagggtgtttcaaaaatatctgatgcccttttgagtgaagatgttttctcaacaataaattgtctgagaaaattaaactgtaaaattataaaaaaaagtaaaaacgagtatgaagtttttggtaagggtcttggatcgtattatgctaaaaaaaatactttattaaatttaggtaatagtggtactgggcttcgtttgataagctcaataatttctacaactccagatctcgaagttaatctcacaggagatagttcgctaaaaaaaagaaatatgtctaaacttatttctttgttgagtgaatttggagcagaaatattccctaaaaataaaattaatttaccatttaaattaagatcctcaaattttccagtagcaattaaatacgtagcaggaaattccgctcaattgaaaagtgctgcaatattaggtgctttaaattcttatggaacttcaacagttcatgaaagttttaaaacgcgggatcatacagaaaatttattaactaaaaactctaaaaatatttcgttcaaagataaaaaaaatgttattaaaatttgtggtaaacaaccgttaaattccttcaatatcaaagttccttctgacccttcctctgcagctttttttgctgcaa

SEQ ID NO: 241083 - DNA, 304 bp, Unknown
  Bacterial polypeptide expressing nucleotide sequence isolated from the Sargasso Sea
aatgcagcttctaacaaaaaaatctcacaagccaatattaggagaaattaaaatttcatctgacaaatctatatcgcatcgctctttaatatttcttgctctcgctaatggtgaggcagaaattgagaatcttttagagagtgaagatgttcttaggactgcttctgctttagaaaaaatgggagttaaaataaagaaaaaaaagaatggtaaatatttggtagttggttctgggatttgcggtctgcaagagccaaatagccaaattgactgtggaaatagtggcacctcagctaggctgcta

SEQ ID NO: 241084 - DNA, 748 bp, Unknown
  Bacterial polypeptide expressing nucleotide sequence isolated from the Sargasso Sea
gggttagttatagaattaaaaggagaattaatatcaaaaccttatatagaaatgtccttacatttacttaataatttaggtataaaaacgagcttcaaaagtaacttaataaatgtaggttatttagaaaaaattcaagatacaagtattacagttgagtcagattggagttctgcgtcatactggtatagtatagttgcactttgtgaaaaagcagaagttaaacttaacaatttttacgaaaatagtatccaaggagattcaattttaattaaatattataaagctctaggagttgaaacaaaatttatagaaaataaaatagtcttaactaaaattaaagatttttcatgtcctaaaaatttaaatttaaatttagtagatagccctgatttagctcaaaccatagctgtaacttgttttggacttggtattagctgctttttatatggattacaaaccttaaatattaaagaaacaaaaagattagttgcattaaaaaatgaattaacaaaactgggagcaaacttagatgttacagaaacgagccttaaactttacaagacaagagagattcaaaaaaatattacaataaatacttatcaggatcatagaatggcaatgtcttttgcacctttgtcactcaaaattccaattttaatagaaaatccatatgttgtagtaaagtcatatccgatattttgggatgatttaaaaacagctggatttataattgagccaatttaaa

SEQ ID NO: 241085 - DNA, 843 bp, Unknown
  Bacterial polypeptide expressing nucleotide sequence isolated from the Sargasso Sea
ctactggatctacctaataggtgtaaaatatgaagctggtgtatccgctcaattaaaaagtgcagcgattcttgcagggatgaactcttacggaaatacaataattatagaaaaagataagagtcgagaccacactgaaaatatgttgttaaaaaattatcatttaatcagaatcaacaatggcaaaagaaggctgattaaaatttttggaaataaatatataaactcacttcatactaaaatacctggtgatccttcatctgcagcttttttcacagctttaactgtgttgcgcgaaaattcatcaataaaaataaaaaatgttggtctcaacgaaactagaactgggttttataggctgcttaaaaaaagtggagcgaaaatttattttaaaaacgttaaaaagaaaaataatgagatttttggagatatagttgtaaaaagttgtaagcttaaaccaattaaagcatctaaagaatattacgttaattctaccgacgaatatccaattttatttgtattagcaagtttaatcaaaggaacatcgatatttaaaggtataagcgacttagcaaataaagaaagtaatagaataaaagaaatgcaaaatattttaaagcaaattggtgttaagtctaaatctaccaaagatgaaataaaaatatttggtagaggaatatttgatgcaaaaaataaaaaaattttagtaccgaatctaggtgatcaccgtatttgtatgtcttcatttatattagctttaatcaccggtgcaaataccttcattaaaaactttgaaacggtttacacttcagctccatcatttttaaaaattattaaagtttt

SEQ ID NO: 241086 - DNA, 391 bp, Unknown
  Bacterial polypeptide expressing nucleotide sequence isolated from the Sargasso Sea
cagcagatcatcacttaatggtattgatgtggacatgaatatgatgccggatgcagccatgacattagcggtcacagcactctttgcctccggtcaaacggctatacacaatatccataactggagggtaaaagaaactgaaagactaaaagctgtttcaactgaattaagaaagctgggagcagaagttgaggaaggagaagattacctggttataattccaccgaaaaaaattcagaatgcagaaattgacacctatgaagatcacaggatggccatggctttttcgctggctgcatgtggagatgcttctgtgacaattaatgacccaggatgtgtaagcaaaacattccccagatattttgatgttttttcaggattatgttcctaa

SEQ ID NO: 241087 - DNA, 415 bp, Unknown
  Bacterial polypeptide expressing nucleotide sequence isolated from the Sargasso Sea
agaataataaaaagtcttcctaaaaatattcatcttaatttaatagataatccagatattgctcagactatacttataacctgtctaggccttggaattgattgtaccctaataggtctccatacattgaaaataaaagaaacggacaggctagtggctttaaaaaatgaaattgaaaaattcgaagttgataaaattgaaataactggtgattcaataacacttgaaaataattcagatttaaaacatgatgtaacaattgatacatacaatgatcatagaatggctatgtcttttgctcccttatcgcttttagtcccaattaatataaaaaatcctgaagtagttactaaatcttattttaacttttggaatgatttagaaagtctgggattcaatattttaaaaaaataaa

SEQ ID NO: 241088 - DNA, 661 bp, Unknown
  Bacterial polypeptide expressing nucleotide sequence isolated from the Sargasso Sea
catgcaacgccgcaaaatcatccagaatctgctcgctatagccgccgtttcgctcacggcaacgtttgcgcatgccgacgacaaacaactcaaggtcggcacgatgagcggcccggacgcacagatctggtcggtcgtgacgagagtcgcggcacgtgaggggttgaacgtgaaggtcatcgaattcaacgactacgtgcagccgaatgcggcactcgacgcaggcgacctcgacgccaacggcttccagcaccagccgtttctcgatagccagatcaggcagcgaggctacaagatcgtcaacgtcggcctgacctacgtttcgccgatgggcttctattcgaagaagctcaagtcgctgaaggacttgccggaaggcgcgaaggtcggcatccagaacgacccgtcgaatggcaaccgcgcgctgctgctgttgcagaagtacggcgtgatcaaactgaagccgggcgtcggcaccaacggcgtcaatgctacgccgctcgacgttgcggagaatccgaagaagatcaagctgatcgaactcgacgccgcgcaattgccgcgctcgctcgacgacctcgacgcggcgtcgatcaacacggattacgcggtgaaggccggcttgcagccgaccagagacgcgatcgcgatcgaagacctc

SEQ ID NO: 241089 - DNA, 685 bp, Unknown
  Bacterial polypeptide expressing nucleotide sequence isolated from the Sargasso Sea
cttgattaagattaaaggacaaacaaactttaaatcttttaattataaaattcctggagacccaagttctgcagctttctttgttatgctaactattttatctaaaaaatctagcatattaataaaaaattgtttgattaataaaaataggattggattttatatattggctaagaaaatgggtgcaaaaatctcttttcgaaataaaaaaaattacaaaggtgaaaaaattgctgatatttattgtgaaagctcaaaaaatttaaaatctattaatttaccaaaaaactttaataatagttctgccatagatgaatttatttctatattcataatagcatctttttctaaaggaattagtactttcaaaggattggaagagctgaataaaaaagagtcacctagattagattggagttttaaaatattaaatatgattggaattaaaacaaaaaaaattggaaatcacggaataaaaatatatggtaatccaaatcttaaattaaataaaaaatatattataaaaaattacttaaaagatcatcgaatagctatgaattcaataattttagctcttgctcgaggtggtgtttggagaataaatgacactgattcaataaaaacttcgtttcctacttttcttaaaataataaaatttttaggtggcaaatatgaagtcgtctaa

SEQ ID NO: 241090 - DNA, 405 bp, Unknown
  Bacterial polypeptide expressing nucleotide sequence isolated from the Sargasso Sea
acttaaacggatgtgaattagattctaatattgcaaaacttatgattgatgaatatcctattttatccatagcagctacatttgcaagtagcccaagtgtttttaggggtttaaaagaattacgagtaaaagaaagtgatagacttgaattaattaaaactaatttacttaaatgtggcgttaagtgtgaagtgagagatgatgatttatttatttatccttctagtaagtataaaataaataatgaaaaaattacaactaattatgatcatagaattgcaatggcgtttgctgttttaggttcaaaaattggacctctcaacatttgtgactctgaatctataaaaactagttttccaacttttgtatcagagtttaacgggattggtggaaaaattttttgag

SEQ ID NO: 241091 - DNA, 157 bp, Unknown
  Bacterial polypeptide expressing nucleotide sequence isolated from the Sargasso Sea
ctgtcaaccagcctaaacgggtctataaaaatagccggtgataagtctatttcacatcgctccatcatacttggcgcattaagcattggtgaaacaacggtggagggtcttttagaaagcccaagatattttagctactatttcagctatgcaggcc

SEQ ID NO: 241092 - DNA, 418 bp, Unknown
  Bacterial polypeptide expressing nucleotide sequence isolated from the Sargasso Sea
gaatggcagccaaattcagtcacagtccatggaaaatctttgaaaggagtcgacctcgatttgaacagaatgcccgatgccgcgatgactctcgcagtcgccgctctttttgcggagggtccaacccgcatccggaatgtctataactggcgtttaaaggaaaccgaaaggatgaaagcggtgaccaccgaactacgaaaattaggtgctaccgtcgaagaaggcaaggattatctggtggttgatcctccccaaaaaatcataccctgtgagattgaaacctatgacgaccaccggatggcgatggccttttcattggccgcttgtggaccggaaccgatcaccatcctcgatcctggatgcgtgagtaaaacctttcctaattattttgaggtcctcgaaagcgtatccgagtaaa

SEQ ID NO: 241093 - DNA, 667 bp, Unknown
  Bacterial polypeptide expressing nucleotide sequence isolated from the Sargasso Sea
aatttagataccatagaattaaaaaatgatagagaattaaaaccaattaaatacaaagttcccggtgacccatcatcagcagcatttttaataacgggtgcatgtttattaccaggatcaaaattactcgttaaaaatattttatttaacaatactagaataggatttattgaaaccttaaaatctatgggcggtggcattaaagttattaaaaaagtaaagataaataatgaaacagtagctgatttatacattgatcaaaaaaagaaattaaaatcaacgactataaaatcagctaatgtaccattacaggttgatgaggtgcctatactttcaatagctgctgcattttctgagggtatttctatttttaagggtttaaaagaactcactgtaaaagaaagtaataggttagatttaattcatcaaaatttattaaaaattggagtgaaatcagaaatcaaaggttttgatttatatatctatggaaactataaattaaaaaaaggtaatgctgaaattatacataatcatgatcatcgcatcataatggctttttatatcgcgaatttaatatgtgaaaaagataatatatttaaggataaatcatgtgtgaacactagttatcctactttttttaaagatgtcacaaaatttttaaattaat

SEQ ID NO: 241094 - DNA, 769 bp, Unknown
  Bacterial polypeptide expressing nucleotide sequence isolated from the Sargasso Sea
atgccaaaggcaaaatactctgtaatatcaaataataaaattggcagtttcgataaaactattgaagttgatagtgataaatcaatttctataagagcatttttgattagctcaatcagccaaggtatttctgaaattaaaaattcacttgagtctgaagatgttttttcaacaataaattgtctgaaaaaactaggggttaaaataaataaaataaataaaaataaatatattgtttacggaaaaggtcttggctcattttatgcaaaaaagaacttaacacttgattgtggaaactctggtactttggcaaggttaatgattggtatcttatctacaaccccaaacattaatttaaaaattactggagatgaatctctaaaaaaaagaaaaatgtcaaaacttatattcttaatgaacaaatttggtgcaagtttcgaaaaaaataaatcttatttcccaatgaaaataatttcttcttcaatgcctataggtataaattatatatcaggtgtttctgctcagttaaaaagtgctgttattctagctggattaaattcttacggatttacaacaattaaagaatcaaaagataatatgagcagaaatcacactgaaaacttattatcaaacaataaaagtgttattaaaattaaaagaaataaaatagatattcttggcaaaggcactttaaatccatttaaattaattattcctggagatccatcatctgctgcctttttttgtgctgtgactatattttcctaaa

SEQ ID NO: 241095 - DNA, 589 bp, Unknown
  Bacterial polypeptide expressing nucleotide sequence isolated from the Sargasso Sea
gacgaatggaatgattttaatgaagataaacaaaatgaaattaaagcaagacaaggagtaagatatcctaatactgaaggtgtaacaattttagatcctgaaactatgaaagaagttcctaaagacggcaaaacaattggagagataatgataagggggaatgtagtaatgaaaggatattttaaagataaagaagctactgataaagcaatgaagggtggctggtttcatactggagatttagctgttatgcaccctgatggatatgtaaaaatacaagacagatctaaagacataattatttctggaggagaaaatatatcttcaattgaaatagaaaatactctttctaaacacccttcagtttctatcgcagctgtggttgcaaaacctgatgaaaaatggggtgaagttccatgcgcttttatcgaaatgattaaagacaaaccaaccagtgaaaaagaattaatagatttttgtaaagaaactttagcaggatttaaagtaccaaaaaaagtaattttctgtgagttaccaaagacttccacaggaaaaattcagaagtttgaactaagaaaacaattctagg

SEQ ID NO: 241096 - DNA, 505 bp, Unknown
  Bacterial polypeptide expressing nucleotide sequence isolated from the Sargasso Sea
attgacaaaacaaaaaataaaaaaattaagtggaacactaaaaatcttaggcgataaatctatatctcatagagcattaatcctagcatccatttctgttggaaagtctcaaattactaatctgcttgagtcagaagataccatgaacacaatcaatattttaaaagatctaggaatcaaaattgtaaaacatgctaataaatggattgtatatggaaatggtacaaatggcttttcacaaccaaaaaaggcccttgactgtggaaattcaggaactactgcaagattaatgttaggagcagtaagtacaaatccaatcttttgtacttttattggcgacaattcactttcaagacgtccaatgcgtcgtattacaaattatttagaaaaaattggctgtaaagttaatctaactaacaaggaaaatcttcctctaactatcaaaggatcacaattaaatttaccacttactcatgaaatatctaagccctctgcgcaaataaaa

SEQ ID NO: 241097 - DNA, 329 bp, Unknown
  Bacterial polypeptide expressing nucleotide sequence isolated from the Sargasso Sea
aatgccaaataagattattttaaaaaaaaaaatttctgattttaataaaaaaattttgatacctggcgataaaagcatcagtattagatgggtacttatctcttccattgccgatggagtctcaaaagctaaaaatttgttaatgtcagaggacgtattagcagctattaatgctgtcagaaagttgggtgtgagggttgtgataaataaaaatatttgtaaaattcatggtgtcggcattaaaggattaaaatataaaaaaaaccttgtaataaacgcaaaaaattctggaacacttgggagattaataactggaattttaattgata

SEQ ID NO: 241098 - DNA, 351 bp, Unknown
  Bacterial polypeptide expressing nucleotide sequence isolated from the Sargasso Sea
aatgactgaatgtttccaaacaattttatctaaaagatcttcgggtttgaaaggtcaaatatatatacctagtgataagtccatatctcatagagcattaattatgggaagtttggctattggtaaaacttccatttttagacttttggagtcagatgatatattcaaaacagtaaatggattaaaagccttaggtgttgatatttataaggaatcagataaatggtgtgtacatggtgtgggtgttggtggtttttgtgaaccagaaaatatcattgattgtggaaactctggaacttccgttagactattgatgggactagtatcaacttgtcctataaaagttacttt

SEQ ID NO: 241099 - DNA, 430 bp, Unknown
  Bacterial polypeptide expressing nucleotide sequence isolated from the Sargasso Sea
ttgaatttaactacttctactgatagtcaaattcttggaagtgtaaaatgtccaggtgataaatctatttcacaaagagtgctaatacttggcgcttttatgaatcaagatatggctattgatggttttttgcacggagaagatccgctttctactatgagcgcactcaaccaaattggtgcagatatttcagttaatgaaaatgatcgagttctcctatgcaaaagaagacaaagttttcataatagtgataatgcacttaatcttggtaattctggaactggattgcgtctcatgcttggtttaagttcaggcataggtttaaaagtttctttttgtggcgatgaatctttatcctcaagaccaatggggcgagttattaatccattgtctgaaatgggcgcaaatattgaatcatcgcgagggtaag

SEQ ID NO: 241100 - DNA, 298 bp, Unknown
  Bacterial polypeptide expressing nucleotide sequence isolated from the Sargasso Sea
aaagaattgagagtcaaggaaagtgataggatttctgcgatggctaaaggtctagcaaaaaatggcgtaatggtggaagaaggcgatgattacttaaaaatagttggtatgggtagtaatggtgttcctggaggagcaactgttaaaaccttttttgatcataggatcgcaatgtcttttctatgtctaggtttagcatctgaaaattccataactgttgatgatgtaagatcaatcgatacaagttttcctaacttttttgaactcatggaaaatctcggtgctgatatttgctaat

SEQ ID NO: 241101 - DNA, 840 bp, Unknown
  Bacterial polypeptide expressing nucleotide sequence isolated from the Sargasso Sea
catgctgaatggaaggaccgtttgcctaagaaatatagatgttaaaaaaatattcgagctaattgataaatatgatgtaacacattttggtggagcgccaattgttcttaatatgattactggtgccccagaagctgatagaaaaaaattaaaacataaagttcatgttttaactgcaggcgcaccacctccaagtataatctttaaaaagatgaaagccctagggttcgaagtcatgcatgtatacggtttaacagaaacttacggacatgttacccaatgtgcttggaatgacgaatggaatgattttgatgaagataaacaaaatgaaattaaagcaagacaaggagtaagatatcctaatactgaaggtgtaacaattttagatcctgaaactatgaaagaagttcccaaagatggcaaaacaattggagagataatgataagggggaatgtagtaatgaaaggatattttaaagataaagaagctaccgataaagcgatgcagggtggctggtttcacactggagatttagcagttatgcaccctgatggatatgtaaaaatacaagacagatctaaagacataattatttctggaggagaaaatatatcttcaattgaaatagaaaatactctttctaaacacccgtcagtttctattgcagctgtagttgcaaaacctgatgaaaaatggggtgaagttccatgtgcttttatagaaatggttaaagacaaaccaaccaatgaaaaagaattaatagatttttgtaaagaaactttagcaggatttaaagtaccaaaaaaagtaattttctgtgagctaccaaaaacttctac

SEQ ID NO: 241102 - DNA, 658 bp, Unknown
  Bacterial polypeptide expressing nucleotide sequence isolated from the Sargasso Sea
ctgaaaaatggactaaagattaagttgtcttcagagattacatcctacccatatattttgatgacaaaaaaaatcattgagagaataggtggtacttcaaagattcatgatagggagatcactattgagccattaacggaaaaagttattccagaacaatttgttgaatctgattggagctcagcctcttatttctttagtatcgctgccctgtctaaatcagcaagattaaccttatctaccttctttaaagacagtttacagggggattcaacacttgttgatatttataaaatatttggaattgaaacaatatttgaggaagatcatattattttaagtaagaatagaattgatcttcctaaaactattaacttaaatttaaaagatagtccagatctagctcagactctaattgttacttgtctaggacttggagttgactgtactttggaaggcttacatactctaaagataaaagaaacagataggctgattgctctgaaaaatgaaattgaaaaatttaatgtagataaagttgaaataacagaaaattcaataactcttgaaaataattcaaatctaaaacatgaagtaattattgatacatataatgatcatagaatggccatgtcttttgctcctttatcacttatag

SEQ ID NO: 241103 - DNA, 214 bp, Unknown
  Bacterial polypeptide expressing nucleotide sequence isolated from the Sargasso Sea
aatgattgaattatttagttctaaaaaattttctggctctataactataccaagtgataaaagtatatctcatcgttcagctatacttaattctgttgcattcggagaagctagaataaataattttagtaatggtaatgattgcttatcaactttaaatgtactatcaaatttaggtgtaaatattgatattgaaaataaaaatgaatttata

SEQ ID NO: 241104 - DNA, 349 bp, Unknown
  Bacterial polypeptide expressing nucleotide sequence isolated from the Sargasso Sea
ttgaaaaaacaaacaaaatataagctaaaaggctccttacaaatatctggtgataagtcaatatcgcatagatcgcttattttatcatctatggctcttggagaggcaaaaattacaaaccttttagagtcagaagatactctcagtacaataaaaatacttaaagccctaagcattcagataaagaaagtaaaagaggattggatcgtgattggtaatggtacaaatggatacattcaaccatctgaggcacttgattgtggaaattcaggaacaactgcaagactaatgcttggagccgttagtacgagtccaattttctgtacttttattggtgacaaatctctaa

SEQ ID NO: 241105 - DNA, 825 bp, Unknown
  Bacterial polypeptide expressing nucleotide sequence isolated from the Sargasso Sea
aatgtcaaatcacattttaattactgaaaaaatcaaaagttttaaaaaaaaaataaatgttgcatcagacaaaagtatatcaataaggtctatacttcttgcctctcaagcagttgggatatctaaaatatcaaatttactagagtctgatgatgtcttgaacactttaaaagctataaaaaaacttggaataaattacaaaaaaaaaagtggtaattaccatatagagggttttggtttaaacaattttagctttaaaaataaaataacaataaacgcaggaaattccggaacattggcacggttaatattggggttgttagttaaatcaaaatatagagtaagattgactggagacaaaagtttatcaaaaagggatttttcaagagttataaaaccattaagactttttggtgtaaatattcatagtagaaaaaattctctacctatcgaaattttaggatcagattatttgagaccaatttcttacaatgaaaaaattgggagcgcacaggttaagtcatgtattattttttgtgctttaaatacgcctggcataactaagatcaaagcaaaaaaatcacgaaaccataccgaacaattgttaaggtctttaaattatccaatcaaagtaaataaaataaataatattgataaaatatccataagtggacttagtcaatttaaatcctttaaacatattattcctggagatattagctctgctgctttttttatagtccttacgactttatcaaataattcagaaatgataattaaaaatgttaatataaatgaaagtagaataggaatcattaaaattct

SEQ ID NO: 241106 - DNA, 859 bp, Unknown
  Bacterial polypeptide expressing nucleotide sequence isolated from the Sargasso Sea
aaatatatatcctcctatcaaaattaaaggggtcggtaatgcagtacctctaaaatatgaaatatcaattccatctgcacaaattaaaagcgcaattatgttatctgctttaaatacaaatggcattgttaggattactgaatttaaatcaacaagagatcataccgaaaatatgcttaagtcgatggggtacaatattcaaattaaagagagtattaaaaaaagatttattaaaatgaaaaataacaaagcgcttcaaaacattaattataatgtgcctggcgatccctcttcagctgcatttttaataactgcagcttgtttaaagcctggatcaaaattaattgtgaataatgtactttttaataagacaagaataggttttatcaaaacactgaaaaaaatgggtggaaatattaaagtagaaagaagaaggaaaattaataatgagttaatagttgatttgaaaatagaacagaaaaaaagtttaatttcaacaactataccatcaatagaaattccattacaaatagatgaaataccaattttatctattgctgcatcatttgcagacggtttgagtatatttagaggtttgaaggagttgacagttaaagaaagtaatagattgttactaattcataaaaatctagaaaatattggtgtaaaatcaaaaattaaaaattatgatctttatatatacggcaattatcatttaaaaaaaggtgcagctaaaatcattcatgagaatgatcacagaattttgatgtctttctttattgcgaatttaatttgtaaaaaaaacaacataataaaagataaatcgtgtgtaaagacaagctatccaaggtttttttaa

SEQ ID NO: 241107 - DNA, 434 bp, Unknown
  Bacterial polypeptide expressing nucleotide sequence isolated from the Sargasso Sea
tcatataagatcctcagagctaagaggtatagatgtgccagacaatattatccaaaatattatcgatgaaattcccatattgagtgttgctgcatgttttgcagaaggacaaacagtaattaaaaatgctgctgagttgcgagttaaagagtctgatagattgcatgcaatttcagaaggactaataaagttaaaaattaaacatgatatttttgaagacggtatatcaattacaggatcatcaaaagaactaaattgtgatgaatctattaattcttttgatgatcatagaattgcaatgagttttttagtagctggtatcagatcatataaatttattcgagtaacaaattgtaaaaatattgagacttcgttccctaatttcaaacgtataatgaatacaataggcatgaaaattaatgaagaagattaat

SEQ ID NO: 241108 - DNA, 427 bp, Unknown
  Bacterial polypeptide expressing nucleotide sequence isolated from the Sargasso Sea
atgagattgatagccgagccatgcaataaagtttctggagaggttttatgtcctggtgacaaatcgatatcgcaaagaattgtaatgcttggcgctttactggatcatgacttgaaggtagaaaactttctaagcgcagcagatccaatttctacaatgtcagcattagaaaaggtggggtttagatatcaacacctgcatgacttaaatactgtaaatattttaaactcaaaaaaaagagtgactgatcctgactctacccttgacctggggaattctggaacaggtttgcgtttaatactgggattcttgggaggcctaaatataaaggcagactatataggagataattcactatcagcgcgccctatggccagggtcttagacccactcagtcaaatggggattaaatacaatagtaatacag

SEQ ID NO: 241109 - DNA, 825 bp, Unknown
  Bacterial polypeptide expressing nucleotide sequence isolated from the Sargasso Sea
catgcaaacactaataaaacaaatggaaagatttggtgctgaatttttaccaagaaataagttctattttcctctaaagattgtatcatcagaaatacctattggtatcaaatacacttctggcaagtcagcgcaaattaagagtgcagtgattttagctgctttaaattcttttgggacaacgttaattgaagaggaacataaaagtagagatcacacagaaaatattctatctaaaaatcaaaaatgtatgactataaaaaaaggaaagaaaaatataatccaagtgtatggtaaaagacaactttcaccacttaatattgatataccaggtgacccgtcgtctgccgcgttctttatttcattatgccttttaaccaaaaaatcagaattagttttaagaaatattcaattaaatcctactagatcaggttttttaagaataatgaaaaatcatggtgcaaaaatatctatcttaaataaaaaaataaaaaataatgaaaccatcggtgatattcgagttaaaagtagtaaattaaaaaaactaagagttggaaaaaattattacgtaaatgcaactgatgaatatccaattatgtttgtggtagctgcattaattgagggaacatcgtcatttaaagggattggtgaacttaaaaataaagaaagtgacagaattaaagtaatgcaaagcttgttaaggcaagctggtgttaaatcgatttttaaaaatgacgagttaaaaatatttggtaaaacgaaacttagaaatactcgaaagaggaaaattgaaatttcaaatattttagatcacaggatctgcat

SEQ ID NO: 241110 - DNA, 759 bp, Unknown
  Bacterial polypeptide expressing nucleotide sequence isolated from the Sargasso Sea
aaaaaatacattaaattgcttaaggaagttaggaatattaattttaaaaaaagggactcaatttgaggtatttggacaaggaggggtttttgaggatcccaaaagagaactatttcttggcaattccggcacaggtttaagattacttataggtttattatctacaagaaatgttaatgtaagttttaaaggtgacgagtctctctcatcaagaccaatgatgagaattattgaaccactaaaaaaaatgaatgtatctttaatccataataatggttatctaccaataaaaattctaaaaaatgatgatttttctctacccttaaaatattcactggaaataggttcggctcaagttaaaagtgcaattctcttagcagccttgaatttaagtggaacaacaatagttaaagagagatttccaagtcgtgatcacacagaaattcttcttaaatatcttggagctgatattaaaaagaaaaaaaacatcatcactttaaaatctccaaattttttaaaaccaaaggatatttttgtgccaggagattttagctcagcagctttcttaatagttgcagctttaattacaaaaaaaagtaaaattataattgaaaatgtaggactaaatttttttagaaccggtcttttggaggttttaaaaaaaatgaatgcaaaaataaatgtttcaaataaaaacatcatcaatggtgaaccagttggagatattacagtagaaagttcaaacctggtttctactaa

SEQ ID NO: 241111 - DNA, 355 bp, Unknown
  Bacterial polypeptide expressing nucleotide sequence isolated from the Sargasso Sea
aatgggcgtgcaaacgaccgcgcgcgacggtgaccggatgccgctatccttaaccggcaccgccgacctgttgccgatcgagtatgtcctgcccatcgcctcggctcaggtgaagtcggcgatcctgctggctggcctgcacgcgcccggacgcaccagcgtggtggaaccggccgcgacccgcgatcataccgaacgcatgcttgcccatatgggcgccaagctcgagatcgccgacacacccgagggccggcgggtcaccgtcaccggccagcctgagctgcacccaacggatattgagatacccgccgacccgagctccgccgccttcccagtcgtcgccgcggcgatcgtg

SEQ ID NO: 241112 - DNA, 596 bp, Unknown
  Bacterial polypeptide expressing nucleotide sequence isolated from the Sargasso Sea
tttaatagttgctgcattgataagtaactcgccagggctagaaattacaaatgttggaatgaacccctcaagaacaggattgttacaagttttgaaaaacatgggtgcagatattgaggcaagaaatcaaagactagagtcaggagagccttgcgccgacttaataataaaaaaatctatgttacgaggcgtggaactttctgggaatattattccaaatattatcgatgaaattcctattctttctattgcagctgcatttgcagagggtgagacaataattcgagatgcagaagaattaagggtcaaggaatcagataggctaaaagccgtttctgatggcttcactagacttggtgtcgctcataaaaattttgaagatggtatgagtattatgggaagcccgaatgcacttttaattgagcaacctatttctattgaatctaatgaagatcataggattgctatgagttttttaattgctggtttgaaatgttcaaaaccaattatagtaaaagattgtaaaaatatttttacatcatttcctaattttatagagctgatttcttctataggatataagcttgaaaaataat

SEQ ID NO: 241113 - DNA, 604 bp, Unknown
  Bacterial polypeptide expressing nucleotide sequence isolated from the Sargasso Sea
ccccgcagatataagttctgcagctttttggatagttgctgggttatgtcataaacaaggaaaaattacattaaaaaatgttggaattaatccgtcaagatcaggtattttagatgttatgtcttcaatgggcggtaatataacaataaaaaattcaactattgttgcgggtgaagaagttggtgatattgttgtagagtctagtgaactagtaggcgttgaaattggtggagatattatcccaagattaatagatgaaattccaattattgctttagctgcatgttttgctaaagggaaaacaataattagagatgcttctgatgcaaggaataaagaaagtgatcgcttatctattactgctagtgagttaacaaaatttggtgctgatatagaagaattagacgacgggattatagttaatggtgtcggtagtttgaatggcacaacttgtgaatcatttgatgatcatcgaatagcaatgatggaagcgatagcagctatattatccaagggacaaactacgataaaaaatagtgattgtgttgcaatttcttatccaatgttttgggatgatttgagtattttgacaggagatcaataa

SEQ ID NO: 241114 - DNA, 146 bp, Unknown
  Bacterial polypeptide expressing nucleotide sequence isolated from the Sargasso Sea
tttgaagggacaaatttacgttcctagtgataagtctatatctcatagagcgcttatattaggaagcttggctattggaaaaactatcattattgatcttttagagtctgaagatgtatttaaaactgcaaatggattaaaagcct

SEQ ID NO: 241115 - DNA, 462 bp, Unknown
  Bacterial polypeptide expressing nucleotide sequence isolated from the Sargasso Sea
tatgagagatttcataaaaattaaatcaaaaattaaaacatttaaaaagacaatccaggtaccgggagataaatcaatttctataagatgggttatgctagcttctttggccgtaggtatgtcaaaatcaaaaaatctacttgagtctgatgatgtaaagtctgcaattaatgctatgaaaaagttaggtataaaaattttaaaaaaaaaaaatcatcactatgtttatggaaaaggattaaatgggttaaaaattaaaaacaacttagttgtagacgctggcaattctggaactttttctagactattttgtggattaatttcaggatatgaaaaggaaataacccttaaaggagataagagcttgtcgagaagagatttttctagagttataaaaccattaaagttatttggtgtaaacttcaagagcagaaataataaattgcctttaaaaatttatgg

SEQ ID NO: 241116 - DNA, 901 bp, Unknown
  Bacterial polypeptide expressing nucleotide sequence isolated from the Sargasso Sea
taataatttacctatcaaaataaaaggtagaaaaatacctttaccaattgaatatcatagcccagtttcatctgcccaagtaaaatctagtatattacttgcaggtttatcgtcattaggaacaactacaattgtagagccctcactatcaagggatcacacagaaagaatgttaaaattttttggcgctaatattactacataccaattagatgatctgtcatggaaaataactttagatggtattccagaactaaaaccattagatctagacattccagcagatccgtctagtgcatcatttccaatagtttcagctataataacacctaatagcaaagttaaggttatgaacgtttgcattaatgagctaaggataggtttgtataaaactttaattgaaatgggcgctaacattgagtttactaataaaagaaaaatgaatggtgaattgattgcagatattactgcttgttcaagtgatttaaaaggaataactgttcctaaatcaagagctgcatctatgatcgatgaatatcctatcctttcaatggctgcgacaagagcttctggagaaactgtaatggaaggagttgaggagctgagatataaagaaactgataggattaaaaatatttgtaacgggttacaaaaacttggaatcgatacttacgaaacaaatgacagtatgatcgtaaaagggaaaggtccaaatggtacaattattggaaatatagagattaattccaatcttgaccatagaattgcaatgtcttttctgtgtttgggattagttactgaaaaatcaataatagtaagagacactgaaacaataaattcttcttttcctttttttatgggtaaaatgaatgatattggcgctaaattaaatttaatatag

SEQ ID NO: 241117 - DNA, 712 bp, Unknown
  Bacterial polypeptide expressing nucleotide sequence isolated from the Sargasso Sea
tttgggtgcaaaattgaagttcacgatagtagtgaagggaggaagataatgttgtcgggacaattagatagcaaggttgttgattatgatgtaccaggtgatttttcttcagcagcatttttaatcatttctgcgttaataacagaggattcagatttgcttattaaaaatgttggcatcaataaaacacggtctggattgttggatgtattgcttgaaatgggtgctgacatacaactcacgaatcatcaaaatataatgaatgagcctagggcagacataaggataaaaagctcagagttgcatggaataaatataggaggcagtattattgccaacctgattgatgaaatacctatactttgtatcgctgcctcttttgcctctggccaaactaaaattgaaggtgctgaggaactccgggtaaaagagtcagatagattaaatgcagttgcacgaggactcgaaaggcttgaaattaattttgttgaacttgatgatgggataattattgatggaggcaataacgtaagcgttaaaaatattaagattaattcataccatgatcacagaattgcaatgagttttttaatcgcctctttaaaatcaactgaagccataacagttgatgattgttctaacattgaaacttcattcccctcattcatgcacgttatgaatgagataggattaaacatttatgaaacttgat

SEQ ID NO: 241118 - DNA, 603 bp, Unknown
  Bacterial polypeptide expressing nucleotide sequence isolated from the Sargasso Sea
attgctcgtcggcaatgttctttatagtcgcagctctgataagcaaagattcacaaaatactataaaaaatgtttgtttaaataaatacagaactggagctatagagattttaagacgcatgggaggaaaaatttttattgacaatataaaaacctcaggttttgagactacaggagatatcacagctaaatcttcatcattagcaggaatagaaataccaaacaataagatctcggatgctatagatgaatttccaattatatttatagcagcggccaatgcaaagggagtaactactttaaaagatgctcaagagttaagggttaaggaaagcgatagattgttagcaatgtcaatcggtcttaataactgtggaatacaaaataaattattcaaggatggtattagtattcaaggtgggaaatttaagggaggagaagtgaatgcatgtggtgatcatcgcattgcaatgtcatttgtaatatcaagtttaatatcaaaggatagcatcagaataattgatacaaaaaatattgatacttcttttccaaattttatagagcttgctaaacaatgtggatttataattcatgaatactaat

SEQ ID NO: 241119 - DNA, 475 bp, Unknown
  Bacterial polypeptide expressing nucleotide sequence isolated from the Sargasso Sea
atgaagaattttgtaaggattgattctgaattaaacaattttaattcagtagtaaatatccctggtgataaatcaatatctataagatggattttattagcatctcaagctttaggtacatcaagagcatataatttgttagagtcagatgatattaaaaatactattaactctataaaaaaaataggggtacaaatcaaaaagaaaaaaaatttttatgagattgaaggggttggtttaaacggtttttacattaaagataagcaaaaaatttatgctggtaattctggaacgtttgcaagattattctgtggattgattgtcaagaccgaaaataaaattcagattctaggtgacaaaagtttatcaaaacgtgacttttcaagaataattgttccactaagtttattcggagtatttttcaaaagcaaaaaaggtaaattacccttaaatattataggtacaaaacattgag

SEQ ID NO: 241120 - DNA, 617 bp, Unknown
  Bacterial polypeptide expressing nucleotide sequence isolated from the Sargasso Sea
gtcagagaatataatcccgggagacataagctctgcatccttttggatgattgctgcatctattgttccaaattcggaggttttaattaagaatgttggattaaatcccacaagaacagggatattaaatgtaatggattcaatggggtgcaattatgaaattttagataaagcgacagttgcaggagagcctattggatctattaaagtaaagactgcgaataatttaagatcattcactattgaaggagatattctcccaaaacttatagatgaaattcctatccttactgtagctgcctgtttttgtagtggagtttctgaaattagggatgcacaagaattaagagttaaggaaactgatcgattaaaagtcatggcgagacaattgcacaaattcggtgctgaaataacagaaaaagaagatgggttaataattaatggcccatcaaaatttcattctgcggatgtagacagcgagacagatcatcgagtggcaatgagtcttgccattgcttcacttctcgccaaaggttcctcaaaaataatgagagcagatgcatctaacgtctcttatcctgctttttgggaagatcttgcccaactaaataactaac

SEQ ID NO: 241121 - DNA, 122 bp, Unknown
  Bacterial polypeptide expressing nucleotide sequence isolated from the Sargasso Sea
catgagccgcggttcccttaccctgtccccaatcaaacatatttcaggaaaggttgaccttcccgggtccaaaagcctctccaaccgggtgctgctgttgagcatgcttgctgaaggtcgca

SEQ ID NO: 241122 - DNA, 497 bp, Unknown
  Bacterial polypeptide expressing nucleotide sequence isolated from the Sargasso Sea
tataaaagtgcttaaattaaaaggttcaatcacaatatctggagataagtctatttcacacagggcactaatttttgcctcactttctacaggtaaagtaaaaatttcaaatttacttgagtcagatgatgtaatgcgaactctgaagattttaaaagagttgggcataaaaattattaaaaaaaaagcacaatggattgtgtatggaaatggaactgggggatatattcaacctgctcaagtacttgattgtggcaatagtggcacgacttcacgtttgatgatgggagcagtttcttctaatccaataagctgcacatttataggcgataattccctaagtaaacgatcaatgtcaagattatcaatatttcttgaaaaaatgggggcagaaataaaacttactaaaaaagattttttaccacttcatataaaaggtgacataaatcttattcctatggagcatgttatgcaaataagcatctgctcaagttaaa

SEQ ID NO: 241123 - DNA, 865 bp, Unknown
  Bacterial polypeptide expressing nucleotide sequence isolated from the Sargasso Sea
ataaacaaaaatgaagttgagattcacggagtagggttacatggcttaaaacaaccaaaagatccaattgatgcagcaaattcgggtacaactgcaaggcttcttataggtctattgtcaaaacaaaatttcagatctgagttgaccggtagttcacaattaatcaaacgcccaatgaagagaatagttaagccactcaatgaaaagggtgctgctattaaagattccaatggtaaattaccaattaattttgagccaaaagattataaatttgaaagtattcattcagaaaaaccaagtgcacaagttaaaagtggatttcttcttgcatcactatatcatgataaatttccgacgactgttactgaagagatgccaacaagagatcatactgaacgaatgataaatttaatgggagtaaataccgtgagacttggtaattctataactatagagcccatacaaagccttagaaatattaattatactgtgcctggagacccttcttcagcagcatttttgatagctcttgggcttatgaaaagtaaaaaattaatcattaaagacgttttactcaacgagagaagaattggtttccttaaaatactaaaaagaatgaacgcaaaaatatcaattgaaaatttagaagtccaaaataatgaatcagttggagatatacatgtttcaaaatctaatctatctgctgtcaagattagtaaagaagatgtatctgacatggtggatgaatttccaatattcactcttttggcgactcaagcaaagggaacaactaccgttagcggtgcaggtgagttaagactaaaagaatcggaccgtatagaatctatggaaaaatttattcaaa

SEQ ID NO: 241124 - DNA, 475 bp, Unknown
  Bacterial polypeptide expressing nucleotide sequence isolated from the Sargasso Sea
atgaaccgggcgttgttattgctggtgggttgttccgccaccctgctggtttttggtttgtggattcccttcaaggcactggtggcccaggaaatgctggagctggcctgggccgaaagccaggccaggcagagcgaggctcggccctggccctgggccgatacctggcccgtggcgaagctggatataccggcacagggtgtgtccatgatcgtgctggagggcgtgcatggtgaaagtctggcctttggtcccgggcgagtgccaggcagtgaaggtcccggtgcgccggtggtgcttgctggccaccgcgacacccactttcgccatctgcagcacctggagccgggcgatgcggtcaggctgcagggcatggatcggcagtggcgacgttatcaggtgacggccacccgggtggtggacagttcccgggagtctctggatacccggtcgctggccccagggtactctggta

SEQ ID NO: 241125 - DNA, 886 bp, Unknown
  Bacterial polypeptide expressing nucleotide sequence isolated from the Sargasso Sea
ttccattgaaatatcagggactaagtttttaaggcctttaacttatgatgaaaatataggaagcgcacaagttaagtcttgtataattcttggggctttgaatactcccggaattacagttttaaacgcaaaatattcaagaaaccatacagagttaatgttgaagtttttgaattaccccataaagataaaaagaaaaaaaaaatatgagagaatatccattcaaggtctgaagcaattcaactcttttaattataaaattccaggagatatttcctcagcgtctttttttattgttttaacgctcttatcacaaaagtctcaaatgactattaaaaatgtaaatgtaaacaaaagtagaataggagttcttaacattttaaacaaaatgggagcaagtataaaacttaaaaataaaaaaacatataacggagaaaagatagcggatatttttataaagagtaaaaaaaatttaaattcaattatttgtcctccaaaaataaatagtacagcaattgatgaattcttaattatatttttagttgcagcaaaggctaagggtatttctaggtttaaagatcttggagaaatgaacaaaaaggaatctaaaagattagatttagcaactaaatttttaaaattaattggcgtaaaagtagaaagaagtaaaaataatataaatatctatggaaatccaagtttgattttaaaagatagttatgaaataaaaaattttttaaaagatcacagaattttttttctttcgtgtatagcagcattaactttgggtggaaaatggaaaatacatgacaaggactctattaatacttcgtttccaaaatttttaaaatccctagaaatagtgggagcaaaaattagatgttaa

SEQ ID NO: 241126 - DNA, 796 bp, Unknown
  Bacterial polypeptide expressing nucleotide sequence isolated from the Sargasso Sea
gaggacggctggattgtttacggtaatggtacggggggtttcattgagccaaaaaaatctttaaattgcggtaacagtggaactaccgctcgcttaatgataggggctgtatcttcaaacccaattaattgcacttttataggtgatgactcacttagtaaaagatcaatgtcgagggtaacaaaacatttagaaaaaattggagctgttgttcaccttacaaaagaggactatttacctctaattataaatggcagtgaagaattgttaccctttaagcacgatatccagaagccttcggctcaaatcaaatcagctttgattatttctgctttgaacatacatggaaaaacgaaaattattgaaaatattccaaccagagatcacacagagagacttttaaaatttctgaatataaaaattaaaattaaaaaaaaagaaaatagaactacacaaattgagttaaatggaccatacgaattcaaggcaaaaagtattgatgttgtaggagatccatcaagtgcagctttttttattgtgggtgcattaattttgcctgagtctaaagttaccttaaaaaatattatgcttaattcatcaagaattgcttttataaaaatattaaagaaaatgggaggcaaaattaaagtaaaaaagataaaacaaatttgtggtgaaaatgttggtaatattacagctgaatatagtaaattaaaagggattactatacctgctagtcagtcagcatatttaattgatgaatatccaaattatatcaggtggctgccactcaagc

SEQ ID NO: 241127 - DNA, 755 bp, Unknown
  Bacterial polypeptide expressing nucleotide sequence isolated from the Sargasso Sea
aaaatcaagaaatcacacagaattaatgttcagtgggcttaatattccaataaatataaaaagtagaaagaatatagatattattaaaacctcaagtcctaataatttaaatggatttaatttaaatatacccggagacattagttcggctgctttttttatagcattaacacttttatctaaagattctaaattaattcttagaaatataaatttaaatccaacaagattaggtgttttgaagattcttaataaaatgggtgcaaatattaaagtaaaaaatattaaatctcgaaagggtgagaattgtggtgacataatagttaaaagtaaagataaacttaaagcaataaattgtcctacctctttaaatagtagtgctatagatgaatttttaataatttttttaattgccgcaaaatcaaaaggagtttctaactttaaagatctttctgaattaaacaagaaagaaagtccaagattaaaattaggatcaaaaatattaaatatgattggggttaaaacaaagcttacaagtagttccttaaaaatttatggcaatccaaatatttctttaaataaaaattatgaaataaaaaattatttgaaagatcatagaattatggcaatgtgcacaattgctgcgctgaccatgggaggaaaatggaaaatatatgatcctgactcaattaatacatcctttccatcgtttgttaaaattttaaaaaataaatttggcgctaaatttttatgaa

SEQ ID NO: 241128 - DNA, 847 bp, Unknown
  Bacterial polypeptide expressing nucleotide sequence isolated from the Sargasso Sea
gatggcaaaagaaaatttttccgtaatttttaatgaaaaaattaaaaaatttagtaaaagtataaaagttgattctgacaaatcaatttctcaaagaagttttattatagcttcgatttccgaaggaatatcaagagttaaaaatgctctagaatcagaggatattttctcaacaattaattgtctgcgtaaattaaattgtaaaattaaaagaattaataagggtgagtaccaaatttacggtaaaggtttgggcagtttaagttgcaaaaaaaatacaaaattggattttggtaactcaggaactgctgttcgactattgggttttggtgcttgcggcacaagtccgaatattcaaataagaattacaggagataaaagccttagaaaaagaaatatgtttaaaattattaaagtaatggaaaaatttggagctaagtttttaccggaaaataagttttatttacctttaactttaatttcatctgaaatgccaattggttttaagtttaatgctggtatttcaagtcaaattaaatctgctgttatacttgctagtacaaattcctacggcaaaactcttgtaagtgaaaagataaaaagcagaaatcatactgaaaatatgctggagcataatactcaagctattaaaataaaaagaggcaaagaaaatacaattgaaattaaaggaaagaaaaatttaaaaccatttaatgttttagttcccggcgacccatcttctggaagtttttatgcaggactctgtttattaagtaagaattcaaaaattatattgagaggtacacatgttaaccctacccgtattggttttttcaatataattaaa

SEQ ID NO: 241129 - DNA, 621 bp, Unknown
  Bacterial polypeptide expressing nucleotide sequence isolated from the Sargasso Sea
taggtcaaaatatattaatccctggagacatcagctcggcagccttttggatgattgccgcatcaatagtgccagaatctgaaattgttattaaaaatgtaggactaaatccaactagaacaggaatattgaatgtaatggatgaaatggggtgcaactataaaatagtagaaaaatcaaccattgcaggggaacccataggttctattaatgtaaaatatgtaagtaatttaaaaccatttaaaatagaaggagatattcttccaaaacttatagatgaaattccaatacttactgtagcggcttgtttttgttctggagtttcagaaattaaagatgcaaaagaattaagagttaaggaaacagaccgattaaaagtgatgacatcccaactagaaaaatttggggccaatattttagaaaaggaagatggtttaataattaatggtgattctaagtttcattctgctgaagttgatagtgaaactgatcatcgtatatcaatgagccttgcaatagcttcacttttagctaagggctcctcaaagattgcaagagcagaagcttctagcgtttcctatccaactttttgggacgatctagaaaaactaattaactgat

SEQ ID NO: 241130 - DNA, 598 bp, Unknown
  Bacterial polypeptide expressing nucleotide sequence isolated from the Sargasso Sea
ttctgcagcatttttagttatagctgcagttatttgtcctgaaagtaaaattgaactgcacaatgtgatgatcaacaaaggtagagatggcttgttcaaaactctcaaagaaatgggggcaaaaattaatatctttaatgaacgaaatatgggtggggagaaaacagcctcaatcatcgctgaatatagtcaacttaaaggtgtctctgtcccatcaaaaagagcaccaagcatgattgatgaatacccaatactttccattgctgccacatgcgcatatggaaaaacaattatgaatggtatttcagaactaagagtaaaagaatctgatagaattaagataatttcaaatggtttacttaaagcaggcgttaaaactttagagcaacatgaaagcttaactatttatggcagtgaagtagctggaggatgttctatagacagtgaactggatcatagaattgcgatgtcttttttgattttagggctgatatcaaaaaagccgataaaagttttgagagcatcaacaatagaaacaagctttccaaatttttataaaacaatgacagaaattggcgcaaaatttattaaagcataa

SEQ ID NO: 241131 - DNA, 899 bp, Unknown
  Bacterial polypeptide expressing nucleotide sequence isolated from the Sargasso Sea
aatgtttcattgtaatggttggtgctacccatggacgatcccaatgctgaatggaaggaccgtttgcctaagaaatatagatgttaaaaaaatattcgagctaattgataaatatgatgtaacgcattttggtggagcgccaattgttcttaatatgattactggtgccccagaagctgatagaaaaaaattaaaacataaagttcatgttttaactgcaggcgcaccacctccaagtataatctttaaaaagatgaaagccctagggttcgaagtcatgcatgtatacggtttaacagaaacttacggacatgttacccaatgtgcttggaatgacgaatggaatgattttgatgaagataaacaaaatgaaattaaagcaagacaaggagtaagatatcctaatactgaaggtgtaacaattttagatcctgaaactatgaaagaagttcccaaagatggcaaaacaattggagagataatgataagggggaatgtagtaatgaaaggatattttaaagacaaagaagctaccgataaagcgatgaagggtggttggtttcacactggagatttagctgttatgcaccctgatggatatgtaaaaatacaagatagatctaaagacataattatttctggaggagaaaatatatcttcaattgaaatagaaaatactctttctaaacacccttcagtttctatcgcagctgtggttgcaaaacctgatgaaaaatggggtgaagttccatgcgcttttatcgaaatgattaaagacaaaccaaccagtgaaaaagaattaatagatttttgtaaagaaactttagcaggatttaaagtaccaaaaaaagtaattttctgtgagttaccaaagacttccacaggaaaaattcagaagt

SEQ ID NO: 241132 - DNA, 855 bp, Unknown
  Bacterial polypeptide expressing nucleotide sequence isolated from the Sargasso Sea
aatggctagcagtatcaaaagtttcaatattaacattaataataaaattgcttcttttaaaaaaaaaattatagtggattcagataagtctatctctataagaagttttttaattggagctattagtcataatatttcttctgtaagtaatgttttagaatccgaagatgttttttctacaatcgaatgcttaaaaaagcttggtgtaaaaattataaaaaaagactctggaaaatatttaatatatggaaaaggcttaggctcacttcaagctaaaagacatactgaattaaactttggaaattcagggactttggcaagactgctcacagggattctaacaaccactcctaatattgatgtaaaaattagaggcgatcattctttaaacaaaaggagtatgaaaaaattgattgaattaatgagtgaatttggagcatttttttttcctaagaataaaataaaatttcctttaagattaatatcaacctcaatgccaataggaataaagtataaggcgggagtttcagctcaacttaaaagcgcggtaattttagctgggttgaattcatacgggacaactgaaattttagaaactgaaagaagtcgagaccataccgaaaacattttacagagtaataatgatgttgttcaaataagtaatgatagagaaaaaataataaaagtttttggtaaaaaatatttagagccgctcaaaataaatgtaagtggagatccatctgccgctgctttttttacagcattaactttgcttaacaatagatcaagtcttgaaataaagaatgtaggtcttaatcctacgagaataggttttttcaatatcttaagaagaca

SEQ ID NO: 241133 - DNA, 654 bp, Unknown
  Bacterial polypeptide expressing nucleotide sequence isolated from the Sargasso Sea
catgcaacgccgcaaaatcatccagaatctgctcgctatagccgccgtttcgctcacggcaacgtttgcgcatgccgacgacaaacaactcaaggtcggcacgatgagcggcccggacgcacagatctggtcggtcgtgacgagagtcgcggcacgtgaggggttgaacgtgaaggtcatcgaattcaacgactacgtgcagccgaatgcggcactcgacgcaggcgacctcgacgccaacggcttccagcaccagccgtttctcgatagccagatcaggcagcgaggctacaagatcgtcaacgtcggcctgacctacgtttcgccgatgggcttctattcgaagaagctcaagtcgctgaaggacttgccggaaggcgcgaaggtcggcatccagaacgacccgtcgaatggcaaccgcgcgctgctgctgttgcagaagtacggcgtgatcaaactgaagccgggcgtcggcaccaacggcgtcaatgctacgccgctcgacgttgcggagaatccgaagaagatcaagctgatcgaactcgacgccgcgcaattgccgcgctcgctcgacgacctcgacgcggcgtcgatcaacacggattacgcggtgaaggccggcttgcagccgaccagagacgcgatcgcgatcga

SEQ ID NO: 241134 - DNA, 286 bp, Unknown
  Bacterial polypeptide expressing nucleotide sequence isolated from the Sargasso Sea
agagagtgacaggctccaggttatgtcagaagcattaaattcttttggggtaaaatttagactagaaaaagatggaatagtgattaatggacttggaaaagaggggacatttaagggagcggaaatcgattctcatggggatcacaggatagctatggctagttccataggctctctaagatctgatagcgcaaccatcattttggattgtctcaatgttgatacatcttttccaaattttatagaagtttgtaaagaggttggtatagagatagaaagcatatga

SEQ ID NO: 241135 - DNA, 451 bp, Unknown
  Bacterial polypeptide expressing nucleotide sequence isolated from the Sargasso Sea
gaaggctgatctaaaggtgcaatattcagaacttcagtcgataaatatctcacctgaagatgttcctgtgataattgatgagattccgattttgttaattgcggcaatttttgcaaaaggtaaaacaactattaatggtgctgaagaattgcgagttaaagaatccgatcgtctagctgccatggaagcaggtcttaaagctcttggggttcaggtttcatcttcacatgacagcatagatgttgagggaaatcctaattttgatttagaatcactaacaattatagattcttttggagatcacagaattgcaatgagttttcttgtattagggcagagggtagcaggtgatattctggttaaagattgcaataatatccagacatcttacccagatttcatgagagatatgataaaacttggaggtagtttagaagaatatgccaagtaa

SEQ ID NO: 241136 - DNA, 167 bp, Unknown
  Bacterial polypeptide expressing nucleotide sequence isolated from the Sargasso Sea
tgtaactattgatacatacaatgatcacagaatggctatgtcttttgctcctttatcccttttaatcccaattaatattaataatccacaagtagttactaaattttatcttaacttttggaatgatttagaaagtttgggatttgatatttcaaaaaataaatagg

SEQ ID NO: 241137 - DNA, 875 bp, Unknown
  Bacterial polypeptide expressing nucleotide sequence isolated from the Sargasso Sea
agacgagtctttaagtcaaaggcccatgtcaagagtagttgatcccttaataacaatgggtaaagaaatctttacaaataatggaaagacaccgattaaaatattaggaggttctatttgtgatgattttgagtattctatgccaatcgcaagcgcacaagtaaaatcctcattaattttggcatctttatcatcaagaaaaactattaaaatagaagaaaaaaaagttacaagagatcatacagagaggatgattgaacattgtggtgggaaaatagatgttaagaagacttctaaaggtaaagtgataactcttcacaaacaaaaattatctgaaatttcttcatacgaagtggtaggtgatttttcttcagcagcttttataattgtagctgcattaatctctaaaaaatctaaggtttttataaaaaatgttggattaaatgaaacaagaattggtttgttgaaagtactactaaaaatgaatgcaaacatagatataatcaatgaaagaaatatttgcaatgagatttgtggtgacttaattgttcaatcatcagatctggtaggtattaacgttcctgatcacatcattcccaatattattgatgaaattcccattctttgtgtagcggcatgttttgctaagggagaaacatcaattaaaaatgcatctgaattaaagattaaagagtctgataggctaaaagcaacttctgaaggtctaaatgcaatgaatgtacagcatgatttattagatgacggattaattattaagggatcaaatgaagagataatgccactcaaagagattgattcatttggtgatcatagaattgcaatgagctttttagttgcaggtttaaggactaaaa

SEQ ID NO: 241138 - DNA, 817 bp, Unknown
  Bacterial polypeptide expressing nucleotide sequence isolated from the Sargasso Sea
atctgatcttaattatgaactacccgtagctagtgcacagctaaaaagtgctttaattcttgctggtctaagatcaaatggtaaggttatcataaaagaaaaagatgtttctagagatcatactgaaagattattaatgggtatgggagcaaatatcaataaaactggtctacaaatagaaatttcaccatctgaacttcaatcaaatgatcttgttatacctggggatatctctagtgctgctttttggatggttgcggcatcaattcattctgatgctgaattaaatattttaaatgtaggaattaatgaaacaagagctggaataatatccgtattagaaagaatgggagctaacctagaatttaataataaagttcagtattctggagaacctgcttgcgatattgctgtaaaaagttcaaaacttaagggtacaaccatatcaggtaaggaaattcctttattaattgacgaaattcctattattgctttagcagctgtatttgcagaaggagaaacaagaattaccgatgctaaagaactaagatataaagaatccgacagaatttcactaactgtagattggatgagaaaagcaggcgctgatatagaagaattagatgatggaatgattattaatggaacatacaatataaatggtggctatttttcatcacatggagatcatagattagccatgactttaggaatagcaagcttagtatctgaaaaaacaataaaaataaaaaatccagaagctgccaatgtttcatatcctaacttttgggaaactttaaatacaattggaaattga

SEQ ID NO: 241139 - DNA, 901 bp, Unknown
  Bacterial polypeptide expressing nucleotide sequence isolated from the Sargasso Sea
aacgctaatttaacatttaataaattatcaaatactgtaaaaactgtaaaacgcaaaatgccatttcaagatcccacagaatcgttggatttgggaaattcaggaacaggtgcaagattgcttactggatttttaagtgggttgggtattaatgcaactattactggtgataagtcattgtcctcaaggccaatgaagcgaattgttgaacccttaacaaaaatgggttttaaactaaactctaataatcacagattgccaatagaaatcactcaaagtactggtagcagcttttttgagtacaattcaccaatttcaagtgctcaagtaaaatcatctatcttattggctgcacttactggatcaattgaaactaaaattactgaaccaatcggctcaagagatcatactgagaggatgctgaagtactttggggcagatatacactcagaaattaagaatgaaaaaaatataattcatttttctccatcagatttatcaatacaagatgaaaattattatgttgttggagatttttcgtccgcagcttttttaattgttgctgcattaatctcagaagattcagaaataataattagagatgttggaattaatcctacaagagctgccttaattaatgtactaaaagaaatgggtggcaatatagaattcactaaagtcaaacaagtttcaaatgaagaagtttgcaatatattagtaaaaaactctcagcttaagggtgctgatattggaggtgacataataccgtcactgattgatgaaatcccaatactttcgattgctgcatcttttgctgatgggaaatcaaaaatatcagatataggcgagctaagagtgaaagaatcagatagactcaatgctatctcaaaaaggccttgat

SEQ ID NO: 241140 - DNA, 495 bp, Unknown
  Bacterial polypeptide expressing nucleotide sequence isolated from the Sargasso Sea
ctttaaaaaaaatgggcgcaaatattaaaatattaaatcaaaaaacaatggctggagaggttgttgctgatattaatgtaaaatcttctgatcttaatggatgtgaattaaataaagaaatggctaagttaatgatagatgaatttccaattttatctgtagcagcttcacaggcaaattctccaagtcattttataggattagatgaattaagagtaaaagaaagtgacagacttgaattaattaatcataatttaaacaattgtggttgtcatagcataataaaagataataatctttttattgatccatctaaaaataaagaaatagttaataccgaaataagaacagattttgatcacaggatagcgatgtcttttgctgtattgggttcaaaaattggcaaacttcatatcaatgaatccgattccattagtaccagttttccaacttttaagtctgaatttaataaagtaggtggaaatttagcttgaa

SEQ ID NO: 241141 - DNA, 184 bp, Unknown
  Bacterial polypeptide expressing nucleotide sequence isolated from the Sargasso Sea
attgaaagcgctcgcctctcatcgcgcccgacctcttaccggtacgactcaggtttctggggacaaatcaatctcccaccgcgcacttattctgggagcgcttgctatcggcgagacgaagatcacgggaatttctcgaggagaagacgtggctgcgacggagtcagccttgcgccagctcgga

SEQ ID NO: 241142 - DNA, 348 bp, Unknown
  Bacterial polypeptide expressing nucleotide sequence isolated from the Sargasso Sea
attggagatttcgggcgataagtctatttcacatagagctctcatattatcagctatgtctactgggaaaacaaaaataactaatttgcttgagtcagaagatgtaatgagcacattgaagatcttaaaaaaattaggtgtaaaaataaaaaaaaaagaaaaaacatggctggtttatggaaatggtacaaatggcttcattgaaccagataattctcttaactgtggcaatagtggaactacagccagactaatgttaggagcagtatcttcaaaccctattaattgtacttttgttggcgatgcatccctgagtaagaggtctatgtcaagagtaacagagcattt

SEQ ID NO: 241143 - DNA, 797 bp, Unknown
  Bacterial polypeptide expressing nucleotide sequence isolated from the Sargasso Sea
tttaactggagataattctctctcctcaagaccaatgaaaagaattacaaatcctttatctgaaatgggcgctgagattaaaactcaacatgggaaattacctttacatatcaagggtaaaattttaaataattgcaaaatcaaaattgacataccctcagctcaaattaaatcagggttaatattagcagccttaaatacagaaggaactagctatattaatgaacagcatattaccagagatcatactgaaataatgcttgaaacatttggtgctgatattaaaacaaaaaaaattggaaattcatctgaaattataataaatggtaaaaaaaatcttattccaataaatattgatgttcctgccgatttatcaagcagttcattttttatcgttgcagcattaattaacaaagactctaatatcactctagaaaatataaatattaatcctactagaaacggattattaattgctttagaaagaatgggagcaaacataaaagtatttaatcagaaaaatagagctggtgaaattgtggcagatataaatgtaaaatcttcagagctgaatggatgtgagttagatgagcaaatggctaaattaatgatagatgaattcccaattttatcagttgcagcatctcaagcaaattcaccaagtcattttaaaggtttagatgagttaagggtaaaagaaagtgatagactagaattaatatgtgaaaatttaaatagatgtggttgttatagtgaaattaaaaataatgatcttttgatcaatcctaaaaagaaca

SEQ ID NO: 241144 - DNA, 804 bp, Unknown
  Bacterial polypeptide expressing nucleotide sequence isolated from the Sargasso Sea
aatctgctttaattttagcaagtttaaatattcatggaaaaacaagaattattgagaaaacactcacaagagaccatactgaaagaatgatgaaatacctcaatattaatttcaaaataaggaaattaaatgatgggattagattaatagagcttaatggaccatatgaaataaattcaaaagatatagaagttgtaagcgacccatcaagcgcatctttttttattgttggagcacttattactccgggctcaaaaataattcttaaaaatataatgataaacccaactagggttacatttttaaaagtattaaaaaacatgggaggaaagatacaaataaaaaaaactaaaaatttatgtggtgaagaagtaggaataataactgcagaatatagtaaattaaaaggtattaacataccctctaaattgtcagctttgctaattgatgagtatccaatcttatctatcgcagcatcgcaagctacaggaaaaacaataatgaaggggcttgatgagctgaggcataaagaaagtgatagaataaatagtatagtaataaattttaggaaaattggatttaaagtaattaataaaaaaaatgacttaattatttatgggaagaaaataaaaatctcaaaaaaaattaacataaaatcgtatgacgatcatagaattgcaatgtcattctctatactaaatatcatttatgataattatttaaaaatcgataacaaggactgtatatcaattagttatccaaaatttcaaaaacacctcaatagcctaacagtaaaatactaat

SEQ ID NO: 241145 - DNA, 334 bp, Unknown
  Bacterial polypeptide expressing nucleotide sequence isolated from the Sargasso Sea
tatgataacagtgtatcgctcaaaaaaattaaccggagatttgtccatttcaggtgataagtcaatctctcatagagctataatttttggatcactctgtgttgggaagacaataataagggggcttttagagtcagaggatgtcttcaaaacgatagaagcggtgaaacaatttggtgcaaaagtcaagaaaaacaatgggaattgggaagtagacggttttggtgttggagggttcagcagcccttcaaacgtaatcaattgtggaaattcgggaactacttgcagattgctgattggtgcaatttcgactactccaatcattagcacattt

SEQ ID NO: 241146 - DNA, 400 bp, Unknown
  Bacterial polypeptide expressing nucleotide sequence isolated from the Sargasso Sea
aatgaaaaaaaaaatttccgttttattaaataataaaataaaaaaatttaacagaaaaatatttgttgaagctgataaaagtatatctcatagatctctattaatagctagccaatgcataggtgtttcaaaaattaaaaatattctcgaaagtgaagatgtcaaaaatacaataatttgtttaacaaaacttggtgtaaaaatagtaaaaaagaaaaatgaatttttcgtatatggcaatgggttaggctcttttagaaagccaaaaaataactctctttatgctgggaattctggaactctagcgagaatgcttttaggtttattagcaactcaaccaaatctaaaaattaaaattttaggcgatgacagtttaaataaaagagatatgaaaagaata

SEQ ID NO: 241147 - DNA, 364 bp, Unknown
  Bacterial polypeptide expressing nucleotide sequence isolated from the Sargasso Sea
aatgatagatgaatttcctattttatccattgctgcatcacaagctaattctccaagccattttaaaggtttgaatgagttgagagtaaaagaaagtgataggctcgatttaataaatcgtaatctaaataattgtggatgctatagtaaaataaatgataatgatctttttatagatccaacaagaaataaacaaatactaaatccggagataagaacagattttgatcacaggatagcaatgtcttttgctgtattaggttcaaaaattggcaaacttcatattaacgagtcagactcaataagcactagcttcccttcttttaaagaacaatttaataaagctggtggacgtttaagttga

SEQ ID NO: 241148 - DNA, 724 bp, Unknown
  Bacterial polypeptide expressing nucleotide sequence isolated from the Sargasso Sea
attgagtatttttggaggaattataagttatggagacgcttcaaaaataggaaatgttgaactaaattattgtgaacttcagccaaaaagtaactataaagttgttggagatttttcatctgcctcgtttatcattgttgcggcattaatttctaatgattcagaagtattgattaagaatgttggattaaatgaaactagatctggtctcttgagtgttcttcaaatgatgggagctgatattcaaattattcaaagtaaagaagtatgtaatgaaaaggtaggggatattttgattaaatcttcaagtttagtaggaattgaggttccaaactcaattatcccaaatattattgatgaaataccaatattaagcattgcagcaatttttgctgatggggaaactattataaagaacgcatctgaactaaaagtgaaagagtctgacagattaagcgccatttcaaatggattagacaaacttaacataagtcatgaactttttgatgatggcttatctattcatggaaacaacaatatgttagagagttcagaagcaattaactcatatggagatcatagaattgctatgagcttcctgattgcaggcgctagatctaagaatggtcttgtggttaaaaattgtgagaatattaaaacatctttcccttctttcaaagatataatgaattcaataggcatgaaaatagatgaaaagaattaa

SEQ ID NO: 241149 - DNA, 872 bp, Unknown
  Bacterial polypeptide expressing nucleotide sequence isolated from the Sargasso Sea
aaaaagagatatgaaaagaatagttgaaccattaaaagaatttggtgctctatttaaaacaaaaaaaaatactctaccttttttaataaaaggcacaaaatttatcagacctattaattataaagaaatgcgaggttctgcacaatgcaaatcagctgtaatgttagcagctttatttgcacctggaaaaacaaatttaaaatgtgtaaaatccagaaatcatactgaacttttttttaaaaatgccataaaagtaccaattaaagtaaataaaagtaataaatttgatcttatacaagttgaaggtggaaaaaattttaaaggtttttcttatcatataccaggtgatatttcatcggcagctttttttatagttctaacaattttaaataagaaatcgtcacttataataaaaaatataaatataaacccttctagaattggcatgattaagattctaaatttgatgggatcaaaaatttcttttcataataaaaaaaaatataaaggagaagtagtaggtgatatccatgtaaaaagtgtaaaaaaatttaaaagtatcaattgtcctaaaaaatttaactcctcagcgattgacgaaatgttactattatttttggtatcatctattgcaaaaggtacaagtactttccgaggactagaagaattaaataaaaaagagtcaaaaagattagattggggaataaagatattaaaaatgattggtgtcaaaacaaaaaggatatctaaccacggtattaaaatttatggtaaccctaatttacaattaaaaaaaacctacagaataagatcttatttaaaagatcatagaatctatatgttgtcagttatcgcagggttaacactaggag

SEQ ID NO: 241150 - DNA, 580 bp, Unknown
  Bacterial polypeptide expressing nucleotide sequence isolated from the Sargasso Sea
tgaagttaagggtgacccatctcaagcagctttctgggtagttggagcgacaattcttcatggttcagaagtgtctataaaaaatatatatagaggtcaagaaagaactggatttattgatgtactagtaagaatgggagcgaagataactcatgaccccgttaccaatgatctccaagtcagttctagtgaacttgttggaacggttgtggaagaaacagagattcctggcctaatcgatgaagtacccatactcgcagttgcggcggcctgtgcagacggagaaactcatttcaagggtcttggcgaacttcgagttaaagaaagcaacaggcttgagacgatagtttcagaaataggttcaatggggatgaaagcagagatttcaggcgatgatcttgttgtaaaaggtggaaagctgactggagggaaagtcgattcgcatggagatcataggatcgccatgagttgcgctattgctgcattagtttcaactagtccgacagaaatcttcggatgggaagctgtgtcaactagctatcccgactttattgctgatttggacgcattaagaaaatga

SEQ ID NO: 241151 - DNA, 915 bp, Unknown
  Bacterial polypeptide expressing nucleotide sequence isolated from the Sargasso Sea
aatgcacttaattctatttggatcttcaatatctataaatgaaaacaaagtcactttaaggaaacgagaagttatgttcaaggatcctcaacaagaattaaatcttggtaactcaggtactggtgcaagattgttgttaggtctgatttctggtcttggcttaagattaacaattaggggagattcgtcgcttgaaaaaagaccaatgagcagagtgattaaaccccttgagatgatgggagcaaagttaagtagtgattcaggcacacttcctatcagaacattaggctcaaaaattattaataattttgaatataaaatgccaattgccagtgctcaagttaaatcatgtttattattagctgcactgtcatcccagaaaaatataacaataactgaaccaaaaataacaagagatcacactgaaaggatgattgagttctttggtggagagattctctatgaaaataatcaaaattcaaaaacaattcatctcaactattctgaactagaaccaaaaaattcgtttgatgttcctggtgatttttcatctgcagcttttattattgttgctacgattatttctaaaggctctgaagttgttataaaaaatgtgggcttaaatgaatctagaaaaggattattagatgttttgctactaatgggagcaaatcttgaaatcaaaaataagaaaaaagcttcaaatgagattgttggtgacatttatataagttcttcagagctaagaggtataaatgtaccagacaatattattccaaatatcattgatgaaattcctatattaagtgttgctgcatgttttgcagaaaggcaaacagtaattaaaaatgctactgagcttcgagtaaaagaatccgatagattgcatgcaatttccgaaggactcataaagta

SEQ ID NO: 241152 - DNA, 734 bp, Unknown
  Bacterial polypeptide expressing nucleotide sequence isolated from the Sargasso Sea
ttttaaatcaagagatcatactgaacgattatttaatgctgccaaaactatggatatgaaaattccatttacaatagaagaaatactaacagctaaaaatgaacttttgaaatctaataatttgctcgatgcttatgttagacctatagtttggcgaggtagtgaaatgatggctgtttctgctcaaacaacaaaaataaattttgcaatagctgcatgggactggccaagttattttgatccagatcaaaaaatgaaaggtattaagctagatatagctagatggagaagaccagatccaaagactgcgcctgttcatgtcaaagcagcaggtctttacatgatatgtacattgtcaaaacatgaagcagaagcgaaaggatatagtgatgctttaatgttagactggaggggacaagtagcagaagcaacaggggctaatattttttttaaaatgcctgatggtaatttacatactccaattccagattgttttttagatggtataaccagaagaactgtcattaagttagccgatgaattgggtgtaaaaactatagagcgagtcattatgccaaatgaaatgaaagaagctgaggagtgttttcttacaggaacagcagcagaagttacaccagtaagtaaaattggaaatgattataattttactcctagtgaggtatcattcaaattgattgaggcatatactaaattggtaaatattaaaaattagt

SEQ ID NO: 241153 - DNA, 410 bp, Unknown
  Bacterial polypeptide expressing nucleotide sequence isolated from the Sargasso Sea
aaaaattaaaaaaaatatatcattagaccttaccaataatcctgatcttgctcaaactattgctgtgacttgtttaggccttgggattgattgtgatctatttggtcttcacacgctcaaaataaaggaaactgatagacttgaagcattgaaatctgaaattgaaaaatttggagttgatagtatacatgtaactgaaaattccttgcatctcaagaataattcagttcttaaatctaatgttgaaatagatacatatcatgatcacagaatggcaatgtcttttactccattatctgttttaatgccaattaaaatcaatgatccacaggtagtatcaaaatcatatgtatgcttttgggatgatttagaaaaacttggttttgaaatttcaaaaataaatagataaa

SEQ ID NO: 241154 - DNA, 848 bp, Unknown
  Bacterial polypeptide expressing nucleotide sequence isolated from the Sargasso Sea
tctggagtctgaagatgttataaatactcttaatgctataaaaaaacttggaataaattttaaaaaaaaaggaaatgtttacagtatctatggttatggaataaacggatacaacataaaaagaaatactacaattaatgcaggtaactcaggaactttagcaagactaatcatcggactacttgtaaaatcaaaatttactgtaaaattaataggtgataaaagtctttcaaaaagagacttttcgagagtaatcaaacctcttaaactttttggtgtaaatataagtagcaacaacaatttactgccaattaaaatacttggtactaattttttaagaccaataaattttgatgagaatatcgggagtgcacaagtaaaatcttgtgtaatttttgctgctataaataccccaggtataactaaaattaatactaaaagatcacgcaatcatactgaactaatgctaaagtttttaaactatcctattaagatcaatcaaacaaaagaatatgataaaatatcagtaatgggtctaaatcaatttaatgcctttaagtatgatgttccaggcgatattagttcagcttcattttttattgttttaacattgctctcaaaaggatcagttgtggttattcaaaacgttaatgtaaatcaaagtaggaatggaatattaactattttaaataaaatgggtgcaaacatcaaattaaaaaatagaaaatcatacaacggagaaaaaattgctgatatttttgtgaaaagtaaaaaaaaattaagatctattaattgcccaccacgattgaatagtgcggcaattgatgaattcttaattatttttttag

SEQ ID NO: 241155 - DNA, 658 bp, Unknown
  Bacterial polypeptide expressing nucleotide sequence isolated from the Sargasso Sea
tctgatcccaaagatcgaacaacctttcaatgttgatctcgaattacccgggagtaaatcgatcgcactacgccaactggccatgagcgccctaacaaagggcacaacaatactggagggggtcccggtgtgcgacgacacggctgccatgctggagtgtctcgagcgattgggtttgagcatctctcagagcaacacaaccgtcacgattgtcgggccgatgaacctagtcgatgatgtagtaatcaattcaaggatgagcggcgcatccacccgcttactgattgcgctggccgccttacgttcaggagaaacatcaatcgacggtcatgaatcactgagagcccggactaatctccccttggtaaacgcgttgcaaaaactgggatgtcagatcgactcatctgacggccatctgcctctagctgtgcatcgacccatacaacaaaccggggccgtttcgatagacggctctttatcgagtcaatacatcacggctcttctcctcatatcttgcggagtggcaggcgacaaagcttttttcgaaaagataacgatcgagggagagctcgtgtcaaaaccatacatcgacatcacgataaccgaaatgagcaaacgaggagtcagtgcccgatgggaaggcactcgatcaatcagt

SEQ ID NO: 241156 - DNA, 322 bp, Unknown
  Bacterial polypeptide expressing nucleotide sequence isolated from the Sargasso Sea
tcatatgagctaccgatagcaagtgcacaagttaagtcatgtcttatgtttgcaggcctttatacagatggacctgttgttattaaagaaaaaatacaaactcgagatcatactgagctcatgttcaagaaatttggtatacatgtctccattgaggaattagaaggcttaaaggagattcatgttttgcctcctaaatctatagatgcaaccaatattaatataccaggagacttttcatctgctgctttctttatcttgggagctttgataactccaggttcagacctaacattaatgaatataggaattaacaaaactc

SEQ ID NO: 241157 - DNA, 379 bp, Unknown
  Bacterial polypeptide expressing nucleotide sequence isolated from the Sargasso Sea
gaatatccaattctagcagttgctgctgcctttgcttcagggaaaacgacaatgcttgggctacaagagcttcgagtaaaggagagtgaccggttaagtgcaatggcgaatggccttaaatcatgcggtgtaaaagtagaagagtcttccgacactttaactgtacatggaaccggtggtgacattaaaggaggcactctaattcgaaccgaactagatcatagaatagcgatgtcgtttttgatcatgggtttagctaccagaaatccaattacgattgataacggcgcaacaattgatacaagttttcctgatttctttgaaataatgaggtccttaggagcgaacctaagtttaagtgacaaaacgaaggactgat

SEQ ID NO: 241158 - DNA, 856 bp, Unknown
  Bacterial polypeptide expressing nucleotide sequence isolated from the Sargasso Sea
aaagaattcctatatgaaatgccaattgccagtgctcaacttaaatcttgtcttctgttagcagctatttcatcaaatatgaagttaactttgcatgagagtaaagtttctagagaccataccgaaaggatgcttaaatattttggagcaaatataactacaaaaaaatatgaaggcgggcaagatatcattcttgataccaataataaactcgaagcaaaagattattcagtggttggagatttttcctcagcatcatttttaatagtggctgcactaataactaaagatagttcaattacaattaagaatgttggaattaacgagacaagattcacattgctagaaatcctcaaaaaaatgggctcagatattaatattaaaaaccattcaatttgttgtggtgaagaggtggcagatattgaagtttcttcttctgctttgagcgggataagtattgacgagaagtctattcctaaaattattgatgaaattccgattttatctattgcggcaagctttgctgagggtgaaacatctataactggtgctggtgagttgagatttaaagaatctgataggcttatggctattgaagagggattaaataagttaggcgtaagttataaatcttcagatgacagtattgtaattatgggaaatagagatctaaatatctcaaaagaagtcaatattgattcttttggcgatcacagaatcgctatgagttttttaattgctggattaagatttgattcagaagtgcatgtaaatgattgcaaaaatattgatacatcttttccaagcttttttgaaaccttttcgtctttaggagcagatataaaaacaacatgaa

SEQ ID NO: 241159 - DNA, 829 bp, Unknown
  Bacterial polypeptide expressing nucleotide sequence isolated from the Sargasso Sea
attgggagacaaaagtttatctaaaagagactttaaaagagtttcagatccactaagtagatttggtgctaagttcaaattaaaaaataataaaaatctaccgcttgaaataattggatctaagaatttaaacaaaattacatatgaggaaaaaagaggttcagcgcagtgtaaaagtgctgtgatttttgctggtatgagatcaaatggagccacaacaattaaagcaaaaaaatcaagaaaccatacagagctattatgtaaataccttaacttgccaattaaaattaaaaataaaaaaaaatatgacgaaataattataaaaaaaataaataaaataaaacctttaaactataaaataccttcagatataagttcagctgctttttttattgtgctaactgctttaagtaaaaattcagaacttttaatcaaaaatgttaatataaatccttctagaacaggtatcataactattttaaaaaaaatgggtgttaaaatagtttataaaaatataaagacatataaaggtgaacgaaatgctgatcttttaattaaatactctaaatcactcaaaggtattaactgtccaaaaaaatttaatagtggggccattgatgaatttctcgtaatttttctggtagctgctaaagctaaaggagtttcgtatttcaaagatttgtctgagcttaatcaaaaagaaagtccaagattagaatggggtaaatatattctaaatcaaatgggaattaagacaatatgcactaatagttcaataaaaatttttggcaatcccaatttaaatataaaaaaaaaaataaacataaaa

SEQ ID NO: 241160 - DNA, 409 bp, Unknown
  Bacterial polypeptide expressing nucleotide sequence isolated from the Sargasso Sea
caagggcatcgatatcccggaagacctggtgccgctggccatcgacgagttccccgtactgttcgtggctgctgcctgcgccgaaggccgcaccgtgctgcgcggcgccgaagagctgcgggtcaaggagtccgaccgtatccaggtcatggccgatggcctggttgcgctgggcgtcaaggccgagccgaccccggacggtatcgtcatcgaaggcggcgccatcggtggtggtgaggtctgggcgcatggcgatcaccgcatcgccatgtccttcagcgtcgcctcgctgcgcgccagcgcgccgatccgcattcacgactgcgccaacgtcgccacttccttccccaacttcctcgccctggcggccgaagtgggcatcaacgtggcagaagagggcaaggcatga

SEQ ID NO: 241161 - DNA, 521 bp, Unknown
  Bacterial polypeptide expressing nucleotide sequence isolated from the Sargasso Sea
tcctactagagatggtattttactagctctaaaaaaaatgggggctaatattacttataaaaataaaagaaaaattaatagcgaagaagtttgtgatattgatgtagaaagcacaaacttaaatggatgtgagcttgactctaatttttctgagttgatgattgacgaatatcctatacttgctgttgcagcatcctttgcaaattcacctagtgtttttagaggtttaaatgaattacgagtcaaggaaagtgatagactagaattaataaatgaaaatttacagagatgtggtgttaatagtttaattaatgaaaacgatctaataattaatccttcaaagaattataaaattaaaaatgatcagattaaaactaattttgatcatagaatagcaatgtcttttgcaataatgggttctaaaataggtaatttagaaatagaagaatcagattcaataaatactagttttcctacttttaaaagtgaatttaataaagtaggaggaaatattacttgaa

SEQ ID NO: 241162 - DNA, 771 bp, Unknown
  Bacterial polypeptide expressing nucleotide sequence isolated from the Sargasso Sea
cagcagcttttgaaacggccatgaagacggtctgtcatgactattttccggaaaatgagttttcaatatacgtacacggtcactctacaggtgggccctttgtgcacatgctgacccaacgcgtagaaaatatctgcggtgtcatcggcattgagaactcccctttcggctatatgtttcagaagatggtgggctatgaatgggaggggccgtttaacgacttgttgatccgcacttggcgggacatcgcccgttaccgtggagccgaagtccgaagcgaagagggtgaacaaggtctaatgcgtcttccgtggattatggaagatgttttagaagactgggagaaaacgctgacacaaccacaatttaaggcggaatatccgcttcattacgcggctgatcatgcgttagaggcagccgcgcgcgcttcagcttcaagacttaagatggataaggcggagaccgagtctttagtaaaacaatatataggttacggttacgagttgtctgggccaaatgtgaaacctgtaccgcctattctactatcgatatgcaaacatagccgagaccatactgagaaagtatatgatgaaattgttatacccatgtttgctgcgatgaaccccgcaccaagggtccgactaactaaattagggacagggagccatcattatgaatatcctgaggaaggattgccggaaggcctcgttggtccaataacggggatatggcatgacgcgattatgaaggggtactaccttgttaactaaa

SEQ ID NO: 241163 - DNA, 835 bp, Unknown
  Bacterial polypeptide expressing nucleotide sequence isolated from the Sargasso Sea
tacaattcctgtaccttcagcacaggtaaaatctggattaatattagccgcacttaatactgaaggtgtttccaaatttattgaaaaagatattacaagagatcacacagagattatgttagaatcttttggagctaatatagatattaaagaagaaaataaatataaacatatttatgttagcggaaaaaaagaactaacagcaaaaaatataaatgtaccatctgacctgtctagtagtgctttttttatcgttgcatgtttaataaataagaattcaaaattaactctaaaaaatattaatataaacccctcaagaaatggaattttgatagccttaaaaaaaatgagggcgaagattgatattaaaaataaaagatttttgaataatgaaattgttgcagatctaaatatcgaatattccaaattagagggagtcgatctagataaagaaatggcaaaattaatgattgatgaatatccaattctttcaatagctgcaagttttgctgaaaccccatcaatatttagagggcttaaagaattaaagataaaagagagcaatagactagaattaatttatcaaaatcttattagatgtggagtgaagtcagaagtaaaagatgatgatttatatatttatcctaataaagaatactcaataaaagattctaatataataactaaatttgatcatagaattgcaatggcatttagtgtcatgggaactcgtttaaatgaaaatttaacaatcttagaaagtgagtgtataaataccagttttcccaatttttttaaaagcttcaacagtgttggaggtaatttaattgaataa

SEQ ID NO: 241164 - DNA, 817 bp, Unknown
  Bacterial polypeptide expressing nucleotide sequence isolated from the Sargasso Sea
atgaagcgtcgcagtctcctgaaggtattttccgtgctggccaccggcgccgcgctgacgttgtcggccggtgcgcacgccgaagacaaggtgatcaaggtcggcacggtcgccggcccggatgcggaagtgtggcagctcgtgcagaaggtcgcgaaggagaaggaaggcctgaacgtgaaggtcatcgagttcaacgactacgtgcagccgaacgcggcgctcgactcgggcgacctcgatgcgaacagcttccagcaccagccctacctcgacagccaggtgaagcagcgcggctacaagctggtcacggcaggcctgacctacatctcgccgatcggcgtgtactcgaagaagttcaagtcgctgaaggatctgccgcagggcgcgaagctcgcggtgccgaacgatccgtcgaacgaaaaccgcgcgctgctgctgcttcagacgcaaggcgtgatcaagctgaaggccggcgcgggcacgggcggcaacaacgcgacggtgctcgacatcgccgagaacccgaagaagctgaagatctccgaactcgacgccgcgcaactgccgcgcgtgctgtcggacgtcgacgcggccgtgatcaacacgaactacgcgctcgccgccaacctgcagccgaccaaggacgcgatcgcgctcgaatcgctgacgagcccgtatgcaaacgtgatcgccgtgcgcgcgaaggacaaggatcagccgtgggtgaagaagctggtcaaggcgtaccagtcgccggaagtacgcgaattcatcaagaagcagttcaagggctcgatggtcgcgtcgttctgaa

SEQ ID NO: 241165 - DNA, 1303 bp, Unknown
  Bacterial polypeptide expressing nucleotide sequence isolated from the Sargasso Sea
aatgacttcaaatcttataataaatggctctgagaaatttaatgttgaaataatagtccctggtgataagtcaattactcacagagcattgatgattgctgcattatcaaatggaatttgcaagatatctaattatcttcaatcggatgattgcataaacactatcagcattttgaaaaatcttggagtctcaattgatatgcatgaggataacagcctgactattaatgcaaaaggtctaaagtcactaaagaaaccaaaaaaggatctagaagcaggcaactctgggacgcttattcgtttgttatcaggtattttatctatgcaagattttacctctataattactggtgatacatctttacagtctagacctatggcgagaataattgaacctcttacaaaaatgggagccgtgatacaaagtcgggagaataaaccgcccttagaattcagtaagcctgtcgaacgacgctgttgtaacgaggaaattctaatagctagcgcgcaagttaagtcatgtctaatcctagcttcattatttgttgagggcgagtcaattattattgaaaatattaagacacgagatcataccgaacgtctattacaatattttaattatgatataaaaattgacgataatagaataaaactttatggcaaaaaggatatattcgctaaagatatcgaagttcctaatgatttttcttctgcatcattttttatagttgctgctttattgaagaaaggttcacaagtattgatcaaagatgtttgtgttaatgagtatagaattggtttgactaatattttaaaaaagatgggtggacagatagaatttaaaaatcttcgtactaattgtaatgaagatattgctgatatatctgtatcatatagtaaattaaaagctataaatatatcgggagaaataatatcttctctaatagatgaattgcccatattgtttattgcatgcgcatgtgcttctggaaaatctgttataagtgatatcgaagaacttagatataaagaaagtgacagaattttatcaatggaaaaaggtctaagagagttaggaatagatgttttatccacagaatcaagtattagcataattggtggtcaaataaatggtggtattgtggatagttttgatgatcatagagttgcgatgtcattcgcaatttcaggcataatttcctctaaacccattacgatattaaaaactaaaaatatttcaacctcatttccaaattttgttgatactctgagacagataaatgttgaggtttatgagatatga

SEQ ID NO: 241166 - DNA, 1141 bp, Unknown
  Bacterial polypeptide expressing nucleotide sequence isolated from the Sargasso Sea
gctggccctggccggatgtgggaagggcgacaaggacgccgcgccggaggccgcgaaacaggcgacggtcgtgacggtgcgcccgacggccgtgccgatgaccgtcgaattgccgggccggctcgacgcctaccggcaggcggaagtgcgagcgcgagtcgcgggcatcgtgaccgcgcgcacctacgaggaaggccaggaagtgaagcagggcgcggtgctgttccgcatcgatcccgcaccgctgaaggccgcgcgcgacgccgcgcagggcgcgctcgcgaaggcgcaggccgccgcgctcgcggcgaccgacaagcgccgccgttacgacgatctcgtgcgcgatcgcgcggtgagcgagcgcgaccacaccgaggccgtcgcggccgacacgcaggcgaaggccgaggtcgcgtccgcgaaggccgagctcgcacgcgcgcagttgcagctcgactacgcgaccgtcaccgcgccgatcgcgggccgcgcgcggcgcgcactcgtgaccgaaggcgcgctggtcggccagagcgaggcgacgccgctcacgactgtcgagcagctcgatccgatctacgtgaacttctcgcagccggccgccgacgtcgacgcactacgccgtgcggtgaagagcgggcgcgcgacgggcatcgcgcagcacgacatcgcggtgacgctgctgcgcgccgacggcaccgcatatccgctgaagggcaagctgctgttcagcgatctcgcggtcgatccgaccaccgacaccgtcgcgatgcgcgcgctgtttccgaatccggagcgcgagttgctgccgggcgcgtatgtgcggatcgcgctcgacacggcggtcgaccagcgggcgatcctcgtgccgcgcgatgcgctgctgcgcacgaccgaccgcatgtcggtgcgggtcgtcggcacgaacggcaaggtcaaggacgtcgaggtcacggccgaccagatgagcggccatgactggcgcatcacgcgcggcctcgcgggcggcgagcgcgtgatcgtcgacaacgccgcgcagttcgcgcccgacacggccgtcaagcccgtcgaaaaggcgccgccgtcgaaggctgcgccggcagcggccgcttcgcaggcggccgcccgtcaaacctga

SEQ ID NO: 241167 - DNA, 1027 bp, Unknown
  Bacterial polypeptide expressing nucleotide sequence isolated from the Sargasso Sea
atgtttttaaaaaattgctggtacgttgctggttggagcgacaactataaaaatgaattaaaggcacaaaaaatcttaggggaagatattgtcttctatcgccaaagaaatggtcaagcagtagcactagaagatgcatgcccacatcgaaagcttcccctatctttagggcaattgaacgaagacaaggtcatttgtggctaccatggtctaacttttgatggctccggctcctgcgttgcagctccaactcaacaaaaaaatattccaaagcgtgcagtagtgaaatcctacccagttattgatcgctatcgcctactttggatttggatgggagacccagataaagcaaacccgaatgatatatttaatatcgagaattttgataaccctgattggggctacacagatggtggaatgctcccgatagaatgtaattatctctgggtggttgataacctattggatcctagccatgttgcgtgggttcatgtaacctcctttgctggaggaggaactgacgaccaaccgcttgatttagaaaagacagacgatggtgtgattgtttccagatggatttatgatcaacctccatcgccctactataaagatttacttaaatttgaaggtaactgtgatcgcaagcagcactatgaaatgtgtattcccggtatagctttaaataagtcagtttacactcctcctggtaccggaggtcccgataaacctgaggtagataaaacctatgtaaatatttcatacaatttcatgaccccagtcgatgaatacaatacacagtatatctggttccaacatcgcaatacagatcctggagataaatcaatatcagagaagatgaatgctggcgctcggatggcatttttggaggataaaactatcctggaagctgtccaaaaagggatggctgagatggaaacacctaatattgatcttgggctagacgcgggcgcaaagctgtttcgcttgaaattacagcgattgattgatgaagagaatagtaattagt

SEQ ID NO: 241168 - DNA, 742 bp, Unknown
  Bacterial polypeptide expressing nucleotide sequence isolated from the Sargasso Sea
taaattgaaattaattgataaaatcacctctttgccttatttacaaatgacaatttcacttttaaagaagattggtgtaaaagtgaaatttgaaaaaaatattatctatgttagtgaattaaaaaaaaatgttatgactgacattcttgttgaatcagactggagttcagcatcatatttttacagttgcgccgcattatcaaatgatgccgaaataaaaataaaaagtttttctaaaaaaagtttacagggagactcaattgtttcaaaaatatacaaaaaattaggagtatcaacaatttatgattcagaaaaaatagtgcttaaaaaaaagaaaaactttaagttacctaactcattagaatacaatttaattgactcccccgacctagcacagactattgctgtaacttgttttggtcttggaataaaatgtgatttatatggattgcatactttaaaaattaaagaaacagatagactaaatgctttgaaattagagttaaaaaaattaggttcaaatgtattaatcacgaatgatagcattcatataaataaaagtaaaattgatttttctaatattaaaatcaaaacctataatgatcatagaatggctatgtcatttgctcctttgggtattttaaaacccataattattgaatcaccaaatgtggtttcaaaatcatttcctgacttttgggataaaataatagatattggttttaaaataaacaaagtttaa

SEQ ID NO: 241169 - DNA, 845 bp, Unknown
  Bacterial polypeptide expressing nucleotide sequence isolated from the Sargasso Sea
agtacatcgacccatacaacaaaccgggaccgtttcgatagacggctctttatcgagtcaatacatcacggcgcttctcctcatatcttgcggagtggcaggcgaccaagcttttttcgaaaagataacgatcgagggacagctcgtgtcaaaaccctatatcgatatcacgataaccgaaatggacaaaagaggagtcagcgcccgatgggaaggcactcgatcaatcagtattgacaccactagaagctatgaagctggtcacataacaatcgaaggagacgccactgccgcctcttatgcagcctcgctcgcttgtattcacagagggcacgttaagttcacgaatctaggatcaaacactcagcagggagactatcgttttttcaacgtcctagagcgcctcggtgctgtagtcactcgtgatcaaacctcaacgttaatcagtggaccaagccagctcgcccatttcaattcaatcgacatgcaggacatgccagacgtggctcttacgctaattgcactggcacctctattaaatgaggaattgagtatttcagggctttcaagcttgcaccacaaggagtgtgaccgcctggagtgtcctgcggacgagctgttaaaaatggggatcaacgtcacgacgacctcagactcaattcgtattcagcctatatcaatcgaaaatttgagcccccacctattaaccacctaccacgaccacaggatggccatggctttttctttacttgggagtaaaactggtaaagtgactgttgacgacaaatttgtagtaaacaaaacttatccaaattattggctcgactatgaaaagctgatctgag

SEQ ID NO: 241170 - DNA, 271 bp, Unknown
  Bacterial polypeptide expressing nucleotide sequence isolated from the Sargasso Sea
tgataagattttatcaatggtaaaaatgatggaaagatttggtatctcaattgatgagtttaatgatggtatggatatttatggctctgacatcaaaggaaatagagtcaatagctatggagatcatagaatcgcaatgacagctcttctcgcttcattagtatctgacggagacataattgttgaagatgccgttaatattaatacatcattcccagaatttactgaaatagctaacaatattggcatgaatatcaaagtctatgactaa

SEQ ID NO: 241171 - DNA, 310 bp, Unknown
  Bacterial polypeptide expressing nucleotide sequence isolated from the Sargasso Sea
ttgaatttaatatctaatcccattcaagaaatttctggtgatgttatatgtcctggtgataaatctatatcacaaagaatattaattattggctcacttctgaattgtgatattaagataaaaggatttttaaatgctcaagatcctctatcaaccatggccgctctaaatcaaataggagcattaataattaaagatggtgaattagttgaaataaaaaatagttcacggttcttcaaaagttcagactcaccaatagatttgggtaattcgggaacaggtataaggttactaacaggattattcagga

SEQ ID NO: 241172 - DNA, 748 bp, Unknown
  Bacterial polypeptide expressing nucleotide sequence isolated from the Sargasso Sea
tggtagtaataaaaaatataagacagatattggacctgtaccaggtaaagtaaagttttgtaagtttaatgatgtctctcatctcaaaaaactagttaataaaaaaacaatagccattatcatagaatttattcaaggagatggtggtatcaatatttgcagtaaaacctttgctaaagcaataaaagatatttgtaaaaataagaaaattttattaattggagatgaaattcaaggaggaattggtcgaactggaaaaatttttgcatacaaacactacggtgtaaatccagatattataacctcagcaaaaggattaggttctggtattcctattggtgcaacaatcgtgaaaaaatatatatcaaagataatttctactggttttcatggttctacgtttggcggaggtatgcttcaaactagggtttcttataatgtactgaaatctataaacacaaaggcttttttaaataaaatactaattaatggtaaatatttatcaaaattgcttaaaaaaatgcataacgatcataaagataaaatagttgataccagatgcttaggtcttatggctgggatagaatttaaaacgaatgaaattgcttcaaaaacatattcaaaaatgtcaaaaaatggacttattactacacttattcagggtaacattataagaataacccctcctctaataattaaaaaaaaagaattaaaaaatggtttagatataatcttaaaatcgttgtaa

SEQ ID NO: 241173 - DNA, 637 bp, Unknown
  Bacterial polypeptide expressing nucleotide sequence isolated from the Sargasso Sea
gattaattcattatcaaataaaaaaataccaagtcaattagttgagtcagattggagctctgcatcatatttttatagtatagtcgcattatcagattcatcagatttaactttaaacacttattataaagatagtatacaaggagactctgatctagttaagatttataaaaattttggtgttaaaactagatatattaataatggaattaatctaagtaagtctgatgataaaattgagaaaaaaatatcattagatctttcaaataatcctgacttagctcaaacaatagttgtaacatgtttaggtcttgaaattgattgtgatctatatggcctgcaaactcttaaaataaaagaaactgatagacttagagcattgaaatctgaaattgaaaaatttggagtagataaaattgaaataacagaagactctctgcatttagaaaataattcgcaacttaaatcacatatttcaatagacacatataatgaccataggatggctatgtcttttgctccactatcacttttaaatcctatattaattaatgatccaatggttgtaacaaagtcttatgtcagtttttgggatcatctgaaaaaacttgggtttgaaatttcaaaaaataaatag

SEQ ID NO: 241174 - DNA, 560 bp, Unknown
  Bacterial polypeptide expressing nucleotide sequence isolated from the Sargasso Sea
catgagtgaaaaaaatattaatcttattgcatcatccaacaacattataaaaggttgcatagaaattccaggagataaatctattacacatagagcaatcattatctcttctattgctgatggaaaaactaaaattaatcgatatctagattcagaagatacaaatgcaaccattgatgcttgtcgccatattggtgctgaaatcgagaaagataatgaaacactgatcattaaaggaaataaccttgagcgaattcaaggagaaaatatcgaaataaactttggtaactcaggaacctcaatgagattgatgatgggcattctttctgctcaaaaattttcatcgactttatttggcgatcaatcactgaatcaaaggccaatgaatagaatttcaaaccccttgaaaatgatgaatggcgatataaaaacaacaaatggaataccgccagttcgtatatctccagttgataaaataagaaatactgatcacataattactatcgctagtgcccaaattaaatcggcaatcatgttagcaggtctttacggtcaagaat

SEQ ID NO: 241175 - DNA, 76 bp, Unknown
  Bacterial polypeptide expressing nucleotide sequence isolated from the Sargasso Sea
tttgaatctaatatcaagccaaataaaatctctcaatggtgagattgtatgtcctggtgataaatccatttcacaa

SEQ ID NO: 241176 - DNA, 1108 bp, Unknown
  Bacterial polypeptide expressing nucleotide sequence isolated from the Sargasso Sea
tcttgctagatactacaggtccttactcaatactaaaattattggaattacaggcagtgtaggaaaaactggaacgaaggatgcgatttcgtttattttaaaggagcataagaatattttttgctcaagacggtcttacaacaataaatatggaatgccattagaaattttaaatatgccaagaaaaacaaaatttggttttttcgaattaggtatgaatcattctggagagataaaaagattagtaaaaatattaaaaccaaatatttcgattatattaaatattgaaaatgtacacttaggtaattttaaatctttaaaagagattgctattgccaaaagtgaaatatttacctcttcagaaaatattgattcactaattcttaataaagagtccaatcattataatctgctatatagatattataaaaatactaagataaaaaatatttataattatagcaaaaaaaataatgcaaatatctatataaaagaaagtaagttagcaaaaaaaattatacagcttaaagttagtcttccaggtgacaaatcaattagttttggtgtcagattcgatcaggaaaatctaatcgataactgcctagcaattcttacttgcttacatgcgcttaatattaattatagttttattaaaaagtttaaaaacgtaccctttaccagtggacggggaaatattattaaatgtaagtataatagtcacaaacttaagctttatgatcattcatataatgcaagcccaatttcaatgaagcaaacaattgatatatttgatagctttaaagagaagaatattgtttatttgatcggggatatgaatgaactgggtcaaaaggctagttactaccatagtaatctagttaagtttttagataagaaaaaatttgaaaaatgtttatttatcggaaagcatttcaaaaagctagaaaacaaaattcgaaataataagatttctttttttaaagatatcaatcaggttatcgacaatcttgacgaaataatagagagtaattatacaatttttgctaaagggtctaattcaattaacataagaaaatttatcagtcatctcaaacaagaaaacttatga

SEQ ID NO: 241177 - DNA, 808 bp, Unknown
  Bacterial polypeptide expressing nucleotide sequence isolated from the Sargasso Sea
atgcaacgccgcaaaatcatccagaatctgctcgctatagccgccgtttcgctcacggcaacgtttgcgcatgccgacgacaaacaactcaaggtcggcacgatgagcggcccggacgcacagatctggtcggtcgtgacgagagtcgcggcacgtgaggggttgaacgtgaaggtcatcgaattcaacgactacgtgcagccgaatgcggcactcgacgcaggcgacctcgacgccaacggcttccagcaccagccgtttctcgatagccagatcaggcagcgaggctacaagatcgtcaacgtcggcctgacctacgtttcgccgatgggcttctattcgaagaagctcaagtcgctgaaggacttgccggaaggcgcgaaggtcggcatccagaacgacccgtcgaatggcaaccgcgcgctgctgctgttgcagaagtacggcgtgatcaaactgaagccgggcgtcggcaccaacggcgtcaatgctacgccgctcgacgttgcggagaatccgaagaagatcaagctgatcgaactcgacgccgcgcaattgccgcgctcgctcgacgacctcgacgcggcgtcgatcaacacggattacgcggtgaaggccggcttgcagccgaccagagacgcgatcgcgatcgaagacctcaaggggccgtacgcgaatctgatcgccgtacgcgcgcaggatcgcgacaagccgtgggtcaaaaagctggtcgcggcctacgaatcggatgaagtgcgcaagtacatcgacacgcaattcaaaggcgcgatcatccccgctttctgag

SEQ ID NO: 241178 - DNA, 526 bp, Unknown
  Bacterial polypeptide expressing nucleotide sequence isolated from the Sargasso Sea
actagaaaagcttttcttgactgtcttttagatatgaatgcaaatattgatcttacaaatattagacaattagggaaagaagaagtagctgatttagtcataaagtcatcggacttactacctgcaaaaataatagaagatatcgttcctaatttaattgatgagctcccattattttttttgattgcaagcttgatagatggagaatcagaatttaatggtttatcagaattgaagcataaagagagcgatagactttcaatcatgatcaataaccttcaaaaactagatgttgaagttcaattaaatgaggatagtctgaagataattggtaaaaaggataggattttttctaatgaagaatttgattcgcatggagatcatagaattgcgatgacaatgttagtagcagggctgagatcttctgaaggccttatagtgaacaatgtagattgtatcaatacctcttttccagagttcatcgaccaagcaaaatcgttggggttcaattttaaaaatggataaa

SEQ ID NO: 241179 - DNA, 400 bp, Unknown
  Bacterial polypeptide expressing nucleotide sequence isolated from the Sargasso Sea
attgatatctcagaagatattattcccaaatataattgatgagataccaattctgtgcattgctgcagcttttgcagaaggaacgacaaatattaaaaatgctgccgaacttagagttaaagaatcagatagaataaatgcaatggcggaaggtcttaaaaaattaaatattaattatgaagtctttgatgatggattatcaattataggaacaaatagttttgtagatattaatgaagaaattaattcttatgatgatcataggattgctatgagctttttaatagcaggaattagatcaaaaaatggtataagggttaaaaattgcaaaaatattgaaacctctttccctcacttcaaagatataatgaattcattaggtatgaagattaatgaataa

SEQ ID NO: 241180 - DNA, 335 bp, Unknown
  Bacterial polypeptide expressing nucleotide sequence isolated from the Sargasso Sea
attgaatttaaccacctctacaaatagccagatttttgggaaggttaaatgtcctggagataaatccatttcgcaaagagctcttatgattggagctttgatgaatcaagaaatgacaattgatggtttcttgcatggagaagatccgttttcaacaatgaatgccctcaatcaaattggagcgggtattacagttgatgaaagtggcttggttcatttatgtaagaagaattatatttttcaaaattgtgatgaaccccttaatcttggtaattctggtactggcctgcgcctcatgttgggtttgacttgtggtgctggcttaaatctttcct

SEQ ID NO: 241181 - DNA, 730 bp, Unknown
  Bacterial polypeptide expressing nucleotide sequence isolated from the Sargasso Sea
aatgccagattatatttcaataacaaatcaaataaaaagttataataaaaaaattaatgttagctcggacaaaagtatatctattagatcagttctactagcttcacaagcagttggaatatcaaaaattacaaatcttctagagtctgaggatgtattaaatactctaaaaacaataaaaaaacttggcataaaatattcaaaaatcggcaaaacctataaaattgaaggttttggattaagtggttttaatattaaaaaaaaaacttcaatagatgcaggaaattcaggaacattagccaggttaatacttggacttttagtaaaatcaaaatttccggttaaattagtaggagataaaagtttatcgaagagagacttttcaagagtaattaaacctctaaagctttttggagcaaacattaaaagcaaaaaaaatttaattccaattgaaataactggaacagattttttaagaccaattacctattttgaaaaaattgggagcgctcaggtaaaatcttgcataatactagctgctttaaatacaccaggaaaaaccataataaattcaaaaaaatcaagagaccatacagaaataatgctcaaatatttaaaatatccaattaaggtccagagaaagaaaaaatatgacagaatttatgtgcaaggtcttaatcaatttaaatcatttaattataatgtgccaggagacataagttcagcagca

SEQ ID NO: 241182 - DNA, 868 bp, Unknown
  Bacterial polypeptide expressing nucleotide sequence isolated from the Sargasso Sea
gatgccaaacgtttctgttataattccaacctataatcgggcacacttgatcaaagaaagtgtctcatccgtactatcgcaaacgtttaaaccaaaagaagttattgttgttgatgacggctcgagtgataaaacttgggatattctgaaaaatttagggttttcattatctgaatctagaaaaaataccctgcgatatatctataaagaaaatggcggggttagttctgccagaaatattggaatagaattgtcgtcctcagaatatgtagccttgttggactccgatgatcagtggaagccttctaaattagaagcacaattatcgtcactaaagaaagaaagcttttcttgtagagttagccataccaacgaaatttggataagaaatgggatcagagtaaaccagcataaaaagcacagcaaaaatggaggtgaccttttcgaaaagtgtctgaaaatgtgctgtatatctccaagctcagctttaattcacagaactgtttttaacgatctgggaggttttgatgaaagcttaaaggcatgtgaagactatgatttttggttaaggtattgtgcttttgaagagactcattttttaaatgaacagctaactattaaaaatggtgggcattcagatcaattatcacaaaagtactggggaatggacagatttaggatctacagtctggaaaaacttctaaaaaataaaaatttaagtcgatctaaatacgaacttgctctaacagaacttatcttaaagcttaaaatattgatgaatggctccatgaaacgcggcaaaaaagattttacagataagctcaataaaaaaataattcactttgagagtttattgggcaatgaataa

SEQ ID NO: 241183 - DNA, 304 bp, Unknown
  Bacterial polypeptide expressing nucleotide sequence isolated from the Sargasso Sea
agagctaagaacaaaagaaagtgataggctgcaagctatggctgactctttgaatgcatttggcattaaaaatgagctcagcaaggatggaatcgttattcatggtataggctcagaaggaacattaaactccgccgaaatagactcttacggtgatcataggatagcaatggcaagcgctataggttctctcaggtccgagggggttgtaaagattttagactgtgtgaacgtaaatacctcttttcctaattttattgatgtttgtagagaagttggaatcgatataagtaatcatgaatga

SEQ ID NO: 241184 - DNA, 808 bp, Unknown
  Bacterial polypeptide expressing nucleotide sequence isolated from the Sargasso Sea
catgcgacgttcattcctgaccggcctcggcgcactcgctgccgcgctggcattcgcggcgccctgcgcgcacgccgactcgcaaacgctcaagatcggtacgatgagcggccccgacgcgcagatctggaccgaggtgacgaaggtcgccgcgcgcgaaggcctcgcgatcaaggtcatcgaattcaacgactacgtgcagccgaacgcggcgctcgatgccggcgatctcgacgcgaacggcttccagcaccagccgttcctcgacagccagatcaagcagcgcggctacaagatcgtcaacgtcgggctcacgtacacggcgccgatgggtttctattcgaaaaagctcaagtcgctcaaggacttgccggtgggggcgaaggtcgggatccagaacgatccgtcgaacggcaaccgcgcgctgttgctgctgcagaagtacggggtgatcaagctgaagccgggcgtcggcgcgaacggcgtgaacgcgacgccgctcgacatcgccgagaacccgaagaagatcaagatcgtcgagcttgattccgcgcagctgccgcgcgcgctgcccgacgtcgatgccgcgtcgatcaacaccgactacgcggtgaaggccgggctcacgccggtgaaggatgcgatcgcgatcgaggatctgcgcgggccgtacgcgaacctgatcgcggtgcgcgcgcaggacaaggacaagccgtgggtgaagaagctcgtcgcggcctatgaatcggacgacgtgcgcaagttcatcgaccagaagttcggcggcgcgatcgtaccggcgttctga

SEQ ID NO: 241185 - DNA, 577 bp, Unknown
  Bacterial polypeptide expressing nucleotide sequence isolated from the Sargasso Sea
tttgtctgaaaactctaaattacttattaaaaatgttttaacaaaccctactcgaacaggtattattaaaatattaaaaaaaatgggtgcaaaaattatattaaaaaataaaagattatataaaggtgaagaaatttcagatatctttattaaaagtacgaaatcgttaaaaagtataaattgtccagaaaactataatgctagtgcaatagatgaatttttaataatttttcttgtggctgcaaaagctaaaggttattcatattttaaaaatctttcagaattaaataaaaaagaaagtcctaggctggaaatggctactaaaattttaaaaatgatgggagtaaaaatattcagaaataaagattctataaaaattcttggaaacccaaaattaaatttaaataagacttataaaattaaaaatttctacaatgatcacagggtattcatgatgtcagtaattgcgggactgtgttttgggggtaaatggaaaattcacaataaaaattcaataaaaacatcatttccagaatttttaaatcttactaaactcttaggagctaaatacaattga

SEQ ID NO: 241186 - DNA, 319 bp, Unknown
  Bacterial polypeptide expressing nucleotide sequence isolated from the Sargasso Sea
agtaattaaaaatgctgctgaactcagagttaaagagtctgatagattgtatgcaatttcagaaggacttataaagctaaaaattgaacacgatatttttgaagatggtatatcaattaaaggaacatcaaaagaacttaaatgtgatgaatctattgattcttttgatgatcatagaattgcaatgagttttttaatagctggtatcagatcagataattttattagagtaacgaattgtaaaaatattgagacttcattccctaatttcaaacgtataatgaatgcgataggcatgaaaattaatgaagaagattaa

SEQ ID NO: 241187 - DNA, 208 bp, Unknown
  Bacterial polypeptide expressing nucleotide sequence isolated from the Sargasso Sea
attgattaatggacttggaaaagagggggcatttattggagccgaaatcgattctcatggagatcacaggatagctatggctagttccataggctccttaagatctgatagcgagacgatcattttggactgtcttaatgttgatacatcttttccaaattttgtagaagtctgtaaggatgtaggtatagagatagaaagtatatga

SEQ ID NO: 241188 - DNA, 416 bp, Unknown
  Bacterial polypeptide expressing nucleotide sequence isolated from the Sargasso Sea
cagaagctcaattcttaaaggatgtgaattaaatgaagatatagcaaaattaatgattgatgaatatccaatcctatctattgcagcagcttttgcaaaatcccccagtatctttagagggttaggtgagttgagagtaaaagaaagtgataggttaagtttaataaaaaataatttaattaattgtggtgttgaatgtaaagtagaaaaggacgacctttacatttttccaaaaaaaaattttaaaataaataataaaattataagaactgattttgatcatagaatagcaatggcgtttgcagtaatgggttcaaaaattggaccacttgaaataaaagactcagaatcaataaatacaagctttccatcttttattaaacaattcaataatattggtggaaacattttttgaa

SEQ ID NO: 241189 - DNA, 1182 bp, Unknown
  Bacterial polypeptide expressing nucleotide sequence isolated from the Sargasso Sea
taaatattagtgggtcaaaaagtgagtcaaatagactgttagccctaagaggttttgcatcttattttgacattataaatatttctgattcagatgacacaaaagttatgatgtcagcaattaattcaaatcaagagaagatcgatattggacatgcaggaacggcaatgaggtttctaacatcgtatttctcatcaattaagaactcatcggttattctaactgggtcaaaaagaatgagagaaagacctatttcaattttagttgatgcattaagagaactggaagttgaaatattatatattgagaatgaaggttatcctcctattagaattaatggaaaagaaataaataagaaacatgtcaatcttccggcaaatgtaagttctcaatatatttcatcccttatgatgcttggagtatctctaaaaaatggactagttataaatctctcaacagaaataacttctttgccatatattgagatgaccaaaaaaataattgaaagaattggaggtaatgttagacttcaatcaaatcaaattacgattgattcattatctaataaaaaaataccaaaccaattagttgagtcagactggagctctgcatcatatttttatagtatagccgcattatcagatttttcagatttaacgttaaatacttattataaaaatagtatacaaggagactcagatctagttgagatttataaaaattttggtattaagactacgtatataagtaatggaattaatctaagtaagactgacgttaaacttgaaaaaaaaatatcattagatctttcaaataatcctgacctagctcaaacaattattgtaacctgtttaggtcttggaattgattgtgatctttatggcctgcaaacacttaaaataaaagaaacagatagacttaaagcattgaaatctgaaattcaaaaatttggagttgataaaattgaaataacagataattctatacatttagaaaataagtcaaaacttaaatcaaatatatcaattgatacatatgatgatcacagaatggctatgtcttttgtcccattatcaattttaaaaccaattataattaacgacccgatggttgtctcaaagtcttatgtaagcttttgggatcatttggaaaaacttggatttaaaattttaaaaaaataaa

SEQ ID NO: 241190 - DNA, 715 bp, Unknown
  Bacterial polypeptide expressing nucleotide sequence isolated from the Sargasso Sea
gaatttggaatacctgttgaagttaataagagtaaaaattctagatctataagagtcagcaaatctgacaaaattaatcctaaagatataaatattcctagtgacttttcttctgctgctttttttattttagcagcactaataacccccaaatctcatttaagaattagaggcgtaggaataaatgagaccagaataggttttttgcatgcacttagacatatgggaggaaaaatagatatacaaaacatccaaaacggtcctgaacctattgcagatcttttaattgaatcttctaaattaaaaggaataacacttaatactaaattagtcgcaaatatgattgatgaaatgcctgctttttttatagcagcctctttagctgaagggattacaatagttaaagatgcagaagaattaagagctaaagaaagtgataggttggaagcaatggctaatgccttagggtctttaggggtcaaatttaaattaaatcaggatggtatagtaattcatgggttaggagataatggccaatttaaggcttcagaaattaattctctaggtgatcataggatagctatggctagttctattgcgtcattaagggctgatggagaagttagaatagtagattgcgataatgtgagaacttcttttcctgactttatagaagtttgtggtgatattggaataaaaataaaagaacaatgaa

SEQ ID NO: 241191 - DNA, 781 bp, Unknown
  Bacterial polypeptide expressing nucleotide sequence isolated from the Sargasso Sea
tttgaacctacatggtataaggttcagtaatattcttcaatttccaccaagtgaggtgtttatgcctgtgcaatatctgaatatttacttgattggattcctgggttctgtcgtgacggtcattgtcggaatcgggttcagctattccggaatgtcagaattaggattcagtgtctatcgtgggatggaaatgaccacctattaccttgataaaaatcgttatgatctttacatgaatgcgatggtctactgcataaccttcggagcagcactaatgctgatcctggcagtgatactcattcctagtgcacaacaggttcaaaaaaggatgtccgcaactccctatggcactccggcaattggaactccaccctcgggaatcgaagctactcccatggaaatggaaatcccttcctatgaggagcctgaaatgactccggaacttgaggattacagtgaggacgaaggtcttggtatggcagggcttgccgatgagaatgattccgacgttgtcagtggaaacggacgcatcaccgatgaatcccatgagagcttcatccgagatcacaccgaatccgcagtcaaattcctgatgaggaaggatctcgacgattccgaactaaaaccggaagacgaacaggttcatgaagagtggcaaaaacgtgggctttcacgaggaaaactccgtaaacatgtgatgaagatgatggattgggacaatattccagaagtccctgttgatgaaattttgagccagatacgtgaaaaaatcagttcctaa

SEQ ID NO: 241192 - DNA, 304 bp, Unknown
  Bacterial polypeptide expressing nucleotide sequence isolated from the Sargasso Sea
ctgcatgaaactcccggacaaactcgccctattccaattaagaatatttccggcacagttgatctccccggatcaaagagcatctccaatcgtatcctactgcttagtatgcttgctgaagggcaaactgaaattcataatttgctggatagcgacgacacccgcagaatggtagaagcccttaaaactcttagagtggatgtactggaggaacgtaatcaaaacaagatttccgttttcggaacatgcgggacaatcccagttacagaagccactttgatgctagggaatgcagggactgtcg

SEQ ID NO: 241193 - DNA, 664 bp, Unknown
  Bacterial polypeptide expressing nucleotide sequence isolated from the Sargasso Sea
tggaaaaaaaagtttaagtcctattaaagtaaaagttccaggtgacccatcctctgctgctttttttacagctttaacaatattaaattataaatcaacaattaaaattaaagatgttggattaaatccaacgaggactggattttataatctattaaaaaaaaacggtgcgaaaataaatttttcaaatttaaaaaaacaaaataatgaactaagaggcgatatacttgtaaaaagttctaaattaaaaccattaaatgcaacaaaacaatattatgtaaattcaaccgatgagtatccaattctttttgtgatagctgcactaacaaaaggggtttctgtatttaaaggaattagtgaccttgcaaataaagaaagtaatcgtatcaaagaaatgcaaaaagttttaaagcaaattggtattaaaagtatatcaaacaaaaatgatttaaaaatttatggaaaaggtttatttgatgcaagcagaaagaagattactgtaccaaatttaggtgaccatagaatttgcatgtcctcatttatattagcaattttatcaggtgctaaaactcaaattaaaaattttgaaacagtatttacttcttccccttcttttttaaaaattatgaaattactcggagctaaatttgaaatacaaaaataa

SEQ ID NO: 241194 - DNA, 304 bp, Unknown
  Bacterial polypeptide expressing nucleotide sequence isolated from the Sargasso Sea
atgaataatatccgcacaataaaaggtggagttaatttaaaaggaaaagtaaaagtacccggagataaatctatttctcatagagctctaataataggaagtattgctaagggtgagacgactattgaagggttcttacattctgaagatccactttcaactgctgattgtcttagaaaattaggtgtgaatataccagaaataaaaaaaaatgagccttttacgatttcaggattgggtcttgatggattaaaagagcccaaagaaattcttaattgtgggaattcagggaaccacctatgag

SEQ ID NO: 241195 - DNA, 412 bp, Unknown
  Bacterial polypeptide expressing nucleotide sequence isolated from the Sargasso Sea
gggattgaagttccaccggaacgtgctgcttccatgatagatgagtatccaattctcgctgtcgtcgccgcaaacgcttctggagacacaaggatgagaggtgttagggaactacgggtaaaagagagtgataggattgaggcaatggcgaagggcttaagatcaaatggggtgtctgtcgaagaaggtgaagattggtggatagtaaagggcaatggtgctggctcagtcaaaggtggttctacttgccagacatttttggatcatcgtattgctatgtcttttttaatcctgggtttatcatcacaaaaatatatcgaaatagatgattgttcaccaatcaatacatcctttccgaatttcattcagctaatgcgtgagcttggggctaacttagaagcacgaggttaac

SEQ ID NO: 241196 - DNA, 859 bp, Unknown
  Bacterial polypeptide expressing nucleotide sequence isolated from the Sargasso Sea
ggcctattggcataaatataaagctggtgtttcagctcaactaaaaagtgctgtaattttagcaggattaaatgcttacggtaacacaacaatcgtagaaaaggatagaagtagagatcacacagaaaatatgctgattaataattcaaaaattatcaaaataatgaatagcagaaaaaaaattataaagatttttggtaaaaaagatttatcttcttcagaaatagtcgttcccggtgatccctcatctgcagctttttttactgcaataaccctattaaacaaggattcttcaatcacaataaaaaatgttggattaaaccctacaagaattggattttataaaattttaaaaagacaaggtgcaaaaataagattttttaaattaaaaaaaattaataacgagttaagaggcgatatatcagttaaaagttccaagattaagccaataaaagcaaataaaaaatactatgttaattcaacagatgaataccctatactttttataattgcagctttgacaaagggactttctatttttaaaggtatttcaggcctcgcaaataaggaaagcaacaggattgttgagatgcaaaaagttttaaaacaggtggggataaagacagctttatcaaaagataaattgaaaatttttggcaaaggaataataaacgctcaaaagaaaaagattttagtgccagaattaggtgatcaccgaatttgtatgtcaacatttgttttggccgcaattacaggcgcagaagcaaaaattaaaaactttgatacagtttttacctcgtcgccatctttcttaaagataatgagcaaattaggagcaaaatttgaaattaaaaaataa

SEQ ID NO: 241197 - DNA, 919 bp, Unknown
  Bacterial polypeptide expressing nucleotide sequence isolated from the Sargasso Sea
tgcatcattttatccaaaaaataagttcacatttcctcttaaattaatttcctctaatatgcctgttggaataaattataaagctggagtaagcgcacaactaaagtctgcagcaattttagctggtttaaatagtaatggaaatacaattatagaagaacaaataagttctcgtgatcacacagaaaatcttcttaaaaagaatactaaaacgattttaattaaaaaaggcaataaaaaattaattaaaataattggaaaaaataaattagatcctttaaatataaatgttaaaggagatccatctagcgctgcattctttactgcgttaactttgttgaacaaaggttcgtctataaaaataaaaaatgttggtcttaaccctacaagaataggtttttataaaattttaaaaaagcagaaagcaaaattaaaatttgtaaatttaaaaaaagaaaataatgagataagcggggacatactcgtaaaaagtagctcacttaaaccaataaaaacttcttctaaaatgtatccaagtactacagatgaatatttgcttttatttttaatcgcaagttttcaaaaaggtgtgtcgatttttaaagggatttcagatttagcaaataaagaaagttccagggcatatgaaatgaaaaaaattttaaatcaagttggaattaaatgtgttttgagcaaggatgaaatgaaaatttatggaaagggaatgtttgatgctagccaaaaaaaaattattattaacaatcttggtgatcatagaattgcaatgagtgcttttattttagcaatattaaccaacgctaaaactttaatcaaaaattttgaaacagtgtatacttcatctccatcttttttaaaaattatgaaaaacttaggagctaaatttgaaatacaaaaataa

SEQ ID NO: 241198 - DNA, 787 bp, Unknown
  Bacterial polypeptide expressing nucleotide sequence isolated from the Sargasso Sea
cgtattgcttgtggagaaaaatttagcagaaagactttccgggggcttgatgactcgtggatacaggcctgcactgagacctttattgtgaagtcagaaaaaatagaaccgaaaggatgcctcaaaggggaaattaatgtacccggcgataagtcaatttctcatcgaattctcatgcttgcttctttggcggaaggtgagtcaacaatccaagggttaagcagaggccaagatgttaagcacacaatggatattctcagttctctaggggcgcaactaagcgaaataggttcagatgatttacacgtgcaaggcggtgaacttaaagaacccactaggaatctatacgtaggaaattcaggaacaagtatccgattaatgtctgggatgcttgcaggtctgccgttctcgacgactcttgatggagacaagtcaattcggaaaaggccaatgggaagaataatagaaccattagaaagaatgggagtttcgatagcttgtctcgaggccacgggaatggctccgtttaggatagatgggggcggtttaaaaggcatcgagtaccagatggaagtgccaagtgctcaagtaaaaggatgtctcatgttcgctgctctttctgcagaaggcgacacgactattatcgaagacacgcccacaagggctcataccgaggagctattcgaagaagtaggccttgaaattgagattgctgatagttctataaccgtcaaagcagggagaccgaaacctttcattcatgaagttaagggtgacccatctcaag

SEQ ID NO: 241199 - DNA, 672 bp, Unknown
  Bacterial polypeptide expressing nucleotide sequence isolated from the Sargasso Sea
aaatgactcttcaattgatgcggctcttcggcgtgtctgtggagaatgataaatttaagcatttccgtgttcctagcatgccatacaaatcccccggggaaatttacgttgaaggtgatgcgtcttcagcttcttattttttagcaggtgcagcaatcagcggtggcccagtgactgtcaaagggtgcggtactaaaagcctgcagggagactcacgctttgctaaagtgctggaaaaaatgggtgcaaatgttgaatggagcgaaagagagatttcagtcagcagatcatcactcaatggcattgatgtggacatgaacatgatgccggatgcggccatgacattagcagttgccgcgctctttgcttccggtcaaactgctatacgaaacatccataactggagggtaaaggaaacggaaagactaaaagctgtttctactgaactgcgaaagctgggcgcagaagttgaggaaggagaagattaccttgttataaatcccccgaaaaagattcagaatgtagaaatagacacctacgaagatcaccggatggccatggctttttcactggctgcattcggagatgcttctgtgacaattaatgatccgggatgtgtaagtaaaacatttccagaatatttcgaggttttttctgaattatgttcctgaa

SEQ ID NO: 241200 - DNA, 918 bp, Unknown
  Bacterial polypeptide expressing nucleotide sequence isolated from the Sargasso Sea
ggtcaaaaaatcaactcctctttgaaaggagattcatcattgtcaaaaagacctatgaagagaataatcaaacccttggaagcaatgtctgtaaacattaaacatgcaaataatatgctccccataactatcaggacagatgatataaagcccattaactacaagatgcttacaaaaagcgcgcaggttaaatcatctttaatgctagctagcctggggtccaacaaatattcaagcattgcatataataaaaatactcgagaccatacagaaaaaatacttaaatatttaaagtttgatatatcagtaaaagagaaaataaaaattagaagatccaatgtagagaaaggcttttcattaacagtgcctggcgatatttcaaatgcatcatttattattgcagcttgcattataataccacactctaaaatcattattaaaaatgtattatataataaaactagacttggttttattaatgctttaaaaaagatgggagcaaatattaaagttgttaaaaaagaacggaatcaaaatccagaaaagttctgtgatgtcacagtgaagcacacgcctaaattgcgaggaatcactatcagcggtgatgaaataataactatgattgatgaaattcctattttttctattgtagcaacgcaagctaccggcaaaacaattataaaaaacgcatctgatcttagaaacaaagaaagtgatcgtttatctttaatttacaaaaatcttgtttcaatgggtgctaatattagagaacaagctgatggattgacaataagtggtaataaaaagttgtataatacaactataaagcatggcaatgatcatagaatagccatgtcatttaaagtgttaaatttattaataaacagtaaaatggataagtcttataatgaggtaatc

SEQ ID NO: 241201 - DNA, 883 bp, Unknown
  Bacterial polypeptide expressing nucleotide sequence isolated from the Sargasso Sea
agaacagaaaaatactgggaggtgataggaaatggtactggaggctttattgagccaaatgaggtgattgattgcggaaatagtggtacgacagcacgcttattaattggaacaatttcttctaatccaattaagtgtacgattgttggagacagatccctgtcaagacggtcaatgtcaagggttaccaatctactcagtactataggcgcagattttaaactcacaaaagatgattatttaccattaatgatttcaggtaatagtaaccttttaccaagcgaacatgtaatgcaaaaagcatctgctcaaataaaatcagcaataattctttcaagtttaaatatagatggcaaaacaacaattgttgaaaaaattccaacaagaaatcatacagaaaaaatgatgaaattcttaaaaattaaatttaaggaaaagaagttaaaaaatggagggaagattatagagcttaatggtccttacgaaatagtatctaaaaatattcatgttgctaacgatccatcaagcgcagctttttttattgcgggagctttaatcataccaaactcgaagataactattaataatgtagcaattaacccgtcgcgtattcaatatctgcgtatactgaagaaaatgggtgcaaaaataaagattaaaaaaactaaaataaaatgtggcgaagaaataggcaatatcactgctgagtacagtaaaatgaaaggtacaaaaattagttcatctttttcgcctttcttaattgatgagtatccaatactagcaattgttgcaactcaagcaaaaggtaaaactgtgatgaaaggacttggtgaattgcgacataaagaaagtgatagaataaatagtatagtaagtaatctaa

SEQ ID NO: 241202 - DNA, 463 bp, Unknown
  Bacterial polypeptide expressing nucleotide sequence isolated from the Sargasso Sea
atgctaaaaagctgtaaagttaataaaggtttaaatgggtctctaattattccaggagataaatcaatatcacatcgttctttaataattgcctctttggcatcaggtatttcagaagttacaaatattctaaaatctgaagatgtcttgcatacattaaatgcaatgaaaaatatgggggttaagattgaagaaaataaaaacaaattaattatatatggagaaggattagattccctaaaaaagcctaataaaacaatatacttaggaaattctgggactagtgcaagattattaattggccttctatcagctcaaaattttgaaagtactataagtggtgatacttctttatcttctagaccaatgaatagaataattgaacctctattaaaaatgggagctactataaatagtaaagatggaaaaatgccagtagaaattataggaaaaaaattaaaga

SEQ ID NO: 241203 - DNA, 706 bp, Unknown
  Bacterial polypeptide expressing nucleotide sequence isolated from the Sargasso Sea
gtgcgcctgcaggtcgaggctgacggcacccatgtcgtcgaactcgagggcgaagccatgctgacggcatccgacgtggtcgtgccgcgcgacccgtcttcagcggcttttccgatggtggcggccctcatcaccgagggcagtgaccttttgatacccgggatcggcatgaacccgcttcgcacaggcctgatcaccacgcttcaggaaatgggcggcgatatcgaaattagcaacgagcgcaacgagggcggcgagacagtcgccgatcttcgtgttcgccacagccggcttcgcggcatcgatgttccggccggacgcgccgcctcgatgatcgacgaatatccaatcctcgccgttgccgcgacccaggccgagggcaccaccagaatgctcggggttgccgaactgcgggtcaaggagaccgaccgtatcgctgtcgccgccgaaggcatcatcgcggctggtggcgacgttatctatgacgaggacagcattagcgtgaccggcagcccggtcgcaggcggcatgagcatcgattcgcaacatgaccaccggatcgcgatgtccttcctcacactcggcatggtgtccgcagatccgataaccgtcaccggctgcatgacgatcaacaccagcttccccggctttgccaccagcatgaatggctgcggcgcggcactggccagtgtcggtgacgcatgat

SEQ ID NO: 241204 - DNA, 532 bp, Unknown
  Bacterial polypeptide expressing nucleotide sequence isolated from the Sargasso Sea
tttgaatctcatatctcataaaatagaatctattaatggagaaattatttgtcctggagataaatcaatatcacaaagaatattaattataggatcacttttaaactgtgatatgcaattagatggttttttaaatgcagaagatccaatatcaaccatggaagcattaaatgaaatcggagcttcaatctcaataaggcaaaattacgtatttttaaataaaagagaggctccatttaaaaatcctgttaatgatctgaatttaggtaattctggaacaggctcaaggcttttactgggtttaatctctggtttaggaataagatgtaatttaacaggagataaatccttatcaaaaagacccatgaataggatagttgagcctctaaaaaaaatgggagcagaaataaaaagtaatgatggaaaacttccaataactaccttaggttcaaatattactaacaattttgaatacaaaatgcccatagctagtgctcaaataaaatcttcattacttcttgccgccttagcc

SEQ ID NO: 241205 - DNA, 550 bp, Unknown
  Bacterial polypeptide expressing nucleotide sequence isolated from the Sargasso Sea
attgatagccgaaccatgcaataaagtttctggtgaggttttatgtcccggagacaaatcgatatcgcaaagaattgtaatgcttggctcgttgctggatcatgatttgacggtagaaaactttttaagtgcagcagatcccatttctacaatgtcagcattagaaagagtgggatttaaatatcaatacctagatgacttagatactgtaaatattttaaactcaaaaaaaagagtaagtgatcctgatgcttctttgaaccttgggaattctggaacgggcctgcgtttaatgctgggattcttgggaggcctaaatataaaagctaactatgtaggagataattcactctccgcacgccccatggccagggtcttagacccacttaatcaaatgggaattaaatataatagtaatgcaggaaagctgccaattaattatataaattcaactcctattaaaagttttagctataaacttcctgttgcgagtgcacaggttaaatcatcaattctcttagcaggcttatgttctggagctcagatagag

SEQ ID NO: 241206 - DNA, 838 bp, Unknown
  Bacterial polypeptide expressing nucleotide sequence isolated from the Sargasso Sea
attataacgccactcctacaaactggggcaacttttcatgactcaaataatgaaaatttacccataaaaatgaagggaagtaaaattccattaccaataaaatattttagtccagttgcttccgcgcaaattaaatcaagcattttactagctggactttcttctgtaggaaatacaacagtcatagaaccttctttatcaagagatcatacagaacgtatgttaaattatcttggggctgatgtatcaacaacgcaattacctaattcttcttggaaaattactttaaaagggctccctatgctaaaaccacatagtattgaggttccatcagatccctcaagcgcggcctttcctattgtagcttcattaataacacccaatagtcaaattaaagttttaaatgtctgcgttaatgaattaagaacaggtttatatactagtctaatcgagatgggcgccaatattaaattttcaaatactagagaaataaatggtgagaagatagcagatatttctgccaaatatagtattttgaatggtattaaaatccctaagtccagggttgcatccatgattgacgagtatccaatactttcaatagctgctgtaaaagctaaaggtaatactataatggagggtgttgaagagttgagattgaaagaaactgatagaatcagtgctatgtgtaaaggtttaaattctattggtattcaaacaatcgacaacaaagatactatggttgtaaagggcaaaggaccagattgtgtcctaaatgggaatgtttcaattaaatctaatctagatcataggattgcaatgtcatttttatgcttgg

SEQ ID NO: 241207 - DNA, 949 bp, Unknown
  Bacterial polypeptide expressing nucleotide sequence isolated from the Sargasso Sea
aatgtcatcaaaaagttttaatttaatcattaaaaaaaaaattccctcatttaaaaaaaaagtaattgaagttgactctgataaatcaatttcaattaggagttttttaataggcgctataagccacaatatctcaacagttactaatactttagagtctgaggatgttatatcaacaataaattgtttaaaaaaacttggggttaaaattagaaaaattaagccaaaaaattattatatttatggaaaggggctagggtctttaaatgcaaaaaaaaatgtaactttaaattttggaaattcaggaacattagcaagacttttaattggaattctttctactaaccctaatatcgatgtaaaacttgttggagataactctttaaataaaagaaatatgaaaaaacttattttgcttatgtctgaattcggtgcgtcttttttccctaaaaaaaaattttattttcctctgaaattaatttcaacaaatcttccactaggtatcaaatataaagctggcgtatctgcgcaattaaagagtgcagttatgtttgctggccttaattcttttggtaatactgaaattttagaaacagataaaagcagagatcatacagaaaatcttttaaaaaaaaattctaaagtaataaaaataaatagtaaaaaaaataaatttataaaaatatttggtaagcaaagtctaggtccaattaatattgaagttccgggagacccgtcttcagctgctttttttacggctcttacgttattaaaaaataattcttcaatacaaataaataatgttggattaaacccaactagaattggtttttataacctcctaaaaaaacatggagcaaaaattgaatttaaaaatttaaaaaaaattaataacgaattaagaggtaatattattgtatttagtagtaagataaaaccaattaagagc

SEQ ID NO: 241208 - DNA, 853 bp, Unknown
  Bacterial polypeptide expressing nucleotide sequence isolated from the Sargasso Sea
cccccgagcccgacaccgacccgggcggcgctctcccgggtgcgcacgctatgggcggcgtgcggcgctgaggtgctggagatggacgtggcgcgtcatgatcaggtgctggcccgcaccagccacctgccgcacctgctggccttctcgctggtggatactctggcgcgccaggacgagcgcctcgagatcttccgctacgccgccggcggctttcgcgacttcacccgcatcgccggcagcgacccggtgatgtggcgcgacatcttcatcgccaaccgcgacgccgtgctcgcctccctggcggacttcgaggccggcgtggcgcggctgcgcgacgccgtggagcgcggcgatggcgacgccatgctggcgaccttcgaccgtgccagccatgcgcgccactacttcgacaccctgctcaacaagaccagttatcaggcggaataccagatgcaacagcaaggcaagctgcgctaccgggtcagccccggtggcggcgtgaccgggcgcatccgcgtccccggcgacaagtcgatctcccaccgctccatcatgctcggcgccctggccgagggggtcaccgagatcaagggcttcctggagggcgaggacagcctggccaccctgcaggccttccgcgagatgggagtggccatcgagggcccgcaccaggggcgggtgaccgtccacggcgtgggtatgcacggcctcaagtcgccgtccggtcccctctacgtgggcaacgccggcaccgccatgcgcctgttcgccggcctgctcgccggccaggccttcgacaccgagctcaccggggacacctccctcaccaggcgccccatggggcgtgtgg

SEQ ID NO: 241209 - DNA, 469 bp, Unknown
  Bacterial polypeptide expressing nucleotide sequence isolated from the Sargasso Sea
aatcaaacaaaaaaaagcaacgaggatgtaggagatttagaagtattttcatcagaattagttggagttgaagtacctgaggaaataatacccaatataatagacgaaattcctatattttctattgcagcatcttttgcaaatggagaaaccagcataaaaggagcttcggaacttcgtgttaaagagtctgacagattagaggctattggagatggattgaaagctttaaatgtaaattatcaactatatgatgatggcataaaaatatttggacaaaataaaaatattacgccaaaaaattatgtaaattcatatggtgatcatagaattgcaatgagctttttaattgcatctttgagaagtaacactgaaattatggttaaagattgtcaaaacatattaacttcttatccaaattttgtagaaactatgaatagtttgggaatgaaaatttatgaaaaataat

SEQ ID NO: 241210 - DNA, 514 bp, Unknown
  Bacterial polypeptide expressing nucleotide sequence isolated from the Sargasso Sea
aatggatttttacatagaaccatcagaaaacctatcaggcgaaatagaaattcctggtgacaaatctatatctcatagggctgtaatatttggttctttggctagtggtatctctgaatttacaaattttctttctggcgaagattgtctcgcgacattaaacgcatttaaaaaaatgggtgtctacgctaatttaagtgatgataagctcataatacatggtgttggcataaatggtctcaataaagcatctgaagcattgtacctaggtaattcaggaacatctgctagattgttggtgggtttattaggagcacaaaaatttgaatccactattgagggtgataagtcactcagcggaagaccaatgaatagagtgctggatccacttgaaaaaatgggcgctaatattcaaagcaacaatggaaaacttcccattcatatcaaatcagtaaatgaggtatcaagtattaactattcactgccgatagcaagcgcgcaagttaagtcttca

SEQ ID NO: 241211 - DNA, 811 bp, Unknown
  Bacterial polypeptide expressing nucleotide sequence isolated from the Sargasso Sea
tacaaaaatacaatgtcaagcgcgcaggttaaatcagcggtgttattatgcgggctaggtactacagatactacaagctactatgagcctataaaatctcggaatcatactgaaataatgttaaaaaatattggtgttgacatagaacacaataacggaaaaattattttaagaaactcaaattctttgatcaaaggattagacattacaattcccggtgacccatctaccgcatcattttttgctgctgctgcattaattttgccaaaatcagagttgattttaaaaaatattttagccaacccaacgcgctttggattttttgatgcactcaaaagaatgggtgccaatattgaatatttatccagctggaatgaatccggagaagaagtgaaaaatattaaaattaaatacggaccattaaacgcaataaaaattgatcacatggatattccagtaatgattgatgagataccaatattatcaatagttgcatctcaagcaaatggtaaaactgaaataagaggagcaaaagaactaagagttaaagaatctgatagaattcaagctattgttcataaccttagaaatatgggagtgttaatagtagaacacaatgatggtttctctatctttggacctgtaaaattaaaaggatctaaaataaaaacttttaatgatcacaggatagcaatggcatttagtatagcgggtttgatcgcagatggagaaactgttttagacaataaaaagtgcgtagatgtctcttttccaaatttttttaatatgttacaatccaatataaaatgaa

SEQ ID NO: 241212 - DNA, 871 bp, Unknown
  Bacterial polypeptide expressing nucleotide sequence isolated from the Sargasso Sea
attaatccattagctgaaatgggtgccaatattgtgtcatcagatggtaagttgccaatttcaatttcaccttcaacaatcaacatgcaatatacatatgaattaccaatagctagtgcacaagtaaagtcatgcatcttattggctggcttgtctgctggtacaggaattgaaattattgaacccattcagaccagggaccataccgaaagaatgctaaaaaactttggagcaaacatagaaataacttcactggatggtaaaaatattattaaacttgattcaactaataatttgtatgctaaaaactataccgttgtgggcgatatttcctcagctgcttttttaatagttgctgctttaattagtaattctccaggactagaaattaccaatgttggaatgaacccttcaaggattggagttcttaaagcattacaaaaaatgggcgcgaatatcgaatttaaaaatcaaagattagtttcaggagagccctgcgctgatcttacggttaaaaaatctaaattgaagggagtagagctttcaggagaaattatcccaaatataattgatgaaatacccattatttcaatcgctgctgcatttgcagatggcgacaccgtaataagagatgcagcagagctcagagtgaaggaatcagacaggcttcaggcagtttcagagggttttggtgtgcttggtatcaaacatgaaaattttggggacggcatgagtattcaaggatcaccaaatacacttttaatagatcaatcagtttcaatagagtcccatgacgatcataggattgctatgagcttccttattgctggacttaaatgctcacaatcaataactgtgaggaattgtgaaa

SEQ ID NO: 241213 - DNA, 118 bp, Unknown
  Bacterial polypeptide expressing nucleotide sequence isolated from the Sargasso Sea
tatgtcttcaaataagtcctcaaaattgtctggtagcatagttgtaccaggtgataagtcaatttcacacagagcactaatattaggatcattggtcactggtaaaataaaaagttaa

SEQ ID NO: 241214 - DNA, 526 bp, Unknown
  Bacterial polypeptide expressing nucleotide sequence isolated from the Sargasso Sea
atgaactttaaagttaagaaaggaaagggtgtgaggggtgaaataacaattcctggggataagtctatatctcataggtccataatgtgttcatctctagcagaaggcaaatcaaaaatctatggattcttagaaggagaagattgtttagccactaaacttgccttccaagacatgggtattaattttgagactaataatgatgaaatagtagttcatggttcaggcttatacggattaaaggaaccaaaaaaagaaattaatttgggtaactctggaacatctattaggctgttaagtggaatattatctgcgcagaagttttcttcaactctcataggagatgagtctttatcatctagacctatgaatagaatcatagaaccgctgtctctgatgggcgcaaatatcaagtctcaaaactctggaagaccgcctttagagattggaaagtcagatatgctaagttcaataaactacgaccttcctattgcgagcgctcaagtgaaatccaagtattttattg

SEQ ID NO: 241215 - DNA, 773 bp, Unknown
  Bacterial polypeptide expressing nucleotide sequence isolated from the Sargasso Sea
aaattccctgaatgaagcaaacaaaccaatttatctcggtaattctggtacaagtgcaagattgctaaccggattattatcatctcaagcatttaattctgttttaataggggatgaatctctatctaaaagaccgatgaatagaattgctaatcctttgagtgaaatgaatgcaaaaattaatacaactaatggatccttaccacttactattgagggtagtaatttaaaagcaaccaacattgatttaaagataccatctgcacaaatcaaatctggtttattgctcgctgccttaaatacacaaggtgaaacaatattaagtgaaaataaaataacaagagatcatactgaaataatgttagaatcatttggagcaaatataaaaataaaacaaagtgataataaaaaaataattaaaattgtagggaaaaaagaactcattgcaaaaaatattgatgttcctaatgatctttcaagtagtgcattttttattgtatcagccctaatcaataaaggctcacatgtgaaacttaaaaatataaataataatccaactagaaatggaataattttggcattaaaaaaaatgggtgctagtataaaattatctaatgaaagaaaaaataataatgaaaatatttgtgatatagatgtatttagctcagaattaaacgggtgtgaactaggcccagaatttgctgacttaatgattgatgaatatccaattctttcagttgctgcttgttttgcaaattctccaagtatatttc

SEQ ID NO: 241216 - DNA, 795 bp, Unknown
  Bacterial polypeptide expressing nucleotide sequence isolated from the Sargasso Sea
aatgatatcaaataaaattagtaatggcattaatggacttatagaaataccatctgataaatctatttcacatagatcaattataatcccatctattgctaaaggtacgtcggaaataaataatttattaatgtctgatgatgtgcttcatacattaaatgcttttaagtcaatgggagtaaaaattactgaagaaaataataagattattataattgggaatggtttaaattcacttttagcacctaaagaaagtatttacttaggtaattcaggaacaagtgcaagattgttaactggactccttgcatctcaaactttcaattcaattttaacaggtgataaatcactttcatcaagaccaatgaatagaattatagatccattaaaaattatgggtgcttcatttgaaaataaaactggtacacttcctttaaagatcattggacaaaatcttaaaaattcaaaaatcgaaattgagattccatctgctcaaattaaatctggattaatgctagcagctttaaatacagatggtgaaagttgcttaattgaaaaaaacattacaagagatcatactgaaaatatgctcaaggcatttggagctaatattgatataaaaaaaaatggcttagaaacaacaattttaataaaaggtaaacatgaacttaaatcacaaaatatagaagttccttcagatttatctagtagtgcgttttttattgtggctgctttaataaataaaggatctaaaattactttgaataaaataaatattaatccttcaagagatgg

SEQ ID NO: 241217 - DNA, 604 bp, Unknown
  Bacterial polypeptide expressing nucleotide sequence isolated from the Sargasso Sea
cttgttgctgggctcttagcttctcatgaggggttgcttattcgtaatgttggaataaacccaacccgaacaggacttttaactattttaaagaaaatgggtggctcaatagatcttttgaataaaagagaatttggcactgaacctgtagctgatatttttgtaaaaaaaagcaaattaaaaggtattgagattgatcagaatctagttccattggcgattgatgagtttccagtcatttttgtagctgcggcttatgcggatggttatacgactgtagcgggtgcgcaggagttgcgttataaggaaagtgatcgcttgcatgttatgtctattggacttcaagagattggaattgaaacaaaagagatagatgatgggcttatcattaagggtggggttgtccatggtggctgtgtagatagttatggtgatcatcgtattgcgatgtcttttgcagttgcaggattggcttcacaagcagtgattcaggtaaaaagaactgatgaggttagcacttcatttcctaatttcttggagttagctaattctagcgggtttgctgttgaggcttttattgctgccaaacctttaaaaggatgaa

SEQ ID NO: 241218 - DNA, 820 bp, Unknown
  Bacterial polypeptide expressing nucleotide sequence isolated from the Sargasso Sea
tggcaaaatttttggtagggaaagagggaacaaagctccaatctcaattgatgggaataaacttaaaggatgtgttattggaacgcctgtagcgagtgctcaagtaaaatccgcaatattattggcaggcctcaaagcctctggaagcacttctgttattgagccagcatcttcaagagatcataccgagagaatgttaaaagcatttggagcagacataagtatcagaggagaattaggaaggaatgtagttataaagccagggggcaacctaattggtcagagaatattaatccctggagacataagctctgcatccttttggatgattgctgcatctattgttccaaattcggaggttttaattaagaatattggattaaatcccactagaacagggatattaaatgtaatggatgcaatggggtgcaattatgaaattttagataaatcgaccattgcaggagaacctattggatctattaaagtaaagactgcaaataatttaagatcattcactattgaaggtgatattctcccaaaacttatagatgaaattcctatccttactgtagctgcctgcttttgtaatggagtgtctgaaataaaggatgcacaggaattaagagttaaggaaacagatcgattaaaagttatggcaagacagttgcataaatttggtgctgaaataacagaaaaacaggatggtttagtaattaatggtcaatcaacatttcattctgctgaggtagacagtgagacggatcatagagtagcaatgagtcttgctattgcttcacttctcgccaaaggctcctca

SEQ ID NO: 241219 - DNA, 847 bp, Unknown
  Bacterial polypeptide expressing nucleotide sequence isolated from the Sargasso Sea
agtgaatttgaatataaaatgccaattgcaagcgcgcaagtgaaatcttccttgatactagcatctttatcatccaataattctataaccatcatcgaaccgaaaattacaagagatcatactgaaagaatgattgaatattttggcggatcaatcacgcattctaatgatgtaagtgggcttatacgagtgaataatactaaattaacatcaaaaaattcttatgaaattgttggtgatttttcttctgctgcttttgtcattgttgcaactcttatatctaaagaatcacaagttattattagaaatgttggcttaaatccttcaaggagtggattgttagaaattcttgctcgtatgggagcaaatattgagataagaaataaaaaaattacatgtaatgaagaatctggggatatttttgttaaatcctctactttgaaaggtatcgatttgcctgaggatattattcctaatattattgatgaaataccaatactaagcattgctgcagcttttgctaaaggaactacttcaatcaaaaatgcatctgagctaagggtaaaggaatcagataggctggaagcaatttcagatggactaaaaaaattaaaaataaagcacgaaacatttggagatggaatatctattacaggaacaaatgatttagttgttgttgatgaagaaatcaactcatttgatgatcataggatcgcaatgagttttttggttgcaggcataagatcagccaataatattaaagtaagagattgtaaaaatattgaaacttcctttcctggattcaaagatataatgaattcaataggtatgaaaataaatgaataaa

SEQ ID NO: 241220 - DNA, 547 bp, Unknown
  Bacterial polypeptide expressing nucleotide sequence isolated from the Sargasso Sea
tcggcctcttattttttagcaggtgcagcaattactggtggacctgttacagtcaagggatgtggaactgaaagccttcaaggggactcccgttttgctgaagttttggaaaaaatgggtgcaaatgttgtatggggcgaaagagagatcttagtaagcagatcatcacttaatggtattgatgtggacatgaatatgatgccggatgcagcaatgacattagctgttacagcactctttgcctccggtcaaacagctatacacaacatccataactggagggtaaaagaaactgaaagattaaaagctgtttcaactgaattaagaaaactgggggcagaagttgaggaaggagaagattacctggttataattccaccaaaaaaaattcagaatgcagaaattgaaacctatgaagatcacaggatggcgatggctttttcgctggctgcatgtggagatgcttctgtgacgattaatgacccaggatgtgtaagcaaaacatttcccagatattttgatgttttttcaggattatgttcctaaa

SEQ ID NO: 241221 - DNA, 928 bp, Unknown
  Bacterial polypeptide expressing nucleotide sequence isolated from the Sargasso Sea
gcacaaagatgtgcaattttaggtcttgattttgatgggaaagaaattagtgaagatgtgaagcataccatggaggctgctaatgctttaaaaagctcgagagaagatgttgaacttgatttaggaaactctggaactgggatgcgacttctgactggatacattgtaggactgggagaagcagcaatccttttgggagatacgtcattatcgaaaagacccatgaagagaatagcagatccgctttcagaatggggtgcaaagattgagcttaccaacaataaatttgcaccgataaaaataaaccggtcagaattaaaaccaaagtttaaataccacttagaaatagcaagtgcacaaattaaatcgtgccttttgatggcagcagtctcatcaggtagtcaaatcgaaatagaagagcatttaatttcacgagatcacacggagaggttgcttgaggagtgcgatggtttaataaaaaaagaaggaaaaaaaattttttttgatggaagaaaaaaactaacaaaaaagaagattgatattcctaaagatttttcatgcgtcgcttattttttagcagcggatattctcactggcagaataaacgaaatcaaaaacgttggtgtaaataaaacacgaacagcttttttagatatcttaaaagaaatgggtgcaaaaattgaacaaaagaatttaagaattatttcaaatgaaccacgtgcggatttaaaagcttcaattgcagggccactcaagggggtaacaatcttgggtgatatggtaccaaaccttattgatgaaataccattaattgcaattcttgctatgtttgcccaaggaaaaacagtagtccgaggtgcaaaagaacttcggtacaaagaatcagacaggatatctttattattgtcaaatctaaaaaaatttaatc

SEQ ID NO: 241222 - DNA, 201 bp, Unknown
  Bacterial polypeptide expressing nucleotide sequence isolated from the Sargasso Sea
aatgaataatatccgcacaataaaaggtggagttaatttaaaaggaaaagtaaaagtacctggagataaatctatatctcatagagctttaataataggtagtattgctgagggtgagacgactattgaggggtttttatattctgaagatccactttcaactgctgattgtcttagaaaattaggtgtaaatattccaaa

SEQ ID NO: 241223 - DNA, 507 bp, Unknown
  Bacterial polypeptide expressing nucleotide sequence isolated from the Sargasso Sea
cgcttcaggagatgggtggcgacatcacgcttgagaaccagcgcacggaaggcggcgaaacggtggctgatcttcgcgtcaggcacagccagcttaggggaatcgacgtgccgccggaacgcgcagcatcgatgatcgacgaatatccaattctggcaatcgccgcgacgcaggcggatggcgtgacacgcatgctcggtgtcgaggagctgcgggtcaaggaaacggaccgcatcgccgtggttgcggacggcctgctggccgccggaggttccgtctcctatgacgaggacagcatgacggtcacgggcggtggtatcgccggaggcatcaccatcgactcgcagcacgatcaccggatagcgatgtcgtttctgaccctcggcatggtgtcggtagccccaatgtccgttacgggctgcggcaccatcaacaccagctttcccggttttgccgaaagcatgaacgcctgtggggccgcgctgagcgccgcacctgagcaatgat

SEQ ID NO: 241224 - DNA, 636 bp, Unknown
  Bacterial polypeptide expressing nucleotide sequence isolated from the Sargasso Sea
aagaattgaaaaaaataaattataacgttccaggagacccatcctccgcagcattttttatttcagctgcttgccttaaaccaggttccaaacttatagttaaaaatgttctatttaatgaaacgagagtgggatttttaaagactttaaaaaatatgggaggaaatattaagataattaacaaaagaaaaattcataatgaaataatcgctaacttgaaaattgtacaaaaaaataatttaactccaactgtattggaacctaatgagatcccactacaagtagatgaaatcccaattttgtctgtggtagcatcgtttgccgatggtttgacaatatttaaaggtctaaaagaactaacagttaaagaaagtaatagattgttacttatacatgaaaatttaaaaaggattggggttaaatctataattaaaaattatgatctgcatatttatggtaatctcaatttgaaaaagggtgatgctactattaagcataatgacgatcacagaattttaatgtctttttttattgcaaatattatttgtaaaaaaaacaatattataaaagaaaaatcgtgtgtaaaaacaagctatccaacgtttttcaaacacatagctcaatttagtaattaat

SEQ ID NO: 241225 - DNA, 802 bp, Unknown
  Bacterial polypeptide expressing nucleotide sequence isolated from the Sargasso Sea
tgctctgatactctcagcgcttaatttaagaggcaagacaaaaataattgaaaaaagaaatacacgagatcatacagaaaggctcatgacatatttgaaaataaaatataaaaaaacaaaattaaatcaaaattctacagctattgaacttaatggcccttatgaaataaagccaaaagatttaaaagtagcaggcgacccatcaagtgcggctttttttatagtaggagcattaattataccaaaatcagcaattattctaaaaaatgtctcactaaataaaaccagaattgctttcattagtgtactaaaaaaaatgggaggtaaaataaaaataaaaagaacagaaaatatttcaggagaagatatcggtaatgtaaaagtgtcttacagttcccttactggagttaaaattaatgcatcttcctcaccatatttaattgacgaatatcctatactctcaatcgctgcttcacaggcaaaaggttctacaattatggaaggattgtctgaacttagacataaagaaagtgatagaataaaaagtattacaactaatctttctaaattaggatttaaggtgaaatcaaaaaatgataatatatctattcaaggaaataaaaatataaagattactaagccaatgaaaattaaaacatacagtgatcatagaattgcaatgtcatttgtaattttaggtttactgtatggcaaaaatttatttgttgacgatgaagcctgtatatcgataagctatccaaactttaaagaacatttagaaaagctttcttccatatattaa

SEQ ID NO: 241226 - DNA, 724 bp, Unknown
  Bacterial polypeptide expressing nucleotide sequence isolated from the Sargasso Sea
atgcacaacagaataatagttaaagaaaaaatcaataattttgaaaaaaagatcgttattccaggtgacaaaagcattagtattaggtgggtacttatcgcctctttagcaagtggtctttcacaagccaaaaatttattattatcagaagatgtgttagcagcaattaaagttataaaaaaacttggagtaaaagtaaaatttaaaaatcaaacgtgtaaagtttatggggttggtgttgatggttataaatacaaaaaagggataattttagatgcacaaaactctggaactcttggtagattaattgctgggatattaattaactcaccctactcaattaaaattattggagataatagcttgtctaaaagagattttaaaagaattgcaaaacctttgaaaaagtttggtgctaatttaaaacttaaaaacgattacacattgcctttaattattacaggttcaaaaaatttaaaacctatcaaatatttggagaatatagggagtgcccaagtaaaaagttgtattctttttgcaggtgccagaaccactggtaaaacatttataaaagtgcctcttgcaaaaaggagtcgcgatcacacagagcgtctttttagatatcttaaattaccaattaaagttaaacgtcaaaaaaattttgatttaattgagattagtaaaattaaaaaaataaaaccatttaattataaaatcccctcag

SEQ ID NO: 241227 - DNA, 604 bp, Unknown
  Bacterial polypeptide expressing nucleotide sequence isolated from the Sargasso Sea
ctcggctgctttcttcctggtcgctgccagcatcgctgaaggctccgagctggtgctggaacatgtcggcatcaacccgacccgcaccggcgtgatcgacattctgaagcttatgggcggtgacatcaccctggaaaaccagcgtgaagtcggcggtgagcctgtggccgacattcgtgtgcgtgcggccaagcttaaaggtatcgatatcccggaagacctggtgccgctggccatcgatgaattcccggtactgttcgtcgccgctgcctgtgccgaaggtcgcaccgtgttgcgcggcgccgaagagctgcgcgtgaaagagtctgatcgcattcaggtcatggccgacggcctgatcgcgctgggcgtgaaggccgagccgaccccggacggcatcatcatcgaaggcggcaccattggtggcggcgaagtctgggcgcatggcgatcaccgtatcgccatgtccttcagcgtcgcctcgctgcgcgccagtgcgccaattcgtattcacgactgcgccaacgtcgccacctccttccccaacttccttgctttggcggctgaagtcggtatcaacgtggccgtagagggcagcgcatga

SEQ ID NO: 241228 - DNA, 892 bp, Unknown
  Bacterial polypeptide expressing nucleotide sequence isolated from the Sargasso Sea
tttgaatttaacatcctatcctgttcaagaaatttttggcgatgttatatgtccaggtgataagtcaatatcacaaagaatcttaatcattggttcacttttaaactgcgatatcaacgtaagtggatttttaaatgccaaagaccctttatcaactatggctgctctcaataaaataggagcatcaattaataaagatggcaatttagttaaaataaaaaaaagattaaggccttttaatagtccagaatcatcgatagatttaggtaactctggaacaggtattaggttactgacagggttaatatcaggattaaacttgaaagcaacattaattggagatgagtctcttagtcaaaggccaatgtcgagagtagtagatcctttagtaaaaatgggtaaaaaaatctcaacaaatgatggtaaaactccaataaaaataaaaggaggatctataattgataattttgcgtatcaaatgccagtcgcaagtgctcaagtaaaatcttccttaattttggcatcactatcatcaggaaattccatacatatagaggaaccaaaagttacaagagatcatacagagaaaatgatcgaatattgtggagggaaaatagacgtacaaaactcttctgaaggcaaaataataactcttaataaatcaaatttagctgaaatctcctcgtacgaagtggtaggtgatttttcttcagcagctttcataattgttgctgcattaatttgtaagaaatctaaagttttgattaaaaatgttgggctaaatgcaacaagaaaaggtctattggaagtcttgctaaaaatgaatgcaaatataaaaatagtaaatcgaagaaaaacttgtaatgagacttgtggtgaccccttattgtag

SEQ ID NO: 241229 - DNA, 496 bp, Unknown
  Bacterial polypeptide expressing nucleotide sequence isolated from the Sargasso Sea
aatgaataatatccgcacaataaaaggtggagttaatttaaaaggaaaggtaaaagtgcctggagataaatctatttctcatagagctctaataattggaagtattgctaagggtgagacgactattgaggggttcttacattctgaagatccactttcaactgctgattgtctaagaaagttaggtgtaaagataccagaaataaaaaaaaatgagccttttacgatttcaggattgggtcttgatggattaaaagagccaaaagaaattctcaattgtggaaattcaggaaccactatgaggttattaatgggtctattagccgcacaagaaggtaagaatttcatcttaaccggggacgcttctcttaacgaaaggcccatgggaagagtggccaaaccattatctttgatgggtggcaaaatttttggtagagaaaaaggaaacaaagctccaatctcaattgatgggaataaattaaagggtgtgttatag

SEQ ID NO: 241230 - DNA, 826 bp, Unknown
  Bacterial polypeptide expressing nucleotide sequence isolated from the Sargasso Sea
attgccattaaaatttgaaattaaaattccatctgcccaaattaaaagtgcaataatgctctcagcattaaacaccaaggggacagttagaataaaagaatttaaaactacaagagatcacactgaaaatatgctcaagtcaatgggatacaatataaaagttaaagaaaactctaaacacagatacattgaaatgaaaaataataaagaaattaaaactataaattataatgtccctggtgatccatcatctgcagcattttttatctcagctgcttgtttaaagcctggttctaaacttatcgtgaaaaatatgctttataacaaaacaagaataggttttattaaaactttaaaaagtatgggagggaatattaaggtaataaaaaaaagaaaaattcataatgaattgattgttgatttaaaaattgaacagaaaaaatatttaaaatcaattatattaagagatgcggatgtaccattacaaattgatgaaatacctattttatcaatagcagcttcgttcgcaaatggcttaactatctttaaaggcttaaaagaattaacagtcaaagagagcgatagattgttacttatacataaaaatttaaaaagaataggtgtaaaatcacaaatcaaaggttatgacttattcatttacggtaataatattttaaaaaaaggtgctgcgattattaaacatgataatgatcacagaattttgatgtcattttttattgcaaatttaatttgcaaaaagaacaacataataaaagataaatcatgtgtaaatacaagctatcccacgtttttcaaacatatatct

SEQ ID NO: 241231 - DNA, 876 bp, Unknown
  Bacterial polypeptide expressing nucleotide sequence isolated from the Sargasso Sea
ttgggagctctatttaaaataaaaaaaaatactttacctttttcaattaaaggtacaaaatttatcagacctattaattataatgaaacacgaggttctgcacaatgtaagtcagcggtaatgttagcagctttacatgcacctggaaaaacaaatttaaaatgcttaaaatcgagagatcatactgaactcttttttaaaaatgtcctaaaagtaccaattaatgtaaaaaaaaataaaaaatttgatcttatacaagttgaaggtagaaaaaattttaaaggtttttcttatcgtgtaccaggtgatatttcatccgctgctttttttatagttttaacaattttaaataagaaatcgtcacttgtaataaaaaatataaatttgaacccttctagaattggtatgattaagattcttaatttgatgggatcaaagatttcttttcataataaaaaaaaatataaaggagaattagtaggtgatattcatgtaaaaagtgtaaaaaaatttaaaagtatcaattgtccaaaaaaatttaattcttcagcgatagacgaaatgttattattatttttggtatcctctgttgcaagaggcacaagtactttccaaggactagaagaattaaataaaaaagagtcaaaaagattagattggggaataaaaatattaaaaatgattggtataaaaacacagaaaatatctaatcacggaattaagatttatggtaaccctaatttgcaattaaaaaaaacttacagaattaaatcttatttaaaagatcatagagtctatatgttatcggttatcgcaggtttaacattaggaggaagatgggtaataaatgacccagactcaattaaaacttccttt

SEQ ID NO: 241232 - DNA, 641 bp, Unknown
  Bacterial polypeptide expressing nucleotide sequence isolated from the Sargasso Sea
caatatttctgaggtaaaaaatgtactagaatcatatgatgttttttctactattaaatgtttaagaaaattgggtgttagaatagttaaagttaaaccaaaaaaatatttaatttatggaaaaggattgggttcgctttttgtaaaaaaaaattctattttaaattttcaaaattcaggaacactttgtcggcttcttgtagggataatttctactacaccaggaattcaagtaaaaattaaaggtgacaattctttaaacaaaagagatatgtcaaaactaatcaaattaatgcatgaatttggtgctgaatttcatccaaaaaataaattaaaactacctttaaaaataacatcatcggaattgcctattggtattaattataaatctgatatttcagcacaattgaaaagtgcggttatgttagcaggtctaaattcttatgggattacgacaattacagaaaaaaaagaaagcagagatcatacagaaaatattttattaaaaaatggtcccaagatcttaaggataaaaaaaaataaaaaaaaacaaaatatcattaaagtttttggaaaaagttatcttgattcttttaaactatcagtccctggagacccctcgtctgctgccttttttactg

SEQ ID NO: 241233 - DNA, 751 bp, Unknown
  Bacterial polypeptide expressing nucleotide sequence isolated from the Sargasso Sea
cagactagggatcatacagaaaaaatgttaaaacactttggtgcaaatatagaaacttcttcacaagatggtaaaaatgttatcaaacttgcttcacctaatgatttgcatgctaaaaactatcatgtagtaggtgatatctcttcagctgcttttttgattgttgctgctctaattagtaactcaccaggactagaaattatgaatgttggagtgaatccttcaaggacaggagtacttcaagcattacaaaaaatgggtgcaaatatagaagttaaagataaaagattagagtcaggagaaccttgtgctgatcttttagttaaaaaatctgaattaaagggagtagagctttccggaaaaatcattccaaatatcattgatgaactacctatcatttctatcgctgctgcatttgcaaatggagagaccttgattaaagatgcaagagagctgagagtaaaggaatcagacaggcttagggcagtttcagagggttttagtaagcttggcataatgcatagaaattttgaggatggaatgagtattaaaggagccccaaatcaacttttaatagaccaatcaatttcaatagattcttatgatgatcataggattgctatgagcttccttattgcaggccttaaatgctcaaaaccaataactgtgaagaattgtgagaatatttttacatcatttcctaattttattgaactaatttcatctacaggttatgagcttaaaaaataat

SEQ ID NO: 241234 - DNA, 213 bp, Unknown
  Bacterial polypeptide expressing nucleotide sequence isolated from the Sargasso Sea
catgagcagggaacaggtcaatctactagcatcgagtaacaacaaaataaatgggtgcataagagtccctggtgataaatctatttcgcatagagctataattatttcatctattgcggaaggaaaaacgcaaattaaccaatatttagattcagcagatatcaatgcaaccatagatgtttgtcgtcgcattgaggctgatattgtaaaaca

SEQ ID NO: 241235 - DNA, 787 bp, Unknown
  Bacterial polypeptide expressing nucleotide sequence isolated from the Sargasso Sea
aatgctctcagctttaaacactgatggtaaagtaaaaattaaagagtttaagaatacaagagatcatactgagaatatgcttaggtcaatgggatataacattaaagttagggaaaattctacatttaggtttattgagatgagaaatactaaagaactaaaaacaatacattataatgttccaggtgacccttcctcagcagcattttttattactgcagcatgttttaaacctgggtcaaaactaatgattaaaaatatactgtttaataaaacgagaattggttttattaaaacattaaagaaaatgggaggagatattagagttataagtaaaaggaaaatacataatgaactaattgctgatttaaaagttgaacaaaaaaaaaatttaaaatcaattacactagaacctaatgaagtaccattacaaattgatgaaatcccaattttgtctatagctgcttcattttcgactggtataacaatatttaagggattgaaagaactcacagtaaaagagagcaatagattatcactaatacatgaaaatttaaaaaaaattggtgtaaaatctgtaatcagaaattatgacttgtatatttacggtgactataatttaaaaaaaggtggtgcaaaaattaaacacaataatgatcatagaatattaatgtcattctttatctcaaatatgatatgtaaaaaaaacaatataattaaagataaatcatgtgtaaaaacaagctatccatcatttttcaaacatatatcccaatttagtagttaa

SEQ ID NO: 241236 - DNA, 753 bp, Unknown
  Bacterial polypeptide expressing nucleotide sequence isolated from the Sargasso Sea
tttgggtaattctggaactggatttagattaatttcaggtttgattgctggccaagaaataaatgccgaactcacaggcgatgattctttaagtaagcgtccaatgaacaggataataaaccccttaaatgaaatgggtgccaagattgaatctaataaaggctgtgccccattaacttttaataagagtcagctggtaaaagaattcttatatgaaatgccaattgccagcgctcaacttaaatcatgtcttctgttagcagctatttcatcaaatatgaagttaactttgcatgagaataaagtttctagagaccataccgaaaggatgcttaaatattttggagcaaatataactacaaaaaaatatgaaggcgggcaagatatcattcttgataccaataataaacttgaagcaaaagattattcagtggttggagatttttcctcagcatcatttttaatagtggctgcaataataactaaggatagttcaattacaattaaaaatgttggaattaacgagacaagattcacattactagaaattcttaaaaaaatgggttcagatatcaatattaaaaatcattctatttgttgtggtgaagaggtggcagatattgaagtttcttcttctgccttgagcggggtaagtattgacgaggagactattcctaaaattattgatgaaattccaattttgtctattgcggcaagctttgctgagggtgaaacatctataattggtgctgg

SEQ ID NO: 241237 - DNA, 782 bp, Unknown
  Bacterial polypeptide expressing nucleotide sequence isolated from the Sargasso Sea
attaatagatacaatgtctgaatttggtgcatactttaaacctaaaaataaatttaatttccctttaaaaataatatcaacaaatttaccaattggaattatttttaaagcaggggtttctgcacaaattaaaagtgcagtaatgctagctggtctaaattcttttggtgatacaaaaatattcgaaaaacaaaaaagtcgagaccatacagaaaatatgttgctaaaaaataaagaggtcataaaagtagtaaataaaaaaaatagattgatcaaaataagcggaaaaaaatacttaaatccaataaaaataaatgttccaggcgatccctcttcgagtgcttttttttgtgcattaacacttctaaatccaggatcacaactgaaaataaaaaacgttggacttaatccaacaagactaggattttataatcttttaaaaaaacaaaacgcaagaatattatttgaaaacataaaaaaagataacaatgaaattaagggagatgtaattgtaaaaagctcaaatctgaaaccgattaaggcttctaaagaatattatgtaaaggcaaccgatgaatatcctatactatttgtaattgcagctcttgtaaaaggtgtatcaatttttaagggtattgacgatttagcgaataaagaaagtaatagaattaaagaaatgcaaaaagttttaaaacaagcaggagtaaaaagcatattttcaaaaaataaattaaaaatatttggtaagggagttatgaatctgaaaaaaaaaaaaattttta

SEQ ID NO: 241238 - DNA, 586 bp, Unknown
  Bacterial polypeptide expressing nucleotide sequence isolated from the Sargasso Sea
gccgctcttataactcagaactcagaaatcacgattcatgatgtttgtatcaaccccttgcgtactggtttaataactacgttgaaagaaatgggtgccaacattgaaatacacaactcccgaattgaagcaggcgaacccgtggcggacctgattgttcgtagttcaaaattaaatggtgtagttgtccctgcagaacgtgcgccagcgatgatagatgagtatccaattctatcggtcgccgcctctaacgctataggtactacacgcatgcaagggttagctgaacttcgtgttaaggaaagtgatcgtttgacagctataacagacggacttaaagcgtgtggagtgaatgtcaacacagaccaagatgatcttatcgttaccggcacaaaaaacaatgtaaaaggaggggtaactgtagagactcgcatggaccaccgaattgcgatgtcatttttagtattagggttaaatgcaaaaaatccgatagctattgatgacgagaaacatataagtacaagttttccttcattcgtaagccttatgaacgacctcggtgcacaaataaggaaagtaatttgaa

SEQ ID NO: 241239 - DNA, 901 bp, Unknown
  Bacterial polypeptide expressing nucleotide sequence isolated from the Sargasso Sea
ttgggaagaaatggtttgcttcctctgacgcttcgtggatcgtctaatcccatttcaataaattatgcctcaagaataccgtcagctcaaattaaatcagctgtgctacttggtgctctgaatgctcctggtacaaccgttttttatgaaccccaaatatcccgagatcatacagaaaagatgctttctgcttttggagctaatatttcgacctcgataagcgaaaaaggtagtaaggttactgttgagggatatgctgagttgagcgcgcaacaagtcgttatacctcaggatccgtcctcagctgctttcccattgtgtgctgcattaattgtaaaagactcaaaggtttcgttcaagaatatatcccaaaaccccacccggaacggtctcattatcacgcttttagaaatgggtgcggatattgaaattaaaaataccaagcatgtaaacggcgagaaagtagctgatttaatcgtatcttcaagtgagttatctggggtagaggtgccagttgaaagagctgtcagtatgattgatgaatatccgatattagcagttgttgccgcactagcaagtggtgttaccactatgcgtggtataaaggaattgagagtcaaggaaagtgataggatttctgcgatggctaaaggtctagcaaaaaatggcgtaatggtggaagaaggcgatgattacttaaaaatagttggcacgggtagtaatggtgttccaggaggagcaactgttaaaaccttttttgatcataggattgcaatgtcttttctgtgtctaggtctagcatctgaaaattcgatcactgtggatgatgtaagatcaatcgatacaagctttcctaacttttttgaactcatggaaaatcttggtgctgatattggctaac

SEQ ID NO: 241240 - DNA, 853 bp, Unknown
  Bacterial polypeptide expressing nucleotide sequence isolated from the Sargasso Sea
atatcctcgatctctgaaggaatttcgtttgtaaacaatgctttggagtctgaagatgtaaaatcaactatagaagttgtaaagagactgggcataaatgtaaaaaaaatagataataaaaaatacaaagtatatgggaagggtcttggatcttttaaatgtaaaaattatagctttttaaattttggaaattctggaacattagcaagattaataattggtcttctatctacaactccagatataaaagtaaaaattaaaggagataaatctttaaataagagaaatatgggagagataataaagttaatgaatcaattcggagctgaatttttaccaaaaaacaaattttactttcctctaactttttcttcatcaaattatccgataggcatttcctataattctggaaaatctgcacagcttaaaagtgcagtaatcctagcaggtctcaatgcatacggaaaaactttgataaatgaagacgaagtaagcagagatcataccgaaaatattttgataagaaataaagattcttttaaaattattaagagtagaggaaaaaaaataattgttaacggaaaaaaagctttaaaaagtttttctattaaagtccctggtgatccttcttctgcagcattttttgttgctttaacaattttaaaaaataattctaaaataaaaataaaggatgtatgccttaatcctacaagaataggtttttatgagttattaaaaaaaagtggagcaaagataaaatttaaaaatttaaaaaggaaaaataatgagattgtgggagatattgtggctgaaagttcaaatcttaaaccgattagggcaactaaagaatatt

SEQ ID NO: 241241 - DNA, 759 bp, Unknown
  Bacterial polypeptide expressing nucleotide sequence isolated from the Sargasso Sea
actttaaaagtactccgagcactcggagcaaggattaaaaaaactgatggattaatcaatattgtaggcggagaatttaaagagccttcaaatttgctatatacaggaaatagtggaaccactacacggttaatggctggagtgctatcaggtcaaaaattcctgtccataatgagcggagataaatcaattcgcatgcgaccaatggcaagaatagtcgacccactacgtgaaatgggcgctagtattgaaggcaggcaaggcggcagactttgcccccttgttttcaagcaatctaatctacatgggattgaatacgatatgccaattccatccgctcaagtaaaaagcgcactactgttggcagcactttatgcagacggacccactataattcaccaacctgcgctttccagagaccacactgaactgatgttccgagcaatgggtattaacgtttccgagcacggactaagcctaaacattgaacctggtcaacttaatgcaatcgatgtcaatgtgcctgcagacataagttctgcagcttattgggtagtggcagcaatttgtcattctaatgcgaaaataactattcagaacgtgggcattaatcctactcgaacaggaatacttgacgccctagaaatgatgggagcttcaatcaacatagaaaacaaaagattagaaggcggagagttagtgggggatattattgccgaatcaagtgaattgaactcggcagttattgaaggagatttg

SEQ ID NO: 241242 - DNA, 805 bp, Unknown
  Bacterial polypeptide expressing nucleotide sequence isolated from the Sargasso Sea
gggataaaaatattaaaaaaaaatgataaatatgatgtttatggtcttccgcctggtgggttgtttcaaccgaataaattgatagattttggaaattccggaactgggattaggcttatatctggtttaatttcttcaaacaatattgaagtaaagttagttggtgataaatctctgagtcaaagacctatgaaaagagttacagagcacctatcaaaaataggtgcaaatatcaaattaaaaaaaaaattatttcctccaattaaattaaaaggtacaggtaatgcattacccctcacatttaagatacttattccatctgctcaaataaaaagtgcgattatgctttcggctttgaatacaaaaggtatcgtaaaaataaaagagtttaaatcaacaagagaccataccgagaatatgctcaaatctatgggatataacattaaagttaaagaggtttcaaaatatagatttatagaaatgagaaataataaagaactaaagaagataaattataaagttcccggtgacccttcatcagcagcattttttatctcagcagcatgccttaaacctggaagtaaacttatagttaaaaacattctatataacagaacgagagtaggttttataaaaactcttaaaagcatgggtggagaaataaatattattaataaaaaaaaggttaacaacgaactaattgctgaccttaaaattgaacaaaaaaaaagattgagctcaacgacaatagaggcaattcaggttccgttacaagtagatgaaataccaatcttgtctgttgctg

SEQ ID NO: 241243 - DNA, 799 bp, Unknown
  Bacterial polypeptide expressing nucleotide sequence isolated from the Sargasso Sea
gggacaaaattttgagtcagtattagatggtgatgaatctcttagaaaaagaccaatggatagagtaaaaactcctttagaagaaattggtgcagaaatatatacaactgatggtaaatttccagttgagattaaaggttccaaaataaaaggtggacatataaagctcgattcaggttcagcacaagttaaatctgctgttatatttgctggactcactggagaaagtgaattaacaattgaaacaaaaataaaatctagggaccataccgaaatactgctagagtattttactgataatattattgttgaggataatttaataaaagttactcccaaccctataattaaaaatgatttgattgatattcctaatgatccttcaagtgcagcattttttattgtgggctcacttttaaatgaaggttcttctataaagcttgaaaagatttgtttgaatcctacgaggattaaatttattgaaattcttcaagaaatgggtggagatatttcattcgaaaacatttctaatataagtggagaaaaagtaggcgacatactagttaagcatagcaatttaaaaggagtagatatcagtgaagaagatatccctttgataatagatgaaatacccatattatctcttgcgatgagtttggcagaaggagattcaaatatcttaggtgctaccgaattaagatataaagaatcagatagaatatactcaatagtatctgaattaagtaaccttggagcagatatcaatcaaattaatgacgatattaaaataaaaggtaaa

SEQ ID NO: 241244 - DNA, 160 bp, Unknown
  Bacterial polypeptide expressing nucleotide sequence isolated from the Sargasso Sea
aatgaataatatccgcacaataaaaggtggagttaatttaagaggaaaaataaaagtacctggagataaatcaatctctcatagagctttgataattggaagtattgctaagggtgaaactacaattgaggggtttttacattctgaagatccgctttgg

SEQ ID NO: 241245 - DNA, 808 bp, Unknown
  Bacterial polypeptide expressing nucleotide sequence isolated from the Sargasso Sea
atgtcttttattagcagcgctagcctcagagaataatataaaagttattgaaccaaaaataacacgagatcatacagagagaatgattgattattttggaggtgatattagttttacacaaaaagataatgtaggagaaataaattataaatttcataacttaactccgaaagattcatacaaagtcgctggtgatttttcttcagcaacatttatcattgtagccaccctaatatctttaaattcagaagttttaattaaaaatgtaggactgaataaaacaaggagtgggttgttagaaatactaaaattgatgggagcaaatattcagattaaaaataaaaaaattgaatctaatgaagaggttggagacatagtagttaaatcctctaaattaactggtgttcaggtacctaagaatataatcccaaatataatcgacgaaatacccatattaagcattgctgcagcttttgctgatggcgtgactaaaatcagtaatgcatctgaattaagagttaaagaatcagatagattaaatgctatatcaaatggactaagcaaattaaatataattcatgaaatatttgaggatggtttaaatataactggaacaaaagaaaaaatagattcaggagagaaaattaattcttttgatgatcatagaattgcaatgagttttttaatagcaggaattagatcaaaaaaaggaatatctgtagaaaactgcaaaaatattgaaacctcatttccaaattttaggaatataatgaattctttaggtatgaaaattgatgaaaaaaattaa

SEQ ID NO: 241246 - DNA, 192 bp, Unknown
  Bacterial polypeptide expressing nucleotide sequence isolated from the Sargasso Sea
aatgtctttcaactaccacagctatataaaaggcacatactacccacctggtgataaatcaataagtcatagaattttaattttagctggacaggcaattggaaagtctgaaatttctaatttattagaaggcgaagacgttgttaatactttaaaagcgatgagattgttaggtattaaaataaaaaaaaa

SEQ ID NO: 241247 - DNA, 256 bp, Unknown
  Bacterial polypeptide expressing nucleotide sequence isolated from the Sargasso Sea
aatggtttctataatttctattaaatcaaataaacttagtggtgaagtttttgtgcctggtgataaatctatttctcacagagcactaatactcggagcatgtgcagttggtaaaacaacaattgaaaatttgttagaaagtgaagatgtattagcaacattcagtgcactaaatgaacttggagtaaatataaaaaaaagtaagaacttatgggaagttcgtggaaatggactaggaagtttaagaagtccagaa

SEQ ID NO: 241248 - DNA, 928 bp, Unknown
  Bacterial polypeptide expressing nucleotide sequence isolated from the Sargasso Sea
ttcacaaaatcaataaaagttgactcggataaatctatttccataagaagttttttaattggatcaatatgtgaagatatttcagttgtaaaaaatgttttagagtcagatgacgttttttcaacaattaaatgcctgcaaaaattgggggtaaaaattaaaaaaaaatcaaatatatattttattcatggaaaaggattaggctctttgtacgctaaaaaaaatttaaatttaaactttggaaactctggtactttagcaagacttttaataggaatattatcaactacaccagaaatagaaatcaaagttaaaggcgatcaatctttaaatagaagaagtatgaaaaaacttataaaactgatgtcagaatttggcgcacaatttctaccgaaaaataaatttaattttccattaaagcttatttcaactgaaatgccagtaggcattaaatacaaggctggtgtctctgcccagctgaaaagtgcagtgattttagccggcctaaattcattcggaactactttaattactgaagagaaaagaagtagagatcatactgaaaatatgcttaaaaataattctcaatcgattacagttagaaaaaataagaaaagtctcataaaaatatacggaaaaaaatttttaaatcagattaaaattgatgtacctggagacccgtcttctgcagctttttttgttgcacttacattacttaataaaaattcatccctaaaaattaaaaacgtaggtttaaatcctactagaataggattttatgaattattaaaaaaacatggggcaaatataaagtttttaaacaaaagaaaaaaaaataatgaaattattggagacattaacgttaagagcagcaaattaaaaaagccaattattgcacctaaacatttctatgaaaaaactacagacg

SEQ ID NO: 241249 - DNA, 418 bp, Unknown
  Bacterial polypeptide expressing nucleotide sequence isolated from the Sargasso Sea
aatgaataatatccgcacaataaaaagtggaattaatttaaaagggaacataaaagtacctggagacaaatctatctctcacagagccttattaataggaagtattgctaagggtgaaactactattgagggttttttacattctgaagatccactttcaactgctgattgtctcaggaaattaggagtaaacataccagaaataaaaaaagatgagccttttacgatttcaggcttgggtcttgatggtatagaagagcctaaagaaattcttaattgtggaaattcgggaaccacaatgagattgttaatgggattattagccggtcatgaaggtaagaattttatcttaacaggggatgcttctcttaatgagaggccaatgggtagagttggtaaaccattatgtttgatgggt

SEQ ID NO: 241250 - DNA, 751 bp, Unknown
  Bacterial polypeptide expressing nucleotide sequence isolated from the Sargasso Sea
aggaatatacgctgatggtataacaacttttgaagaaccatcaaaaagtagagaccatacagaaagaatgttgtcggctatgggagctgacataaaaattgacgggaatgtaactactatacaaaaatcaaagctaaaagcacaaaatattgtcattccaagtgacataagttctgctgcattttggatggttttgggagcatgtcaccctaatgcagaaatattattaccaaatataggcctgaatcctaatagaacaggaatacttgaggtattaattgaaatgggagccaatattactgttaataataaaactaccgatatgggggaacctagaggagatattctagttaaatcaagtaagctcaaaggaataaatatagataaaaatactattccaaaaattattgatgaaataccaatattgtcactggctgcctgttttgcaagcacccaaacaattattgatgatgccgaagaattaagagtaaaagaatcagacaggattaaagcaactgtgtccgggctttcaaaattaggtgctgacatacaggaaactgaacaaggaatgataataaatccaagtaataaattaataggaaatcaagtagaaagctatggagatcatagaattgctatgatgcttggaattgcaggattgttatctgataaaacaacaataatagaaggtgccgaacacgctagtgtttcttatccaaatttctgggatgaaatagaaagtaaaaaataa

SEQ ID NO: 241251 - DNA, 745 bp, Unknown
  Bacterial polypeptide expressing nucleotide sequence isolated from the Sargasso Sea
tttgattattaaaagtaaaattttaccatttaaaaaaactataaaggttgactcggataaatcaatttcgatcagaacttttttaattggtgcaataagtcataaaatttcgtcagcaaaaaatgttttggagtccgaggatgttttttcaactataaattgtttaaaaaaactaggagtaaaaattcaaaaagaaaatgaaaaaaattatctaatttacggaaaagggttaggatctctttatatcaaaaaaaattcaaaattaaattttggtaactcaggtacattagctcgacttttagttgggatactttctagcactcctaatatagaaattaaaattgagggagataattctttaaataaaagaagtatgaaatctctaatattattgatgtcagagtttggtgcttcttttttacctataaataaatttaggtttcctctaaaaatgatatcttcaagcatgccgattggaataggttataaagctggtgtgtcagcgcaacttaaaagtgctgtaattttagcaggtttaaactcatacggagttaccagaataatagaaaatgaaaaaagtcgagaccatacagaaaacatgctttctaaaaattcacaagtaattaatataactaataaaaaaaaaaaattaattaaaattaatggaaaaaaaagtttagaaccaatcaatattactgtacctggagatccctcatctgcagctttttttaccgctttaactatt

SEQ ID NO: 241252 - DNA, 763 bp, Unknown
  Bacterial polypeptide expressing nucleotide sequence isolated from the Sargasso Sea
tcaataaaaagcgcagtgattttagcgggattaaattcgtttggtaatacgaatataattgagacagaaaaaagtagagatcacacagaaaatatgttgctccataacaaaaagtgtataaaaatcaaaagaggtaaaagtaaacatatcaaaatttttggaaaaaaatttttagactctttaaaaattgaggtgcccggagacccatcttcatctgcattcttttctgctttaactattcttaacgaaaaatcttcaataatcataaagaacgttggattaaaccctacaagaataggtttttacaaacttctcaaaaaacatggagcgaatattaaatttaaaaattttaaaaataaaaataatgaaccaagaggtgatattcttgttactagttgtaaattaaaatcattaaaagcatccaaagagtattatgtcaactcaacagatgaatatcctattctttttgttattgctgctttaaccaaaggtttgtctatattcaaaggtataaaagatttagcaaacaaagaaagcaatagaataaaagaaatgcagaaaatacttaaacaaataggagttaaaagcactgcaacaaaaaatcaacttaaaatttttggaaaaggcatgattaacgcaagaaataaaatgataatagttccaagtttaggtgatcatagaatatgtatgtcatcttttgttcttgggctattaactggagctaaagtaaaaattaaaaattttgaaacagtttttacttcat

SEQ ID NO: 241253 - DNA, 267 bp, Unknown
  Bacterial polypeptide expressing nucleotide sequence isolated from the Sargasso Sea
catgcgtgctttgagctcgaagtctcttaagggcattgtttcaattccgggcgacaaatctatttcgcatcgctctttaatccttggagccctcgctattgggcaaactaaaattactggattattagagggtcaagatgttcttgataccgcaagggcaatggttgcatttggtgcgcaagttgagaaaaatgagggtggtgaatggtgtgtagacggtgtgggtgtgggtggctttgcggaaccttcgacggtcgttgattgtgg

SEQ ID NO: 241254 - DNA, 142 bp, Unknown
  Bacterial polypeptide expressing nucleotide sequence isolated from the Sargasso Sea
atgttaaaaagttcaaaaatttataatggcataaatggtgaaattgcaattccaggagataaatcaatttcacacagatcaataattatcccatccatatcaaatggaatttctgaagtttcaaatattttaaaatcagaag

SEQ ID NO: 241255 - DNA, 307 bp, Unknown
  Bacterial polypeptide expressing nucleotide sequence isolated from the Sargasso Sea
atgagccttccgggcaaacttacactgactccaattaataatatttcaggcactgttgatctccccggctcaaaaagcatttccaacaggattctcctgctgagcatgcttgctgaagggaatactgaaattcataatttgcttgatagcgatgacactcgccggatgatggaagcccttaacactcttagagtagatttgctggaggatcgcaatcaaaacagggtttcaatttccggaacatctgggacaatcccagttaacaaagccactttgatgctaggaaatgctggaactgtcatacgtc

SEQ ID NO: 241256 - DNA, 885 bp, Unknown
  Bacterial polypeptide expressing nucleotide sequence isolated from the Sargasso Sea
cattgtaaagtttatggaaatggtcttaatggctacgtttatataaaaaacttaactctggacgctggtaattcaggcactgcagcaagacttttaacagcgaccttggtcaactctacaaaatatataaaaatcacaggtgatacttcgctgaaaaaaagagatatgaaaagaatcattgaccctttaaaagaatttggagcaacttttaaaacaaaaaataatactcttcctatttttgtgaaaggatctaattttttaagacccataaattatcatgaatacagaggatcggcacaatgtaaatctgcagtaatgctagcagctttatttgctccaggaattacaaatttaaaatgtagaaaatcaagaaatcatacagaacttttttttaaaaacattattaaagctaacactaaaattaaaaaaaataaaaaatatgattttattgaaattgaaggaagaaaaaattttgaaggattttcttataatataccaggagatttttcctcagcagctttctttatagtcttaactttgttaacaaaaaattcttctattgtattaaaaaatattaatattaacccatcaagaactggaatggtttctattcttaatctaatgggtgccaaaatatctttttataataaaaaaaaatacaaaggtgaaattgttggagatattcatgtaaaaaacatcaagaaactaaaaggaattaaatgtccaatgaaatttaatacatctgctatagatgaaatgcttttactatttctagtttcttctatttcaaaagggacaagtacatataaaaatttggaagaattaaacaaaaaagagtcaaaaagactagattggggaataaaaatattaaaaatgattggtata

SEQ ID NO: 241257 - DNA, 697 bp, Unknown
  Bacterial polypeptide expressing nucleotide sequence isolated from the Sargasso Sea
aaacttgtttctgtaccttacgtggaaatgactcttcaattgatgatgcgtttcggcgtgtcagtgaaaaataacaaatttaagcatttccgtgttcccagaataccatacaggtctcccggtaaggtttatgtggaaggtgatgcatcttcagcctcttattttttagctggtgctgcaatcgctggtggtcctgtgactgtcaaagggtgtggtactgaaagcatacaaggagactcccgctttgctgaagtacttgaaaaaatgggagcaaatgttgaatggagcgaaagagagatttcagtcagcggatcatcaattaatggcattgatgtggacatgaacatgatgccagatgccgccatgactttagctgttgcggcgctatttgcttcgggacaaactactatacgcaacatccataactggagggtaaaggaaacagaaaggataaaagccgtttcaactgaactacgaaagctgggtgcagacgtaaaggaaggagaggactacttggttataaaccctccgaaaaaaattcagaatgcagaaattgacacctatgaagatcataggatggccatggctttttcattggctgcatgtggagaggcttctgttacaattaaaaaccctggatgcgtaagtaaaacatttccagaatattttgaggttttttctggattatgttcctgaa

SEQ ID NO: 241258 - DNA, 829 bp, Unknown
  Bacterial polypeptide expressing nucleotide sequence isolated from the Sargasso Sea
cctaaaaatccaattgatttaggtaattctgggactggtatgagattaatgtttggtttaatttctggtttaggaattgaagcaaccttaattggtgatgattcgctatctaaaagaccgatgagacgtgtagctgatcctttaaaagaaatgggagcctcaaataagcttaaaatagatgggacaccgccaatagaaatatttaaaggaaaaataattgatgattttatttatgagatgcctgtagcaagtgctcaagtaaagtcttcaataatattagcagctattgctgcaaaaaagggaataacaattatagaagaaaacccaaccagaaatcatacagaaagaatgattgaatatttcaagggaaatatagaaattttaccaatatggtgtgatgaatctaagtcactaaatagttttatgggaaataagattgtatataagcctagagaacttatttctatagaacattatgatgtagttggtgatttttcttcagcatcatttttaatagtagctggattaatatctaagagcggtaaattaataattaaaaatgttggtttgaacccttcaagaagcttgctaataaaaattttaaaattaatgggcggaaatgtaagcataagcaataaaagaatggtttcaaatgaagaagtgggagacataacagcttcaccatctaaattaaaaggatttaatatatctcacttagtaggtgaagttcgagctgaccatgttataccaaatataattgatgaaattccgatcttatgtattgctgcagcttttgcagagggcagcacaatacttggcgatcttgagg

SEQ ID NO: 241259 - DNA, 937 bp, Unknown
  Bacterial polypeptide expressing nucleotide sequence isolated from the Sargasso Sea
tatgaggagatatcagatcccattgagtaaaatgaatgcaaaaatcaatagttcaaatggaaagttaccattaaaaattgaaggttctgaattatcatctacaaaaatagacttagatattccatcagcacaaattaaatcaggattattattagcaggcttaaatacaaaaggagaaacaataatcactgaaaataaaattacaagagaccacactgaaattatgttagaatcgtttggggcaaatattgatgttataaaaaattataataataaattaataaaaataattggaaaaaaagaactagtttctaaaaatattgatgtaccaaatgatctttctagtagtgctttttttattgtttcagctttaattaataggaactcaaaagttgttattaaaaatattaacaataatccaacaagaaacggattattatttgctttagaaaaaatgggtgcaaaaattaggctatttaacaaaagaataagtaataatgaaaatatttgtgatattgaagtcttatcaactgatttgaatggttgtgaacttggtccagaaattgcagatttaatgatagatgaatatccagttcttgctgttgcggcctcatttgctagcacccctagtatatttcgtggattaaaagaattaagagttaaagaaagtgatagactaaaactaattatgttaaacttaaagaaatgtggtgtgaattgtaaaacggaaaatgatgatttgtttatttatccatccaaagattatgaaattagttctaatataattcaaacagattttgatcatagaattgcaatggctttttgtattatgggtacaagaataggaccattaagaataaatgactcagaatcaataaatacaagtttcccaaatttcaaaagtgaattaaataaactaggcggaagaattatttga

SEQ ID NO: 241260 - DNA, 142 bp, Unknown
  Bacterial polypeptide expressing nucleotide sequence isolated from the Sargasso Sea
ttgagcgccaacggcccttctcaccctgcccgtgaactcaaggccggcgggtccttgtccggtcatgtgaaggtgccgggagacaagtcgatctcccaccgatccctgctgttcggtgccatcgcggagggcaccaccacca

SEQ ID NO: 241261 - DNA, 490 bp, Unknown
  Bacterial polypeptide expressing nucleotide sequence isolated from the Sargasso Sea
atgaataatatctgcacaataaaaggtggagtaaatttaaaaggaaaaataaaagtcccaggagataaatctatctctcatagagctttaataattgggagtattgctgagggtgaaacgactattgagggatttttacattctgaagatcccctttcaactgctgattgccttagaaaattaggtgtaaatataccagaaataaaaaaagataagccttttacgatttcaggattggggcttaatggattaaaagagcccaatgagattctcaattgtggaaattcaggaaccaccatgagattattaatggggttacttgccggccaagaaggcaagaattttatcttaacaggtgacatttctcttaatgaaaggccaatggggagagtgggcaaaccattatcgttaatgggtggcaaaatttttggtagagaaaaaggaaacaaagctccaatctcaattgatgggggtaaactaaaaaggatgc

SEQ ID NO: 241262 - DNA, 229 bp, Unknown
  Bacterial polypeptide expressing nucleotide sequence isolated from the Sargasso Sea
atgaagcatattatatcaaaaaagtcatttagattagcaggttatgcaaaagtgcctggggataaatcaatttcccacagagcacttattatatcaagtatgtgtataggccaatctaaaatcaaaggtctacttgagagtgaagatgtttttgctacaatgaatgcgcttaaaacattgggtgtaaaaattgaaaaatcaaatggatattggtttgtaaatggtgtgg

SEQ ID NO: 241263 - DNA, 577 bp, Unknown
  Bacterial polypeptide expressing nucleotide sequence isolated from the Sargasso Sea
catgagcctcggttccctgaccctgtctccaatcaaacgtatttcaggaaaggtcgaccttcccgggtccaaaagcctctccaaccgggtgctgctgctgggcatgcttgcagaaggtacgactcacattcgaaaccttcttgacagtgacgatgttcgctacatgatcggagcgcttgagcaactgggcatcaggatggaggaaacccgagaaagtaataaaatccgcgttgaaggctgcgccggaaaaatccccaattcagatttggaactgatgatcggcaacgctggaaccgcaatgcgtcctctgactgcagccttgaccttaggtcaaggccgttatgtgcttgacggcgttccaaggatgagggaacgccccatcgttgacctcgtcgatggactccgacagcttggcgccgaggtgagcttgttgaacgggcctcccggtcccccggtggaaatcattgcttcaggccttcccggagggaccgccgaaatcaaaggaagcgtcagcagtcaattcctcagtgcgatcctaatggccgcaccctctgcacaaaacgatgtcactctgaaa

SEQ ID NO: 241264 - DNA, 703 bp, Unknown
  Bacterial polypeptide expressing nucleotide sequence isolated from the Sargasso Sea
gtacttgattgtggcaacagtggcacaacatcacgtttgatgatgggagctgtttcatctaatcctataagctgtacctttgtaggtgataattctttgagcaaacgttcaatgtcaagactatcaatatttcttgaaaaaatgggtgcagaaataaaacttactaataaagattttttgccacttcaaataaatggtaacataaatctacttcctatggagcatgtaatgcagaaaccatcagctcaagttaaatccgctataatactttcagctctcaacttacgagggaagactaaaattattgaaaaaagaaatacacgggatcatactgaaagactaatgcgtcatcttaaaataaatttcaaaaagaaaatattaagcaaaagttctacgtcaattgaacttaatggtccatatgaaataaaacctagagatattacagttgcaagtgacccatcaagtgcagctttctttatagtaggagcgctaattattccaaattctatgatttatctaaaaaatatagcacttaataaatctagaattgcttttatcgatgttcttaagcggatgggtggtaaaataaaaataaaaaaaacaaaaacaatatcaggcgaagatgttggtaacattcaggtctcatatagctcacttcaggcaattgaaataaaggcatcctcatctccatatttaatagacg

SEQ ID NO: 241265 - DNA, 844 bp, Unknown
  Bacterial polypeptide expressing nucleotide sequence isolated from the Sargasso Sea
aacaaagggaaattaccaatttttacccttgattcaaaaatttctaataactttaaatatgaaatgcctattgcaagcgctcaagttaaatcatgtcttttattagcagcgctagcctcagagaataatataaaagttattgaaccaaaaataacacgagatcatacagagagaatgattgattattttggaggtgatattagttttacacaaaaagataatgtaggagaaataaattataaatttcataacttaactccgaaagattcatacaaagtcgctggtgatttttcttcagcaacatttatcattgtagccaccctaatatctttaaattcagaagttttaattaaaaatgtaggactgaataaaacaaggagtgggttgttagaaatactaaaattgatgggagcaaatattcagattaaaaataaaaaaattgaatctaatgaagaggttggagacatagtagttaaatcctctaaattaactggtgttcaggtacctaagaatataatcccaaatataatcgacgaaatacccatattgagcattgctgcagcttttgctgatggcgtgactaaaatcagtaatgcatctgaattaagagttaaagaatcagatagattaaatgctatatcaaatggactaagcaaattaaatataattcatgaaatatttgaggatggtttaaatataactggaacaaaagaaaaaatagattcagaagagaaaattaattcttttgatgatcatagaattgcaatgagttttttaatagcaggaattagatcaaaaaaaggaatatctgtagaaaactgcaaaaatatgaaacctcattcca

SEQ ID NO: 241266 - DNA, 282 bp, Unknown
  Bacterial polypeptide expressing nucleotide sequence isolated from the Sargasso Sea
catgtcatattcacttaataataaaaaaactttacgaggagatctcacaatccctcctgataaatccttatctcatagagccgtaatgtttaattccatagcacaaggagaagctagaatttctaattttttaatgggtgaagattgcttatctactatttcagttcttaggaaacttggagtaaatattgttgttgatgggaataatgtttttacctatggtaagggcatacaatcattgactcctccaaaagaaattttggatgttgggaattcaggaac

SEQ ID NO: 241267 - DNA, 361 bp, Unknown
  Bacterial polypeptide expressing nucleotide sequence isolated from the Sargasso Sea
atgataagtgatgttattacaaaaggtatcaatggtgttccaaaaatacctggagataaatctatctcacacagatctataataataccctccatttcaaaaggaatttgtgaaataaataacatcttaaaatctgaggatgttttacacacacttaacgctcttaaagctatgaacgtaaatattgaagagagtggaaaaaaattaataattcaaggtaaaggattaaactcattaaaagaggctaagaaaaaaatttatcttggaaactcaggcacaagtgctaggctgttaacagggcttttatcttctcaaaaatttaaatctgttttaactggtgacgaatcattatctagcagac

SEQ ID NO: 241268 - DNA, 838 bp, Unknown
  Bacterial polypeptide expressing nucleotide sequence isolated from the Sargasso Sea
tttgcaaatagaaattgatataccgtcagctcaaattaagtcaggtttaatattagcagcattaaatacagagggggctagttacattaatgaaaaacatattactagaaatcacactgagataatgcttgaaacatttggagccgatattgaaacaaaaaaagttggtaattcttctgagattataataaatgggaaaaaaaaccttactccaaaaaatattgatgtacctgccgatttatcaagtagttcattttttattgttgcggcattaataaacaaagactcaaatatcactctagaaaatataaatattaatccaaccagaaatggattactaattgctttagagaaaatgggggcaaaaataaaaatatttaatcacaaaactattgctggtgaaattgttgcagacatacatgtaaaatcttcggagttaagtgggtgtgaattagataaagaaatggctaaattaatgatagatgaattcccaattttatcagttgcagcatcacaagcaaattctcctagttacttcaaaggcttagatgaattgagagtaaaagaaagtgatagactggagttaataaatgataatttaaaaagatgtggttgttatagtgaaattaaagataacgatctattcattgatcctacaaaaaataaagaaattataaatcctgaaatcagaacagattttgatcacagaatagcaatgtcttttgcggtattaggttcaaaaattgggaagcttcatatcaatgaatctgattcaataagtactagctttccaacttttaaagatcaatttaatagagctggtggcaatttaatttga

SEQ ID NO: 241269 - DNA, 611 bp, Unknown
  Bacterial polypeptide expressing nucleotide sequence isolated from the Sargasso Sea
tgctaatttaaaaggagatgcatctctaagtaaaagaccaatgggtagaattcttacacctctgaaaatgatgggagcaaaaataatctcgagcaataatgaaaaactacccataactataaaagggccaaaagaagtttttccaataaattactcttcaaagatatcatcagctcagattaagtcatctattttattatcaggtttagcagcatctgggagaacaatatttaaagaaccaaatgagagtagaaatcatacagaaaaaatgctctcaagtttgggtgcaaaaattcaatcaaaaactttagaagatggttcttataaggtagaactaggcggaaacccagttttaagaggtagtaatataaatgttccttgcgacccctcttctgctgcttttttagttgtagctgcagtgatttgtcctgaaagtaaaattgaactcaaaaacgttatgatcaacaaagggaggagcggtttatttgaaactttaaaagaaatgggagcaaaaattaatatttttgacaaaaaaaataacggtggagaagaaacagcctcaattatagctgaatatagccacctcaaaggtatcactgttccatcaaaaa

SEQ ID NO: 241270 - DNA, 931 bp, Unknown
  Bacterial polypeptide expressing nucleotide sequence isolated from the Sargasso Sea
tatgaaaaggatttcagaacctttagaaaaaatgggggcaagcataaatctaagttctgaatttactccaccaataaaaataattggtaataagaatctttcagcaatctcctacgacatgccaatcgcgagcgctcaagtaaagtcagctatactttttgcagcattattttccgaaggaaaaacaaaagtaagagaatcgctcgtttcaagaaatcataccgaattaatgttccaacaatttggcataaatttaaaaacgattaattctgaaataactttatctgggttagaagaatttgagggcaaagacattaatgtccctggagatttttcatcagctgccttcatgattgtgggtgcattaattacacctgattcttctgtttcgattaaagatgttggtttaaattcaactagaattgcttttttgaaggttttaaattccatggaggcggatataaaaattgaaaatataagaaaatttggaagcgaagaggttggagacttaagagtttcttcttcgcaattaaaaccttgcaaagtagaagcttctctaattcccaatctaatcgatgagttaccaattttatttatagcttcattatttgctacgggagattcagaattttttggaattgaagaattacgtcacaaagaaagtgatagattattggccatgcaaagcggtcttaaaaatattgaaatagagacaatttataatagtggaaagttaacaattgaaggcaaaggcagtgattatttaatcgattcgggaactgtagattcttttgaagatcatagaattgctatggcttttattattgctggattaagatcaaaaaaaaatttggtggttaaaaatacagattgtataaaaacctcgtttccagagttttctatttacttgattctctgggagcaaaaataa

SEQ ID NO: 241271 - DNA, 859 bp, Unknown
  Bacterial polypeptide expressing nucleotide sequence isolated from the Sargasso Sea
gataaatctatttcccatagagctgtgatattcaattcaatgtctaattcaacaaaaaattctattagaaattttttaccaggagaagattgttactctacaattaatataatgagacaattaggtgttgatattagtatagaaaatgataaaaataacaaccctgtaattatagtaaatggtgttggtcttgatggatttcatgaacctactagcatactcaattgtggtaatagcggaacaacaacaaggcttatatcaggtgctttagctggaagagatttcatctcaattttatctggtgaccactctctgaattctaggccaatgggaagaattattcagcctttatcagaaatgggtgcaaaaatatttggtcgtgaaaataatagttttgcccctttagtttttgcaggtggatcacttaattctattaattataaaatgccagtagcttcagcccagataaaatcttgtattattattgctgcattaagagctaatggtataacaaaaatttctcaaactgccctttcacgtgatcattcggaacgcatgcttttggccatgggagcaaaagttacccaagataaacttgatatatacgtagaaccatcggagattcattctatagatgttgatgttccaggtgatataagtagtgctgctttttggatgattgctggtatttgtcatccagattctgaacttttgttgaaaaatgtaggtgtaaatagaacaagaagtggaataatcacaatactaaaaaagatgaacgctaaaattgaaatacttaacaagaaagatgttgcaggcgaacctgttgctgatatatatgttagaacaagtgacttaatag

SEQ ID NO: 241272 - DNA, 370 bp, Unknown
  Bacterial polypeptide expressing nucleotide sequence isolated from the Sargasso Sea
atgaataatatccgcacaataaaaggtggagtaaatttaaaaggaaaagtaaaagtccctggagataaatctatttctcatagagctctaataattggaagtattgctaagggtgagacgactattgaggggttcttgcattctgaagatccactttcaactgctgattgtctaagaaagttaggtgtaaacataccagaaataaaaaaaaatgagccttttacgatttcaggattaggtcttgatggatttaaagagcccaaagaaattctaaattgtggtaattcgggaaccaccatgagattattaatggggttacttgctggtcaagaaggcaagaatttcatcttaacaggtgacatttctctta

SEQ ID NO: 241273 - DNA, 517 bp, Unknown
  Bacterial polypeptide expressing nucleotide sequence isolated from the Sargasso Sea
atgaataatatccgcacaataaaaggtggaattaatttaaaaggaaaagtaaaagtacctggagataaatctatttctcatagagctttaataataggtagtattgctaagggtgagacgactatcgaggggtttttacattctgaagatccactttcaactgctgattgtcttaggaaattaggtgtcaatatacccgaaataaaaaaaaatgagccttttacgatttcaggattgggtcttgatggattaaaagagcctaaagaaattcttaattgtggaaattcgggaacgaccatgagattattaatggggttgcttgctggtcaagaaggcaagaattttatcttaacaggtgacatttctcttaatgaaaggccaatggggagagtgggcaagccattatcgttaatgggtggcaaaatttttggtagagaaaaaggaaacaaagctccaatctcaattgatgggaataaactaaaaggatgtgttattggaacccctggtagcgagcgct

SEQ ID NO: 241274 - DNA, 920 bp, Unknown
  Bacterial polypeptide expressing nucleotide sequence isolated from the Sargasso Sea
taccttttatcctaaaaataaattcatgttgcctctaacaatacaaggaaccagcatgcctttggctcaaaaacacattgaaaatataggttctgctcaggtaaaatcagctattttacttgcggctcttaacactccaggaatcactgaaatagaagaaaaaaaaatatcaagaaatcataccgaaaatcttttagctcatattaaagctgatataaaagtcaaaaaactaaaaaaaggaaatacaattttactgagaggtcaaaaaaatttacaaagttttaatttagaaattcctggcgatccttcttctgcttcaccttttattgttcttgctttaataacagctggctcaaaattgttaattaaaaacgttaactgcaatccgaccagaattggttttattaaaattttaaaaaaaatgaatgcaaatataaaaataataaacctgaaaaaaaaatcaggagaaattgttggtgatattttagctaaaagtagtaatctaaaaccaataaattgccctaaaggactagtgccttcggcaatagatgaatttcctttgctatttattgtagcttcaattttgaagggcataactaaattttcaggaataaatgaactaagacacaaagaatcggatagaataaaaagtatggaaatagggctaaaaggaattggtataaaaactaaatctacaagagatagtataaaaatatatggaaaccagaatgcgcaaataaataaaactttaaaaatttttccaaaaaaagatcatagaattgctatggcctttttctgtttgggtcaaatattaaagggaaatattgaaatcaataattttgaaacggttaatacatcattttctaaatttttaaatattatgaaaaacgttggagcaaaatttgaaattaaaaaataaa

SEQ ID NO: 241275 - DNA, 682 bp, Unknown
  Bacterial polypeptide expressing nucleotide sequence isolated from the Sargasso Sea
tttgcaggtttcagaacccaaggtaaaactattataagagcaaaaaaatcaagaaatcacactgagcttttatgtaaatatcttagaatgccaataaaaattaaatctaataaacataatgatttaatagaagttaatagagtaaaaaagataaaatcctttaattatacaattccaaatgatattagctctgcagcattctttatggttcttactgcattaacaaaagattcaattttgatcatcaaaaacgtaaatataaacccaacaagaactggcatcgtagaaattttaaaaaaaatgggagtgaagattttttacttaaataaaaaattatataaaggtgaaaaagtttcagatataaaaattataagtcctacaaagttaaaaccaattaattgttcaccaaaattaaatagtaagtcaattgatgaatttctagtaatatttcttgctgctgcaaaagcaaaaggaatttcttattttaaaaacttacaggaactaaaccaaaaagaaagtccaagattagaatggggaaataaaattttaaagatgattggtataaaaactattaaaagtaaaaattctattaaaatttttggaaatcctgaaattaagatcaaaaaaaagatagttattagaaatttcttaaaagatcatagggtttttatgactagtacta

SEQ ID NO: 241276 - DNA, 829 bp, Unknown
  Bacterial polypeptide expressing nucleotide sequence isolated from the Sargasso Sea
atgcctgtaggtatagaatataattctgggatctctgcacagttaaaaagtgctgtaatttttgctggattaaattcttttgccaatactaaaattatagaaacaaaaaaaagtagagaccatacagaaaatttgctgaaaaaaaacatacaggctattaagattaaagaaggtaaaaataaattaattcaaatttttggtaaaaaatatcttgatcctttaaaaataaatattccaggagacccatcttcagctgcatttttttctgccttaactttattgaacaaaagctcaactttgaaaattaataacgttggtcttaatccaactagaataggtttttatcaattattaaaaaagtttggggcaaaaatttcttttaaagatttaaaaaggaacaacaacgagatttatggcaatatcgtagtacgtagttcaaagataaaacctatcaaagcctcaaaggaattttacgtaaaatctacagacgaatatcctatcttatttgtcatagctggtcttactaagggtacttcgatttttaaaggcataagcgatcttgcgaataaggagagtaatcgtattaaagaaatgcaaaaaattttaaaacaaattggtattaaaagtgtagcatctcaaaatatgattaagatttatggaaaaaaatttgaaaagagaaaaaattttaaaataaatgttcctaatttaggagatcatagaatatgtatgtcggcattaatactctcattaataacaggtgtaaaatgtaaaataaaaaattttgaaactgtctttacatcttctccttcttttttagaaatagtaaaaa

SEQ ID NO: 241277 - DNA, 544 bp, Unknown
  Bacterial polypeptide expressing nucleotide sequence isolated from the Sargasso Sea
tgttggcttaaatgaatctagaaaaggattattagatgttttgctactaatgggagcaaatcttgaaattaaaaataagaaaaaagcttcaaatgagattgttggtgacatttatattggctcttcagagctaagaggtatagatgttccagataatattattccaaatatcatcgatgaaattcctatattaagtgttgctgcgtgttttgctgaaggacaaacagtaattaaaaatgctgctgagctgcgagttaaagagtctgatagattgcatgcaatttcacagggactcagaaagttaaaaatcaaacacgatatttttgaggatggtatatcaatttttggaacatcaaaactactaaaatgtgacgaatctattgattcttatgatgatcatagaattgcaatgagtttcttagtgtccggtattagatcagataattgtattaaagtaacaaattgtaaaaatattgagacttcattccctaatttcagacatataatgaatacattaggtatgaaaattaatgaagaagattaa

SEQ ID NO: 241278 - DNA, 619 bp, Unknown
  Bacterial polypeptide expressing nucleotide sequence isolated from the Sargasso Sea
ggaagtcccaggagatatctcttcagcggcattcctacttgtggcggcgaccatctgtccgggcagtgatctgctgttgccgggagttggcataaacccaacgcgttcggcggtgctgtcgattttgcgcatgatgggagcgagcatagagacctcctcggagcgcctggaatccaacgaacccgtgtgtgatctcagggttcgctctgcagcgctgagagggattgatattccttccgaatttgtcgctaacgcgatagatgaattcccagtgcttgcggtggcggcggccactgcgtcgggtgtgacgcgccttcgcggagcgtcagaactacgcgtgaaggaatccgatcggatcgcggccgtggtccaggggctctgtgcgctggggatagatgccgttgagtatcccgacgggatggacattaccgggggatctttccgcagcggttccgtcgaaagtttcggcgatcatcgaatcgcgatggcatttgccgtggccggggccatctcggacgggcctgttgaaatccgggaggcagacaacatcaagacgtcatttccgaattttctttcgcttgccaattccattggaatgagcgttacagagtccccttaa

SEQ ID NO: 241279 - DNA, 842 bp, Unknown
  Bacterial polypeptide expressing nucleotide sequence isolated from the Sargasso Sea
aattccttctgcgcaagtaaaatctgctattttgcttgctgggttaaatgttagaggtaaaacaactgtaatagagaatgaacctacaagggatcatactgaaaaaatgttaaagtttcttggtgctaaaattcaaattgagaaaaaagggtcaagtaataatatttcagtaaatggatttccaaaaataaatcctggtattgttagtgttcctggagatatttcttctgcctcctttccaatcgcattagcttgtatgataccaaattctaaattaattattaagggtgttggtttaaatccactaagagatggttttattgaaacgataatagaaatgggagctaatataaaaattcaaaataagaatactgaagcaggagaaatagttgctgatttgcatgttagttactctccaaatcttgtaggagtggaagtcccagaagatagatctgctagaatgattgacgagtatccaattttatcaattttggcagcaactgcaaaaggtcctaccataatgaaaggtatagaagagctgagatttaaagaaagtgataggattgaagctattgcagatggtttggaaagaaatggtgtttccataacaaaaaaaaaggaccagttaactgtttttggtaatggcaatcaaaaaattaaaggtggaagtattattaatgcctcaaatgaccatagaatagcgatgtcttttgcttctcttggaagcataactgaaaacagtatagagatacgtggagcatcatcaattaagactagctttccaaacttcatagatcttatgaattctattggattgaatataattgcattaaaggattaga

SEQ ID NO: 241280 - DNA, 866 bp, Unknown
  Bacterial polypeptide expressing nucleotide sequence isolated from the Sargasso Sea
tatgaaaaggataatagatcctttatctttaatgggtgctgaaattatttctaacgataataaagctccactgacatttaaaccttctaatttaaatggaattaattacgaaatgaatatttctagtgctcaagtaaaaagttgcattatgcttgcaggattaaattctcatagtgaaacagttatcaaacaaccttccttatcaagagatcacactgaaaggatgctcgaaggaatgggtgcaaatatcaaaaccagtaaattagatattattattgagccatctaaactaaattcggttgacttgactattcctggtgatgtaagttcagcttctttctggatggttgctgccttgattcatccaaacagtaacattacattaaaaaatgtaggaatgaatcctttgagaactggcgtcattgatattctaaaaaaaatgggaggaaaaataataatagaggatgaaagaattgaggctaatgagccagtagcaaacataaaagttatgtcatcagatctcaatggagttgaaatttctggagaaattatcccaaaacttattgatgaaattccaataataataattgcagcatcaattgcaaatggtacaacctatattaaaaatgcagaagaattaagatataaagaaactgatagattgttggctatgtctaaatttttagagaaatcaaaaattgaacacactttatatgatgatggaattaaaatttttggtaatggacaatttataggtggtgaatttgatacatatgatgatcatagaatagctatgtcggtggcaataagttcaataattgcaaaaaataaaactgtaattaatgatcatgaagttgcatcaattt

SEQ ID NO: 241281 - DNA, 619 bp, Unknown
  Bacterial polypeptide expressing nucleotide sequence isolated from the Sargasso Sea
ttaaactgtgatatggaaatagagggttttttagatgcatacgatcctaattcaactttgagcgcattgaataaaattggtgcatcaattaaaaaaaataataataatgttgctctcaccaaaaggtctaatgcgtttatagatgcttcagaggaattagatcttggaaattctggtactggagtacgtcttatgctcggtttagtttctggacttgggataaatgctaactttattggagattcctctttatcaaaaagaccaatgtcacgtgttatagatccgttgagagaaatgggggcttcaatagacagtaacaacggaaagttacccatcaatgttattaagtcaaatattataaattcttattcatataagttacctattgctagtgcgcaggtaaaatcatgtcttcttcttgctgcaattgcttcaaaaaatgacattaatttaattgagcctaaaattacaagaaatcatactgaaagaatgattgagtattttggtggagttataaattatggagatccttcaaaaataggaaatattgaattaaattattgcgagctccaaccaaaaagcaattatcaaattgttggagatttttcatcagcctcat

SEQ ID NO: 241282 - DNA, 292 bp, Unknown
  Bacterial polypeptide expressing nucleotide sequence isolated from the Sargasso Sea
aatgaaatctataagcagtaaaaaattaaaaggcaatatcttaattcctggagataaatctatttcgcatagacttgttattttatcttcaattgctattgggaaaagcaatattaagggaattttaaaaagtgatgacattatgaaaactattgacgctatgaaaaattttggcgcttcaattgaattttcaaatccatataattgtttaattaaaggagtgggcttgggaggtctagcagagccaaaatcagcattggattttggtaattcaggtactgcggttagatta

SEQ ID NO: 241283 - DNA, 194 bp, Unknown
  Bacterial polypeptide expressing nucleotide sequence isolated from the Sargasso Sea
catgataaaaggaactatcgaatttccaggagataaatcaatatctcacagagctttgatgattgcatctatattatcaggaagatctcagataaaaaatctctcaaatgggcaagatgtcttatcgacaaaaaaatgcttagagcagtgtggaatatccataaatgattcaaaaaatagttatcaagtaagag

SEQ ID NO: 241284 - DNA, 388 bp, Unknown
  Bacterial polypeptide expressing nucleotide sequence isolated from the Sargasso Sea
atgataacagtaaacagatccaaagcactgtccggacatattttaatcccgggcgacaaatctatatcacatagggctatcatttttggttctctttgtgttgggaagacaacaataagaggactcctagagtccgaggacgttcaaagaacaattgaagctgttagacagctaggggcaaaggttgataaaaaaaatgataaatgggaggttctaggttttggggttgggggcttttcgagtcctgaaaatgtaattgattgtgggaactcaggtacaacttgcaggttgcttatgggagctatttcgacaactcctatatcagcaatatttgttggtgataagagtttatctcaaaggccaatggatagaataatagatcccttaa

SEQ ID NO: 241285 - DNA, 598 bp, Unknown
  Bacterial polypeptide expressing nucleotide sequence isolated from the Sargasso Sea
atggactatttggttaagccagcagaatcaatcaaaggtgaaataaaggttcctggtgataaatctattacgcatagagctatgatgcttgcctctatagcaagcggtcaatctaggcttactggtgcattagaaggtgaggattgcttagcaactaaaaaagtttttgaacacctgggagttaattttataaaagaagacgacgatctgatagtagaaggagtagggatcaaaggtcttcgtgagccagaaagagaattagactttgggaattcaggcacaggtataagactaagctcgggcatacttgtagcccagaattttgctacagaattgataggagattcctctttaagtgaaagacctatgtctagaatagtagagcctctatctttgatgggggctaatatttcttctaatcaaggaattcttcctcttaatatcttaccaacttcatctttaagaggaatcactttctctcttcctgtcgcgagtgctcaagttaagtctgctttattattggcaggcttatatgcagaaggatatacagaagttaaagaagataaaattacaagaaatcataccgaaactatttaac

SEQ ID NO: 241286 - DNA, 676 bp, Unknown
  Bacterial polypeptide expressing nucleotide sequence isolated from the Sargasso Sea
ttgaatttaatatcacatcaaattaattctctaagtggggaggttatatgccctggagataaatcaatatctcaaagaattcttattattggatttttgttaaattctcggatggaagtaaaaggcttcttagacgctaaagatccaaattcaacacttatagcacttaatggaataggcgcatcaattaaaaaagataatggattaatatatttaagtaagagagatgattatttaaaaagtccttctaaagatttaaatcttggcaattccgggacaggaatgaggctaatcctaggtttgatatcagggctgggcataaatgcaactttggttggggatcaatcgttatcaaatagaccaatgtctagagtaattgatcctcttagagctatgggtgttgaaatagaaagcaatgatggcaatgcaccaataaaaattttaggcggtgatatctgtaataattttgaatatgagatgcctattgcaagtgcgcagttaaaatcttgtttgatgatagctgcactagcatcaaataatgctataagcattaaagagccaaaaacaagcagagaccatactgaaagaatgattgaatactttaaaggcgatattaaatatggagataatgaaaataaaggattaattaagcttaataataaggatttaatatcta

SEQ ID NO: 241287 - DNA, 1085 bp, Unknown
  Bacterial polypeptide expressing nucleotide sequence isolated from the Sargasso Sea
atattttaaaagtccttcaaaagatttaaatcttggtaattctggtacaggaatgaggctaattctaggtttaatatcaggattaggcattaatgcaactttagttggagatcaatcattaaccaatagacctatgtctagagtaattgatcctctgaaagctatgggtgttgcaatagaaagcaatgatggcatggccccaataaaaattttaggcggcaatatttgtaacaattttgaatatgagatgcctattgcaagtgcacaggtcaaatcttgtctaatgttagctgcgcttgcatcaaacaaaaccataagcattagagaaccaaaaacaactagagatcatactgaaagaatgattgaatattttaagggcgatataaaatatgggaacgaagaaaataaaggcttaattaaacttcacaataaaaacttaatatctagagagtcatatgatatcgttggtgatttttcatccgcatctttcatcattgtagcagcattaatatctcctgaatctgaagtaataataaagaatgttggtttaaatccaacaagaaatggattattaaaagtgcttgctttgatgggggcggatatagagataaaaaatgttaagaatatttgcaatgaagaatcaggagatgttttagtaaggtcttcaaatttaaatggagtcgatattccagaagatattattccaaatattattgatgaaataccaattttaagcattgctgcagcttttgcagaaggcacaacaaatattaaaaatgctaaggaactaagagtaaaagaatcagatagaataaatgcaatggcagaaggtcttaaaaaattaaatattaatcatgaagtttttgatgatggattatcaattactggaacaaatggttttgtagatattaatgaagaaattaattcttttgatgatcataggattgctatgagttttttaatatcaggcattagatctaagaatggcgtaagagttaaaaattgtaaaaatattgaaacctctttccctcacttcaaagatataatgaattcattaggtatgaaggttaatgaaaaagattaat

SEQ ID NO: 241288 - DNA, 1306 bp, Unknown
  Bacterial polypeptide expressing nucleotide sequence isolated from the Sargasso Sea
ctgggacttggtcttatagggggaagtattgctcgatcgttaaggcatcgctttcccactattaatttgatagcccatgacgtaagtgatacaaatattgaaatagcgttaagagataaaaccatcgacgcctgcgatactttagagaatgtcgctaagggtgttgatattttaattctggcgctacctcccctaaataatattgaaattatcgacaagcttcctgaacttgttaatgccgacacggttattacggatgtttctagcgtgaagtcagcaataaatattgctctaaattcaactccaacctcctttagaagaaacttcgtgttaggacatccacttgcagggtcagagcaaagtggttactccgcatcgtcaagcactttattttatgaaagaaatgttattttgacacccaatgaaaatacctccactcgggctgtgggagccattcaccgcctttggcactccattggtgctaatgtgattggtatgagtgtttgtgagcatgacgaaatgctcgcggcaactagtcatctccctcatttactgtcttatacactcgtaaatgtcttgataaaaaaaaataagggtaatgatatatttcgttatgctgctggagggtttgcagactttagtcggcttgcttccagcgaccctgctttgtgggctgaaattttcttaactaatgcgagtgaaattgaggcaatattagacgcttacattaaacaactcacgaattataaggatcttcttttagaaaaaaataaggattctctggctattgaatttgccaaggcaaaaacggctaggaagtattttatggaaaaacactttaactcgcagagctcccttgaaaatatgcctgtaacaaaaaattatgttgtaaatccttcgaatcgaattaagggctctttgagggttccaggagataaatccatatcgcatcgggcgattatcctaggttcggtagcagaaggtataacaacagtccgagatttccttgagggtgaagatacactcaacacacttgcagccttccgagagatgggagtgacgatattaggaccaagcagaggaaaagtgatcatttatggtgtgggtctgagaggcttacaaaaaccaagaaagccactgaatatggggaattcagggacggctatgcgtttaatggctgggattttatctgcacagagttttaattctatcctgataggagatgagtcactgagtaatcgtccaatgaaaaggatatcagaaccgcttgctaaattcggagcaaaagttgagtctaaaaaatgac

SEQ ID NO: 241289 - DNA, 898 bp, Unknown
  Bacterial polypeptide expressing nucleotide sequence isolated from the Sargasso Sea
aatgcttggtgtcgaggcggaggcaggaagtgcaggcgagtgccctcctgttaccattcgtagcactggagtaacgagcgctgaggcatgcatccagagcacaacaagcagccaatttgcgagcggactcgccttggttgcaccatgtatgccagaaggcctttcccttgagctaactggaacacttgtctcaacgccgtatctcgatatgactcgcaaaattattgagtcgtttggtggaaaatgtgaacttcgtaacgatcgccagtggcatattgcacccacaggttacgtgtcaaaaaattacgaaattgaacccgatgcatctgcagccagctattttgcagctgctgctgcaattacgcatggcacagtcactctggagggacttggtcgtaatagcatgcaaggtgatatcgaattctgctcagcactcgaacagatgggatgcactgttacatggtcaagcaatagttcgtcatgtccatccattacgatacaaggcaatgatttaaagggtattgatatcgacatgaatgcaatcagtgatactgtcatgacactcgctgctgttgcgctttttgccgagggaccgaccgtgattcggaatgttgctcacatacgagacaaggagactgatcgtattagcgacctcacatgtgaactacaacgcctcggggccatcgttgacgaacagcctgatggactgacaatacatcctgcccaccttcggccagcaaaaatacaaacatacgacgatcaccgtatggccatgagcctgtcacttgttgggcttcggtcaaagggagtatgcatcaccaacccagcatgtgtccggaagacctttccgaattactggagtgcattagaagagttggttcagacaagcagacagtaa

SEQ ID NO: 241290 - DNA, 835 bp, Unknown
  Bacterial polypeptide expressing nucleotide sequence isolated from the Sargasso Sea
ttgagttcattaaaaactatttctggagaagttactatcttaggggataaatcaatatctcataggtgtataattttaggttctcttgcagagggtgaatcttcttttgagaatattttaatttcaggagacacagctgcaacaattgaaatttttcgatcattaggtgtcaatattgatttaattgatgaaaatattatcaaaatacatggtgtaggtttaaatggcttagatgaaccaaaacatgatctagatgctaaaagttcgggaaccactgcaaggttattaattggtttgctttcaaggcaaaacttttcttcaagaatggttgggagtaatcagttgatgaaaagaccaatggctagagtcatagatttatttactgataatggagcaaaaattgattcagataaagggaatttgccaattacatttactccctcatcatatacatttaataatttagatacaaaagttccaagtgctcaagttaagagcgctgtgattctttcatcgctatacaataatgaaccaacaataattaatgaagaaaccctaactagagaccatacggaaagaatgctattagaaatgggtattgagctagtaaggcttggaaacacaatcacaatacccccagtttcaaaattaaaccctttaaatatgaatgttccttcagatatttcatctgctgcatttttgatttctctaggagttctaaaaggagagaatctgttattaaagaatgttttaattaacgagagaagattaggttttataaaagttctaaaaagaatgaatgcaaatattgagatactaaatattaaagaaataa

SEQ ID NO: 241291 - DNA, 1168 bp, Unknown
  Bacterial polypeptide expressing nucleotide sequence isolated from the Sargasso Sea
atacgctctctaattccaagttttaataaagtattaaatgttccaggtgacaaatcattatctatcagatgggttttattggcctcacaagcgataggaaaatctaaagcatacaacttgttagagtctgacgatgtaactaacgcaataatttctatgaaaaaacttggtgtagaaattttaaaaaggaaaggttattatgaaataaacggagttggattaagtggttttagacataaaaataatataagtttagatgcaggcaactcaggcacatttgcacgtcttttgtgtggtactttagctggaaatgttatgaatgttaaagtgactggagactcaagtttgtcaaagagagatttttccagagtggtaaaaccattagaactatttggcgttaatattaaaactaataaaaataaactgccaataactattaaaggttcaaaatttttaagaccaattttttataaagaagaaaaaggaagtgcacaagttaaaagtgccatattgttagcatcactaaataccccaggacaaacaattgttaaatcgaaattgtcgagaaatcatacagagctaatgtttaaaaattgtttaaaaatacctttgaaacttaagaagtataaaaattatgagattatcaaagtaaatggtaaaaaaaattataaaggttttaattataatattcctggtgatatcagctctgctgcattttttatagctttgactattttagcaaataaatcacgacttaagatgaaaaatgtaaattataacaaatcgagaattggaataattgaaatacttaaaaaaatgagagccaaaataagaattactaatattaaaaattataagggggaaaaagtagctgatatttctgttacaagtagtaacaatttaattggtataaactgtcctaaatcgttaaatactaggtcaatagatgaatttttaataatttttttagtatgcgcaaaagcaaagggtatttcgaaatttattggcattaatgaacttagacaaaaggagagtgatagattaaagatggctgctaagtttttaaaatctattggaataaaggtagatgaaaaatttgatagtctaaaaatttatggaaatccaaatcttaaaataaaaaaaaaagttgtaattaaaaattttttga

SEQ ID NO: 241292 - DNA, 784 bp, Unknown
  Bacterial polypeptide expressing nucleotide sequence isolated from the Sargasso Sea
tctcgacagtgacgatgtacgatatatgatcaaagcgcttgagcaactgggcatcaagatggaggaaaacagggaaaataacgaaatctgcgttgaaggctgcaccggtaagatcccgaattcggatttggaactgatgcttggtaacgcaggaaccgcaatgcgtcctctgaccgccgctttgactttaggacaaggtcgttacgtacttgatggcgttccaaggatgagggaacgtcccatcgttgacttggtggatggtctcaggcagcttggcgccgaggtgagagtgttggacggagctaccggccccccggtggaaattatggcttcagggcttcccggaggaacggcggaaatcaaagggagcgtcagcagtcaatttctcagtgcgatcctgatggccgcaccctctgcacaaaacgatgtcactctgaaaatcatggatagcctggtttccgttccctatgtcgaattgactctacacctgatggaaaggtttggagtgaaggtggaaaaccgaaacttcaaggaatttcacattcggggaaaccagacctaccgttcgccaggagaattttatgtagaaggggacgcgtcctccgcctcctatttactcgctggagcggcaattaccgggggaagcattagcgtccagggttgtgggactgaaagcctgcagggagatgtgaaatttgctgaagtgctggaactgatgggagcggaaacgaacatgggagccaaattcagtcaccgtccaaggaaaatctttgaaaggagttga

SEQ ID NO: 241293 - DNA, 379 bp, Unknown
  Bacterial polypeptide expressing nucleotide sequence isolated from the Sargasso Sea
tttgaaaggagttgacctcgatttgaaccgaatgcccgatgccgcgatgactctggcagtggccgctctttttgcggagggtccaacacgcatccggaatgtctacaactggcgtttgaaggaaaccgaaaggatgaaagcggtgaccactgaacttcggaaacttggggctaccgttgaagaaggagaagattacctagtgatcgaccctccccaaaaaatcctaccctgtgaaattgaaacctatgacgaccaccggatggcgatggccttttcattagccgcctgcggagcggaaacgatcacaatcctcgatcctggatgcgtaagtaaaacctttcctgattacttcaaggtcctcgaaagcgtatcagaataa

SEQ ID NO: 241294 - DNA, 988 bp, Unknown
  Bacterial polypeptide expressing nucleotide sequence isolated from the Sargasso Sea
tggcttgctttcaaggcaaaacttttcttcaacaatggttgggagtaatcagttgatgaaaagaccaatggctagagtgatagatttatttactgataatggagcaaaaattgattcagataatggaaagttaccaattacatttactccatcatcttatatatttagtagtttagatacgaaagttccaagcgcacaagttaagagcgctgcgattatttcatcgttatacaataatgaaccaacaataattaatgaagaaaccctaactagagaccatacggaaagaatgttattagaaatgggtattgagttagtaaggcttggaaacacagtcacaatacccccagtttcaaaactaaatcctttaaatatgaaagtcccttcagatatttcatctgctgcatttttgatttctctaggagttttaaaaggagagaatctgttattaaagaatgttttaattaatgagagaagattaggttttgtaaaagttttaaaaagaatgaatgcaaatattgagatactaaatattaaagaaataagtaatgaattagtaggagatataaaagtatctaaatccgaccttgtagccacaacgattgaaccaaaagaaatatcagacattattgatgaaataccaattttaacttttatagcaagccaagccgaaggcaaaacaatacttaaaggtgcaaacgagttaagaattaaagaatccgatagattagaaaatatgaagaatttcatccaaggcttaaaaggtgatatcactatgtatgaagatggctttgcaattaatggagtccaagatttagacgaggggaatgtaattacggaagacgatcatcgagttgctatgacagccataattgccaacattgctcttggaaagaaaatattacctgataacactgattgcattaaagattcttacccaaccttttttcttgatatagagagcattggaggaatgattaatgaataa

SEQ ID NO: 241295 - DNA, 992 bp, Unknown
  Bacterial polypeptide expressing nucleotide sequence isolated from the Sargasso Sea
aaccatatttattggtgacaaatctttatcattaagaccaatggatagagttttaaaacctttagttaattttggttctaactattcactaagaaaagacaattatttacctgcaatactgaaaggttcagataatccaattccttttagttttgaattggatgaaccatcagcccagattaaatcggcagtccttttaggagcattaaatactcctggagtaactacagtgaaagataaatttaatacaagagaccatactgagagactattagggttatatggagcaaatattaatattaccaaaaaaagaaatataaaaaaaatttcaataaggggagttaatgaacttaaaggattagatttgagcgttcctggtgacccatcctctgctttatttccaattatagcggctttgatttgtaaaaattcagacataatggtcaaaaatgttctaataaatcctacaagagatggtgcatttaaggttttaaaagatatgggtgctgatataagttttttaaataatagaattatggcggcagaagaagtttatgatattagagtcaggtcgagtaacttaaaaggaattgatataccagggagacttgctccaacgatgatagatgattacccaattcttgcagttgcggcttctatggctaagggtaaaacatattttaaagggattaatgagcttagatttaaagagagtgatagatttgttggaattttgaatctattagaaaaaaatggggtaagagttgaatctaaaaaagatacaataattattcatggaaaatgtgaattaaaaaaaggtggaattaaaatagaaacaaatttagatcataggatggccatgtcggctttaatcatgggtttagtatctaagaatggagtaaagattgataattctgaaactataaaaacaagttttccatctttttacaatgttatgattaaaattggcgccaagttatcaaagaaataaa

SEQ ID NO: 241296 - DNA, 905 bp, Unknown
  Bacterial polypeptide expressing nucleotide sequence isolated from the Sargasso Sea
tttatttactgataatggagcaaaaattgattcagataatgagaagttaccaattacatttactccatcatcttatatatttagtaatttagatacaaaagtcccaagcgcacaagttaagagcgctgcgattctttcatcgttatacaataatgaaccaacaataattaatgaagaaaccctaactagagaccatacggaaagaatgttattagaaatgggtattgagttagtaaggcttggaaacacaatcacaatacccccagtttcaaaattaaatcctttaaatatgaaagtcccttcagatatttcatctgctgcatttttgatttctctaggagttctaaaaggagataatctgttactaaagaatgttttaataaacgagagaagattaggttttgtaaaagttctaaaaagaatgaatgcaaatattgagatactaaatattaaagaaacaagtaatgaattagtaggagatataaaagtatctaaatccgaccttgtagccacaacaattgaaacaaaagaaatatcagacattattgatgagataccaattttaatttttatagcaagccaagccgagggcaaaacaatacttaaaggtgcaaacgagttaagaattaaagaatccgatagattagaaaatatgaagaatttcatccaaggcttaaaaggtgaaatcactatgtatgaagatggctttgcaattaatggagtccaagatctagacgaggggaatgtaattacggaagacgatcatcgagttgctatgacagccataattgccaacattgctcttggaaagaaaatattacctgataacactgattgcattaaagattcctacccaactttttttcttgatttagagagcattggaggagtgattaatgagtaaa

SEQ ID NO: 241297 - DNA, 505 bp, Unknown
  Bacterial polypeptide expressing nucleotide sequence isolated from the Sargasso Sea
atgccaaaaatacctggagataaatctatatcacatagatctataataatcccatccatttcaaatggaatttgtgaaataaataatattttaaaatctgatgatgttttgcatacactaaatgctcttaaatctatgggtgttgatattgaggagaataaaaacaaaataattattcaaggtaaaggattgaactccctaaataaagctaatggagaaatctatcttggaaactctggaacaagtgctagattactaacagggctattatcatctcaaaagtttaaatctgttttaacaggtgacaaatcattatccagtcgacctatgaaaagaattgcagatcctttgactcaaatgaatgccaaaatttatacaactaaaggatctttaccccttactattgaaggaagtaatttaaaagctgtaaattttgatttaaaaattccatctgctcaaattaaatctggtttgttgctagccgctttaaacacaaaaggtcaaa

SEQ ID NO: 241298 - DNA, 1315 bp, Unknown
  Bacterial polypeptide expressing nucleotide sequence isolated from the Sargasso Sea
tttgaacttaacctcattcaaaacagaatctttgcatggagaagttgactgtccaggtgataaatcagtatctcaaagaattgtaattattggatcattaattaattgtgatatgcatgtaaatggatttttaaatgctcaagatccaatttcaaccgttaatgcacttaattctattggatcttcaatatctataaataaaaacaaagttactttaaagaaacgagaagttatgttcagtgatcctcaacaagaattaaatcttggtaactcaggtactggtgcaagattgttgttagggctgatttctggccttggcttaagattaactatgaagggagattcatcgcttgaaaaaagaccaatgagtagagtgattaaaccacttgagatgatgggagctaagttaagtagtgattcaggcacacttcctataagaacattaggctcaaaaattattaataattttgaatataaaatgccaattgccagcgctcaagttaaatcatgcttattattagctgcactgtcatctcagaaaaatataaaaatcactgaaccaaaaataacaagagatcatactgaaaggatgatcgagttctttggtggagagattctatatgaaaataatcgaaattcaaaaacaattcagctcaattactctgaactagaatcaaaaaattcgtttgatgttcctggtgatttttcatctgcagcttttattattgttgcaacgataatttctaaaggctctgaagttgttataaaaaatgttggcttgaatgaatcaagaaaaggattattagatgttttgctactaatgggagcaaatcttgaaattaaaaataagaaaaaagcttcaaatgagattgttggtgacatttatattagttcttcagagctaagaggtatagatgtaccagacaatatcattccaaacatcatcgatgaaattcctatattaagtgttgctgcatgttttgcagaaggacaaacagtaattaaaaatgctgctgagttgcgagttaaagagtctgatagattgcatgcaatttcacaaggactcataaagttaaaaataaaacacgatatttttgaggatggtatatcaatttcaggagcatcaaaagaacttaaatgtgatgaatctattgattcttttgacgatcacagaattgcaatgagttttttaatagctggtatcagatcagataattttattagagtaatgaattgtaaaaatattgagacttcattccctaatttcaaacgaataatgaataaaataggtatgaaaattaatgaagaagattaa

SEQ ID NO: 241299 - DNA, 883 bp, Unknown
  Bacterial polypeptide expressing nucleotide sequence isolated from the Sargasso Sea
tcagagaagctcaaattcaataaactatgaacttcctattgcgagcgctcaagtgaaatcatgtattttgtttgcaagtctttattctgagggaaaaacaactgttagagagagacaaacaacacgtaaccatacagaaataatgtttaagcaatttggagtgcctttgagtattcgagacacggtcgatggaaggaatatagaaatgtattctccatcaaaattaaaaagcgcagaaattgatattccaggagacttttcttctgcagctttctttattttagctgcattgataatccctaactcaaatctaacaattaaaaatgtaggtatgaatgaaactcgcatagcattattaaatgcctttcaagaaatgggtgctgaaatagacattttcaataaaactggagaatttgaacctcgtgctgatttaaaagttaaattctcgaaattaaaaggtataaatctagacactaagttagtgcctaatttgatagatgaattgccggccttctttgtcgctgcggcaatgtcatctggatcaactgctgtaagagatgcagaagaattacgcaataaagaatcagatagattagaggcaatgggagaagttctaagatcacttggtgttgattttaaaatgtatcaagatggcattgatataaatggtcttgatgaaaataatactcttagtccatacaaaggagggataatagaatcttttggcgatcacagaatagcaatgtcttcagcaattgcttgcagtttttttgaccaggaatctcttattctaaatactgataatgtaaatacctcatttccagcatttttaaaaattgcagatcaagtaggcttagatattagtttagaggaacattcatga

SEQ ID NO: 241300 - DNA, 1198 bp, Unknown
  Bacterial polypeptide expressing nucleotide sequence isolated from the Sargasso Sea
tatgtctcatagagcaataatgcttgcttctttagcagagggaaaatcagatatttctggttttttagaaggagaggactgtcttgcaactattgaagtatttaaaaaaatgggagtaaatatatccagacgtgaggggatatttatagtagagggtagaggtctcaggggacttaaggacccatctgaccctttagatttcgggaattcaggcacttcagtcaggctatgctctggagttttggcagctcaaaaattttcttctactttagtaggagatagttccttatcttcaaggcccatgacgaggataactgaacctttaggactcatgggtgctaatgcatcaagcacagagaagggaactctgccaattaagatagaaccagtagactcccttaattcaattcaatattctttaccagttccgagcgcgcaggttaagtcatgcttattgtttgcaggtttatattcggaaggaattactgaaattgaagaaaaggttactacccgagatcacacagagagaatgtttaaacaatttggtatacctattgacgtatcccaatcaaaaggatcaaagttaattaaattaaataaagtagaaggtataaatcctactaatatagaaatttgtggagatttttcttctgcatccttttttatcttagctgcactcattactcctaattctgaattgttacttaaaaacgtgggagtaaatccaactaggattggttttttacatgctctaaagcatatgggagcaaatattgagttacaaaaagaaatagattccttcgagccaacagcagatatacttgttagaacttctagccttaaaggcgtaaccctaaataagaatatagttgcaaacatgattgatgaaatgccagcattctttgtcgcagcctctctagccgaaggcactacaaaggttaaagacgctaaggagcttaggactaaggaaagtgatcgactccaagttatgtcggaagctttagattctttcggagttaaattccggctagaagatgatggtattactataaatggacttgggaaaaccggcacctttaaaactgcagaaatagattctcatggagatcacagaatagctatggcctgctccatgggctctcttagatctgacggagaaacctcagttttagattgctttaatgttaatacttctttc

SEQ ID NO: 241301 - DNA, 304 bp, Unknown
  Bacterial polypeptide expressing nucleotide sequence isolated from the Sargasso Sea
atggatttttacacagaaccatcagaaaacctgtcaggcgagatcgagattcctggtgacaaatccatatctcatagggcggtaatatttggctctttggctagtggtgtctctgaatttacaaactttctctctggcgaagattgtcttgcgaccttaaatgcatttagagaaatgggagtctacactaatctaagtgatgataagcttataatacatggtgttggcataaatggtcttaatgaagcatctaaatcattgtatctgggtaattcaggaacatctgctagattgttggtgggtt

SEQ ID NO: 241302 - DNA, 832 bp, Unknown
  Bacterial polypeptide expressing nucleotide sequence isolated from the Sargasso Sea
tagtagaattaaaggtatagattacaaaaatacaatgtcaagtgctcaggtcaaatcagcggtattattctgcgggcttggaaccagcgatactacgagttattatgaacctgtaaaatctcgaaatcatactgaaataatgttaaaaaatgttggtgtcgaaatagagcacaataacggaaaaataattttaaaaaactcaaattctatgataaaaggattagatattacaatccccggtgacccatctaccgcatcattttttgctgctgcagcattaattttgccaaaatcagagttgattttaaaaaatatcttagccaacccaacacgctttggattttttgatgcaattaacagaatgggtgccaatattgaatttttatccagctggatggaatctggcgaaaaagtgaaaaatattaaaattaaaaacgggccattaaacccaataaaaattgatcatcagcatattccaagcataatagatgagataccaataatatcaatagttgcatctcaagcagatggcaaaactgaaataagaggcgctaaagaactaagagttaaggaatctgatagaattcaagctattgtctgtaacctcagaaatatgggagtaccaatagaagagtacaatgatggcttttctatctttggacctgtaaaattaaaaggatctaaaataaaaacttttaatgaccacaggatagcaatggcatttagcatagcgggcttgattgcagatggagtaactgttttggataataaaaaatgcgtagatatctctttcccaaatttttttaatatgttacaatccaaaataaaatga

SEQ ID NO: 241303 - DNA, 94 bp, Unknown
  Bacterial polypeptide expressing nucleotide sequence isolated from the Sargasso Sea
aatgagctcctcgaataatctgattgttaacaagtctaaaccattcctcggtaaggtaattattcccggtgataaatctatttcacatagaagt

SEQ ID NO: 241304 - DNA, 847 bp, Unknown
  Bacterial polypeptide expressing nucleotide sequence isolated from the Sargasso Sea
tcatataagttacctattgctagtgctcaggtaaaatcatgtcttcttcttgctgcaattgcttcaaaaattaatatcaatttaattgaaccgaaaattactaggaatcatactgaaaaaatgattgagtattttggtggagttatcgattatggagatgcttcaaaagtagggaatattgaattaagaaatcatgaactccaaccaaaaagtaattatcaaattgttggagatttttcatcagcttcatttattattgttgctagtttaatttctaacgattctgaagtattaattaaaaatgttggattaaatgaaactaggtctggtctattaaaggttcttcaaatgatgggagctgaaattcaaattatacaaagcaaagaagtgtgtaacgaaatagtaggagacattttagtcaaatcttcaaatttagaaggaattgaagtaccagattcaattatcccaaatattattgacgaaatacctatattaagtattgcagctatttttgctaagggtaaaactattataaagaatgcatctgagctaaaagtaaaagagtctgacagattaagtgccatatcaaatggactcgacaagcttaatattagacatgaactttttaatgatggtttatctatttatggaaactataatgaattagatactacagaagtaattgactcttatggtgatcatagaattgctatgagttttctgattgcaggtgctagaaccaaaaatggtcttatggtaaaaaactgtgggaacatcaaaacatcttttccatctttcaaagatataatgaattcaataggtatgaaaatagatgaaaagaattaaa

SEQ ID NO: 241305 - DNA, 480 bp, Unknown
  Bacterial polypeptide expressing nucleotide sequence isolated from the Sargasso Sea
aatgattagtaataaaatcgataaaggcttaataggaagtcctaaaattccaggtgataaatcaatatcacacagatcggtaataatcccttctattgcaaatggcataacagaagttaaaaatattttaaaatctgaagatgttattcatacaattaatgcttttaaaaatatgggcgttgaaatatcagaaaatagggaaaatataattattaatggtaaaggtttaaattctcttaaaggacctaaatcagaaatttatttaggaaactctggcacaagtgcaagattacttacaggtctattatcatctcaaaaatttaattcattaattactggtgatcaatctttatcttcgagaccaatgatgagaattgtaaacccattatctaaaatggacgcaaagatagaaactactaatggatgtttgccaataaaaataaatggccaggatctaaaaagtacagatattgaaattaa

SEQ ID NO: 241306 - DNA, 1228 bp, Unknown
  Bacterial polypeptide expressing nucleotide sequence isolated from the Sargasso Sea
atgaatgtcagattaaagaaaaccaaatcaaaattatttggtgaaatatgtattagcggttcaaaaagtgaatccaataggttgttgctcttgaatgctgtctacaataatattaaaattgaaaatttttcaaattcagatgattctagtcaaatgatgcttgcattaaggtcaaaaaataaaattataaatataaatcatgctgggactgcaatgagatttttaacatcttattatgcatttaaaaataaatctaatattatattgacaggatccaaaagaatggaagagagacctatttcaatcttagtggattcacttttaaaaattggagcttcaattaagtatatgaaaaaaaacgggtatcctccattaaaaattattggaaaaaatccaacaaaaaatacggtaaatttatcatcaaatgtgagtagtcaatatatatcatcgttaatgctaattgctcctaagttaaggggtggattagaaatagatttaactggtaatttaacctccttaccatatatcgaaatgactaaatctattctagaaaaaataggtgtaaaagttgattttcttaaaaataaaataaaagtgtatccaaaagaaaatattgatgatgtaacaataaaagttgaatctgactggagctctgcttcatatttttatagtctggtggcactatcagatagagcgaattttattttaaccagttttaaaaaaaaatcttttcaaggtgattcatgtttaaccgaaatttataaaaaattaggagttaacactagttttaaaggtgataaattattaatatcaaaacaagaaaattttaaaaaaccaaactcaatcaaattaaatttggttaattcaccggatattgctcaaacaattgccgtaacctgcttaggacttggaattaaatgtgatattgacgggctccacacactaaaagtcaaagagactgatagattgattgctttaaaaaaagaaatcacaaaacttggtgctaaaatctcaattaccgatagaagtttatcaattcttccaactgaatcaataaatcaaaatattaatattttaacttatgatgatcacagaatggctatgtcttttgctcctcttgcaatatgtgcagatataaatattttaaacgctgaagttgtaaataaatcctatcccaatttttggaatgatattaaatctgttggaattgaatattttatagaataaa

SEQ ID NO: 241307 - DNA, 603 bp, Unknown
  Bacterial polypeptide expressing nucleotide sequence isolated from the Sargasso Sea
tatgaacgcattaataaaaaaagggtccagttttaaaagctcgattgttttgcctcttgataaatctatcgctcaacgtgctgcaatacttaatcttgagacaaatgacggcattgttggtggtgatgtcatatctacaaggctagcttcaaaaaatgctatagccaacggagaggagaacttatacttaggaaattcaggaacaggaatacgacttctaacaggatacttatcagggctgggcagaaaattcaatcttagcggagacatatccttatccaaaagaccaatggatagaattgcagatccattgaatgaacttggcgctaaagtaagtcttaataatggaaaacccccaatcaatattcttccatcaaacttaaaaaaggaattttcatatcgtttgccaattccaagcgctcaactaaagagctctctactacttgcagctttgaatggaaaaacaaagattgaaattattgagccagaattatcccgggatcataccgagaaaatgcttaagtatttagagtgtgacataaagattgagtataaagatagtttaagaagaatctattttgatggggaggttccgattaaaga

SEQ ID NO: 241308 - DNA, 1180 bp, Unknown
  Bacterial polypeptide expressing nucleotide sequence isolated from the Sargasso Sea
gatcattacttaattgtgatatgcatgttaatggggtttttaaatgctcaagatccaatttcaaccgttaatgcacttaattctattggatcttcaatatctgtaaatgaaaacaaagttactttaaagaaacgagaagttatgttcaaggatcctgaacaagacttaaatcttggtaactcaggtactggtgcaagattgttgttaggtctgatctcaggccttggcttaagattaactatgacaggagattcatcgcttgaaaaaagaccaatgagtagagtgattaaaccacttgagatgatgggagctaagttaagtagtgattcaggcacacttcctataacaacattaggatcaaaaattataaataattttgaatataaaatgccaattgccagcgctcaagttaaatcatgtttactattagctgcattgtcatctcagaaaaatataaaaataactgaaccaaaaataacaagagatcatactgaaaggatgattgagttttttggtggagagattctgtatgaaaataatcaaaattcaaaaacaattcagctcaactattctgaactagaaacaaaaaattcgtttgatgttcctggtgatttttcatctgcagcttttattattgttgcaacgattatttctaaagactctgaggttgttataaaaaatgttggcttaaatgaatctagaaaaggattattagatgttttgctactaatgggagcaaatcttgaaattaaaaataagaaaaaagcttcaaatgagattgttgctgatatttatataagttcttcggagcttagaggtatagatgtaccagacaatattattccaaatatcattgatgaaattcccatattaagtgttgctgcatgcttcgcagaaggacaaacagtaattaaaaatgctgctgaactgcgagttaaggagtctgatagattgcatgcaatttcacaaggactcttaaagttaaaaatcaaacacgatatttttgaagatggcatatcaatttcaggaacatcaaaagaacttaaatgtgatgaatctattgattcttttgatgatcatagaattgcaatgagttttttaatagctggcatcagatcagataattttattagagtaacgaattgtaagaatattgagacttcatttcctaattcaaaag

SEQ ID NO: 241309 - DNA, 362 bp, Unknown
  Bacterial polypeptide expressing nucleotide sequence isolated from the Sargasso Sea
aatggagcagttaacattagacccgattgcaaaagtatcgggagaggtcaatgtacctggctcaaaaagtctgtctaaccgcgcactactgcttgccgcgttagctgaaggtgaaactgaattaaccaacttgctagatagcgaagatattgagcatatgcttaatgcactcaccaaattaggcatcaactaccgcttgagcgaagacaaaactcaatgcgttgttcaaggtaacggtggcgcgttcaacgtagctgagccactagagcttttcctaggcaatgccggtactgcaatgcgacctttgtgcgctgcactcgctgctagtaacgtcgacacagtacttaccggtgaaccgcgta

SEQ ID NO: 241310 - DNA, 1084 bp, Unknown
  Bacterial polypeptide expressing nucleotide sequence isolated from the Sargasso Sea
tgggtttaatttaaaaaagaatacggtaataaatgcaggaaattcaggaacattggctaggctcattcttggattattggtcaaatcaaaatttcaagtcaaacttattggagataatagtttatctaaaagagatttttcaagagttataaagccattaaagctttttggagtaaatattgcgagtaaaaataacttaatgcctattaaaatattaggtacaaattttttaagaccgatagaatattctgaaaatataggcagtgctcaagttaaatcgtgtttaatattatctgctttaaacacacccggaattacaacgattaattcaagaaagtcaagaaatcacactgaactaatgttaaagtttttaaaatatccaataaaaattattagaaagaaaacatttgaaaaaatttcaattcaaggtcttaaacaatttaaagcatttgattataatgttcctggagatattagctcagcagctttttttatagttttaactcttttatctaaaaattcatctttaattattaaaaatgtaaatgtaaatccaagtagaaaaggaattataactatattgaacaaaatgggggcaaaaattgaactcaaaaacaaaaaatcatacaatggagaggctattgctaacatttatgttaaaggtaaaaaaaattttaaatcaataaattgtccagcaaatttaaatagttctgcaatagatgaatttttgataatttttttagttgcagctaaggcaaatggaatttcaagatttaaagaactaagtgaaatgaataaaaaggagtctaaaagattagatttaggtattagatttttgaaattaattggcgttaaagttgaaaggtatggagataacattaatatttatggtaacccaagtctagaactctcaaaaaattttgaaatgaaaaattttttgaaggaccacagaatattttttctttcatgtatcacagcattaactttgggtggaaagtggaaaatacaagataaagattcaattaatacatcatttcctaattttttaaaaactttgaaatctctaggggcaaaaataagttga

SEQ ID NO: 241311 - DNA, 664 bp, Unknown
  Bacterial polypeptide expressing nucleotide sequence isolated from the Sargasso Sea
ttgattttaacatccaaccctgttcaagaaatttttggcgatgttaaatgtccaggtgataagtcaatatcacaaagaatcttaatcattggctcacttttaaactgcgatatcaatgtaagtggatttttaaatgccaatgatcctttatcaactatggctgctcttaatcaaataggagcatcaattaataaagatggtgatttagttaaaataaaaaaaagatcaaggcctttcaatagcccagaatcatcgatatatttgggtaactctggaacaggtattaggttaatgacaggattaatatcaggattaaatttaaaagcaacattgattggagatgagtctcttagtcaaaggccaatgttgagagtagtgaatcctttagtaaaaatgggtaaaaaaatttctacaaatgacggtaaaactccaataaaaataaaaggaggatctataaatgataattttgagtatcaaatgccaatcgcaagtgctcaggtaaaatcttctttaattttggcatcattatcgtcagggaattccatacgtatagaggaaccaaaagttacaagagatcatacagagaaaatgatcgaatattgtggagggaaaatagacgttcaaaactcttcagaaggcaaaataatatctctaaataaatcag

SEQ ID NO: 241312 - DNA, 316 bp, Unknown
  Bacterial polypeptide expressing nucleotide sequence isolated from the Sargasso Sea
atgagattccaaggaacattgcaacttccaggtgataaatctatttcacacagggctataatgctttctgccattgctgatggggaaagctgtgtaaaaaatttaaatgatggagccgatcttcagtccacaataaatattttgaaagattgcggtgctttaattgaacaaagaaacgaaaaaataataattaatggaagaaaacttcattccccaaaaacagaacttgattgtgggaattcaggaaccactactaggcttattgcaggcctgttatcttcacaaaaaataatattcacattaatttggagatgaa

SEQ ID NO: 241313 - DNA, 1007 bp, Unknown
  Bacterial polypeptide expressing nucleotide sequence isolated from the Sargasso Sea
agctcaggaattttcctcaactttaataggcgatagttcgctttcttcgagacctatgcgaagaattatagatccattaagtttaatgggcgctgatatagcaggttcagaagacggcactcttcctttagaaattcaaccatcagattcattgaaaccaattacttattcattgcctgttgcaagtgctcaagttaagtcttgtctcatgtttgctagtttgtatgcacaaggagtaacagaattagaagaaaaagttataactagagatcatacagagagaatgtttaaacaatttaatattcctgtagaaataaaccgattgaaagattctaatttaataaaagtagaaaatgttgaatatatagctcctcaagatataaatatttgtggagacttctcatccgcatctttctttatactagctggactcatcacgcctgattcagagatattaatcagaaatatagggataaatccttcaagaattggattcttgcatgccctacgccatatgggcgctaatattgaattgcaaaaaacaggcggttctgttgagcctacagcaaatataatagccagaacctcagagcttaaaggtataacactaaatacaaatctcgttgcgaacatgatagatgagatgccggcattcttcattgcagcttctttagctgatggtgttacaaaagttacagacgctaaggaactaagaacaaaagagagtgacagactacaggttatgtctgaagctttaaattcttttggggtaaaatttagacttcaaaaagatggaatattgattaatggacttggaaaagaggggacatttaagggagccgaaatcgattctcatggtgatcacaggatagctatggctagttccataggctccttaaggtctgatagcgagacgatcattttggattgtcttaatgttgatacatcttttccaaattttatagaagtctgtaaggatgtaggtatagagatagaaagtatatgag

SEQ ID NO: 241314 - DNA, 752 bp, Unknown
  Bacterial polypeptide expressing nucleotide sequence isolated from the Sargasso Sea
ggaccatactgaaagaatgcttaaaggtttcggagccaatattatatcggaacaaacaagtgaaggaaatataatcaagctcgaggggtacccagagctcaaagctcaggaaataagagtaccaagagatccctcaagcgccgcttttcccgtttgcgcagcattgataaccgaagggtctgatatcctagtacccaatatcgggcttaatcccacacgctctggtttattggataccctcaaagaaatgaatgcaaatataacattcgaaaacgaaaattttcagggaggtgaaccaatggccgacattcgagcacagttttcacctgagatgaagggaatagatgtacctccagaaagagccgcaagcatgatagacgagtatccaattctttcagttgtcgctgcctttgcaaaaggaagaacaatgatgcgggatgtgcgcgagttgagagttaaggaaagtgatcggatagacgcgatggcaaaggggttaaagtcaaacggactcaaaatagaagaaggtgaagattggtggtcggtggaaggccgtgaaatagatggtgtagttgggggtggtttttgtgaaacctttctagatcacaggatagccatgtcatttcttgttatgggtatggccagccagcgcgcgattaccattgatgatagtagtccaataaccacctcttttccaagttttgaaaatttgatggcccaaattggagcaaattttcagaagctaaagcaatgag

SEQ ID NO: 241315 - DNA, 136 bp, Unknown
  Bacterial polypeptide expressing nucleotide sequence isolated from the Sargasso Sea
atgtttagtgaacaaactaagattggaattaatgggtctattaaaattccgggtgacaaatcaatatcacacagatcaattataattccctcaatttctagtggtatttgtgaaatttcaaatattttaaaatcag

SEQ ID NO: 241316 - DNA, 853 bp, Unknown
  Bacterial polypeptide expressing nucleotide sequence isolated from the Sargasso Sea
cccggcgcaatcacggccgacgcgccgatccgcgtgcgtggcgacgtgtcgagccagttcctgacttcactgctgatgacgctgccgctgctgcgcacggaaagcggcgtgaccgtcgtgcaggtggacggcgagctgatctcgaagccgtacatcgagatcacgatcaagctgatggagcggttcggcatcaaggtcgagcgccatgaatggcatcgcttcgtcgtgccggcggggcagcgctatcagtcgccgggcaccatcatggtggaaggcgatgcatcgtcggcgtcgtatttcctcgcggccggcgcgctcggcggcggaccgttgcgggtggaaggtgtgggccgctccagcatccagggcgacgtcggctttgccgatgcgctgatcaagatgggcgcgaacctgcagatgggcgacgactggatcgaggtgcgcggagtcggcaacgacaacggcaagctcgatccgatcgacatggacttcaacctgattcccgacgccgcgatgacgatcgccgtcgcggcgctgttcgccgacggcacgaccacgctgcgcaatattgccagttggcgtgtcaaggaaaccgaccggatcgccgcgatggctaccgagctgcgcaaggtcggcgccaaagtgcaggagggcgaggatttcctcgtcgtcacgccgcctgaaaaattgattccgaacgcctcgatcgacacttacgacgatcaccgcatggcgatgtgcttctcgctcgtgagcctgggtggcgtgccgatccggatcaacgacccgaagtgcgtcggcaagacgtttcccgattatttcgagcgcttcaccgcgctcgctcaaccctgat

SEQ ID NO: 241317 - DNA, 1002 bp, Unknown
  Bacterial polypeptide expressing nucleotide sequence isolated from the Sargasso Sea
aatgaaatctataagcagtaaaaaattaaaaggcaacatcttaattcctggagataaatctatttcgcatagattagttattttatcttcaattgctattggtcatagcaatattaaaggaattctgaaaagtgatgatattatgaaaactattggcgttatgaaaaagtttggtgcttcgattgaatttacaaaaccacttaattgttcaattaaaggagtgggtctagggggtttattagaaccagaatcagcattggactttggtaattctggtacttcagccagactaataatgggcttatctgcctctcaccctattacaaccatatttgttggtgataaatctttatcaataagaccaatggatagagttttaaaacctttagttaattttggctctaactactcactaagaaaagataattatttacctgcaatactgaaaggttcagataatccaattccttttagttttgaattggatgagccatcagcccagattaaatcagcagtactcttaggtgcattaaatacccctggagtaactacagtgaaggataaatttaatacaagggaccatactgagagacttttaggtttatatggggctaatattaatatcactaaaaaaagaaatgtaaaaacaatctcaataaagggagttaacgaacttaaaggagtagatttgagtgttcctggtgacccatcctctgctttatttccaataatagcggcattgatttgtaaaaattcagatataacggttaaaaatgttctaataaatcccactagagatggtgcatttaaggttttaaaagatatgggtgctgatataagttttttgaataatagaattatggcagcagaagaagtttatgatattagagtgaagtctagtaacttaaaaggaattaatataccaaggatacttgctccaacgatgatagatgattatccaattcttgctgttgcagcttctatggctgagggtaaaacata

SEQ ID NO: 241318 - DNA, 890 bp, Unknown
  Bacterial polypeptide expressing nucleotide sequence isolated from the Sargasso Sea
aatttttggtagagagaaagggaacaaagctccgatctcaattgatgggaataaacttaaaggatgtgttattggaacccctgtagcaagtgctcaagtgaaatccgcaatattattagcaggccttaaagcttctggaaccacttctgttattgagccagcatcttcaagagatcataccgaaagaatgttaaaagcatttggagcagatataagtatcagaggagaattaggaaggaatgtagtaataaagtcagggggtaacttaattggtcagagaatattaatccctggagacataagctctgcttccttttggatgattgctgcatctattgttccaaattcggagattttaattcaaaatgtcggattaaatcccactagaacagggattttaaatgtaatggattccatgggttgcgattatgaaattttagataaatcgacgattgcaggagaacctattggatctattaaagtaaagactgcagataatttaagatcattcactattgaaggtgatattctcccaaaacttatagatgaaattcctatccttactgttgctgcctgtttttgtgacggagtttctgaaattaaggatgcacaagaattaagagttaaggaaacagatcgattaaaagtcatggcaagacagttaaacaaattcggtgctgaaataatagaaaaagaagatgggctaattattaatggtcaatcaaaatttcattctgcggacgtagatagtgagacggatcatagagtagcaatgagtcttgctattgcgtcacttctggccaaaggtacctcaaaaattaagagagcagatgctgctagcgtctcgtatcccactttttgggaagagcttgccaaactaactaactaac

SEQ ID NO: 241319 - DNA, 911 bp, Unknown
  Bacterial polypeptide expressing nucleotide sequence isolated from the Sargasso Sea
cctgcctggtgataaatctatatcacacagaactgttatgcttgccgctctatctgatcaacgatcaaaagttaacaacttatctaatggtaaagatgtaaagtcaacaatttcctgtttaaagaattgcggaattgatattgaatattcaacggggtcctattttgttaatggcgggagatttaagcaaccaataactgatttagattgtggaaattctggaacaactatgagattgctgatcggtcttcttgcaggtcaagggatagatgccaatttcattggtgacaagtctctttcaaatagacctatggaaagaataattgatcccttaaaaaaaatgggtcttaatattaaaagcaacaaaacaatgccacctatacacatttctaagagtaaactaaagggaatagattatgtaatgccaattgcaagtgcgcaattgaaatcaagcatccttcttgctgcgcttggtgcaaaatcaaacacaacgataaaagaaaatatagtttctagagatcatacggaaatcatgttaaaaaatattggagtcaacctttatagaaaaagtggatcaatatttgtagagccttgtaataaatttctacctcaaaatatttcagttcctgctgacccatcaactgcagctttctttattggtgctgcagtcttgtcacccagatctaaattactaataacaaacctgcttttaaatgaaactcgaattggatttttaagggcattagaaaaaatggggtgttcatttaattatcgcaatattcgtaatgtgtctggcgaaaaaataggtgacttagaaatgcgttatcacaagttattcggtattgaaataaacaaatctgatatcccctctataattgatgaaataccaattctcgcactgattgcttcac

SEQ ID NO: 241320 - DNA, 882 bp, Unknown
  Bacterial polypeptide expressing nucleotide sequence isolated from the Sargasso Sea
agataaacctatttatttaggtaactcaggtacaagtgctagattattaacaggcttattatcaagtcaaaagtttgataccattttagaaggagacaaatcactatccaaaagaccaatgaaaagaattactgatcctttatgtataatgggaggtaaatttgaaaatcaatctggaactttacctataaaaattttaggcaatgaactaaaaaatattcaacacaaaattttaataccatctgcccaaataaaatctggccttattttggcggcgttgaatacaactggcaaaactcaaataattgaagaaaacattacaagaaatcatactgaaataatgttaaaagcttttggtgctaaaataactacaaaagaaaggatgtcaggatctaatatatctatattaggaaaaaatgaactaacatcaaaaaatatttcagtgccatcagatttatctagtgcagctttctttattgttgctgccttgataaacgaaaattcaaaacttactttggaaaatataaatattaatccaactagggatggaatattaagagcactacaaaaaatgggagctaaaattaatattaaaaatgaaagatttgtaaatgaagaaaaaattgccgatttaaatataagtcattccaaattaaaaggttgtgaacttgatggtagtattgcaaaattaatgattgatgaattcccaattcttgctgtagcagcaagttttgctgaaactccatcaaaattttatggtttgaaagaattaagagtaaaagaaagtgatcgtttagagttaataagacacaatctagaaaattgtggtatttattgtgaaattgaaggtgaaaatctttttattaatcctggaaaaaattt

SEQ ID NO: 241321 - DNA, 829 bp, Unknown
  Bacterial polypeptide expressing nucleotide sequence isolated from the Sargasso Sea
atgagtagggaaagtatcaatctactagcctcaagtagcaaaaaaataaatggatgcataagagtccctggcgacaaatctatttcgcatagagccataattatttcatctattgctgaaggaaaaacacaaattaaccaatatttagattcagcagataccaatgcaaccattgatgtttgccgtcaaattaatgctgaaattgtaaaaaataatgaatcattgattattacaggaaataaccttgagcgaattcagaaagataatattgaattaaattttggcaactctggtacatctatgagattgatgatgggcgttctatcggcacaaatcttttcatcaattttatctggtgatgaatcacttagtcagagaccgatgagtagggtctcaaaacctcttaccaacatgaatgccgatataaaaacttcaaatggaacacctccaatattcataactcctgtagatgatataaaaaatgtcgaccacaaaattcatattgctagtgcacaaattaaatcagccattatgctcgcaggactttatggcagagatccttttacgataattacacctaagtctagagatcatacagaaattatgttgaatcaatttggatgcgatatcactatagaatctgattatattaatgtgatcccaagtaaacttacttcgccagagacaattgatgttcctggtgatatttcctcggctgcattttttatagttggatcaattctctcaagagatagtcaagtgaagattgaaaatgttggtttgaatccattgagaacaggattcattgatattcttaaaatgatggggg

SEQ ID NO: 241322 - DNA, 815 bp, Unknown
  Bacterial polypeptide expressing nucleotide sequence isolated from the Sargasso Sea
tgtggctattgcaagtgcacaaattaaatcatcaatcatgctggctggactttatggcaataagtctttcaggataactactccaaaatccagagatcatactgaaatcatgctgagtgaatttggatgtaatatctcaatagattcagattcaattgagatggaaccaggaaaactcatcacgccaaatattataaatgttccaggcgatatttcatcagctgcatttttcatagttggatcaattatctctaaaaatagtaaaataaatattgaaaatgttggtttaaatcctttaagaacaggtctcatagagatcctcaaaatgatgggtgcaaacattcatattacaaatataaaaacaattaatggcgagttggtaggaaatatttatacagaatcttcgaggctaaatggaattgaaattccaaaggatctgatcgcaagttcaattgatgagttaccgctgattgctttagcagctagccgagctaatggaaaaacctcaataagaaatgctgaagaactaagagttaaggagtcagacagaatatcatcaatgacaaagatgatggaggctttcagtatctcgactgatgaatttccagatggaatgaatgtttatggtggctcaatcaaaggtgcaagagtgaacagctttggtgaccacagaattgcaatgaccgcactcatggcttcactcgtgtctgaaggtgatattctggttgagaattgcaagaatatcgacacatcatttccaacatttattgaaattgctaataatattggcatggatattaaaaaaaatgactaat

SEQ ID NO: 241323 - DNA, 976 bp, Unknown
  Bacterial polypeptide expressing nucleotide sequence isolated from the Sargasso Sea
atgaataatatccgcacaataaaaggtggagtaaatttaaacggaaaagtaaaagtacctggagataaatctatttctcatagagctttaataataggaagtattgctaagggtgatactaatattgaggggttcttacattctgaagatccactttcaactgctgattgtctaagaaagttaggtgtgaatataccagagataaaacaaaatgagccttttacgatttcaggattgggtcttgatggatttaaagagcccaaagaaattctaaattgcggaaattcgggaaccactatgagattattaatgggtttacttgccggtcaagaaggcaagaattttatcttaactggtgacatttctcttaatgaaaggccaatggggagagtgggcaaaccattatcgttgatgggtggcaaaatttttggtagagaaaaaggaaacaaagctccaatctcaattgatgggaataaattaaaagggtgtgttattggaactcctgtagcgagtgctcaagtgaaatctgcaatcttattggcaggcctcaaagcttctggaaccacttctgttattgaaccagcatcttcaagagatcatactgaaagaatgttaaaagcatttggagcagacatcagtatcagaggagaattaggaaggaatgtagttatcaagtcaggtggcaacttaattggccagagaatattgattcctggagacataagctctgcttctttttggatgattgctgcatctattgttccaaattcggaggttttaattcaaaatgtaggactaaatcccacaagaaccggggttttaaatgtaatggattcaatggggtgtgattatgagattttagatgaaacgactattgcaggtgagcctattggatctattaaagtaaagacttcaaaaaatttaagatcatttactattgaaggagatattctcccaaaacttatagatgaaattc

SEQ ID NO: 241324 - DNA, 673 bp, Unknown
  Bacterial polypeptide expressing nucleotide sequence isolated from the Sargasso Sea
atgcttataagttcaaaaatttataatggcattaatggtgagattgaaattccaggagataaatcaatttcgcacagatcaataattattccatctatatcaaatggggtttctgaagtttcaaatattttaaaatctgaagatgtcttacatactatgagcgcttttaggcagatgggagtcaaaattgaggaagtaaaagataaaataattatttatggcaaaggtttaaactcacttaataaaccttcaaagaaaatttatttgggtaactctggaactagtgcaagattattaataggcctactttcttctcaaaatttcatatctaatttgacaggagatatttctttatcttctaggccaatgggaagaattatggatcctttgaatttaatgggagctaaaatagattctgcagataaaaaattaccaattcgtatttacggtcaaaaattaaaaccaattaactatacagttcctgtaccatctgcacaggtaaaatcaggcttaatattagccgcacttaatactgaaggcgtttccaaatttattgaaaaagatattacaagagatcacacagagattatgttagaatcttttggggctgatatagatataaaagaagacaataaatataaacatatttctattattgaaaaaaagagctgat

SEQ ID NO: 241325 - DNA, 880 bp, Unknown
  Bacterial polypeptide expressing nucleotide sequence isolated from the Sargasso Sea
acaatattaaataaaaataatcttgtagtggaaggaaggggacttaattctctaaaaaaaccaataagtaaaatagatttaggcaactctggaacaagtgcgagattattaactggactattatcttctcaaaaatttgaatcaataatttatggggatgaatcactttctaaaagaccaatggatagaataatagatccattagaacttatgggagcaaaatttataagtaatgaaaaaaaattacctattaatattattggaaaaaaattacgaaatattgaatatgaacttaatttgccttcggcacaagttaaatcaggaataatgttagctgctttaaatacagatggcaaaactaaaataatagaaaaagaaataactcgaaatcatacggaaataatgcttacagcttttggtgcagatatatcaataaacaaatttgataatgaaaatcatatttatttaaatggtggaaaagagctagtttcgaaaaaaatacatgttccctctgatttatcaagtgctgctttttttattgtcggagctttaataaataaaaattcagaaataaatatgcaaaatataaatttaaatccaactcgaactggaattttacaagcattaaatttaatgggtgcaaaaataaatataaaaaacaaaaaaacattaaatgatgaggaggttggtgatttagaaattaaagactctaacttaaatggctgtgaattaaatggtgatattgcgagacttatgattgatgaatatcctattttatcaatcgcagcttcttttgcaaattcaccttcagtatttagaggtttgggggaattaaaacataaagaaagtgatagattagagctaattagatataatctag

SEQ ID NO: 241326 - DNA, 713 bp, Unknown
  Bacterial polypeptide expressing nucleotide sequence isolated from the Sargasso Sea
aatgaataatatccgcacaataaaaggtggagttaatttaaaaggaaaaataaaagtacctggagataaatctatttctcatagagctttaataataggaagtattgctaggggcgagacgactattgaggggttcttacattctgaagatccactttcaactgctgattgtctaagaaagttaggtgtaaatataccagaaataaaaaaaaatgagcctttcacgatttcaggattgggtcttaatggatttaaagagcccaaagaaattctaaattgtgggaattcaggaaccaccatgagattattaatggggttacttgccggtcaagaaggcaaaaatttcatattaacaggtgacatttctcttaatgaaaggccaatggggagagtgggcaaaccgttatcgttaatgggcggcaaaatttttggtagagagaaaggaaacaaagctccaatctcaatttatgggaataaattaaaagggtgtgttgtaggaacccctgtagcaagtgcgcaagtaaaatctgcaatcttattggcaggcctcaaagcttctggaaccacttctgttattgaaccagcatcttcaagagatcatactgaaagaatgttaaaagcatttggagcagacatcagtatcagaggagaattaggaagaaatgtagttatcaagtcaggtggtaacttaattggccagagaatattgattc

SEQ ID NO: 241327 - DNA, 685 bp, Unknown
  Bacterial polypeptide expressing nucleotide sequence isolated from the Sargasso Sea
catgataaaaggaactatcgaatttccaggagataaatcaatatctcacagagctttgatgattgcatctatatcatctgaaacatctcaaatcaaaaatctctcaaatgggcaagatgtcttatcaacaaaaaaatgcttagagcagtgtggaatatctataaatggttcaaaaaatagttatcaagtaagaggtggaaaatttgctgatccagtaaaagacctagactgtcagaattcagggactacagtacgattgcttactggattattagctggaaaaaatatcaatgcaagacttattggtgatgaatcactttctaaaaggcccatggaaagaattgtaaaacccttatctaaaatgggactacagataaaaagcaacgatggaaaacttccaatatccattaaaaatagtagaattaatggcatagactacaaaaatacaatgtcaagcgcgcaggtcaaatcagcggtgttattatgcgggctgggtactacagatactacaagctattatgagcctataaaatctcgggatcatactgaaataatgttaaaaaatattggtgttgacatagaacacaataacggaaaaattattttaagaaactcaaattctttgatcagaggattagacattacaattcccggtgacccatctaccgcatcattttttgctgct

SEQ ID NO: 241328 - DNA, 553 bp, Unknown
  Bacterial polypeptide expressing nucleotide sequence isolated from the Sargasso Sea
gatgattagtaattcaatagcagaaggcaaaggcataaacggtacacctgttgtgcctggtgacaaatcaatatctcataggtctataattataccgtcaatttctaatggtgtatgcgaaattaataacattttaaaatccgatgacgttatgcacactcttaatgcatttaaagatatgggtgtgaaaataattgagagtgaaaataaattaataatatttggtaacggattaaattctttaaaaaaatcaaaaaattctatttatttaggtaattctggtactagtgcaagattattaacaggtttactttcttctcaaaagtttaattcagttttaactggagacgactctttatctaaaaggccgatgagaagaatctcaaatccactaagtaaaatgaatgcaaaaatatataccaataatggttcattgccacttacaattgaaggtgcagatttaataccctgtgatatagaacttgagattccttcagctcaaattaaatccggattacttgtagcaagtttaaatacaaagggagaaacaaat

SEQ ID NO: 241329 - DNA, 721 bp, Unknown
  Bacterial polypeptide expressing nucleotide sequence isolated from the Sargasso Sea
atgaaatctaataaaataaattcaagcttcaatggactaattaatattccaggtgataaatctatatcacatcgatcaataattattccttctattgcaaatggtatttcagaagttaacaatatcttaatgtcagatgatgtgatgcatacattaaatgcttttagagaactaggtgtaaaaattgtactagaaggaaaaaaagtaattattcatggaaagggcctaaactcattaaatgaagcaaaaaaaaatatttacttgggtaattcaggaactagtgcaagattattaactggtttgtttgcctcacaaaattttaatacattaattgaaggtgataaatcactttcttcaagaccaatgaaacgaattattgagccattaaaattaatgggtgcagtttttgaaaatacatctggaaaattacctttaaaaataattggcacaaaattaaaaaatactaatataaaaatagatataccatctgctcaaataaaatcagggatattattagctgctttaaaaacagatggtattacatcagtgatagaaaaaaatataactagagatcataccgaaaatatgcttaaattgtttggagcagatattaagattgaaaaaaatagttctgagaattgcatatcaataaatggaaatatagaattgatatcgaataacatagatgtcccatctgatttatctagtagtgcttttttta

SEQ ID NO: 241330 - DNA, 766 bp, Unknown
  Bacterial polypeptide expressing nucleotide sequence isolated from the Sargasso Sea
aattgtagaaaaagaaaaaagtagagatcatactgaaaatatgattttaaaaaattattcagtaataaaagtaaaaaataataatgaaaaaattattacgattaaaggaaaagaaaatttaaaaccattaaacctaaaagtaccaggcgatccttcttctgctgctttttttgtaggattaacactacttaaaaaaaattcatttattaagattaaaaatgttggattgaatcctacaagaacaggtttctatcaacttttacaggagcaaaaagcacatattaaatttttaaatttaaagaaaattaataatgaaattaaaggtgatattgtagttaagaatagtaaaattaaaccgattaaggcagccaaaaaatattatgtaaatgctacggatgaatatccaatattgtttgtaattgcagcattaactaaaggaatatcagtttttaaaggtattagcgatttggcaaacaaagaaagtaatagaattactgagatgcaaaaaattttaaaacaaattggaattaaaagtattgcatcaaaaaatgaactaaaaatttttggtaaaggtatatttgatgcatcaaataaaagaatcaatgttcctaatctcggagatcatagaatttgtatggcaacttttattttggcaattttaactggagctaaaacaaaaataaaaaactttgaaacagtatttacctcatcaccatcttttttaaaaactatgaaatttttaggagtgaaatttgaaatacaataa

SEQ ID NO: 241331 - DNA, 658 bp, Unknown
  Bacterial polypeptide expressing nucleotide sequence isolated from the Sargasso Sea
tgaaggagaagggtctttatcaggtatagatatagaagtacccggagatatttcatctgcagcgttttttatggttgctgcagcgatttctgaagggagcgcaataaacctcttacatgttggtcttaatcctacgagaacaggaattatatcgttattaaatttgatgaatacaaaactagagattactaatgagaagataatcggtggagaaccggtcggagatattagggttacttcgtcaaaccttgaaggaattgccgttccctcgcagcttgttcccctagcgatagatgagtttccaatattctgtatcgctgcggcatgcgctaccggcactacgactattagaggagctgaagagttgcgagttaaggaaagtgatcgtattgaggctatggcagaaggtttgacggctttgggtattaaagtgaaaacatttgccgatggtttagaaataaaaggcggaactattttaggtgggcgtgtaaaaagccattctgatcatcgaatcgcgatggcgttttcaattgcggcaattaaagcaaaagatcgaatcttcatcgaagattgtaaaaatgtggctacttcattcccagggtttgtagatttagcgaattcaattggaatggatattaaagagatctctgatggttga

SEQ ID NO: 241332 - DNA, 582 bp, Unknown
  Bacterial polypeptide expressing nucleotide sequence isolated from the Sargasso Sea
aatgaataatatccgcacaataaaaggtggagttaatttaaaaggaaaagtaaaagtacctggagataaatctatatctcatagagctttaataataggaagtattgctaagggtgagacgactatcgagggttttttatattctgaagatccactttcaactgctgattgtcttagaaaattaggtgtaaatattccaaaaataataaaagatgagacttttaagattttagggatgggtcttaatggattaaaagagccaaaagaaattctcaattgtggaaattcaggaaccactatgaggttattaatgggtttattagccgcacaagaaggtaagaatttcatcttaaccggggacgcttctcttaatgaaaggccaatggggagagttggcaaaccattatcattaatgggtggcaaaatttctggaagggacggcggtaacaaagctccaatctcaattgatggaaagaaacttaagggatgtgttattggaactccagtagcaagtgctcaagtgaaatcggcaatattattagcaggccctaatgcttctgggactacttctgttattgaacc

SEQ ID NO: 241333 - DNA, 865 bp, Unknown
  Bacterial polypeptide expressing nucleotide sequence isolated from the Sargasso Sea
gtcatcgacacgcgttacgaatctgcgcggccacgcaaacgtacctggtgataaatcaatatcacatcgatcattaattctaggtgctttgtcgattgggaaaactaagattaatggccttcttgaaggtcaagacgtcatcgacactgcaaaagcaatgagctcatttggagcattaattaaaaaacataaaaatggagagtggacagttgatggttttggagttggaggatttgctgagcccaaaaaagtaatagattgtgggaactcgggaacaggcgtccggcttattatgggagcaatgtcaacatctgatattacagccacttttactggagacgccagtcttaacaaacgaccaatggccagaataacggaacctctaaatctatttggtgcaaaaactttcagccgaagaaatggcaagcttccaataactgtagttggatctgactcccctattccaataacttatcaaactcctatagcctctgcccaaattaaatcagccatactatttgccggtttaaattctcctgggacaacgacagtaattgaaaaggaaaaaaccagagaccacactgaaagaatgtttcgaggttttggagctgatattatatcggagcagacaaatgaaggaaacataatcaagctcgaaggatatccagagctcaaagctcaggaaattagagtcccaagagacccctcaagcgcggctttccccgtttgcgcagcattgataaccgaagggtctgatattctagtccccaatatcgggctaaatccaacacggtctggtttgttcgatacccttaaagaaatgaatgcaaatataaccttcgaaaacgaaaattttcagggaggt

SEQ ID NO: 241334 - DNA, 859 bp, Unknown
  Bacterial polypeptide expressing nucleotide sequence isolated from the Sargasso Sea
tttggagaaggtttcaaaatttaaattagtgaaaaatcaaataaagataaataaaattattaatccctttaaaaaaaaaatttatattccaggagataaaagtattagtattagatgtatattattagcatctatagcaactgggaaatcagaaatatttaatttgcttaagtcagaagatgtattaaacgctgtaaaagcagtaaaaaaaattggtgtaaattgtattaaaaaaaaaaattcttttgagatttatggtgtaggaataaacggttttcatattaaaaaaaatacaactattaatgcaggaaactccggaacgcttgctagatgtattttaggattatgctcaggcatagataaagaaattaaaattataggggataaaagtttatcaaaaagagactttttaagagttattaaaccacttaatttatttggtacaaaagttgtatcaaaaaatgggatgatgcctttgaaaattgttggttcagatttattaagacctataaattatattgagaacaagggaagtgcacaaattaagacttgtataattttaagtgcaataaacactaatggtattacaaatattaaagcaaaaaaatcaagaaatcacactgaattaattttaaaaaatttgaattatccaattaatattaaaaaaaataagaaatacgattttattaaaattagaggtttaagccaatttaattcatttaattataatgtacctggtgacattagctctgctgctttttttattgctttaactatattatcaaataattcaaatcttttaataaaagatgtcaatattaatccctctagaaacctggtattattaaaatttaaaaaa

SEQ ID NO: 241335 - DNA, 892 bp, Unknown
  Bacterial polypeptide expressing nucleotide sequence isolated from the Sargasso Sea
gaaaaatctcttctgccaatttgcatcttaggagctaatgatcctgtaggaatagattttactggcaaagttgcatctgctcaagttaagtccgctatactgatagctggattaaatgctacaggcgaaactcgatatattgaaagtgttcataccagagatcatacggaaagaatgctttcaactttcggtgctgaagtagaaataagccagttaactgactcaaagtgtattaacataaagggtttagctcagttaggccctcaagaggtttctataccaggagacccttcctcagcagcatttccaatgtgtgcagcattaatggtcaatgggtcagaaataacaatacctaatatatgccaaaatccaacaagaataggcttgcaagagacattatgtgaaatgggcgcggatatatctgttgaaaataagcggatttatggcggagagcctgttgcggatttgtcagttcgttttggccctctgagaggtgtaagtgttccacctgaaagagctccatcaatgattgatgaataccctattctagctattctagcctctacggctgaggggaagactattatgaagggtattaaagagttaagagtaaaggagagtgatagaataaaggcggtgtctgatggtttaaggcaaaatggaatagaaattgaagagactgaagattctttaacagtttttggaaaaccaggctcaatatctggaggttctttggttaaaacttactatgatcataggattgcaatgtcatttttgtgtttggatttagtagctgaagagcctataagagttgatagtttgagttcaattaatacaagctttaaagagtttcttagctctatgaaaaaaattggagcaaaatttgattaaa

SEQ ID NO: 241336 - DNA, 605 bp, Unknown
  Bacterial polypeptide expressing nucleotide sequence isolated from the Sargasso Sea
ccaggggaaccagacctatctttccccgagagaattttatgtggaaggcgacgcgtcctccgcctcctatttcctcgcgggagcagcgattaccggagggagcatcaccgtccaggggtgtgggacggaaagtctccagggagatgcaaaattcgctgaagtgctggagttgatgggagcagaaacgaaatggcagccaaattcagtcaccgtccatggaaaatctttgaaaggggtcgacctcgatatgaaccgaatgcctgatgctgcgatgactctcgcagtggccgctcttttcgcggaaggcccgacccgaatccggaatgtctacaactggcgtttgaaggaaaccgaaaggatgaaagcggtgaccaccgaactacgaaaactaggtgcttccgtcgaagaaggcgaggattacctagtggttgatcctccccaaaaaatcctaccctgtgaaattgaaacctatgacgatcaccggatggcgatggccttttcattggccgcctgcggagcggaaccaatcaccatccttgatcctggatgcgtgagtaaaacttttcctgattacttcgaggtcctcgaaagcgtatcagagtaaa

SEQ ID NO: 241337 - DNA, 297 bp, Unknown
  Bacterial polypeptide expressing nucleotide sequence isolated from the Sargasso Sea
gatgaaaattttaaaagttaataaatcctcacttatatcaagaactattaacataccaggtgataagtccatatcacacagagcaatcattcttttatcattagcatcaaattcttcaacaatcagaggcctgcttgaggctgaggattgccttaacacaattcgtataatgcagggattgggcgtaaaaatttctaagcaaggcgaagaatacattattgaaggagttggcataaacgggttaacaaaaccaaaagaggaactgtactgtggtaattctggcacggcaatgagatt

SEQ ID NO: 241338 - DNA, 451 bp, Unknown
  Bacterial polypeptide expressing nucleotide sequence isolated from the Sargasso Sea
atgtcatattcacttaataataaaaaaactttacgaggagatctcacaatccctcctgataaatccttatctcatagagccgtaatgtttaattccatagcacaaggagaagctagaatttctaattttttaatgggtgaagattgcttatctactatttcagttcttaggaaacttggagtaaatattgttgttgatgggaataatgtttttacctatggtaagggcatagaatcattgactcctccaaaagaaattttggatgttgggaattcaggaactacaataagattaatgtctggaatactagcagggagaaatttcaattgtgtacttgatggtgattcatcaatcagaaaaaggccaatgaatagaattattaaaccattaaatatgttgggtgcaaatatttctgctaaaaataataatgagaatgcacctatagaattta

SEQ ID NO: 241339 - DNA, 632 bp, Unknown
  Bacterial polypeptide expressing nucleotide sequence isolated from the Sargasso Sea
aatgaataatatccgcacaataaaaggtggagttaatttaaaaggaaaagtaaaagtacctggagataaatctatttctcatagagctttaataattggaagtattgctaaaggtgacacgaccattgagggattcttacattctgaagatccactttcaactgctgattgtctaagaaagttaggtgttaacataccagaaataaaaaaaaatgagccttttacgatttcaggattgggtgttgatggatttagagagcccaaagaaatcctaaattgtgggaattcgggaaccaccatgagattattaatgggattacttgccggtcaagaaggcaagaattttatcttaacaggagacatttctcttaatgaaaggccaatggggcgagtgggcaaaccgttatcgttgatgggtggcagaatttttggcagagaaaacggtaacaaagctccaatctcaattgatgggaataaattaaaaggctgtgttattggaacccctgtagcaagtgcccaagtgaaatctgcaatcttattggcaggcctcaaagcttctggaactacttctgttattgaaccagcatcttcaagagatcatactgaaagaatgttaaaagcatttggagcag

SEQ ID NO: 241340 - DNA, 874 bp, Unknown
  Bacterial polypeptide expressing nucleotide sequence isolated from the Sargasso Sea
aatgatatctaataaaatagaagttggatttaatggtataattcaaataccaggagataagtctatttcccatcgttcaattatcattccgtcaatatcaaatggaacttctgagattaataatttattgatgtcagatgatgttctttgtacattagaagcttttagaaagttaggagtaaatataactatttctaacaaaaaagttacaatatttggtaaaggtttaaattctctatcaaagccaagtgaaagaatatatctaggaaattctggtacaagtgccagacttttaactggtttattagcttcacaaaattttaattcaattcttgaaggtgacaaatctctttcatcaagaccaatgaaaagaattataaatccattaaaattaatgggagctaaatttgaaaatactaatgggttacttccattaaatataattggtcaagagcttaaaaatcaaaaaataattattgatgtgccttcagcacaaattaaatcaggtttaatattagcagcattaaataccaaaggattaactactataattgaaaaaaatattacgagagatcatactgaaaatatgcttacatcatttggtgctgacatagatattaaaaaaaataaaagtgaatcaactattttaattaaaggaaaaaaagaattaatatcaaataatattgatgtaccttcagatttatcaagttgtgcattttttatagttgcagcattaataaataaaggatcaaaaatttttatggaaaatataaatattaatccaactagagatggaattttgaaggctttaaaacaaatgggtgcaaaaattaatattaaaaatagacgttttttatcaggagaaatcgtagct

SEQ ID NO: 241341 - DNA, 646 bp, Unknown
  Bacterial polypeptide expressing nucleotide sequence isolated from the Sargasso Sea
ctccaatctccgcctaacgcgctctatctgggcaactcagggacgtcaatgcgcctgctcgcaggtctcatggccgggcaatctttcgatgttgagatgagcggtgatgagtctctttctaaacgccctatggggcgggttgctgatcctttggccctgatgggggctattgttgatactgctgaaggtggtcgaccgcccttgaaagttaaaggtggcagcgacctgaagggcattcactatgatttgccgatggccagtgctcaggtaaaaagttgtgtattgcttgcgggactgtacgccgagggtgaaacctcagttactgagcctgcaccgactcgtgaccataccgagcgtatgttgcgtggctttggttatgacgttattactgaaggtaacaaagtgacgctgcgttcaggcggcgagctcacggcaaccgaaattgacgtgccttctgatatctcctcggcggccttctttatggtaggtgccagtatcatgccgggttctgatattacgctggagcacgtgggtattaatccaacgcgcgtcggtgtgatcaatatcctgcgcgccatgggcggtaatattgatgttctgaatgaacgtgaagtcggcggcgagcccgttgctgatatccgtatcc

SEQ ID NO: 241342 - DNA, 616 bp, Unknown
  Bacterial polypeptide expressing nucleotide sequence isolated from the Sargasso Sea
atgaataatatccgcacaataaaaggtggaattaatttaaaaggaaaagtaaaagtacctggagataagtctatttctcatagagctttaataataggaagtattgctaagggtgaaaccattattgaggggttcttacattctgaagatccactttcaactgctgattgtctaagaaaattaggagtaaacataccagaaataaaaaaaaatgagccttttacgatttcaggattgggtcttgatggattaaaagagcccaaagaaattctaaattgtgggaactcgggaaccaccatgagattattaatggggttacttgccggtcaagaaggtaagaatttcatcttaacaggtgatgtttctcttaatgaaaggccaatggggagagttggcaaaccgttatcgttgatgggtggcaaaatttttggtagagaaaaaggaaacaaagctccaatctcaattgatgggaataaattaaaagggtgtgttattggaacccctgtagcgagtgctcaagtaaaatctgcaatcttattggcaggcctcaaagcttcaggaaccacttcagttattgaaccagcatcttcaagagatcatactgaaagaatgttaa

SEQ ID NO: 241343 - DNA, 457 bp, Unknown
  Bacterial polypeptide expressing nucleotide sequence isolated from the Sargasso Sea
atgagtctctctaataatcttatagtgaataagtcaagaccattgattggaaaaataaaaatacctggtgataaatcaatatctcatagaagtattattcttggatcactatctgagggtgaattagtcgtctctaattttttaaattctgatgattgtctttcaacaattaatgccatgagagagcttggagtagaaattcacttagacaatgataaagttaagattattggcaaaggtttatatggattaaataaacctaaatctataattgatgtaggaaattctggcacattattgcgtttattaacaggattgctgtcagcacaaaaatttgaatcttcaataacaggtgataaatctattataaagagacctatggctagagtaattaaaccactagtagccaacggtgcaagaattgagtcagataactatatggcacccaatacaaaat

SEQ ID NO: 241344 - DNA, 298 bp, Unknown
  Bacterial polypeptide expressing nucleotide sequence isolated from the Sargasso Sea
ttgacgttaaaaccaatcaagaaaatcgatgggaccgttcgccttccggggtcgaagtctttatcaaatagaatcttattgttagctgctttggcggaagggacgacgaaagtcgaaaacctgttagactcggacgatatccgatacatggtggatgcgttaaaagtcctaggcttgagtttcacggaagatcgagccaataatattttggaaatcacggggtgtggaggtaaattcgaaaagaccggaaaagatgtgacagagttgttcttaggaaatgcagggacggcgatgaggc

SEQ ID NO: 241345 - DNA, 793 bp, Unknown
  Bacterial polypeptide expressing nucleotide sequence isolated from the Sargasso Sea
cctttgcttaggatgaatgccaatataaaaacatctgatggcaccccacctgtatacattaatcctgtttcctcattgaaatgtgtagatcacaatatagaaattgcaagtgcacagattaaatcttcaattatgttggctgggctttatggcgataacacttttaagatagtaacacctaactctagaaaccatactgaaatcatgctgaaagaatttggatgcaatatttcaattgattcagattctattaaaataacccctggaaaactcattacaccaaattttatagaaatacctggcgatatttcttctgctgcatttttcatagttggatcaatcatctctaagaatagtcgagtgaaaattgaaaatgttggcttaaatccattaagaacaggtctcataaagatccttgaaatgatgggtgcgaatatccagatttcaaatgtaagaacaatcaatggagagataattggtgatatttacacagaatcttcattactaaatggaattgaaataccaaaagagctgatatcaagttcaattgatgaattacctttaattgttttagcagcaagccaagccaatgggaaaacctccataagaaatgcggaagagctaagagtaaaagaatcagacagaattttgtcaatgataaaaatgatggataaatttagaatctcgactgatgaatttccagatggcatgaatatttatggcggcttaattaaaggcgctagagtaaatagttatggtgatcatagaattgcaatgactgccataatggctt

SEQ ID NO: 241346 - DNA, 546 bp, Unknown
  Bacterial polypeptide expressing nucleotide sequence isolated from the Sargasso Sea
aatgccttttaattatcattctaaaattgaaggtacttactacccacctggtgataaatcaataagccatagagctttaattttagcaagccatgcgattggtgaatcaaagatttcaaacttattggaaggtgaagatgtgattaacactctaaaagcaatgagatcttttggagttaaaattaataaaatttcagataaatatattatttttggaataccacccggtggattatttcaaccaaagaaaactatctattttggtaattcaggaactagtatcagacttatttctggcttaattgcatcgaataatatcacagtaactttaaccggagataaatctctaagtaaaagaccaatgaagagggtcacagagcacttatctatgattggtgctattattaaattgagaaaaaatacttatccacctattaaaattaaaggaagtggaaatgcaattccattaactttcaacattatcattccttctgctcaaattaaaagcgcgattatgctttcggctttgaatacgaatggtactgt

SEQ ID NO: 241347 - DNA, 580 bp, Unknown
  Bacterial polypeptide expressing nucleotide sequence isolated from the Sargasso Sea
atgcctttgaattataaaagtattattaaaggcacttatcttcctccaggcgataaatcaataagccacagaattttaattttggctggtcaggctattggaaagtcgaatatttataacctacttgagggcgaagatgttattaacacactaaaagcaatgaaattgttgggcattcgaattaaaaaaaataaaaaaaagtatgaaatttttggtgttcctccagggggattgtttcaaccagatagaaatatagattttggaaattctggaactggcataaggttgttagccggcttaatttcttctaacaatattgaagtaaagctaattggagataactctcttagtaaaagacctatgaaaagagttacagagcacttagtcaggataggtgcaaatattgcattaaaaaaagagctttttcctccaataaaaataaaagggacaggaaaagctacacctttaacatttgaaatactaataccttcagctcaaatcaaaagtgcgattatgctctcagcattaaatacaaatggcaccgtaaaaataaaagagtttaaaagtacacgtgatcaca

SEQ ID NO: 241348 - DNA, 601 bp, Unknown
  Bacterial polypeptide expressing nucleotide sequence isolated from the Sargasso Sea
atgccaatacgcggttcaatacatatgcctggagataaatctatttctcatagatctgtattaatttcatcattaatacctggtgaacataatattaaaaatatttcaacggcagaagatgttaactattcattaaaatgtctaaataatattggaattattcattctagagaaaataataatattattattcatgggaatactttctccaatccaactgagccattattctgtggcaattctgggacaacgatgaggttattgattggtttattatctgggcttaatataggggctgaattatttggggatgaatcattgatgaaaagaccaatggatagagtgattaatccattaattgaaatgggtgcagatatatcctatcatgagggaaaatcttcaattattattcataaaaaacaatttttaagagatttgaattatactatgagcattgcaagtgctcaagtgaaatcagcattattgattgctggaataagtgcaaataaaaaaattgttctctatgagaaatacccaactagaaatcacacagaaattatgttaaatgatattggatatgatattatcacaaaaagataat

SEQ ID NO: 241349 - DNA, 922 bp, Unknown
  Bacterial polypeptide expressing nucleotide sequence isolated from the Sargasso Sea
gcaggaaccgacagagattctcaattgcggcaattccggcaccacaatgcggctgatgctggggctgctggcgggacgtgcgggccgccatttcgtcctggacggcgatgcctcgctgcgacgacggccgatgggcagggttagccagccactggcctcgatgggtgccgatgtacgcgggcgtcagggtggcaacctggcccccctggccgtgaagggatgtcggctcaagggaacggtgatcggaacaccggtggccagcgcccaggtgaaatcagcgctgctgctggcagctctgaccgctgaaggtgcaaccaacgtgatcgaaccggcgcgctcccgtgatcacagcgagcggatgttgcgcgctttcggcgccgatcttgaggtggatggtgagatgggacggcacatcaccgttcgccctggagcgaccctgcgtggtcaggatgtggtggtccccggggacatcagctccgctgccttctggctggtggctggcgcccttgtgcccggggcggatctcaccatcgagaacgtcggtctcaaccccacccgcactggaatcctcgaggtgctggagcagatggaggcccgaatcgaggtgctgaaccgtcgtgatgtggccggtgaaccggtgggcgacctgcgcatcacccacgggccgctcaaaccgttccacttcggcgacgagatcatgccccgccttgtggatgaagtcccaatcctcagcgttgccgcctgtttctgcgagggcgagagtcggatcagtggagcatccgaactgcgggtcaaggaaaccgatcggctggcggtgatggcccggcagctcaaggccatgggggcggacatcgaagaacacgacgacggcatgaccatccgcggcggacgctccctcaagggagccgtgctgacagcgaaa

SEQ ID NO: 241350 - DNA, 836 bp, Unknown
  Bacterial polypeptide expressing nucleotide sequence isolated from the Sargasso Sea
tataaaatgtgtcgatcataagattgatattgcaagtgcacaaattaaatcatcaatcatgttggcaggactttatggcaataattcttttaagattaagactccgaaatctagagatcatactgaaatcatgttgtgtgaatttggatgtaatatctcaataaattcagattcaattaaaataaaaccaggaacattaacaacaccaaatgctatagaagttcctggcgatatatcatcggctgcatttttcatagttggatcaatcatctctaaaaatagtcaaatcaagattgaaaatgttggtttaaatccattgagaactggacttatagaaattctaaaaatgatgggcgcaaatattcaaatttctgatgtaaaaaaagttaatggagaaataactggaactatttatacagaatcctcaagactaaatggaattgaagtaccaaaggagctcattgcaagttcaattgatgagttgccattgattgtattagcagcaagccaagccaatggaaaaacctcgataagaaatgctcaagagctaagagttaaagaatcagatagaatctcatcaatgataaaaatgatgaatgattttaaaatctcaactgatgaattctcagacggactgaatatttatggcggcaaaattaaaggagctaagattgaaagctatggtgatcatagaattgcaatgactgcactaatggcttcgcttgtttctgatggtgagattctggttgaggattgtaagaatatcgacacatcatttccaacatttattgaagttgctaataatattggtatgaatattaaaaaaaatgactgat

SEQ ID NO: 241351 - DNA, 931 bp, Unknown
  Bacterial polypeptide expressing nucleotide sequence isolated from the Sargasso Sea
catgtcatattcacttaataataaaaaaactatacgaggagatctcacaatccctcctgataaatccttatctcatagagctgtaatgtttaactccatagcacaaggagaagctagaatttctaattttttaatgggtgaagattgtctgtctactatttcggttcttaggaaacttggagtaaatattgttgttgatgggaataatgttttcacctatggtaagggcatagaatcattgactcctccacaagaaattttggatgttggaaattcaggaactacaataagattaatgtctggaatactagcagggagagatttcaagtgtgtacttgatggtgattcatcaattagaaaaaggcctatgaatagaattattaaaccattaaatatgatgggtgcaaatatttctgctaaaaataataatgaaaatgcgcctatagaatttaatggtgggaacctactagatcttgactatgatcttcctgttgctagtgcccaacttaagagttctctaatattagcgggtattagatctaaaaatggaataaaaatcaaagaaaaagatacttcaagagatcatacagaaagattgctttcaaatatgggagctgatattaatgttgatggcttgaagattacagttaagccttcattaattgaatcaagagacataattgttccaggagacatatcaagtgcagcattttggatggtggcggcatcaattcataatgattctgagataatgattagaaatgtaggaatcaacgaaactagagctggaataatatcagttttaaatagaatgggagcatctttagagttttctaataagatggattactctggcgaaccagcatgtgatattttagtaaaaagttcaaatcttaagggtacaaatatatcaggaaaagaaattccttta

SEQ ID NO: 241352 - DNA, 839 bp, Unknown
  Bacterial polypeptide expressing nucleotide sequence isolated from the Sargasso Sea
attgttagcaaaaaataatctttctattatatctaaaagaatatcttcaattaaaggtattataattgttcctggagataaatctatttcacatagagcattaattttaagtagtatttcaataggtacaacaaaaatttcaggtcttttagaaagtgaagacgttttagcaacacttaatgctttaaaaaaattaggtgtaaaaattacaaaagataaaatgaataactacttagtaacaggagtaagtacatttggttacattagcccaaaaaatattcttaacttaggaaattcaggaacaggagtgaggttactaattggtacaatcgcaggtcaaaatgtaaaagcaaaatttactggtgataaatcgctatcatcaaggcctatggaaagaataacctctccattaatgaaaataggagctcaaataaaatttaataaacagtcaattaaatcaaaaacattacctttggaagtcataggaacaaataaacccctacctattcagattgaaacagatattgcttctgcacaagtaaaatcatgtttgatgttggcttgtattaatgctagaggaacaattgaaataacagaacctcaagtatcaagagatcatacagaaattatgtttagacactttggtatttctgtaaaacaaaaattttactcaaatggtaaacataaaatttcatttaatggtgagaagaccctaattgcaaaagatttgttggtgccaagagatccttcatccgcttcatttgtaattgttgcatgcttattacaaagaacagtcatattacaatcccaaatgtttgtcttaaccctcaaagaattgg

SEQ ID NO: 241353 - DNA, 463 bp, Unknown
  Bacterial polypeptide expressing nucleotide sequence isolated from the Sargasso Sea
catgattagtaatttaattactgaaggaattaatggtattccagaaatacctggagataaatcaatttctcatagatcaataataattccttcaatatctaatggaataactgaaataagtaatattttaaagtctgaagatgttttacatactttaaatgcatttaaggctatgggtgtaaaaattgaagaaaataaaaaaaatattacaatatttgggaatggattaaattctttaaaaaaaccaaaaactgaaatttatcttggtaattcaggtacaagtgctagacttctaactggacttttatcatctcagaaatttaattgtgttatgactggagatttttctctatctaaaagaccgatgaacaggatagcagatccattatcaaaaatggatgcaagaattaaaacgacaaatggaactttacctattactatagaaggaaactctttaatgcct

SEQ ID NO: 241354 - DNA, 874 bp, Unknown
  Bacterial polypeptide expressing nucleotide sequence isolated from the Sargasso Sea
ttcaggtatagttgatctccccggatcaaagagcctttccaaccgcattctacttatcagcatgcttgctgaagggcatactgaaattcataacttgttggatagcgacgacactcgtagaatggtggacgcccttaaaatacttggagtagaggtacatgaggaccgcagcaataataggatttctgtcaacggaacctctggaaccattcctgttactgaagctactttgatgcttgggaatgcaggaactgtcatgcgccctcttacagcggcactaacacttggaaagggacgttttgtcctagatggtgtgcagcgtatgcgcgaaagaccaatcatagaccttgtaaacggactcaatcagcttggtgcaaatgtcaagtgcatcaacggtactaactctcctccagttgaagtgatagccaacggactgccaggagggactactcttctgagcggtgttataagcagccaatacctgagtgccattcttatggctgctccttacgccaaaacagaagtacagattcaaatcacagacaatcttgtgtctgtgccttacgtagaaatgactattcagttgatgaaacgttttggagtgtcagtagagaattacaagtttaagtatttccgtgtacctagcataccttacagttcccccgggaaggtgtatgtggaaggagatgcgtcttcagcatcttattttttagcaggtgctgcaataaccggaggtactgttaaagtcaaagggtgcggtactgaaagccttcagggggactcccgctttggtgaaatgttagagaaaatgggtgcaattgttgagtggagtgaaagggaaatctcagttaaaggatcatcactaaacggcatt

SEQ ID NO: 241355 - DNA, 541 bp, Unknown
  Bacterial polypeptide expressing nucleotide sequence isolated from the Sargasso Sea
tatgtcttcatataaatcctccaaattgtctggagaaataatggttccaggtgacaaatcaatttcacatagagcattaattttaggatcattagtcactggtaaaataaaagttaaaaatttgctcgaaagtgatgatgttattgcaactgcagaagctttaaaaaagttaggtgtaaaaattaataaaaaaattaatttttgggaaatttttggtaatggaattggaaatttctttggttcaaattatgagttagatatgggaaattctgggacaggctctagattgatgatggggcttatcgctgggtcagatgtagaagcaacaattttaggagatgaatcattatccaaaagaccaatgaaaagaataattttacctctcctaaaaactggagcaacttttgatgatccaaacaatgataatttacctgtaaaaataaaaggaagtaaaattccattgcctattgaatatattagtccagtttcttcagctcaaattaaatcaagtattttattgactggactctcttctacagga

SEQ ID NO: 241356 - DNA, 497 bp, Unknown
  Bacterial polypeptide expressing nucleotide sequence isolated from the Sargasso Sea
aatgaattcaatatcgtctagtaaatctataaatttatctgggaatttgagtgttcctggagataaatccatttcacatagatcattgatcataggttctttagtcagtggcagaatcgaaataaataatcttttagaaagtgaagacgttgttgcaacagctgaagctcttaaaattctaggagttaaaataaataaattaaatgacaaatgggaggtatttggtagtggaataggtaatttttttggctctaactatatactaaatatgggtaattctggaactggggctagattgctaatgggtttagtagcaggatctgacgttgaagctacatttataggagacgagtctttatcaaaaagaccaatgaaaagagtaacaacacctttaaaaaaaacaggtgcagtaataaagagtcaaactagtaatttaccaattaaaatacaaggtagtaaaaattcctttaccaatttaaatatcaaagcccctcttt

SEQ ID NO: 241357 - DNA, 871 bp, Unknown
  Bacterial polypeptide expressing nucleotide sequence isolated from the Sargasso Sea
cctgggagacaaatctatctctcatcgagctttgataattggtagtattgctcaaggtaagactactattgagggttttttacattctgaagatccactctcaactgctgattgtctcagaaaattaggtgtaaatattccaaaaataagaaaagatgagccttttacgatttcaggattgggtcttgatggattaaaagaaccaaaagaaattctcaattgtgggaattctggaaccactatgagattattaatgggtttattagcgggccaagaaggaaagaatttcatcctaacaggagatacttctcttaatgagaggcccatgaggagagtgggcaaaccattatctttaatgggtggcaaaatttctggtagaaatagtggtaacaaagctcccatctcgattgcagggaataaacttaaagggtgtgtcattggaactccagtagccagtgctcaagtaaaatcagccatattattggcaggcctcaaagctgctgggacaacttctgttattgagccagcatcttctagagatcataccgaaaggatgttaaaggcatttggagcagatataagtattagaggagaattagggaggaatgtagtaataaagtcagggaccaacttaattggtcagaaaatattaattcctggggacataagctctgcatccttttggatgattgctgcatctattgtcccaaattcagaggttttaattgagaatgttggattaaatcccactagaacagggatattaaatgtaatggatttaatgggttgcaattatgagatttttgataaatcaataattgcaggagaacctattggatctattaaagtaaagactgcaaaaaatttaaga

SEQ ID NO: 241358 - DNA, 610 bp, Unknown
  Bacterial polypeptide expressing nucleotide sequence isolated from the Sargasso Sea
atgaaacatattatatcaaaaaaatcatttagattagcaggttgtgcagaagtgcctggggataaatcaatttcccacagagcacttattatatcaagtatgtgtataggccaatctaaaatcgaaggtctacttgaaagtgaagatgttttttctacaatggatgcgcttcaaaaattaggtgtaagaattgaaaaattaaatggatattggtttgtaaatggtgtgggcctttttggctttaaagagccaactgaatatctagatcttggtaattctggaactggagcgagactaattttaggagctattatgggttcaagtatacttgctaatttaaaaggggatgcgtctctaagtaaaaggccaatgggtagaattttaacacccctgaaattgatgggagcaaaaatcatctctagcaataatgaaaaactacctataactataaaagggccaaaagaagtttttccactaaattactattctaagatttcatctgctcagattaagtcatctattttattatcaggtttatcagcatctgggaaaacagtattcaaagaaccaaatgagagtagaaatcatacagaaaaaatgctctcaagtt

SEQ ID NO: 241359 - DNA, 733 bp, Unknown
  Bacterial polypeptide expressing nucleotide sequence isolated from the Sargasso Sea
atggaatccctgacgttacaacccattgcgcgagtcgatggcaccgtgaacctgcccgggtcaaaaagtgtctctaaccgtgctttgctgctggcggctttggcccgtggcaccacggtgctgaccaacctgctggacagcgacgatgtacgccatatgctgaatgccctgagcgccctgggagttcattacgttctgtcttctgaccgtacccgctgtgaagtgaccggcaacggtgggccgctgcaggccggcagtgcgctggagctgttcctcggtaacgcaggtaccgccatgcgtccgctggccgccgcgctgtgtctgggcagcaacgatatcgtgttgaccggcgagccgcgcatgaaagagcgcccgattggccatctggttgacgctctgcgccagggcggcgcgcagattgattatctggagcaggaaaactatccgcctctgcgcctgcgcggcggctttaccggcggcgacgttgaagtggacggcagcgtatccagccagttcctgaccgcgctgctgatggctgcgccactggcgccgcaggataccgtcatcgcgattaaaggcgagctggtttccagaccgtatatcgacatcacgctgcatctgatgaaaacattcggcgttgaggtcgaaaatcaggcctatcagcgctttattgtccgcggcaatcagcagtaccagtcgccgggtgattacctggtggaaggggatgcctcgt

SEQ ID NO: 241360 - DNA, 532 bp, Unknown
  Bacterial polypeptide expressing nucleotide sequence isolated from the Sargasso Sea
aatgcttaaaaagaaattttttgcaaaaggagggcatgttataagtggcgaagtagtcatgccaggagataaatccatatcccacagggcggtcatgtgtggagcattagcaaaaggggtgtctagaatagcgaattgtttgatgggtgatgacgtaaaggcaactatccaggcgtttaagtctatgggtgtggaatttgagtttgattctcaattcagttttcttataaagggtagaggttgtcatctagaacacccgagaagaaccataaatttacaaaattctggaacctctattaggctcattacaggaatattggctggccttaatttgtcggctagattggatggagatgagtctcttagaagaaggcccatggaaagaatagcgactcctctaagaaaaatgggggctatcataaatctaagagaagaggattttcctcctatcgatattattagttcgaaaagattagaggcgatcgaatatactttgcctgtcgccagtgctcaggttaagtcagctgtgatt

SEQ ID NO: 241361 - DNA, 784 bp, Unknown
  Bacterial polypeptide expressing nucleotide sequence isolated from the Sargasso Sea
atgaataatatccgcacaatagaaggtggaggtagtttaaaaggaaaaataaaagtacctggagataaatctatctctcatagggccttaataataggcagtatttctaagggtgagactactattgagggatttttacattctgaagatccactttcaactgctgattgtcttagaaaattaggtgtaaatataccagagataaaaaaggatgagccttttactatttcagggttgggtcttgatggaataaaagagcctaaagaaattctaaattgcgggaattcaggaacaactatgagattattaatgggattactagccggtcaagaaggtaagaattttattttaactggggactcctctcttaatgagaggcccatgaatagagtggggaaaccattatctttgatgggtggcaaaatttttggtagagaaagagggaacaaagctccaatctctattgatgggaataaacttaaaggatgtgttgttggaacgcctgtagcgagtgctcaagtaaaatccgcaattttattggcaggcctcaaagcttctggtactacttctgttattgagcccgcatcttcgagagaccataccgaaaggatgttaaaagcatttggagcagatataagtattagaggagaatttggaaggaatgtagttatcaagtcaggaggtaacttaattggtcagaggatattaattcctggagacattagctctgcttccttttggatgattgctgcatctattgttccaaattcggagattttaatta

SEQ ID NO: 241362 - DNA, 637 bp, Unknown
  Bacterial polypeptide expressing nucleotide sequence isolated from the Sargasso Sea
cgaaaccctgacatcaggccggcatgatggcctgacaggtctgttcgacgttcccggcgacaaatcgatctctcaccgctctttcatccttggcggccttgccattggcaccacacgcgtcaccggacttctggaaggcgatgatgtgatggcgaccggccgcgccatgcaagcgctcggcgccggcatcatccgcgacagcgacggcagctggaccataacgggggtcggcaccgccggcctcgtatcgcccgaggcgccacttgatctcggcaacagcggcaccggcgtgcggctgctgatgggtgttgtcgccggcctgccggtaacggcaacattctgcggcgatgagtcgctcagccgccggccgatggcgcgggtcaccgacccgctcgaactgatgggcgccaagatcacagcccgcgacggcggacggctgcccgtcacaatcactggggcgcgcgcgccgcttgccgccgaccatgccagcaaggtggcctcggcacagatcaagtcggccgtgctcctcgccggcttgaacgcgcgcggcaccagcgttgtccgtgaaccgcacgcatcccgcgaccatacagaatcgatgctccggcattttggcgcgaacttgcgcctgcaggtc

SEQ ID NO: 241363 - DNA, 862 bp, Unknown
  Bacterial polypeptide expressing nucleotide sequence isolated from the Sargasso Sea
ctgtgggaattctggaacaacagcgagattaatgctgggagcagtttgcactaatccaatttattgtacattaataggtgacaaatcactttcaaaacgtcctatgaagcgcgtaactgctcatttagaaaaaataggctctagagttagtctaactaacaacaaaaatttacctctgacgataacaggatcgcaaacttgcttacctcttcttcataaaatatctaaaccttctgcgcaaatcaaatctgcaattattcttgctgctttaaatattaacggcgaaacaacgataattgaaccaaggcaaacaagagatcatactgaactattgctgaagtacttaaaagttgattacaaaaatcaaaaaatgtcatctggtggtagaaaattgatttttaatggcccctatgaaataaaatcaaaaaatttatttgttccaggagatccaagcagtgccgcatttattattgttggagcattaattactcctaactctaaaatcaagttaatagatgtattattaaacaaaactagaattgcatacttatcaatactcaaaaaaatgggtggaaaaataaaaattaaaaagacaaaaattcaatctggggaacagctaggaacaattacagttttagcaagttctcttagagggataaacataccagcaaatttatcgccttatcttattgatgaatatcctattctttcagttgctgctgctcgagcaaaaggaacaacagttatgaaagggcttgatgaattaagatataaagaaagtgatagaataaaaagtacagttggaatgctaaaatcatttggaattaaagctgaatcaatcaaaaatgatataaagattaag

SEQ ID NO: 241364 - DNA, 637 bp, Unknown
  Bacterial polypeptide expressing nucleotide sequence isolated from the Sargasso Sea
ttgagcgcgaccggcagcccgtccaccccccgtgtgctgccggctggaggcagcttatccggccgggtgacggtgcccggggacaagtccatctcccaccgctcactgctgttcggggccattgctgaaggcacgacaaccatcgaaggactgctgccggccgaggacccgctgagcaccgcagcctgcctgcgggccatgggagtcgccatcagcccgatcacccctggcgccaccgtcacggtgcagggagtcggcctcgaaggccttcaggagccctcggtgatcctcgactgcggcaactccggcaccagcatgcggctgatgctcggtctgctggccggtcggagcggtcggcatttcatcctggatggcgatgcctcactgcggcgtcgcccgatgcgacgggtgggccagcccctctcggccatgggcgctgaggtgcgcggacgtgaaagcggcaatctcgctcccctggccgtgcagggacgacagctgaaaggcacggtgatcggcacgccagtcgccagcgctcaggtgaaatccgctctgctgctggccgctctgacagcggacggtccgaccacggtgatcgaaccggcccagtcgagagatcacagcgaacgcatgctgcggg

SEQ ID NO: 241365 - DNA, 574 bp, Unknown
  Bacterial polypeptide expressing nucleotide sequence isolated from the Sargasso Sea
ttgaatactaatcatgtccgcgccgtcaaaggtggaagcagtttacaaggaacaataaaagtacctggtgataaatcaatctcgcatagatctttgataattggaagtattgctgaaggcgaaacaaatattgaagggtttttgtattctgaagacccactttcaactgctgactgtttaaggaagttgggtgtttgtattcctgaaataaaaaaggataattcttttactgtaaaaggtttagggcttgatggatttaaagaaccaaaagaaattcttaattgtggcaattctggtaccacgatgagattattaatggggcttttggcagggcaaaaaagtaggaatttcatactaactggagacagatctcttaatgagagaccgatgggaagagttagcaagccattaaggcaaatggggggagtgatttatggaagagaaagtggtacaaaagctccaatttcaatcactgggaataaactaaaaggttgtgtgattggaactcctgtagcaagtgctcaagttaagtctgcaatcttgttagcagggttaactgcgtctgggactactt

SEQ ID NO: 241366 - DNA, 712 bp, Unknown
  Bacterial polypeptide expressing nucleotide sequence isolated from the Sargasso Sea
gctacaaattaaaggtaagactttaaacggcggtgaaatgtcggtagacggcagtgtatctagccagtttttaacagcccttttaatggctgcgccgttattttctggcgatgtgactattcgcataaaaggtgagttggtttctaagccttatatcgatatcacgttagataccatggcgaagtttggcgttactgttaaaaacgataactaccaaacatttacggtttctggtgacgccaagtacattgcgccgggtaaatttatggttgaaggcgatgcatcgtcagcatcttacttccttgcagccggtgccattaaaggtggaacggtacgcgtaaccggaattggccaaaacagcattcaaggtgacattcgttttgctgatgtgcttgaggccatgggtgcaacggtggtttggaacgatgagtatgttgaaataacgggtgcgccgcttaaaggcgtgaacatggatatgaaccatattccagatgcggccatgaccatcgcgactacggcattgtttgctgaaggtccaactaccatgactaatatttataactggcgtgttaaggaaacagaccgtctcgcggctatggccaccgagcttcaaaagttgggcgcgaaagtggaagaagggcatgactatattaaagtatggccaactgactcgctaaaacatgctgagatagacacgtataacgaccatcgc

SEQ ID NO: 241367 - DNA, 802 bp, Unknown
  Bacterial polypeptide expressing nucleotide sequence isolated from the Sargasso Sea
tgtcaaaattcaggaactacagtacgattacttactggattattagccggaaaaaatatcaatgcaaaactaattggggatgaatcactttctaaaaggcccatggaaagaattgtaaaccccttatctaaaatgggactacagataaaaagcaatgatggaaaacttcctatatccattaaagatagtagaattaatggcatagattacaaaaatacaatgtcaagcgcgcaggtcaaatcagcggtgttattatgcgggttgggtactacggatactacaagctattatgagcctataaaatctcggaatcatactgaaataatgttaaaaaacattggtgttgacatagaacacaataacggaaaaattattttaagaaactcaaattctttgatcaaaggattagacattacaattcccggtgacccatctaccgcatcattttttgctgctgcagcattaattatgccaaaatctgagttgattttaaaaaatattttagccaacccaacacgctttggattttttgatgcgctcgttaaaatggatgccaatattgaatatttatctagctggaatgattctggcgaagaagtgaaaaatattaaaattaaatacggaccattaaacgcaataaaaattaatcacatgcatattccaggaatgattgatgagataccaatattatcaatagttgcatctcaagcaaatggtaaaactgaaataagaggtgctaaagaattaagagtcaaggaatctgatagaattcaagctattgtccataaccttagaaatatgg

SEQ ID NO: 241368 - DNA, 778 bp, Unknown
  Bacterial polypeptide expressing nucleotide sequence isolated from the Sargasso Sea
aatgaaaagttcaaaaataactaatggtataaacggtgagccaaaaataccaggtgacaaatctatttctcatagatcaataattatcccgtctatatcaaatggtatatgtgaaattcaaaatatcctagaatcagaagatgtgatgcataccttaaatgcttttataaaaatgggagtgaatataaaaaaaactgaaaataaaataattatagatgggaaaggattaaattcattaaataaaccaactaatgatatatatttaggcaactcgggtacaagtgcaagattattaactggtttactagccgcacaaaattttgattcaagattaattggtgataaatcactgtcatcaaggcccatgggtagaatcgcaaacccgctctcattaatgaaagcaaatataattactaataacggcaaacttcctctagaaattcatggtacagaattagtaaatacaaccgtaaatattgaggtgccttcagctcaaataaaatctggattaatatttgctgctcttaatactaagggtaaaacgataataatagaaaacagtattacaagagatcatacagaaattatgttggaagcttttgatgccgacattacaattagaaaagaaaaaacgaaaaaaataatagaaataaatggaaaaaaagaattaaaatcaaaaaatataattgttccttcagatttatcgagtagtgctttttttattgttgctgctttaataaatgataactcaaaaataactttaaaaaatattaatata

SEQ ID NO: 241369 - DNA, 451 bp, Unknown
  Bacterial polypeptide expressing nucleotide sequence isolated from the Sargasso Sea
tatgctaactagttctaaaatttcaggaggaattaatggaaacgttaatattcctggagataaatcaatctctcatagatcaataattataccttctatttcaaatggatttacagaaattgataatattttattatctgaagatgtaatgaataccatgaatgcttttagagccatgggtgtgaaaataattaaaaataacaataaattattaattgaaggtaaagggctaaattctctaacttccccaacatctgaaattaacttgggtaattctggaaccacagcaaggttgttaacgggacttctgtcttctcaaaattttaattcaatattaatcggagatatttcattgtcaaagagaccaatggatagaattattcaacctttagaaaaagtaggtgctagctttaaaagcaatgacagtaaactaccattagagatatttgga

SEQ ID NO: 241370 - DNA, 617 bp, Unknown
  Bacterial polypeptide expressing nucleotide sequence isolated from the Sargasso Sea
aatgctagttcaaggcgcactgcaacttccaggagataaatctatttctcatcgagcaattatgctttcagctatagctgatggaattagttgtgttagaaatttaaatgatggagcagatcttcagtcaacaattaatgttttgagagattgtggagcttcaattgagcaaaaagaggatgagataataataaatggtaaagaacttcattctccatccaaagatcttgattgtggcaattcaggaaccactactagactggttgcaggactattatcatcgcaaaaattaatatttacattaactggagataaatcattgtcaaaaagaccaatgaagcgaatagttacacctttagtagcaatgggctgtaaaatttcctcaaataatggattattgcctttatcaatagatgcttctaatggtattaacgcgatagactatgatatgaaagttgcaagtgcacaagttaaatcaagtatacttttttcagctttaggaggaaataatgtatcgagtattaatgaagttatttcaaccagaaatcattcagaaattatgttaaaaaacatgggggcattaattgaaggaaaaggaagtaaaattatagttcatc

SEQ ID NO: 241371 - DNA, 705 bp, Unknown
  Bacterial polypeptide expressing nucleotide sequence isolated from the Sargasso Sea
aatgctagttcaaggcgcactgcaacttccaggagataaatctatttctcatcgagcaattatgctttcagctatagctgatggaattagttgtgttagaaatttaaatgatggagcagatcttcagtcaacaattaatgttttgagagattgtggagcttcaattgagcaaaaagaggatgagataataataaatggtaaagaacttcattctccatccaaagatcttgattgtggcaattcaggaaccactactagactggttgcaggactattatcatcgcaaaaattaatatttacattaactggagataaatcattgtcaaaaagaccaatgaagcgaatagttacacctttagtagcaatgggctgtaaaatttcctcaaataatggattattgcctttatcaatagatgcttctaatggtattaacgcgatagactatgatatgaaagttgcaagtgcacaagttaaatcaagtatacttttttcagctttaggaggaaataatgtatcgagtattaatgaagttatttcaaccagaaatcattcagaaattatgttaaaaaacatgggggcattaattgaaggaaaaggaagtaaaattatagttcatccacttaaatctaaattaaagtcgattgatatttctgtaccctctgatccatcttcagcagctttctttgctgctttagcagttattaa

SEQ ID NO: 241372 - DNA, 538 bp, Unknown
  Bacterial polypeptide expressing nucleotide sequence isolated from the Sargasso Sea
ttgaaattaaaaaatataaatttaaaatcactactttctcactctctatcaggtactgcgaagatacctggagacaagtctatatctcatagatcgcttataataggaagtctatcgattggaaagtctaaagtttttagactattagaaagtgatgatgtgttagctacaaaacaagctttaagagaactgggagttaaaatttctaaatcaaagaaagattattgggaaataaatggtgttggattgcatggatttaaatcaccaaaaaattttttaaatcttcacaactctggaactggagtaagactattgatgggtgctgtaatgggctcaaatataactacttcattcaaaggagatccttctctttcttctagaccaatgatgagaattattgagcctttaaaattaatgggtgctaaatttgattattataacaatggcactcttccaataactttgtttagtccaagtgaggttttatctttagaaaataaaactccggtttcttctgctcaaataaagtcatccatat

SEQ ID NO: 241373 - DNA, 781 bp, Unknown
  Bacterial polypeptide expressing nucleotide sequence isolated from the Sargasso Sea
aatgaggagagttggcaaaccgttatctttgatgggtggcaaaatttatggaagggaagacggtaacaaagctccaatatcaattaacgggaaaaaacttaagggatgcgttattggaactccagtggcaagtgcccaagtgaaatcggcaatattatttgcaggcctcaatgcttctggaaccacttctgtaattgaaccagcatcttcaagagatcatactgaaagaatgctaaaagcatttggagcagacatcagtatcagaggagaattaggaaggaatatagttataaagtcagggagcaacttaattggtcagagaatattgattcctggagacataagctctgcatctttttggatgattgctgcatctattgttccaaattcagaggttttaattaagaatgtcggattaaatcctactagaacagggatcttaaatgtaatggattcaatggggtgcaattatgagattttagataaatcgactgttgcaggtgaacctattggatcaattaaagtaaagagttcaaaaaatttaagatcattcactattgaaggagatactctcccaaaacttatagatgaaattcctatccttacggtggctgcctgtttttgcaatggagtttctgaaattaaggatgcacaagaattaagagtaaaggagacagatcgattgaaagtcatggcacgacagttacaaaaattcggcgctgaaataatagaaaaagaggatgggttaattattaatgggcaatcaaaattcactctgcgg

SEQ ID NO: 241374 - DNA, 990 bp, Unknown
  Bacterial polypeptide expressing nucleotide sequence isolated from the Sargasso Sea
catgaacggtgcgcctaatataccaggtgataaatcaatttcacatagatctataataattccatctatatcaaatggaatttgtgaaatagaaaatatattaaaatctgatgatgttatgcatacacttaatgcatttaaagaaatgggagttgaaattaaagaaagtgaaaaaaaactaattattattggtaaaggattaaattcacttgaaaaaccaaaaaaggaaatttatcttggaaactcaggaactagtgcaagattattaacaggtctattatcttcacaaaaatttgattctatcttgacaggagataaatccttatcaaaaagaccaatgaagagaatctccgacccactgcataaaatgaatgcaaaaattgaaacggcaaatggtactttgcctcttctaattaaacaaagtaaacttgtaccaataaatattgatttagtaatcccatcagcacaaatcaaatccggtcttttgttagccagcttaaatacagagggtgaaacaattatcaatgaatttaaaactactagagatcatactgaaactatgttgaaatcgtttggagcaaatatagatatagtaaaaaataatgaaaaaaagttaattaaagtacttggaaaaaaagaattaaaatctaaaaatattaaggtcccgaatgatctttcaagtagtgcattttttatagtttctgctctaataaacaaaaattctaaactgattataaaaaatattaataataacccaactaggaatggattattaattgcattgaaaaaaatgggagctaaaatttctctttctaacgagcatttatcaaacaatgaaaatatttgtgatattgaagtttccagttctgatttaataggatgtgaattgggtcctgaaattgcagatttgatgattgatgagtatccaattctggggcattgctgcatctttttgcaagttcaccctagtgtattttcatgttttgcaag

SEQ ID NO: 241375 - DNA, 721 bp, Unknown
  Bacterial polypeptide expressing nucleotide sequence isolated from the Sargasso Sea
atgttaacttgtaaagtacatgcacaaaagttacagttaaactctgttatcgatgggattcctggggataaatcaatttctcatcgtgcatttattttgggttctttatgtgataatcagtcgttattttctcatattttagagtctgaagattgtttaaataccttaactattatgagaactttaggggcaactatttctaaatcggatgatatttattgtgttgaaggtttaggtttgaatggattgaaagctccgtcgacgttgagtcctttagatgttggtaattcggggactagtatacgattgttaacaggcttattagcggctcagccctttgaaagtgttataactggggactcgtccattcaaggtcgtcctatgcgacgtattattgatccattgtctaaaatgggggctttaattaccggtcagtcacatacaaattctgacgatatttatcctccattgctaattcaaccagtagatcagttatcttcattatcttatagttctccagtggccagtgctcaattaaagtcttccttacttttggccggtttatatgccgattctgtttcagttgatgagccagatcattcacgagatcatactgaacgtttattgcgttattttggagcttccgttgatacttatggtaagcgtgttacattgcatcatactcaactattaactaatcctaatccagatcatgtgttac

SEQ ID NO: 241376 - DNA, 772 bp, Unknown
  Bacterial polypeptide expressing nucleotide sequence isolated from the Sargasso Sea
atgtttagtgaacaaacaagtgttggtattaatgggacaatattaatacctggagataagtctatatcacacaggtcaataataattccttcgatttcaaatggtatatgtgaaatttcaaatatattaaaatcagatgatgttcttcgaactatgaatgcatttaaagaaatgggtgttgaaataaaagaagaaaacaaaaaaataattattaatggaaaaggactagactctctaaaaaaaccaaataaggaactttatcttggaaattctggaacaagtgcaagattgttaacaggattactagcttcacaaaattttgaaacgattttaagtggagataaatctctttcatcaagacctatgaaaagaataactaatcctcttaaggaaatgggtgcaaaaataaaaacacaggatggaaaattaccattaaatataaagggcacaaatttaaaaaattgcaacatacaaattgaaataccttcagctcagataaaatcaggtttaattttagcagcattaaacacagaaggaacaagttatattaaggaacaaaatattacaagggatcatacggaaattatgcttgaaacgtttggtgcagatattcaaacaaaaaaatatgaaaattcttctgaaattattattaatggtaaaaaaaatctttttccaaaaaatattgatgttccctctgatttgtcaagcagtgctttttttatagttgcagcactaataaataaaaactcaaatataactctagaaaatataa

SEQ ID NO: 241377 - DNA, 682 bp, Unknown
  Bacterial polypeptide expressing nucleotide sequence isolated from the Sargasso Sea
atgaaactcatttctaaaccgtccatgaatctaaatgggaaaattagaattcctggagataaatcaatttctcacagggcattaatatgtgcagctatctcagaaggaacctcaaagatttccaatcttcaagaaagcgaagatgtaatgaacactttaaattctctaaagcagttaggtattaacatttataaagaagggcattgttattttgtagaaggcaagggctttaagggtttgcaaaaatcagacgaccaactttattttggaaattctggaacaggattgagattaatgtcaggtttgctttcatctcaagatttttcatcaagcttaacgggtgatgaatctctttccaaaagacccatgaaaagaataatagatcctttgatagaaatgggagcaaatatttctggttcaaagatggatactttaccaattcatattatcccaacaaaaaaaattaaaggaataaactacgagatgccaatagcaagcgcacaagttaagtcagcaattttatttgctagtttagggttagacagtaatacaaaaataactgaaaaatcagtatcaagagatcatacagaaagaatgtttgaatattttggagcaaatattttcttattcaaaaaccgaaacaactttagaaaaaaccatgaatttcaattcacaaaatatg

SEQ ID NO: 241378 - DNA, 831 bp, Unknown
  Bacterial polypeptide expressing nucleotide sequence isolated from the Sargasso Sea
aaaaggccaatggggagagttgcaaaaccgttatctttgatgggtagcaaaattactggaagagaaggaggtaacaaagctccaatctcaattgatgggaaaaaacttaagggatgtgttattggaacaccagtggcaagtgctcaagtgaaatctgcaatattattggcaggcctcaatgcttctggaactacctctgttattgaaccagcatcttcaagagatcatactgaaagaatgttaaaagcatttggagcagacatcagtatcagaggagaattaggaaggaatgtagttatcaagtcagggggtaacttaattggccagagaatattgattcctggagacataagctctgcttctttttggatgattgctgcatctattgttccaaattcagaggttttaattcagaatgtcggattaaatcccactagaacagggattttaaatgtaatggattcaatggggtgcaattatgaaattttagataaatcgactgttgctggtgaacatattggttctattaaagtaaagacttcaaataatttaagatcattcactattgaaggagatattctcccaaaacttatagatgaaattcctatccttactgtggctgcctgtttttgtaatggagtttctgaaattaaggatgcacaagaattaagagttaaggagacagatcgattaaaagtcatggcacgacaattacaaaaattcggtgctgaaataaccgaaaaagaggatggattaattattaatgggcaatcaaaatttcattctgcggaggtagatagtgagacagatcatcgagtagcaatgagtctt

SEQ ID NO: 241379 - DNA, 1327 bp, Unknown
  Bacterial polypeptide expressing nucleotide sequence isolated from the Sargasso Sea
ccccactaaagatcagtctttaagaaactttcaaaaaagaggggagctctgtggaaaggtgaaagtacctggagataaatcaatctcacaccgtgcactactttttggggctattgctaaagggaaaacactaattgagggccttttacctgctgaagatccattaagtactgctgaatgccttaggtcaatgggcgtaaagattagtccaatcaagaaaggagacattattgaaattgaaggcgttggattaaatggcctccaggagccacaagatattttgaactgcggaaattcaggaacaactatgagattaataatgggattattagccggtcaaaaagatcatcatttcatcctcacaggcgataaatcacttagaaataggccgatgaaaagagtaggacagccgttaaaaatgatggggggtaaagttttcggaagatgcggtggaaacttggctcctctatcaattatcgggaataaattaagaggtgccgtaattggtacaccagtagcaagtgctcagataaaatctgcaatcctactagctgctcttaatgcagaaggctcaacgacggttattgaacccgccagatcaagagatcatagcgagagaatgctaaaagccttcggagctaatctagaggttggtggagaaatgggtagacatataactgtttcccctggtaaagatctaaaaggtcaatcaattattgttccaggggatattagttctgctgcattttggctcgttgcaggtagcatcatacccggatcagagttggttgtagaaaatgttggtctaaatccaacaaggactggaatacttgacgtattagaagcaatggaagcaaatatcaacgtaataaataaaagagatgtagccggtgaacctgtcggagatattgaagttttctacaaagaaaacttaaaaccatttaaaattgacggtgagataatgccacggcttgtagacgagatacccattttatccgtaggagcatgtttttgtaatggtatcagtcaaataaaaggagcaagtgaactaagagttaaagaaactgatcgattagctgtaatggcaaggcaattaaaaaggatgggagccagcgtagatgagcatcaagatggtctaactatctatggaggaaaaagcttagaaggatgcgaacttgatagcgaggatgatcaccgtatagccatgagtttagctattgcatcaataatggctaattctaattcgacattacgacgtagtgaggctgcagcaatttcatatcctgatttttggagtgatcttaagagacttcaacaaaaaaattag

SEQ ID NO: 241380 - DNA, 1312 bp, Unknown
  Bacterial polypeptide expressing nucleotide sequence isolated from the Sargasso Sea
atgaataatatccgcacaataaaaggtggtgttaatttaaaaggaaaagtaaaagtaccaggagataaatctatttctcatagagctctaataattggaagtattgccgagggtcagacgactattgagggattcttacattctgaagatccactttcaactgctgattgtcttaggaaattaggagtaaacataccagaaataaaaaaaaatgagccttttacgatttcaggattgggtcttaatggattaaaagagcctaaagaaattcttaattgtgggaattcgggaaccaccatgagattattaatggggttacttgccggtcaagaacgaaagaattttatcttgacaggtgatatttctcttaatgaaaggccaatggggagagtgggcaaaccattatcgttgatgggtggcaaaatttttggtagagaaaaaggaaacaaagctccaatttcaattaatgggaataaattaaaaggatgtgttattggaactcctgtagcgagcgctcaagtaaaatcggcaatcttattagcaggtcttaaagcttctggaaccacttctgttattgaaccagcatcttcaagagatcacactgaacgaatgttaaaagcatttggagcaaacatcagtatcagaggagaattaggaaggaatgtagttattaagtcagggagcaaactaactggtcagagaatattgattcctggagacataagctctgcttctttttggatgattgctgcatctattgttccaaattcagaggttttaattcagaatgtaggattaaatcccactagaacaggaattttaaatgtaatggattcaatggggtgcaattatgagattttagatcaatcgactattgcaggtgaaccaattggatctattaaagtaaagacttcaaataatttaagatcattcactattgaaggagatattctcccaaaacttatagatgaaattcctattcttactgtcgctgcctgtttttgtaatggtgtttctgaaattaaagatgcacaagaattaagagttaaggagacagatcgattaaaagtcatggcacaacagttacaaaaattcggtgctgaaataatagaaaaagaggatgggttaattattaatggccaatcaaaatttcattctgcggaggtagacagtgagacagatcatcgagtagcgatgagtcttgctattgcttcactccttgccaaaggtacctcaaaaattatgagggcagatgctgctagcgtctcgtatcccactttttgggaagagctggccaaactaactaattaac

SEQ ID NO: 241381 - DNA, 1123 bp, Unknown
  Bacterial polypeptide expressing nucleotide sequence isolated from the Sargasso Sea
aatgattacatccagtaaaactaattcacttcatggaagcataattttgccaggtgacaaatctatatctcacagagcaatcatatttggagctttatctgtcggaaaaacagtgattgaaggtcttcttgagtctgaagatatttacagaacaatgaaagcaatggaaaaatttggggcaaggattaataaaaataaaaataattgggaagtatatggcttcggcgtgggaggtttttcttcccctgatagcgtaattgattgcggtaattcaggtactacttgtagactattaatgggtgcaatcgctacaaccccaattaaagcggtttttgttggagaccctagtttaagtaaaagacccatggatcgaataattgagcccttagagaggatgggcgcaaggtttattgctagggaaaactcatttttgcctattaccataacaggtgcaaaagagcctctcccaataagatttgaatcaaaaatagactctgcgcagataaaatcagctgttttacttgcggggttaaattgcagaggagaaacaacctatattgaaaaaagtcttacccgtaatcatactgaaaatatgcttagtggttttggagtgaaattggacagtgaattttcctcaaaaggattttctcacaaattgctaggatttcaggaactaactccaaaagaaattattgttccaacagacccatcatcagcagctttttttattgctagcgctttaatcgtgaaagactcaagtataaatctttataatttatgtatgaatcacaccagaagtggtttcttggaaacggttaaggaaatgggagcaaaaatagagttgtctaacaatagaaccatcagtggcgaattagttgcagatttaactgtatgtttttccaaattgaaaggtattgaagtacccatatccagggtcccaagtatgatcgatgaatacccaatactgtcaataattgcatcatttgcaactgggaaaactattatgagaggtatcaaagagctaactgtcaaagagagcaatcgaattttatcgatggcaaaaggtttaaaacaatgtgggattgaaatagaatatggtgatgactttcttattgtaagtgga

SEQ ID NO: 241382 - DNA, 543 bp, Unknown
  Bacterial polypeptide expressing nucleotide sequence isolated from the Sargasso Sea
tttccttgcagctgctgctattaaaaggcggtactataaaagttacaggtattggcaaaaatgcagtgcagggcgatattcactttgccgacgctttagaagccatgggcgcgacagtagactggggttatgactacatttcggttacccgtaaccaactgaagggcatagaccgtgattacaacgctattcctgatgcagccatgaccattgcgactacggctttgtttgcgcaaggcccaacagctatccgtaatgtttataattggcgcgtgaaggaaaccgatcgtctgaatgctatggcaacagaactacgtaaagtaggtgctgacgtggaagaaggtgaagattacattttaatcacaccgccaaagacactgaaacatgccagcatcgcgacctataacgatcatcggatggcgatgtgtttctctttggtggcattaagcgatacagctgtcactattgaagatccggattgtacccgtaaaacatttcctcaatactttgaagtatttagcaaactcagcactttagcctgaa

SEQ ID NO: 241383 - DNA, 1312 bp, Unknown
  Bacterial polypeptide expressing nucleotide sequence isolated from the Sargasso Sea
gatggaacagctcacgctcaagccgattaagaaagtcgagggtaccgttcgccttccgggatctaagtcgttgtccaaccgcatccttctcctcgcggcgcttgcggaaggtaccaccaaggtggaaaacttactggatagcgatgacattcgctacatggtcgacgcgctcaaggtcctgggattggacttcactgaagatagagagaacaacatcttggaaatcactggatgcggtggtgagttccccgtggaaggcgcggacttgttccttggtaatgccggtacggcgatgcgccctctcaccgccgctgtggcggcggcgggcaagggtacttttgtccttgatggtgtcgagagaatgcgcgagagaccgattcaagaccttgtcgatggtttggtgcagcttggtgtgaaggcggaatgcacgatgggcactggatgccctcctgtgaaggttgaggcgaacggattgccgggtggacgagttgaactcagcggttcggtgagctcacagtacctcactgctcttctcatggcggcgccgctttgccaaggatcgatcgagatcgtgatcgtggacgaacttatctcgaagccgtacgttgagatgacgatcacgctcatggaacgcttcggtgtcaaggttgaaaaggctgatgaccttcagagcttcaagattcaaggcgggcaaaagtacgtctccccgggtagtgcgttcgtcgaaggagatgcttcttcggcttcttatttcctcgccggtgccacgattactggtggtaccgttacggtcatcggatgcggttcggagagtattcaaggggacacaaacttcgcgtacaccatggaacaaatgggtgcgacgctcgagtggggaccaaactcggtcacttgcactggacctcaaggcccgttgaaggcgattgatgtgaacatgaatgcgatgccggacgccgccatgactcttgcggttgccgcacttttcgcggacggcgttacgactattcgtgacgttgcgagttggcgtgttaaggagacggagcgcatgattgccatctgcaccgaactccgcaagctgggttgcgatgtctttgaaggttcggattactgtgtcatcaccccgccgcacaagcttgaacccccggcgacgatgaaggcgaacgttgatattgacacttacgacgaccaccgcatggctatggctttcgccctcgccgcttgcggtgacgtcgacgtcatcatcaacgacccgaagtgcacgaagaagacgttcccgacgtactgggacgtcctctcttcggtgtctgcgtag

SEQ ID NO: 241384 - DNA, 1294 bp, Unknown
  Bacterial polypeptide expressing nucleotide sequence isolated from the Sargasso Sea
gctggtctggactatcgacacgccaagtgataaatctatttcacatcgggcgcttattctcggctcgctatgcattggtgaaacgaaaattcataatttacttttgtcggaagatatcacctccacaatctgtgctttggaacagtttggtgcaaacatcaatgtggaggaagagcataatatcacaaatatatacggtattggtattggtggattattacaacccagtaaaaaaatttatttaggaaattcaggcacttccgtaagattacttattggtcttatgtcgagttgtgatgtttgtgttgagtttgaaggtgacgagtcactatcgaaacggccaatgggtagagtattagatcctttaaaagaaattggtttagaaatactgagcaatgagaaagaaaatttaccattaaagctaaagggtacggctttacctgttcctataaatcataagcttgttgtgccatcagctcaaataaagtcagctttaatgctggcagcgttaaacataagaggccgctctacaataatcgaaacaattaaaactcgtgaccatacggaaaaattatttgagtattttggcgcagatattcaaataaggttgaatgatgtgggccaaaaggaaattatgataagcgggcaaaaaaaactttctccaagagagatagatattcctggtgacccaagctcagctgcattttttattgttgcaggccttatatcaaaaggttctaagttgaggataaaaaatataatgataaatccgacaaggtcgctatttattgattatttgatctcaatgggggcaaaaatagactttttggataaatattcaaaatgtggagaagaggttgcggatattgatgttacagcaagtgaattaaaaggagttacaaccagtctgaacgacgccccatcaattattgatgaatttctaatactatctgttgcagctgcctacgcaaagggtgagagtaaattctgcggggtttctgaattaaaagtaaaagagagtgatcgccttgaagccataattaaaatgttaacagcctcaggtgtcaagtgtggaacaaaagatgatgatctcataatatatgggaacggtgaagtccctggtggctcagacatcaagtccaattatgatcatcgcgtggccatgtcagcgttaattcttgggctcggttcaaaaagtcaaatcaggattgatgatgtttcccctatagcaacaagttttccaaattttatggaaatttatcatagaatagggggaaattttcatagtggatga

SEQ ID NO: 241385 - DNA, 1252 bp, Unknown
  Bacterial polypeptide expressing nucleotide sequence isolated from the Sargasso Sea
aatgctagttcaaggtacattgcaacttccaggagataaatctatttctcatagagcaattatgctttcagctatagctgatggagttagttatgttagaaatttaaatgatggagctgatctgcagtcaacaattaatattttgaaagattgtggagcttcaatacagcaaagagatggtgaagtagtaattaatggaaaaaaacttcattctccatcaaatgatcttgattgtggtaattcaggaactactactagattggttgcaggactattagcttcccaaaaattaacattttcattaattggagatgaatccttgtcaaaaagaccaatgaagcgaataattacgcctttaacagcaatgggatgtaaaatttcctcaaataatggattactgcctttgtcaatagatgcttctgacggtattagcgctatagattatgacatgaaagttgcaagcgcacaggtgaaatcaagtatacttttttcagctttaggtggaaataatgtatcaagtattaatgagattattccgacgagaaatcattcagaaattatgttaaagaatatgggagcatcaattgaaagtgaaggaagtaaaattatagttcatccacttaaatccaagttaaagtcgattgatatttctgtaccctctgatccatcttcaacagctttttttgctgctttagcagttattaataataattcaaatttaaagttgactaatgtattgcttaacgagtctagaattggatttgttgaagttttaaataaaatgaattgtttaatatcaaaatcaaatgaatcagttcataatggtgaaaaagtaggagatttaactattagctcatctagtcttaaagcaatagaaattgaatcagaaactataccgtcaattatagatgaagtgccaatattagcggttgtagcggcttttgcaaacggcacaacagtttttaaaaatgtagaagaattaaaatataaagaatgtgacagattaagagcaattatacataatctagaagaatttggaatcaaggcatatgagaaaaataatgatttatttgtcgagggaggtaaggtaaaaagaatgcctaaaataactacgtttgatgatcatagaattgctatggcattcacaattttaagccttacttcttttgaaaaatatgagcttgataacaggtcatgtgtggatatttcattaccaaatttcttcaattacctaagtgagattgccgaatga

SEQ ID NO: 241386 - DNA, 868 bp, Unknown
  Bacterial polypeptide expressing nucleotide sequence isolated from the Sargasso Sea
ttgagtattaatgcagcagaattatctggtattcactacgagatgaaaattgccagtgctcaggtcaaatcgtgtttattacttgccggtttatatgcaaagggcgttacaaaaattaatgaacctgttgtttgcagggatcatacggaacgaatgttagcgggttttggttatcctgtagttcgaaatgagtctggtgacattaccattgaaggagaaggggctttagcaggtatagatatagaagtacccggagatatttcatctgcagcgttttttatggttgctgcagcgatttctgaagggagcgcaataaacctcttacatgttggtcttaatcctacgagagcaggaattatatcgttattaaatttgatgaatacaaaactagaggttactaatgagaagataatcggtggagaaccggtcggagatattagggttacttcgtcaaagcttgaaggaattgccgttccctcgcagcttgttcccctagcgatagatgagtttccaatattctgtatcgctgcggcatgcgctaccggcactacgactatcagaggagctgaagagttgcgagttaaggaaagtgatcgtattgaggctatggcagaaggtttgacggctttgggtattaaagtgaaaacatttgccgatggcttagaaataaaggggggaactattttaggagggcgtgtaaaaagccattctgatcatcggatcgcgatggcgttttcaattgctgcaattaaagcaaaagatccaatcttcatcgaagattgcaacaatgtggctacttcattcccagggtttgtagatttagcgaattcaattggaatggatattaaagagatctccgatggttgaa

SEQ ID NO: 241387 - DNA, 811 bp, Unknown
  Bacterial polypeptide expressing nucleotide sequence isolated from the Sargasso Sea
catgagcagggaacaggtcaatctactagcatcgagtaacaacaaaataaatgggtgcataagagtccctggtgataaatctatttcgcatagagctataattatttcatctattgcggaaggaaaaacgcaaattaaccaatatttagattcagcagatatcaatgcaaccatagatgtttgtcgtcgcattgaggctgatattgtaaaacataatgaatcactgattgttacaggaaataatcttgagcgaattaagaaagaagatattgaattgaactttggtaactctggaacttctatgagattgatgatgggcgttctatctgcacaaattttttcatcgatcttatctggagatgaatcacttagtcagagaccaatgaatagagtctcaaaacctcttatcaacatgaatgccgatataaaaacctcaaatggaaagcctccgatattcatatctcctgtaaatgaaataaaaaatgtcgaccacaaaattcatattgctagtgcacaaattaaatcagccgttatgctcgcaggactttatggcagagacccttttacaataattactcccaaatctagagatcatactgaaatcatgttgaatgaatttggatgcaatatcacactagagtctgattctattaatgtgatcccaagtaagcttacttcaccaaagacaatagatattcctggtgatatttcctcagctgcattttttattgttggatctattatctctaaagatagtcaagtgaagattgaaaatgttggcttgaatccattgagaacaggattcataaaa

SEQ ID NO: 241388 - DNA, 503 bp, Unknown
  Bacterial polypeptide expressing nucleotide sequence isolated from the Sargasso Sea
tatgaattcgtttcgtttggaacctatttctcgtgtggccggtgaggtcaatctgcccggctccaagagcgtgtccaaccgggctctgctgctggcagccctggcccgtggcaccacccggctcaccaacctgctcgacagcgatgacattcgtcacatgctggcggcgctgacccagctcggggtcaagtacaagctctccgccgacaagaccgagtgcaccgtgcacggtctgggtcgcagcttcgcggtgaaggagccggtcaatctgttcctcggcaacgccggcaccgccatgcgaccgctgtgcgccgccctgtgtctgggctccggcgaatacaccctgggcggggaaccgcgcatggaagagcgccccatcggccatctggtggatgccctgcgcgaagcgggcgcccatatccagtacctgaagaaagatggctatccgccgctggtggtggacgccaaggggctgtggggcggcgatgtgcacgtcgacggtt

SEQ ID NO: 241389 - DNA, 1318 bp, Unknown
  Bacterial polypeptide expressing nucleotide sequence isolated from the Sargasso Sea
attgaatttaaccacgtctatcaataacgagatttttgggacggtgcaatgtcctggagacaaatccatctcgcaaagagtgctaatgatcggagctttgatgaatcaagaaatgatagttgatggtttcctgcatggagaagatccgctttcaacaatgaatgccctcaatcaaattggagccggtattacagttgatgaaaatggcttggttcatttgagtaaaagaaatcatgtttttcaaaattgtgacgagccacttaatcttggtaattctgggactggcttgcgtcttatgctaggtctgacttctggaattggtttaaacctctctttttgtggtgatgagtctttgtcttctcgaccaatgagcaggataataaacccattgaccgaaatgggtgccaatattaaatcatcaagtggcaagctgcccatttcaatatcaacaacgtcactccaaaagcaatacagatatgagttgccagtggcaagtgctcaagtaaaatcaagcatactattagctggtcttgcttcaggatcaggtgttgaaattattgaacctattcaaacaagagatcatacagaaagaatgttaaaaaactttggtgcaaatatagaaattagctctgtggagagtaaaaatattattcaactgcaaccctcaaataaattagttgccaaaaattatactgtggtgggtgatatttcttcagcagcttttttgatagttgctgctttaattagtaattcatcaggactagagattaccaaagtcggaatgaatccttctagaaccggggtgttagaagccttaaaaaaaatgggcgcaaatattaaggttaaaaatcaaagattagagtcaggggagttttgcgctgatctgatagttaaacaatctaaattaaaaggagttgagctctcaggagaaataatccctaatattattgatgaaatacctatcctatctattgctgctgcatttgcagagggtgaaaccctgattagagatgctgcggaattaagggttaaggaatctgacagacttcaagcagtctcagatggttttagaatgcttggaattgctcataaaaattttgatgatggcatgtctattttgggaagctcagagagcctttgtatagaggagcccatttttattgaatctcatgatgatcataggattgccatgagttttttgattgctggtttgaaatgctcaaaaccaatcactgtaaaggattgtaaaaatatattcacatcatttcctaattttatagaactcatttcatccgtaggatataagcttgaaaaataa

SEQ ID NO: 241390 - DNA, 1247 bp, Unknown
  Bacterial polypeptide expressing nucleotide sequence isolated from the Sargasso Sea
catgaagcaattacgtcttgaacctgttgtgcaagtccgcggtgagatcaatattcccggctcaaaaagtatttctaaccgcgctttattattggcgaccttagccaaaggtaccaccacgctcaccaatctgctcgactccgatgatattcgccacatgttggcgtctttaaagcagttaggggttgaataccgtttatcgcaaaacaacactgtctgtgaactcatagggttaggtgggacgatttcggcagacagcgcgcaaacgctgtttttaggtaatgcgggcacggcaatgcggccattgtgtgctgcgctgaccttggggcgaggcgaatttaccttaaccggcgagctgcgcatggaagagcgtcctatcggtgacttagtcgatgccttaaggcaacttggtgccaatgttgtgtatttaaaaaatgacggtttcccgcctctaaccattaatgcgacaggtcttaatggtggtgatgtggaaattgccggcgatctgtctagccaattcttaacggcgttgttaatggttgcgccccttgcgaagggtagcgtgaatattcatgttaagggagaactggtttctaagccttatatcgacatcaccttagcgctgatggcgcagtttggggttaatgttatcaatcatgattacgcacgctttgagatccccgtcgggcagcagtatgtgtcaccgggtaaagtgttagtagaaggggatgcctcttccgcatcttactttttagcggcgggtgccatcaaaggcggtgaggtgaaagtcactggtgttggccgtttaagcattcaaggcgatgtgaaatttgccgatgtgctggaaaaaatgggcgctgatattgagtggggcgatgattatattattgcccgtggcgcgccgttaactgcggttgatttagacatgaatcatattcccgatgcggcgatgaccattgctaccgcagcattgtttgctaagggcacgaccaccattcgcaatatctataactggcgcattaaagagaccgaccgattagctgcgatggccacagagctgcgtaaagtgggagcgttagtggaagaggggcatgattatattcaaatcacgccgccagcagtactgaataccgcagagattgacacttataacgatcaccgcatggccatgtgcttctccatgctggcctttgccgattgcgggatcactattaatgatcctgactgcacctcgaaaaccttccctg

SEQ ID NO: 241391 - DNA, 1309 bp, Unknown
  Bacterial polypeptide expressing nucleotide sequence isolated from the Sargasso Sea
atgagcagggaacaggtcaatctactagcatcaagtaacaacaaaataaatggatgcataagagtccctggtgataaatctatttcacatagagcgataattatttcatctattgctgagggaaaaacgcaaattaaccaatatttagattcagcagatatcaatgcaaccattgatgtttgtcgtcgcattgatgctgaaattataaaaagtaatgaatcattgattgttacaggaaataacctagagcgaattcagaaagatgatattgaattgaactttggtaactctggaacatctatgagattgatgatgggcattttatcggcacaaatcttttcatcgattttatctggcgatgactcacttagtcagagaccaatgaatagagtctcaaaacctcttatcaacatgaatgccaatataaaaacctcaaatggaaagcctccaatattcatatctcctgtagatgaaataaaaaatgtcgaccacaaaattcatattgctagtgcacaaattaaatcagccattatgctcgcaggactttatggcagagaatcttttacaataactactcctaaatctagagatcatactgaaatcatgttgaatgaatttggatgcaatatcactctagaatctaattctattaatgtgatcccaagtaagcttacttcaccaaatacaattgatattcccggtgatatttcctcggctgcattttttattgttggatctattatctctaaagatagtcaagtgaagattgaaaatgttggcttgaatccattgagaacaggattcattgatattcttaaaatgatgggtgcaagtatcgaaatctcggatctaaaaacagtaaatggagaggtagttggaaatatagacgtagaatcatcatcacttgagggtatagcaattccaaaagaattaatagcaagctctatagatgaattaccccttattattctggctgcaagccaagctgatggtaagacttctcttagaaatgctgaagaacttcgcttcaaagaatcagataggatttcatcaatggcaaagatgatgcaaagattcaatattccaattgatgaatttaacgatggaatggatattcatgggggaattatcgaaggaaacacaattaatagctttggagatcacagaatagcaatgacagcacttttagcttcattagtatctaacggtgatattatcgtagaagatacagtcaatattgatacatccttcccagaatttattgagatagcaaataatatcggcatggatatcaaaacttatgactaaa

SEQ ID NO: 241392 - DNA, 1234 bp, Unknown
  Bacterial polypeptide expressing nucleotide sequence isolated from the Sargasso Sea
tcccaccgctctctgctgttcggtgccattgcggagggcaccaccaccatcgacggtctgctgccggcggaagaccccatcagcaccgccgcttgcctgagggcaatgggtgtgcggatcagcccgatcgaggccgccggcctcgtcaccgttgagggggtgggtctggacggacttcaggaacccgccgaaattctcgattgcggcaactccggcaccaccatgcgcctgatgctggggttgctggctggacgggccggccgtcacttcgtgctggatggtgatgcctccctgcgtcgccggccgatgcggcgggtgggtcagcccctggcctcgatgggggcggatgtgcggggccgtgacggaggcaacctcgctccattggcggtgcagggccagagcctgcgtggcacggtgatcggaacgcctgtggccagcgctcaggtgaagtcggccctgctgctggcggccctgacggccgacggaaccaccaccgtgatcgaaccggcccagtcccgcgaccacagcgagcggatgctgcgggcctttggtgctgatctccaggtggggggtgagatggggcgtcacatcaccgttcgccccggcaacaccctgaagggccaacaagtagtcgtcccgggggacatcagctcagcagccttctggctggtggccggtgccctggtgcctggcgcggacctcaccattgagaacgtcggactcaatcccactcgaacaggcattctcgaggtgctcgagcagatgaatgctcagatcgaggtgctgaaccgtcgcgatgtggccggtgaaccggtgggcgacctgagggtcacccatggaccgttgcaaccgttttccatcggcgaagaaatcatgccccgcctcgtggatgaggttccgatcctcagcgtcgccgcctgcttctgcgacggtgaaagcaggatcagcggcgcctcggagctgcgggtgaaggaaaccgatcgcctggcggtgatggcacgccagctcaaggccatgggtgctgagatcgaggagcacgaggacggcatgaccatccgcggcggacgcccgttgaagggcgctgctctggacagcgaaaccgaccaccgggtggcgatgagcctggcggtggcctcattgctggcgtctggggactcgaccctgcagcgcagcgatgctgcagccgtgagttaccccagcttctgggacgaccttgaccggctccgctgctgat

SEQ ID NO: 241393 - DNA, 1471 bp, Unknown
  Bacterial polypeptide expressing nucleotide sequence isolated from the Sargasso Sea
gatggctacacgcgtgtgctcacgcggctgcgtgcggcgatcgacgccggcgacggcgcggcgctcgaagcggtgttcacgcgctcgcgtgccgcacgcaaggcatggcaggagcgcggcggcgcgcccgctgccgaaccggtcaagaaataacaggacgattcccatggactacctcgatctcggcccgtactccagcgcttcgggcaccgtgcgcctgcccggctcgaagagcatttcgaaccgcgtgctgctgctcgcggcgctcgccgaaggcgaaacgacgatcaccaacctgctcgactccgacgacacgcgcgtgatgctcgacgctctcggcaagctcggcgtgaagctcgcgcgcgacggcgacacctgcgtggtcaccggcacgcgcggcgcattcaccgcgaagacggccgatctgttcctcggcaacgcgggcacggccgtgcggccgctgaccgccgcgctcgccgtgaacggcggcgattatcgcgtgcacggcgtgccgcgcatgcacgagcggccgatcggcgatctcgtcgacggcttgcgacaaatcggcgcgcagatcgactacgagctgaacgaaggctacccgccgctgcggatcaagcccgcgaacatttccgtcgacgcgccgatccgcgtgcgtggcgacgtgtcgagccagttcctcacggcactgctgatgacgctgccgctcgtgaaggcaaaggacggcaagatcgtcgtcgaggtcgacggcgaactgatctcgaagccgtacatcgacatcaccatccggctgatggagcgcttcggcgtgaccgtcgagcgcgacggctggcagcgcttcgtcgtgcccgccggcgtccgctaccgttcgccgggccggatcatggtcgagggtgatgcgtcgtccgcatcgtacttcctcgcggccggcgcgcttggcggcggcccgctgcgcgtcgaaggcgtggggcgcgcgagcatccagggcgatgtcggcttcgcgaacgcgctgatgcagatgggcgcgaacgtgacgatgggcgacgactggatcgacgtgcgcggcatcggccacgaccacggcaagctcgagccgatcgacatggacttcaacctgatccccgatgcggcgatgaccatcgcggtcgcggcgttgttcgcgaacggcacgagcacgctgcgcaacatcgcgagctggcgcgtgaaggaaaccgaccgcatcgccgcgatggcgaccgagttgcgcaaggtcggcgcgatcatcgaggaaggccctgactacctcgtcgtcacgccgccggaaaagctcacgccgaacgcggcgatcgacacctacgacgatcaccggatggcgatgtgcttctcgctcatcagcctcggcggcgtgcccgtgcggatcaacgatccgaagtgcgtcggcaagacgttccccgactatttcgaccgcttcgccgcgctcgccaaagcctga

SEQ ID NO: 241394 - DNA, 1330 bp, Unknown
  Bacterial polypeptide expressing nucleotide sequence isolated from the Sargasso Sea
catgacagacaatactcacgccacaaccaatcccacttttgtggtggcccccggcggtcaattgcaggggcgcctgcgtgtgccgggcgataaatccatgtcccatcgctccatcatgcttggttcgctggcagaaggcgttactcaggtggaagggttcctggaaggggaggatgcgcttgccaccttgcaagctttccgtgacatgggggtagtgattgaggggccccataacggccaggtcactatccatggtgtgggcctgcatggtctcaaagcccccgagaaagccttgtacatgggtaactcaggcacctccatgcggttacttaccggcttgctggcggggcagtcctttgatgtggagttgaccggggatgcgtccctgtccaagcgccccatggagagagtagccaagccattacgcgaaatgggggctcagattaccactggtacagacggtcgcccgccagtgcgtattcgtggtggccagtcccttaaaggcttccattacgacttgcccatggcgtctgctcaagtgaaatcagcggtgctattgggcgggctctatgctgatggcgaaacatcagtaacggaaccggcgcctacccgtgatcacactgaacgcatgctgggtggttttggttatgaagtgcgtcgagacggcgccaccagagcactgtccggtggcggcaagctcactgcgggtaaattggaagtgcccgcggatatctcctctgccgcctttttcctggtgggcgcttccattgccgctaatagtgaagtgacgctaccgcacgtggggatcaaccctacccggaccggtgtaatcgatattctcaagctgatgggcgcggatattcgcttggaaaaccagcgcgatgcaggtggtgagccggtggccgacctggtggttaatgctgctccgcttaagggtattgagatccccgaggcgctggtgcctttggccattgatgaatttccggccattttcatcgccgcggcctgcgctcagggcgacaccattttgcgcggagcagaagagctgcgggtgaaagaatccgatcgtattcaggtgatggccgatggccttgctgcgttgggtgtgagtcaccaagtgtttgatgacggtattcgtattaccggtggtgagtttggcggtggggaggtgcagtcccatggtgaccaccgcatcgccatgagctttgccatggcggctctacgcgccactggccccattactattcatgattgtgccaacgtggccaccagcttccccgggttcgcccagttggcgacccatgcaggcctgaagctggaggtgaaatga

SEQ ID NO: 241395 - DNA, 858 bp, Unknown
  Bacterial polypeptide expressing nucleotide sequence isolated from the Sargasso Sea
aatgaaatctataagcagtaaaaaattaaaaggcaatatcttaattcctggagataagtctatttcgcatagattagttattttatcttcaattgctattggtcatagtaatattaaaggaattctgaaaagtgatgatattatgaaaactattgaggctatgaaaaattttggtgcttcaattgaatttacaaatccacataattgttcaattaaaggagtgggtctagggggtttatcagaaccagaatcagcattaaattttggtaattctggtacttcagctagactaataatgggtttatctgcctctcatcctattacaaccatatttattggtgataaatctttatcaataagaccaatggatagagttttaaaacctttagttaattttggctctaactactcactaagaaaagataattatttacccgcaatagtgaaaggttcagataatccaattccttttagttttgaattgggtgagccatcagcccagattaaatcggcagtccttttaggcgcattaaatactcccggggtaactacagtgaaggataaatttaatacaagagaccatactgagagactgttaggtttatatggagcaaatattaatattactaaaaaaagaaatgtaaaagaaatttcaataaagggagttaatgaacttaaaggattagatttgagcgttcctggcgacccatcctctgctttatttccaattatagcggcattgatttgtaaaaattcagatattatggtcaaaaatgttctaataaatcctacaagagatggtgcatttcaggttttaaaagatatgggtgctgatataagttttttaaataatagaaa

SEQ ID NO: 241396 - DNA, 1249 bp, Unknown
  Bacterial polypeptide expressing nucleotide sequence isolated from the Sargasso Sea
aatggtaattagaggagaaattgaacttcctggagataaatctatctcccatcgagcgttaatgtttgccgcattggcacaaggggaatcaaagatagaaaacatttccaccggggatgacatacaatccactatgaattgccttaaagcgtgtggcattgatataaataataaaaatgagggcttaatcgtaaaaggaggctcattctctgatccaaaaaggccattaaattgtggaaactctgggacgacagcgagattaatgcttggtctattagcggggagaggacttcaagcaaagtttattggagacgattctctttcttcacgccccatggacaggataatgtctccattatcaaaaatggggttaaaatacagaagcactaatggcaaactccctgtcaccattgagcaaagtaatcttgttggaatagactataggtcttccattgctagtgctcaattaaaatcagcgctactacttgctgggctaggagcggatagtaaaacaatagttagagaaccattaaaatcacgagaccatactgaaataatgttatcagaaatgggagcaaaaattcatactgatggtctttctacttttattgagccccagtcctcagatttaaggtctattaatttgtccattccaggagacccttcttctgctgctttttttgttgcggctgcggcaatgctgcctggctcggatattattttaaaaaatattttactaaatcctactagggctgaggtattccatcatttagaaaaaatgggtgtcgtaattaagtatattaataattataaaaggtcaggtgaatccattggaagcttggccatatctaatggggaattgtcttctattattataaatgagcaagatgttccaggggtgattgatgaactacctattttggctatattggcaacccaagcgaacggtaccacaatagtaaaaggagcaagtgagctcagggtaaaagaatgcgaccgcataaatgccatttgtctaaacctaagaaaaatgggtggggacattatcgaattggaagacggttttaaaattaatgggccaacagaattacatggagctaacattgagacatttcatgatcacagaattgcaatggcatttgcaattgctgggttaattactacacagagcgtaatactcgatcacccggaatgtgcatctacatcttttccagaattctatgatgtcttagatcgggtatgtcaatga

SEQ ID NO: 241397 - DNA, 844 bp, Unknown
  Bacterial polypeptide expressing nucleotide sequence isolated from the Sargasso Sea
tttgaattttattgctgaaaaaacatcaaatctcaagggtgaagtcgtatgcccaggagacaaatccatatcacagcgcatcttaatgattggctcacttttagatcaagatattgaaatttcaggctttttaaatgctctagatccgctttccaccctaaatgctttgtcttgtgttggtgtaaaaataaaaaatgataatacaaaaataaaaatttttaacaaaacaaattttatttcacccaaaaatgacattaatctcggaaactcaggtactggcatgagactaatgatgggatttatttctggactaagtattgatgctaatcttgttggcgatcactctctttctaaaagacctatgatgagagttgccaatccattaaatgatatgggctcaaatataacttgcacaaacgagctaccgccagtcttaattaaaagaggaaacatagttaacaactataaatatgaattgccaatagcaagtgcacaagtaaagtcctcaattctattagctgcacttaccgcaaaaaaaaatgtaacagttattgaaccatcagcaacaagagatcacactgaaaaaatgatcgaacactttaacggtgatattgaaactcacttcaaagatggtaaaaattatataaagttattaacttctaatcttacttctaattcttcatatgaaattgtaggcgatttttcttcagcatcatttttaattgttgcatgtttgatttccaaaaattcaagaattctaattaaaaatgttggtcttaatcagacaagatcaggtttgataaaccttctcaagaaaatgggcgcaaaatataaatattgttaa

SEQ ID NO: 241398 - DNA, 1315 bp, Unknown
  Bacterial polypeptide expressing nucleotide sequence isolated from the Sargasso Sea
aatgaaatctataagcagtaaaaaattaaaaggcaatatcttaattcctggagataaatccatttcgcacagattagttattttatcttctattgctattgggagaagcaatattaaaggcctcttaaaaagtgatgatattatgaaaactattggagctatgcaaaattttggtgcttcaattgaatttaaaaattcatttaattgttcgattaaaggagtaggcttgggaggtttattagaaccaaaatcagcattagactttggtaattcaggtactgcagctagattaatcatgggcttatctgcctctcattctattactaccttatatgttggtgattcatcgttatcgatacggccaatggatagagttttaaagcctttaattaattttggctctaactactcattaagaaaagataattatttacctgcaatattaaaaggttcagataatccaattccttttagttttgatttagaggaaccatccgctcagattaaatcggcagttctgctaggggcattaaatactcctggaataactacagtgaaggataaatttaatacaagagatcatacagagaggttgctagggttatatggggcaaatattaatattactaaaaaaagaaatgcaaaagaaatttcaataaagggagttaatgaacttaatggaatagatgtaagtgttcctggtgacccgtcctctgctttatttcctattatagcggcattgatttgtaaaaattcagatataattgtcaaaaatgttttaataaactcaactagagatggtgcatttagagttttaaaaaatatgggtgctgatataagttttttaaatcacagaattatggcagcggaagatgtttatgatattagagtaaggtcaagcaaattaagaggggttgatgtaccaaggaaattttctccaacgatgatagatgattatccaattcttgcagttgcagcttctatggcaaagggtaaaactcattttaaaggaattaacgaacttagatttaaagagagtgatagatttacaggaattattaatctattagaaaaaaatggggtaagagttgagtctaaaaaggatacaataattattcatggaagatgtgaattaaaaaaaggtggaattgaaattaaaacaaatttagaccataggatggctatgtcagccttaatcatggggttagtatcaaagaaagaaataaaaattgataattccgagaccataaaaacaagttttccatctttttataaagttatgattaaagttggcgctaagttgtcaaaaaaataa

SEQ ID NO: 241399 - DNA, 487 bp, Unknown
  Bacterial polypeptide expressing nucleotide sequence isolated from the Sargasso Sea
gatgttaattagttcaaaaataaaaaatggctttaatggaaaagtattaattcctggagataaatctatatctcacagatctattattatcccctcaatatctaacggcacctcagaaattaacaatatcctttggtcagatgacgtaattaatacattaggggcatttaaaactatgggtgtaaaaatagataaatataaagataatttaattatagatggaaaaggccttaattctcttaaaaaaccaaataaaaacattgatttaggaaactctggaactagtgctagattgcttataggcctacttgccagtcaaaaatttgaaagtactttaacaggagactcttcattatctaagagacctatggaaagaataacaaaacctcttgaaattatgggcgcagaatttcaaagtactaaaaatctattgcctatgaaaatacttgggcaagatttaaagaaaattaactacaaattagtttta

SEQ ID NO: 241400 - DNA, 1315 bp, Unknown
  Bacterial polypeptide expressing nucleotide sequence isolated from the Sargasso Sea
atgaaatctataagcagtaaaaaattaaaaggcaatatcttaattccaggcgataaatctatttcgcatagattagttattttatcttctatcgctataggtaatagcaagattaaaggcttattgaaaagtgatgatgtaatgaaaacagttgaagctatgaagagttttggcgcttcaattaatttatcaaattcatcaaattgttttattaatggtattggtttgggtggattagcagaaccaaaaacagctttagatttcgggaattcagggacttctgcaagattaataatgggcttgtcttcttctcaccccattacaactttatttattggagatacatctttatctgtgaggccaatgcaaagagttttgaagccattaataaactttggctcatcattttctttacgagaagacgaatttttaccagctatattaaaaggttcagttagcccaataccctttatttttgatttaaatgaaccctcagcacagattaaatccgcagttttgctgggtgctttaaataccccaggtacaacaatagttagagataaatttaatactagagatcatacggagaggttgctggaattatatggagctaacataagcgtaaaaagaaaaaagtctttgaaggaaatttctataaaaggaattaaagatttgaatggcatagatgtaaatgttccaggtgacccatcttcagctctttttcctattgtagcagcgttaatatgtgcagattcggatatcatagttaaaaatgttttgattaatccaacaagagatggagcttttgaggtccttaaagaaatgggagctaacatcaattatttaaatcacagaattatggcagcagaggatgtttatgatattagagtaaagtctagtaatttaagcggtatagatgttccaaagaaaatatcaccaactatgatagatgattatccaattttagcagttgcggcctcaatggctaagggtaaaacttgtttcagaggaatcggcgaactcagattcaaagaaagtgatagatttaatggtattttgaatcttttgaaaaaaaatggtgttaaagttgagtctaataaagatacaatcattatccatggaaagaaagaattgaaaagaggtggcattgaaatatccactaatttagaccataggatggcaatgtcagcgttagtcatgggattaatttcaattaaggaagtaaaaatagataatgctaaaactattaaaacgagttttccaaatttttataatcttatgatcaaaattggtgctaaattatttaaaaaataat

SEQ ID NO: 241401 - DNA, 1348 bp, Unknown
  Bacterial polypeptide expressing nucleotide sequence isolated from the Sargasso Sea
tatgattaaaaaaaatattataaaaaataatttagtatctcatgggtctagtagtttaaaaggtataattactcctccaggagacaaatctatttcacatagagcccttttattttcttctttagcattaggaaaaagtgaaatttctaacttgttgcattcagaagatgtcttaaatatggtaaaagcacttaaattattaggtataaaaattacaaaaataaataatatattttacgtaattggatctggtctaactggttttaatattccaaaaaaacatatcgattgtggaaatagtggtactttagctagaatactaataggtgctattggaggaagcgaaatttttgtaacattaactggcgatgaatcattaagaactcgtccaatgaatagagttataaaaccgttagagaaaatgggcattaattttcactcctcaaatggattattgccattaatagtttatggtactaatgaaattcttcctataaaatataattctccaatttcttctgcccaagtaaaaacatcaattttgttagcagggttaaatgctcaaggcacaagtgaaataattgagccctatacttctagagaccattctgaaaacttgttaaaatattttggtgcaaatataaagtataattctaaaacttctggaaagaataaggtattgataactgggggtaatactttaaaaagttgttctattgaaattcctggagatatctcttcagctgcttttataattatagccgctataataattcctggatcagatattatagttaaaaatgtaggtataaattattttagaaaaggcgtattagaggcattagaaaaaatgggggctaaaattagtatagaaaacaaatttactaataattttaatgagcctgtagctgatatatcagctaaatactcaaaaattaaaggaataactttggatagcacatattcttccaggctaattgatgaatatcctattctagcaatagcagcagctgttgcttctggaaagtctgtatttaaaggcttatcagaacttaggcataaagaaagtgatagatttaatggcattattgatggtttgaaagcatcgggaataaaggttgaagcaaaaaatgatgatattgttatttatggaaatttatctagaataaagggaggcataaccattaattgtcaatatgatcacagaattgctatgtcatttttagttttgggagctgtggcagaaaatcctataaaagtaattggttgtaattctatctctacatcttatccaaattttatttctgaattaaacaatatgggaacaaaaattaggaatgaaaagtaa

SEQ ID NO: 241402 - DNA, 1315 bp, Unknown
  Bacterial polypeptide expressing nucleotide sequence isolated from the Sargasso Sea
aatgaaatctataagcagtaaaaaattaaaaggcaatatcttaattcctggagataaatctatttcacatagattagttattttatcttcggtcgctattggaaaaagtaatattaaaggcatcttaaaaagtgatgatattatgaaaactattgaagctatgcaaaattttggtgcttcaatcgaatttaaaaattcatctaattgttcaattaaaggagtgggtttgggtggattatcagaaccaaaatcagcattggattttggtaattcgggtactgcagcaagattagtaatgggtttatctgcctctcatccaattacaaccatatatgtaggtgatacatcattatcaacacggccaatggatagagttttaaagcctttagttaattttggctctaattattcactaagaaaagataattatttacctgcaatattgaaaggttcagataatccaattccttttagttttaacttaagggaaccatctgcccagattaaatcggcagttctattaggctcattaaatacccctggagtaactacagtgaaggataaatttaatacaagagatcatactgagaggttgttagagttatatggagcaaatattaatattactaaaaaaagaaatataaaagaaatttcagtaaaaggagttaatgagcttaagggaatagatgtaaatgttcctggtgatccatcctctgctttgtttccaattatagcggcattgatttgtaaaaattcagatataattgttaaaaatgttttaataaaccctactagagatggtgcatatagagttttaaaagatatgggcgctgatataagttttttaaatcagagaattatggcagcagaagaagtttatgatattagagttaagtcaagcaacttaaaaggagttgacatacccagtaagctctcccccacaatgatagatgattatccaattcttgcagttgcagcttctatggctaagggcaaaacatattttaaaggaattaatgaacttagatttaaggagagtgacagatttaatggaattttgaatctgttagagaaaaatggtgtaaaagttgagtctataaaagatacaataattatccatggtaaatgtgaattaaaaaaaggtggaattgaaattgaaacaaatttagatcacaggatggctatgtctgctctaataatgggtttagtatcaaagaaagaaataaagattgataattctgatactataaaaacaagttttccatctttttataaagttatgattaaaattggcgcaaagttatcaaaaaaataa

SEQ ID NO: 241403 - DNA, 766 bp, Unknown
  Bacterial polypeptide expressing nucleotide sequence isolated from the Sargasso Sea
tttgaatttaacatcaactaatacaaattctctcaacggggaaattatttgtcctggagacaaatctatttctcaaagaatactaatattgggttcattattaaattgcgatatggaaattagtggttttctagatgcaaaagacccaaattctacccttaatgctcttaatgaaattggagcctcaataaataaaagcggaagtaaggtaattttgtgcaaaagagaattaccttttatcaagccctctcaaaatctagatcttggaaattccggcactggaatgagattgatgataggtttaatttctggtcttggcattaatgcaacgcttgttggggatgcatctttatcaaaaaggccaatgtccagagtaattaaaccattaaaagaaatgggagctaaaattcaaagcaatgagggcaaatctcctattgaaatcattgaatcaaatatatcaagtgaatttgaatataaaatgccaattgctagtgcgcaagtaaaatcttccttgatactagcatctttatcatctaataattctataactatcatcgagccaaaaattacaagagatcataccgaaagaatgattgaatattttggtgggtcagtcacacattctaatgatgaaagtgggcgtattacagtcgacaatagcaaattaacatcaaaagattcttatgaaattgttggtgatttttcttctgctgcttttgtaattgttgctactcttatatctaaagaatcaaaagtcattattaaa

SEQ ID NO: 241404 - DNA, 1252 bp, Unknown
  Bacterial polypeptide expressing nucleotide sequence isolated from the Sargasso Sea
aatgctagttcaaggtacattgcaacttccaggagataaatctatttctcatcgagcaattatgctttcagctatagctgatggagttagttgtgttagaaatttaaatgatggagctgatcttcagtcaacaattaatattttaagagattgtggagcttcaattgagcaaaaagaggatgagataataataaatggtaaaaaacttcattctccatccaaagatcttgattgtggcaattcaggaaccactactagactggttgcaggactattatcatctcaaaaattaatatttacattaactggagatgaatcattgtcaaaaagaccaatgaagcgaatagttacacctttagtaggaatgggctgtaaaatttcctcaaataacggattattgcctttgtcaatagatgcttctgatggtattacagctatagactatgatatgacagttgcaagtgcacaagtcaaatcatgtatacttttttcagctttaggaggaaataatatatcaattattaatgagattattccgaccagaaatcattcagaaattatgttaaaaaacatgggagtatcaattgaaagagaaggaagtaagattatagttcatccacttaaatcaaagttaaagtcgattgatatttctgtaccctctgatccatcttcagcagctttttttgctgcattagcagttattaataataattcaaatttaaagttaaccaatgttttacttaacgagtctagaattggatttgttgaagttttaaatcaaatgaattgtttaatatcaaaatcaaatgaatcagttcacaatggtgaaaaagtaggagatttaactattagctcatctaaccttaaagcaatagaaattaaatcagaaactataccatcaattatagatgaagtaccaatattagcggttgtagcggcttttgcaaatggtacgacagtttttaaaaatgtagaagagttaaaatataaagaatgtgatagattaagagcaattatacataatcttgaagcatttggaatcaaggcatatgaaaaaaataatgatttgtttgtcgagggaggaaaggtaaaaagaatgcctaaaataactacgtttgatgatcatagaattgctatggcattcacaattttaagccttacttcttttaaaaaatatgagctcgataacagttcatgtgtggatatttcattaccaaatttcttcaattacctaagtgagattaccaaatga

SEQ ID NO: 241405 - DNA, 1254 bp, Unknown
  Bacterial polypeptide expressing nucleotide sequence isolated from the Sargasso Sea
aaatgctagttcaaggaacattgcaacttccaggagataaatctatttctcatagagcaattatgctttcagccatagctgagggagttagttatgttagaaatttaaatgatggagctgatctgcagtcaacaattaatattttgaaagattgtggagcttcaatacaagaaagagaaaatgaaatagtaattaatggaaaagaacttcattctccatcaaatgatcttgattgtggtaattcaggaactactactagactggttgcaggactattagcttcccaaaaattaacattttcattaattggagatgaatccttatcaaaaagaccaatgaagcgaataattacgcctttaacagcaatgggatgtaaaatttcctctaatgatggattattacccttatcaatagatgcttctaacggtattagcgctatagattatgatatgaaagttgcaagtgcacaggtgaaatcaagtatacttttttcagctttaggtggaaataatgtatcaagtattaatgaaattattcagacaagaaatcattcagaaattatgttaaagaatatgggagcatcaattgaaagtgaaggaagtaaaattatagttcatccactcaaatccaagttaaagtcaattgatatttctgtaccctctgatccatcctcagcagccttttttgttgctttggcagttattaataataattcaaatttaaagctgaccaatgtattacttaacgagtcaagaattggatttgttgaagttttaaataaaatgaattgtttaataacaaaatcaaatgattcagttcataatggtgaaaaggtaggagatttaactattggcgcatctaatcttaaagcaatagaaattgaatcagaaactataccatcgatcatagatgaagtgccaatattagcagttgtagcagcttttgcaaaaggcacaacagtttttaaaaatgttgaagagttaaaatataaagaatgtgataggttaagcgcaattatacataatcttgaagcatttggaattagggcatatgaaaagaataacgacctatttgttgagggaggaaaggtaaaaagaatgcctaaaataactacctttgatgatcataggattgctatggcattcacaattttaagccttacttcttttggaaaatatgagcttgataatatgcaatgcgttgatatttctttaccaaatttcttcaattatcttagcgaggtaaccaaatgaa

SEQ ID NO: 241406 - DNA, 1282 bp, Unknown
  Bacterial polypeptide expressing nucleotide sequence isolated from the Sargasso Sea
atgaagcaattacgtcttgaacctgttgtgcaagtccgcggtgagatcaacattccgggctcaaaaagtatctctaaccgcgcgttattattagcgaccttagccaaaggcaccaccacgctaaccaatttgctcgattccgatgatattcgtcatatgttggcgtctttaaagcagttgggcgtcgaataccgcttatcgcaaaataatactgtctgtgaactgactggcttaggcggcgtgatttcatcagataccgcgcaaacgctgtttttaggcaatgcgggcacggctatgcgtccattgtgcgctgcgctcaccttaggccgtggcgaatttaccttaaccggcgagccgcgcatggaagagcgtcccattggcgatttggtcgatgccttaaagcaattgggcgccaatattgtttaccttaagaatgaaggatttccaccactgaccatcaatgcaaccggtcttaacggtggcgatgtggaaattgctggcgatctgtctagccagttcttaaccgcgctgttaatggttgcgcccctcgcgaagggcagtgtgaatattcatgtcaaaggtgaactggtttcaaagccctatatcgatattaccttagccctgatggcgcagtttggcgttcaggtgattaaccatgactatgcccgctttgaaatcccagccgggcagcagtatatgtctccgggtaaagtgttagtggaaggggatgcctcttctgcatcttactttttagcggcgggagccattaaaggcggtgaggtgaaagtcacgggtgttggtcgtttaagcattcagggcgatgtgaaatttgccgatgtgctggaaaaaatgggcgccgacattgagtggggcgatgattacattattgcccgcggcgcgccattaaccgcggttgatttagacatgaatcatatccccgatgcggcgatgaccattgccactgcggccttgtttgctaagggcacgaccactatacgcaacatctataactggcgcattaaagagaccgaccgattagcagcgatggccaccgagctgcgtaaagtgggcgcgttagtggaagagggccacgattatattcaaatcaccccgccagctgttctcaataccgcagagattgacacctataacgatcatcgcatggcgatgtgcttctccatgatggcttttgccgattgcgggatcaccatcaacgatcctgattgcacctcgaaaaccttcccagactattttgcccaatttgccagtctcaaagcctaac

SEQ ID NO: 241407 - DNA, 1249 bp, Unknown
  Bacterial polypeptide expressing nucleotide sequence isolated from the Sargasso Sea
gataaatctatttcccatagagctctaataattggaagtattgctaagggggagacgaccattgaggggttcttacattctgaagatccactttcaactgctgattgtctaagaaagttaggtgtaaatataccagaaataaaaaaaaatgagccttttacgatttcaggattgggtcttgatggattaaaagaaccaaaagaaattctcaattgtggaaattcaggaaccactatgaggttattaatgggtttattggccgcacaagaaggtaagaatttcatcttaaccggggacgcttctcttaacgaaaggccaatgcgaagagttggtaaaccgttatctttgatgggtggcaaaatttatggaagggaaggtggtaacaaagctccaatttcaattgatggaaaaaaacttaagggatgtgttattggaactccagtggcaagtgctcaagtgaaatcggcaatattattggcaggcctcaatgcttctgggactacttctgtaattgaaccagcatcatcgagagatcatactgaaagaatgctaaaagcatttggagcagacatcagtatcagaggagaattaggaaggaatgtagttattaagtcaggaagcaacttaattggtcagagaatattgatccctggagacataagctctgcttctttttggatgattgctgcatctattgttccaaattcagaggttttaattcagaatgtcggattaaatccaactagaacagggattttaaatgtaatggattcaatggggtgcaactatgagattttagataaatcgactattgcaggtgaaccaattggatctattaaagtaaagacttcatataatttaagatcattcactattgaaggagatattctcccaaaacttatagatgaaattcctatccttactgtggctgcctgtttttgtaatggaatttctgaaattaaggatgcacaagaattaagagttaaggagaccgatcgattaaaagtcatggcacgacagttacgaaaattcggcgctgaaataactgaaaaagaggatgggttaattattaatgggcaatcaaaatttaattctgcggaggtagatagtgagacagatcatcgagtagcaatgagtcttgcaattgcttcacttcttgctaaaggcacctcaaaaatcatgggatctcatgctgctagcgtctcgtatcccagcttttgggaagagctggctaaacttactaactagc

SEQ ID NO: 241408 - DNA, 927 bp, Unknown
  Bacterial polypeptide expressing nucleotide sequence isolated from the Sargasso Sea
catgataaaaggaactatcgaatttccaggagataaatcaatatctcacagagctttgatgattgcatctatatcatcagaaacatctcaaatcaaaaatctctcaaatgggcaagatgtcttatcgacaaaaaaatgcttagagcagtgtggaatatccataaatgattcaaaaaatagttatcaagtaaaaggcggaaaatttacaaatccagaaaaagatctagactgtcaaaattcagggactacagtacgattacttactggattattagcggggaaaaaaatcaatgcaagacttatcggcgatgaatcactttctaaaaggcctatggaaaggattgtaacccccttatctaaaatgggactgaacataaaaagtaataatgggaaacttcctatattaattaaaaatagtagaattaaaggtatagattacaaaaatacaatgtcaagcgcacaggtcaaatcagcggtattattctgcgggcttggcaccacagatactacgagttattatgaacctgtaaaatctcgaaatcacactgaaataatgttaaaaaatgttggtgtcgaaatagaacacaataatggtaaaataattttaaaaaactcagattctatgataaaaggattagatattacaatccccggtgacccgtctaccgcatcattttttgctgctgcagcattaattttaccaaaatcagagttgattttaaaaaatatcttagccaacccaacacgctttggattttttgatgcaatcaacagaatgggtgccaatattgaatttttatccagctggatggaatctggtgaaaaagttaaaaatattaaaattaaaaacggaccattaaaagcaataaaaattgatcatgggcatattccaagtataatagatgagataccaaatattatcaatag

SEQ ID NO: 241409 - DNA, 1318 bp, Unknown
  Bacterial polypeptide expressing nucleotide sequence isolated from the Sargasso Sea
gatgcaattcaaaatttcacaaggtaaaggtctcagaggagatataactattcctggtgataagtctatttctcacagagctgtgatgctagcttcattagctgaaggaaaatcaaagatttctggtctactggaaggagaagactgtcttgcaaccgttgaagtattcaagaaactaggagttagtatttctaaagaggaagaagaatacattgtcgaaggcaagggattacagggtcttaatgagccaattagttctttagattttggaaattcagggacttccgtaagattatgcgcaggtttactagcagctcaggaattttcctcaactttaataggcgatagttcactttcttcgagacctatgcgaagaattatagatccattaagtttaatgggcgctgacatagcaggttcagaagacggcactcttcctctaaaaattcaaccatcagattcattgaaaccaattacttattcattgcctgtcgcaagtgctcaagttaagtcttgtctcatgtttgctagtttatacgcacaaggagtaacagaattagaagaaaaagttataactagagatcatacagagagaatgtttaaacaatttaatattcctgtagaaataaatcgattgaaagagtctaatttaataaaagtaaaaaatgttgaatatatagctcctcaagatataaatatttgtggagacttttcatccgcatctttctttatactagctggactcatcacgcctgattcagagatattaatcagaaatgtagggataaatccttcaagaattggattcttacatgccctacgccatatgggcgctaatattgaattgcaaaaaacaggtagttctgttgagcctacagcaaatataatagcaagaacctcagatcttaagggtataacactaaatacaaatctcgttgcgaacatgatagatgagatgccagcattcttcattgcagcttctttggctgatggtgttacaaaagttacagacgctatggaactaagaacaaaagagagtgacagactacaggctatgtctgaagctttaaattcttttggggtaaaatttagacttgaaaaagatggaatattgattaatggacttggaaaagagggggcatttaagggagccgaaatcgattctcatggagatcacaggatagctatggctagttccataggctccttaagatctgatagcgagacgatcattttggactgtcttaatgttgatacatcttttccaaattttgtagaagtctgtaaggatgtaggtatagagatagaaagtatatga

SEQ ID NO: 241410 - DNA, 1204 bp, Unknown
  Bacterial polypeptide expressing nucleotide sequence isolated from the Sargasso Sea
atgacaactgttacacgcgaaacaccaggcttttcaagcttttccaatcctttgtcaggagccatagaagtgccaggagataagtctatttcgcatagagctatcattttaggggctttagcggttggagaaactcaagtttttggattgttggagtcagcggatgttcttggaactattgatgccatggttgctttaggggcagaggtgaaaaaaaataatgatggcagctggtcagtttttggagttggggtgggaggtttttcggaacctaacaaggtgatagattttggtaattccggcacgggtgtccgtttagcactaggagctatagctacgtcacccattgtggcaacttttactggcgaccaaagtttgatcgggcgacctatgggtaggatccttgaaccgatacaaatgtttggagcttccaatttaagtcggtcaaatggttttttaccgttgacgctttctggcgcaaaaaacccgataccaataacttacgtgtcacctattccgtcagctcaggtaaaatcggcggttttattggcggcactaaatgttccaggtgaaactatttttaaggagccatcattatcccgagaccatacagagcgaatgttaaaaagttttggtgctgatattagctctgttagccagggcgaagaacgctctatcttctgccacggatacgcggaattaaaagcccagcaagtttttgtgccgggagacccttcttccgcagcttttctgatttgtgctgctcttatggttgaggggtcacatattaagatttcgaacgtttgtcaaaacgaaactcgaaatggattgataattacattgaaagaaatgggagcaaaaatagaaattgaaaatgaaagaaattttcatggtgaaacggtcgcagatctatcggtttctagtagcgacctctcaggtgttgaagttcctccacaaagagttgtgagcatgatcgatgagtatcctattttagccgtcgtcgctgctatagctaatggtaaaaccgtaatgagaggtttgagagaattgagagtcaaagaaagtgacaggattgcttctatggctaaaggtctttctgacagcggtgtcaaggttgaggaggcagaggattctttaacggtttatggaagtggatcaagagagataaacggtggggcaaagataaagacttttcatgatcatc

SEQ ID NO: 241411 - DNA, 718 bp, Unknown
  Bacterial polypeptide expressing nucleotide sequence isolated from the Sargasso Sea
tttgaatctagaatcaaaaccaacaaaacatctagagggagaggtaatttgtcctggtgataaatccatttctcaaagaattctgataattggatcattattaaactgtgatattgagatagagggttttttagatgcatatgatcctaattcgactttgagcgcattaaataagattggcgcatcaattacaaaaaataataacaccgttactcttagcaaaagagcacattcatttgtagatgcttcagaggtattggatcttggaaattctggtacaggcattcgtctaatgcttggtttggtttctgggcttggaataagtgctaactttaaaggagattcctctttatcaaaaagaccaatgtcgcgtgttatagaccccttaagagaaatgggagccttaatagagagtaataacggaaagttgcctatcaatgtttccaagtcaaatattataaattcctattcatataaacttcctgttgccagcgcacaggtaaaatcatgtcttcttttggctgcaattgcttcaaaaaatcagattaatttagttgaaccaaaaattaccagagatcataccgagaggatgattgagcattttggcggaattataaattatggagatgacttaaaaaaaggaaatattgaactggattattgcgaactaaaaccaaaaggtaattatcgagttgttggagatttttcatcagcttcg

SEQ ID NO: 241412 - DNA, 1309 bp, Unknown
  Bacterial polypeptide expressing nucleotide sequence isolated from the Sargasso Sea
catgagtatcaagcaaaatagtcttttagcaacttccaatacaaaaataaatggctgcataaatgttcctggtgataagtcgatatcacatagggcaattattatttcatccattgctcatggaagaacgaaaattaaaggctacctaaattcaacagatattgacgcgactatcaatgcctgtcgagccattggggcagatattaaagaagatatagactctttgattattgatggaaataatcttgagcaaaggcatggagataatgctgaacttaactttggtaactcaggaacatctatgagattaatgatgggagttctttcagctcaaaaattttcttctattcttaaaggtgatgaatccctgactcaaaggccaatgaatagagttacggatcctttgcttagaatgaatgccgatataaaaacgtctgatggcacaccgcctgtattcattaatccaatatcctttataaaatgtgtagatcacagtatagaaattgcaagcgcacaaattaaatcttcaattatgttagctgggctttatggtgatagtgctttcaagataataactccacaatctagaaaccatactgaaatcatgttgaacgaatttgggtgcgatatatcagttatagcagattcaattgaattagtgcctggaaaactcattacaccaaatcatatagaaattcctggcgatatttcatctgctgcatttttcatcgttggatcaatcatctctagagacagtcaaataaaaattaataatgttggccttaatccattaagaacaggtttcataaagatccttaaaatgatgggtgcaaatatacagatttcaaatgaaagaataatcaatggcgaacttattggagatatttatacagaatcttcaatactaaatggaattgatataccaaaagagctgatatcaagttcaatcgatgaattacccttaattgttttggcagcaagccaggccaatggaaaaacctcgattagaaacgcagaagagctgagagtaaaagaatcagatagaattctgtcaatgataagaatgatggataaatttagaatctcaactgatgaatttccagatggtatgaatatttatggtggttcaattaaaggcgcaagggtaaatagttatggcgatcatagaattgcaatgactgccttaattgcttcactcgtctctgatggcgatattctggttgaggattgtaagaatatagacacttcatttccaacatttattgatacagctaataatattgggatggatatccaaataaatgactaa

SEQ ID NO: 241413 - DNA, 904 bp, Unknown
  Bacterial polypeptide expressing nucleotide sequence isolated from the Sargasso Sea
atgagtatcaagacaaatagtctttcagcaagttccaatacaaaaataaatggctccataaatgttcctggtgataagtcaatatcacatagggcaatcattatttcatccattgctcatggcagaacgaaaattaaaggctaccttaattcaacagacattgatgcgactatcaatgcctgtcgagtcattggggctgatattaaggaagatatagactcattggttattgatggaaatgatctcgagcaaagacatggagataatactgaacttaactttggtaactcaggaacatctatgagattaatgatgggagttctttcagctcaaaaattttcttctgttctaaaaggtgatgaatccctcactcaaagaccaatgaatagagttatgcaacctttgcttagaatgaatgccgatataaaaacctctggtggcacaccgcctgtatacattaatccagtatcctttttaaaatctgtagatcacactatagaaattgcaagcgcacaaattaaatcttcaattatgttagccgggctttatggtgatagtgctttcaagataataactccacaatctagaaaccatactgaaatcatgttgagcgaatttgggtgcaatatctcagttaaagctgatttaattgaattagtacctggaaaactcattacaccaaatcaaatagaaattcccggcgatatttcatctgccgcattttttatcattggatcaatcatctctagagacagtcaaataaaaattaataatgttggccttaatccattaagaataggtttcataaagatccttaaaatgatgggtgcaaatatacagatttcaaatgaaagaataatcaatggcgaacttataaaagatatttatacagactcttccatac

SEQ ID NO: 241414 - DNA, 1273 bp, Unknown
  Bacterial polypeptide expressing nucleotide sequence isolated from the Sargasso Sea
atgagaagcagaattgttggcgaagttaatatagtaggtgacaaatctatttcgcatagagctataattttatcttcactagcttctggtaaatctatgttgtctaatgtattaatttctggtgatacaaaagcaacaataaatatatttaaaaatctaggtgttgagattaatgaaatttcaaacaatcaattagaaattcatggtgtcggtttaaatggattgaatgaatcaaaggaaccgcttaatgctcttaattctggcacaactgcaagacttcttataggtcttctttcaaaacaaaaatttgaaagtgatttaataggtagtactcaactaaacaaaagaccaatgagtagggtaattgatcctttagtcaatgaaggtgccaaaatttcaggtaatggaggtagccttcccataaaaattaaaccttcagattactcctttgaaaacattcattcaactaaaccaagcgcacaggtaaaaagtagttttctacttgctagtttatatcataaagcaccaactactatctctgaaatagtactaaccagagatcatacagaaagaatgctgagtctcatgggtgttaacattgtaagacttggaaatacttctactgttgccccaacaaatgaaataacaagtatagattatttagttccaggagatccttcatctgcagcatttttgattgctataggattgttgaagagcaaaaaagtagtaatcaaaaatgttttattaaatgagagaagaattgggtttttaaaagttctcaaaagaatgaatgctgatattttattggaaaatatagaaaattttcaaaacgaaccagttggagatattgtagttaaaaaatctaaacttcaaggtgttactatcgatggttctgacgtggttgatatggtagatgaaattccaatatttacactgttagcgtctcaagcagaaggtgttacaaaggtaataggtgctcaagaattaagacttaaggagtctgatcgtttggcagctatggaaaattttataaatgaattagatggtgaaattactactttcgaagatggttttgaaataaatggtaagcaaaatttacagagtggagtagttgagactcttgaagaccacagaatagcaatgactgcagtcgtagctaatatatgtatagattcacagataaaagcagacaatattatttgtataagtgattcatatccagatttttttttcgacttagaaaaaattggagcgaattatgaatcttaag

SEQ ID NO: 241415 - DNA, 1282 bp, Unknown
  Bacterial polypeptide expressing nucleotide sequence isolated from the Sargasso Sea
atgaatatctctctaaataatgtttctactataagaggtgagataaacatacctcctgacaaatctttatcccatagagctgtcatgtttaattcaatagctaacggagatgcaaaaatcactaattttttaatgggtgaagattgtttatctaccatagatgttcttagaaaattaggtgtgaaaattagagtcgatggaagtaatgtatatacatatggaaaaggtcttcattcattacaaaagccctctgaggttctatatgtaggaaactctggaactaccataagacttatgtcaggaattttagcaggaagaaactttgaatctattttagatggagactcttcaattagaaaaagaccaatgaaaagaataattgatccactgactaagatgggtgccaaaatatcagcagaaaataataatgaaaatgctcctattaagtttttaggtggtaaactatcgtctataaattatgagttgcctgttgccagtgcacaactgaaaagtgctttgatacttgcaggattaaggtccgataataccgtaacaattatagaaaaagatgtatcaagagaccatacagaaagattgttaacaggcatgggtgcaaaaataaaaaaagatggattaagtattgatatatctccatctgatttaagtgcaaatgatttagtgattccaggtgatatttcaagtgctgcgttttggatggttgctgctgcaattcataaaaatgctgaaataaatatcataaatgttggaatcaatgaaactagagcaggaataatttctgtactagaaagaatgggagcaaatttaaattttgataataataaagaatactcaggtgagcctgtttcagatataacagttaagacatcaaagcttaagggcactgtgatttcagggaaagaaattccattattaattgatgaaatacctataatagctttagctgctgtatttgctgagggagaaactaaaatagttgatgcaaaagaattaagatataaagaatcggatagaatttcattgactgttgattggatgaaaaaagcaggagcaaaaattgaagaacttgaagatggaatgattataaatggaacaaataatttagatggaggaactttctcttcacatggtgatcatagattagctatgactttaggaatagccagtttagtttctaaaaataaaattgaaatagaaaatcctgaagcagcaaatgtgtcatatccaactttctgggatactttgaagggaattggaaaataaa

SEQ ID NO: 241416 - DNA, 886 bp, Unknown
  Bacterial polypeptide expressing nucleotide sequence isolated from the Sargasso Sea
catgagtagggaacaggtcaatctactagcatcaagtaacaacaaaataaatggatgcataaaagtacctggtgataaatctatttctcatagagcgataattatttcatctattgctgagggaaaaacacaaattaataaatatttagattcatcagatattaatgcaaccattgatgtttgtcgtcgcattgatgttgaaattataaaaaataatgaatcattgattattacaggaaataatcttgagcgaattcagaaagaagatattgaattgagctttggtaactctggaacatctatgagattgatgatgggcgttctatcggcacaaaacttttcatcaattttatctggtgatgaatcacttagtcagagaccaatgaatagagtctcaaaaccccttatcaacatgaatgccaatataaaaacttcaaatggaaagcctccaatattcgtatctcctgtagatgcaataaaaaatgtcgaccacaaaattcatattgctagtgcacaaattaaatcagccatcatgctcgcaggactttatggcaaagatccttttacaataactacccctaaatctagagatcatactgaaatcatgttgaatgaatttggatgcaatatcactctagaatctaattctattaatgtaatcccaagtaagcttatttcaccaaagataattaatattcctggtgatatttcctcggctgcattttttatagttggatctattatctctaaagatagtcaagtgaagattgaaaatgttggtttgaatccatttagaacaggattcattgatattcttagaatgatgggtgcaagtatcgaaatctcggatctaaaaacaataaatggagaagtagtggaaatatag

SEQ ID NO: 241417 - DNA, 487 bp, Unknown
  Bacterial polypeptide expressing nucleotide sequence isolated from the Sargasso Sea
gatgaaaattttaaaagtaaataaatcctcacttaaatcaagaactatcaatatcccaggtgataagtccatatcacacagagcaatcattctcttatcattagcatcaaattcttcaacaatcagaggcttacttgaggctgaggattgccttcacacaattcgtataatgcaggaattgggagtaaaaatttataagcaaggcgaagaatatattattgaaggagttggcttaaatggattaacaaaaccaaagaaggagctatattgtggtaattctggcacggcaatgagattgatttctggcatactagcaggccaagattttgaatctaagcttacgggagacacgtcgttgttatctcgaccaatggaaagagtaagtgaaccattaaaattaatgggtgcaaacttaactcttgaaaacaaagaaaaagctcctattaattttaaacctgcaaaacttactggaattaatatgaaatga

SEQ ID NO: 241418 - DNA, 515 bp, Unknown
  Bacterial polypeptide expressing nucleotide sequence isolated from the Sargasso Sea
catgagccgcggttccctgaccctgtctgcaatcagacgtatttcaggaaaggtcgaccttcccgggtccaaaagcctctccaaccgggtgctgctgctgagcatgcttgcagaaggaacgactcatattcgaaaccttcttgacagtgatgatgttcgctacatgatcggagcgcttgagcaactgggcatcaggatggaggaaacccgggaaagtaacgaaatcagcgttgaaggctgcgctgctaagatcccgaattcggatttggaactgatgctcggtaatgctggaaccgcaatgcgtcctctgactgcagccttaacattaggtcagggcctttatgtgctcgatggcgttccaaggatgagggaacgtcccatcgttgagctcgtcgatgggctccgacagttaggcgccaaggtgagtctgttgaacgggcctcccggccccccggtggaaatcatcgcttcaggccttcccggaggaaccgccgaaatcaaaggtagcgtcagca

SEQ ID NO: 241419 - DNA, 682 bp, Unknown
  Bacterial polypeptide expressing nucleotide sequence isolated from the Sargasso Sea
ttgagcgccaccggccactctcattctccccgtgagctcaaggctggcggatcactgtccggtcgcgtgaaagtgccgggagacaaatcaatctcccatcgctccctgctcttcggcgccatcgcagagggcaccaccaccattgatggcttgctgccagcggaggatcccatcagcaccgccgcttgcctgagggcgatgggggtccgcatcagcccgatcgaagccggcggtctcgtcaccgttgagggagtcggcctggatggactgcaggaaccggctgaagttctcgattgcggcaactccggcaccaccatgcggttgatgctggggttgctggcgggccgggctgggcgtcacttcgtcctggatggcgatgcctcgctgcggcgacggcccatgcgcagggtcggtcagcccctggcctcgatgggagctgatgttcggggccgtgatggcggcaatctcgcccccttggcggtgcaggggcaaagcctgcggggaacggtgatcggaacaccggtggccagtgcccaggtgaaatcagccctgctgctggcggccctgaccgccgacggaaccaccaccgtgatcgagcccgcccagtcccgcgaccacagcgagcggatgttgcgggcctttggtgccgatctggaggtaggaggcgagatgggtcgtcaca

SEQ ID NO: 241420 - DNA, 1327 bp, Unknown
  Bacterial polypeptide expressing nucleotide sequence isolated from the Sargasso Sea
cttgagcggcacaggccaatccgacgacccccgtgagctcaaggccggaggaagcctccagggacgggtgaaggttccaggcgataaatcgatctcgcaccgatcgctgctgttcggcgcaatcgcagagggcaccacaaccattgatggtctgctcccggccgaagaccccctgagcaccgccgcatgcctacgggccatgggcgtcagcatcagcccgatcaccgatggcggcatcgtcaccgttgaaggggttggcctcgacggattgcaggagccagcagaagtgctcgactgcggcaactccggcaccacgatgcgattgatgctgggcctgctggcgggccgcgacggtcgccacttcgtgctggatggcgatgcctcattgcgccgccgcccgatgcgtcgggtgggccaaccgttagcctcgatgggtgcggatgtgcgtggccgtgatggcggcaacctggcgccgctggcggtgcgggggcgccagctgaaaggaacggtgatcggcacgcccgtggccagtgctcaggtgaaatcagcactgctgctggctgcgctcacggccgagagcccgaccacggtgatcgaaccggcccagtccagggatcacagcgagcggatgctgaaggccttcggtgctgatctcacggttggcggcgaaatggggcggcacatcagcgtgcgtcctggagccaccctgcagggccagaacgtggtggtccctggcgacatcagctcggcggctttctggcttgtggcaggagccctgattccaggtgccgatctcaccatcgaaaacgtggggctgaatccaacacgcaccgggatcctcgaggtgctggagcagatgggtgcccggatcgaggtgctcaacccccgcgacgtggcgggcgaaccggtgggcgatctgcgggtgacccacggcccgatgaaacccttcaattttggcgagcagatcatgccccgcctcgtggatgaagtgccgattctcagcgtcgccgcctgtttctgcgagggcgaaagccggatcagtggagcgtctgaactgcgggtgaaggaaaccgatcggctggcggtgatggcgcgtcaactcaaggccatgggggccgacattgatgaacatgaggacggcatgaccatccgcggcggtcgaccgctcaagggagccatgctggacagcgaaaccgatcaccgggtggcgatgagcctcggcgtggcggccatgctcgccgacggcaactcgagcctggcgagaagcgaagctgcagccgtgtcgtatccctcgttctgggacgaacttgaacggctccgctgctga

SEQ ID NO: 241421 - DNA, 850 bp, Unknown
  Bacterial polypeptide expressing nucleotide sequence isolated from the Sargasso Sea
attaattataaagctggagtatctgcgcaactcaaaagtgcagctattttagctggattgaattcttttggcaatacagaaattatcgaaggagaaaaaagcagagatcacacagaaaatatgttgttacacaattcaaattctataaaaataaaaaaaggtaaaaaaaaaattattaaaatttctggaaaaaaaaatttaaatcctatcaatataactgttccgggagatccttcttcagcagctttttttactgccttaactttgttaaacaagaattcatctcttaaaataaaaaatgtgggtatcaatccaactagaacaggtttttatgaattactcaaaaaaagtggggctaaaattaaaattacaaataaaaaaagaaaaaataatgagatgagtggagatatttttattaaaagtcaaaaaataaaacccataatagcttctaaagaatattatgttaaagctactgatgaatatccaatattgtttattatttcggcattaacaaacggaacatctatttacaagaatgtagatggacttaaaaataaagaatcagatagaataaaagaaatgcaaaaagttttaagacaagttggaataaaaactttattatctaaaaatgaattaaaaatttttggaaaaggcatgattgatggtagaacaaaaaagataatcattccaaatataggggatcatcgtatagctatgagtgggtttatattagcttctttgattggagctcgagcaaaaataagaaattttgaaactgtctttacatcttcaccatcctttttaaaaattatgagatttttgggggcaaaatttgaaaaacaattttaaa

SEQ ID NO: 241422 - DNA, 1318 bp, Unknown
  Bacterial polypeptide expressing nucleotide sequence isolated from the Sargasso Sea
ctggactcaattatggaattcctcgatctcggaccattctctcgtgcgtccggcacggttcgtttgcccggctcgaaaagcatttcgaatcgtgtgctgctgctcgcggcgctcgccgaaggcgaaacgacgatcacgaatctgctcgactccgacgacacccgcgtgatgctcgacgcgcttgaaaagctcggcgtgcgtctgaagcgtgagggcgacacttgtgtcgtgaccggtacgcgtggcgcgtttacagcacgcaccgccgatctgttcctcggcaacgccggcacggcggtgcgtccgctgaccgcggcgctcgcggtgaacggcggcgattatcgtattcacggcgtgccgcgcatgcacgaacggccgatcggcgatctggtcgacggcttgcgccagcttggcgcgaaagtcgactatgaagagaacgaaggttatccgccgctgcggattcgcccggcgcaaatcacggccgacgcgccgatccgcgtgcgtggcgacgtgtcgagccagttcctgacttcactgctgatgacgctgccgctgctgcgcacggaaagcggcgtgaccgtcgtgcaggtggacggcgagctgatctcgaagccgtacatcgagatcacgatcaagctgatggagcggttcggcatcaaggtcgagcgccatgaatggcatcgcttcgtcgtgccggcggggcagcgctatcagtcgccgggcaccatcatggtggaaggcgatgcatcgtcggcgtcgtatttcctcgcggccggcgcgctcggcggcggaccgttgcgggtggaaggtgtgggccgctccagcatccagggcgacgtcggctttgccgatgcgctgatcaagatgggcgcgaacctgcagatgggcgacgactggatcgaggtgcgcggagtcggcaacgacaacggcaagctcgatccgatcgacatggacttcaacctgattcccgacgccgcgatgacgatcgccgtcgcggcgctgttcgccgacggcacgaccacgctgcgcaatattgccagttggcgtgtcaaggaaaccgaccggatcgccgcgatggctaccgagctgcgcaaggtcggcgccaaagtgcaggagggcgaggatttcctcgtcgtcacgccgcctgaaaaattgattccgaacgcctcgatcgacacttacgacgatcaccgcatggcgatgtgcttctcgctcgtgagcctgggtggcgtgccgatccggatcaacgacccgaagtgcgtcggcaagacgtttcccgattatttcgagcgcttcaccgcgctcgctcaaccctgat

SEQ ID NO: 241423 - DNA, 925 bp, Unknown
  Bacterial polypeptide expressing nucleotide sequence isolated from the Sargasso Sea
atgtcagggctcgaaaaacctatcccgatgttatcgacacgcgttactaatctgcgcggccaagcaaaggtgcctggtgataaatcaatatctcatcgatcattaattctaggtgctttgtcgattggaaaaaccaagatccatggtcttcttgagggtcaagatgtcatagacacggcaaaagcaatgacctcatttggagcattagttgaaaaacataaaaatggagagtggacagttgatggctttggtgttggaggatttgctgagcctgaaaaagttatagattgtggaaactctggaacaggcgtccgccttataatgggagcaatgtcaacatctgatattacagctacttttacaggagacgctagtcttaacaaacgaccaatggaaaggataacagaacctctaaacctatttggtgcaaaaactttcagtcgaagaagcggtaagcttcccataactgtagttggatctgctgcgcctattccaataacctataaaacaccggtagcctctgcccaaattaaatcggccatactatttgctggtttaaattctcctggaacaacgacggtaatcgaaaaagaaaaaaccagggaccatactgaaaggatgcttcaaggttttggaaccaaaattcaatcggaagaaacaagtgagggaaatataatcaagctcgagggttatcccgaacttaaggcccaggaaataagagtcccaagagatccctcgagcgcggcttttccggtttgtgcagcattgataaccgaagggtctgatatcatagtgaccaatattgggctaaatccaacgcggtctggtttgttcgatactcttaaagaaatgaatgcaaatataaccttcgaaaacgaaaatcttcagggggggaaccaatggccgacatcgagcaaagttcgcc

SEQ ID NO: 241424 - DNA, 580 bp, Unknown
  Bacterial polypeptide expressing nucleotide sequence isolated from the Sargasso Sea
atgaaatttacaatacaaaagggaaatggccttaaaggtgaaatctctgttcctggggacaaatctatatctcatagagcaataatgcttgcttctttggcaaacggaaattcagagatttctggttttttagaaggagaggattgccttgcaactattgaggtattcaaaaaaatgggagtaaatatttcaaaaaatgaagaaaagtttgtagtagaaggtagaggtctccatggacttgcaagcccttctagtcctttagattttaggaattcaggcacttctgtaagattatgttctggagttttagcagctcaacaattttcttcaacacttttaggtgatagctctttatcttcaagacctatgacaaggataactgaacctttagaacttatgggtgcaaacacaataagcacggaagagggcactctcccgataagaatagaaccagtagaatcccttaaatcaattaaatattctttaccagtggcaagtgcacaagttaagtcatgtatattatttgccggtttatattcaaaaggaaacactgagattgaagaaaaggttactactcgag

SEQ ID NO: 241425 - DNA, 1300 bp, Unknown
  Bacterial polypeptide expressing nucleotide sequence isolated from the Sargasso Sea
aatgattagttttaaaattgataatggattaaaaggaaatccaaaaattccgggtgacaaatcgatttctcatagatctattataatcccttcaatctcaaatggtatttgtgaggttaaaaattatttagaatctgaagatgtaattaatactttagaaacttttatatctatgggagtaaaaattattaaaaatgataaaaaattaataatagaaggaaagggtcttaattctttaaaaaaaccaaataaagatatttacttgggaaattctggaactagtgctcgattattaactggtttattgtgttcacaaaaatttgactcaattttaacaggtgattcatcattgtcttcaaggcctatgagcagaatagcagagcctttaaaaaagatggaagctaatattgttactaacaaaggtaaaatgcccttaattattaaaggttgcaatcttgtaaatgcagaaattgatatcaaaataccctcagctcaaattaaatctggtgtcattcttgctgctttgaatacagaaggaataacaaaaattattgaacataatatctcaagagaccatactgaaataatgcttgaagcatttcaggctgatatcaaaattacaagagaagataaaaaaaaaatcattgctattaatggtaaaagagagcttcagtctaaaaatattgatgtacctagcgatctttcaagtagtgctttttttatagtagcatccttaataaataaaaattcacatttaaaattaaaaaatataaacattaatcccactagaaatggaattttaatagctcttgaaaaaatgggtgcaaacattttatattcaaatcaaagaactattaataatgaaaaaatttgtgacattgaagtttatacttctgatcttaaaggatgtgatctacacgcagatgttgcaaatttaatgatagacgaatacccaattctttcaattgcagcatcatttgcaaactcaccaagtgtttttagaggattgggtgaattgaaggttaaagaaagtgatagattaaaacttataaatattaatttacttaattgtggagttgattgtaaaataattgatgacgatttacatatttttccaagtaaaaaatttgaaattaaaaataatactattaaaacagattttgatcatagaattgctatggcttttgctgtaatgggttcaaaaataggtccattaaatattaaagaatctaattcaattaatactagctttccttcttttgttaatgagttcaataccattggtggtaaaatttcttga

SEQ ID NO: 241426 - DNA, 736 bp, Unknown
  Bacterial polypeptide expressing nucleotide sequence isolated from the Sargasso Sea
ggcggcgggcgacacccgcatccacatcaagggggagctggtctccaagccctacatcgacatcaccctgcacatcatgaagcagttcggggtggtcatcgagcacgacaactacaagctgttctacatcaagggcaaccagagctatgtcagcccgggtgacttcctggtggaaggggatgcctccagcgcctcctacttcctcgcggcgggcgccatcaagggcaaggtgcgagtcaccggcatcggcaagcacagcattcagggcgacatccacttcgccgacgtgctggagaagatgggcgcgcgcatcacctggggcgatgacttcatcgaggccgagcaggcgccgttgcacggcatcgacatggacatgaaccacatccccgatgcggccatgaccatcgcagttgccgcactgttcgccgaagggcccacctcgattcgcaacatctacaactggcgggtgaaggagaccgaccgcctgcacgccatggcgaccgagctgcgcaagctgggcgtcgaggtggaggaggggcgtgacttcatcaccgtcaccccgtcagcgcagctcaagcatgcggccatcgacacctacaacgaccaccgcatcgccatgtgcttctcgctggtggcgctgtccgataccgccgtcaccatcaatgatccgggttgtacctccaagaccttcccggactacttcgacaagctggccagcatcagtcagcgcgcgtga

SEQ ID NO: 241427 - DNA, 877 bp, Unknown
  Bacterial polypeptide expressing nucleotide sequence isolated from the Sargasso Sea
atggggttaaatggtaccccacagatacctggtgataaatctatttcgcataggtccataataataccatctatatcagagggaatttgtgaggttactaatattttaaagtcagatgatgttatgcatacattaaaggctttttctttaatgggtgttaaaatagaagaaaaagatcaaaaaattataatatatggaaaaggtttaaagtcactaaaaaaaccaagcacttatatttacctgggtaattcaggaactagtgcaagactattaacaggtttacttgcctcacaaaattttgaaactgaaattaaaggagatgactcactttcatccagaccaatgaatagaatgtctgagccattaaaaaagatggatgcaaatattactaccaccaatggatgtttaccaattaaaattcatggaaaagaacttaaatgcactaatattgaggttaagattccatctgctcagataaaatctggaataattctagcagctttgaataccattggggtaacaaaaataactgaaaatttcataacaagagatcacacagaaataatgttagaatcatttggtgctggtatagaaattaaaaaagaaggaaaaaagaaaattattgcaattgaaggtggtagagaactgaaatctaaaaatattgaagttccatgtgatttatcaagtagctctttttttattgttgccgcattgataaatgaaaactcaaatataaaactgaataatattaatattaatcctactagagacggaatactaatcgctttagaaaaaatgggtgctgatataactatatataataagcgaaaaaaaaataatgaaatgatttgtgacattgaagtcagaagctcaattc

SEQ ID NO: 241428 - DNA, 1246 bp, Unknown
  Bacterial polypeptide expressing nucleotide sequence isolated from the Sargasso Sea
aatggcaattagcggaacattaaatcttcctggagataagtctatatcgcaccgtgcattgatgctagcatccctagcaaatggcagatctgagcttcgtaatttatccactgcagatgatgtagtttctaccatatcgtgcttgaaaagttgtggactaaaatacgataggacttcaaatggtgtaattataaatggtggaaattttgtagaccctgatcaaccgcttgattgcgggaattctggaaccactatgcgtctgcttctagggcttttatctggccaaggaattaatgcaacacttattggtgatgaatccctatcaaaaaggcctatgaaaagaataattaacccattaaaacaaatgggattaaaaatcattagtaaggattataaatctcctataaaaatacaaaaaagcaaattgaatggtataagctataactctccaattgcaagtgcacagatcaaatcatctctcttgttttctgggttaggggcagccggaactacaatgattactgagccgatattgtccagaaaccattctgaaataatgcttaataatcttggcgccaagataaaaactaatgatttgtcaataagcataactaaaagcaataattttagtccgttgaacctgactataccctcagatacttctacagcatcattttttattgctgcagcaatcttaatttcagattcaagaataaaattcaataggctcttattaaaccctacacgaacaggtttcttaaatgctataaaaaaaatgggctgtacaataaaatttatagatacgtctatcgaaaatggggaaaaaattggaaacgtagaggtgtatcatcaaaaacttaaagggattacaatagataaaagcgatgtcccttcaattattgatgaattacctattttagctcttatggcaacccaagcccatggaataacaaaagtctatggagctgaagagctaagggttaaagaatctgatagaatagcagctatatgtgataatcttaaaaatatgggcgcagatgtagaagagctagatgatggatttatcattaaaggccctacaaaacttaatggtgcattaattaaaacttatgatgatcatcgcattgcaatgacgtttgaaattgctgcattgatagctgagggtaaaacacaattagataataattcgtgtatatctatttcattccctgaattttattcaacattagaaagtatcttgcaatga

SEQ ID NO: 241429 - DNA, 709 bp, Unknown
  Bacterial polypeptide expressing nucleotide sequence isolated from the Sargasso Sea
ttgtttttacagaaatcttatcaagtaattaatttgaaaatgaataatatccgcacaataaaaggtggagttaatttaaaaggaaaagtaaaagtacctggagataaatctatttctcatagagctctaatcataggaagtattgctaagggtgagacgactattgaggggttcttacattctgaagatccactttcaactgctgattgtctgagaaagttaggtgtaaacataccagaaataaaaaaaaatgagccttttacgatttcaggattgggtcttgatggatttaaagagcccaaagaaattctaaattgtggaaattcgggaacaaccatgagattattaatggggttacttgcagggcaagaaggcaagaatttcatcttaactggtgacgtttctcttaatgaaaggccaatggggagagtaggcaaaccattatccttgatgggtggcaaaatttttggtagagaaaaaggaaacaaagctccaatctcaattcatgggaataaattaaaagggtgtgttataggaacccctgtagcgagtgctcaagtaaaatctgcaatcttattagcaggcctcaaagcttctggaaccacttctgttattgaaccagcatcttcaagagatcatactgaaagaatgttaaaagcatttggagctgacatcagtatcagaggagaattaggaaggaatgtagtat

SEQ ID NO: 241430 - DNA, 1351 bp, Unknown
  Bacterial polypeptide expressing nucleotide sequence isolated from the Sargasso Sea
ttgtttttacagaaatcttatcaagtatttaatttgaaaatgaataatatccgcacaataaaaggtggagttaatttaaaaggaaatgtaaaagtacctggagataaatctatttctcatagagccttaataataggaagtattgctaagggtgacacgactattgaggggtttttacattctgaagatccactttcaactgctgattgtcttagaaaattaggtgtaaaaataccagaaataaaaaaaaatgagccttttacgatttcaggattgggtcttgatggattaaaagagcccaaagagattcttaattgtgggaattcgggaaccaccatgagattattaatggggttacttgccggtcaagaaggcaagaattttatcttaacaggtgatatttctctcaatgaaaggccaatggggagagtgggtaaaccattatcgttgatgggtggcaaaatttttggtagagaaaaaggaaacaaagctccaatctcaattaatgggaataaactaaaaggatgtgttattggaacccctgtagcgagcgctcaagtaaaatccgcaatcttattagcaggcctcaaagcttctggaaccacttctgttattgaaccagcatcttcgagagatcatactgaaagaatgttaaaagcatttggagcagacatcagtatcagaggagaattaggaagaaatgtagttatcaagtcagggggtaacttaattggccagagaatattgattcctggggacataagctctgcttctttttggatgattgctgcatctattgttccaaattcagaggttttaattcagaatgtcggattaaatcccactagaacagggattttaaatgtaatggattcaatggggtgcaattatgagattttagataaatcgactattgcaggtgaacctattggatctattaaagtaaagacttcaaataatttaagatcatttactattgaaggagatattctcccaaaacttatagatgaaattcctatccttactgttgctgcctgtttttgtaatggagtttctgaaattaaagatgcacaagaattaagagttaaggagacagatcgattaaaagtcatggcacgacagttacaaaaattcggtgctgaaataacagaaaaagaggatgggttaattattaatgggcaatcaaaatttcattctgcggaagtagacagtgagacagatcatcgagtagcaatgagtcttgctattgcttcacttcttgctaaaggttcctcaagaatcatgagggcagatgcagccagcgtctcttatcccactttttgggaagagctggccaaactaactaattaac

SEQ ID NO: 241431 - DNA, 1285 bp, Unknown
  Bacterial polypeptide expressing nucleotide sequence isolated from the Sargasso Sea
tttgtttttacagaaattttatcaagttattaatttgaaaatgaataatatccgcacaataaaaggtggagttaatttaaaaggaaaagttaaagtacctggagataaatctatttctcatagagctctaataataggaagtattgctaagggtaagacgactattgaggggttcttacattccgaagatccactttcaactgctgattgtctaagaaagttaggtgtaaacataccagaaataaaaaaaaatgagccttttacgatttcaggattaggtcttgatggtttaaaagagccaaaagaaattctcaattgtggaaattcaggaaccactatgagattattaatgggtttattagcctcacaagaaggtaagaatttcatcttaactggggacgcttctcttaacgaaaggccaatgagaagagttggcaaaccgttatctttgatgggtggcaaaatttatggaagggaaaggggtaacaaagctccaatctcaattgatgggaaaaaacttaagggatgtgttattggaactccagttgcaagtgctcaagtgaaatctgcaatattattggcaggcctcaaagcttcaggaacaacttctgttattgaaccagcatcttcaagagatcatactgaaagaatgttaaaagcatttggagcagacatcagtatcagaggagaattaggaagaaatgtagttatcaagtcagggggtaacttaattggccagagaatattgattcctggagacataagctctgcttctttttggatgattgctgcatctattgttccaaattcagaggttttaattcagaatgtcggactaaatcctactagaacaggaattttaaatgtaatggattcaatggggtgcaattatgagattttagataaatcgactattgcaggtgaacctattggatctattaaagtaaagacttcaaataatttaagatcattcactattgaaggagatattctcccaaaacttatagatgaaattcctatccttactgtagctgcctgtttttgtgatggagtttctgaaattagggatgcacaagaattaagagttaaggagacagatcgattaaaagtcatggcacgacagttacaaaaattcggtgctgaaataacagaaaaagaggatggtttaattattaatgggaaatcaaaatttcattctgcggaagtagacagtgagacagatcatcgagtagcaatgagtcttgctattgcttcacttcttgctaaaggcacctcaaaaatcatg

SEQ ID NO: 241432 - DNA, 1351 bp, Unknown
  Bacterial polypeptide expressing nucleotide sequence isolated from the Sargasso Sea
tttgtttttacagaaaacttatctagtaattaatttgaaaatgaataatatccgcgcaataaaaggtggagttaatttaaaaggaaaagtaaaagtacctggagataaatctatttctcatagagctctaataataggaagtattgctaaaggtgatacgactattgaggggttcttacattctgaagatccactttcaactgctgattgtctaagaaagttaggtgtaaatataccagaaataaaaaaaaatgaaccttttacgatttcaggattgggtcttaatggattaaaagagccaaaagaaattctcaattgtggaaattcaggaaccactatgaggttactaatgggtttattagccgcacaagaaggtaagaatttcatcttaaccggggacgattctcttaacgaaaggccaatggggagagttggtaaaccattatctttgatgggtggcaaaatttatggaagggaaggcggtaacaaagctccaatctcaattgatggaaaaaaacttaagggatgtgttattggaactccagtggcaagtgctcaagtgaaatcggcaatattattggcaggcctcaatgcttctggaactacttctgtaattgaaccagcatcttcaagagaccatactgaaagaatgctaaaagcatttggagcagacatcagtataagaggagaattaggaaggaatgtagttatcaagtcagggagcaacttaattggtcagagaatattgattcctggagatataagttctgcttctttttggatgattgctgcatctattgttccaaattcagagattttaattcagaatgtcggattaaatcccactagaacagggattttaaatgtaatgaattcaatggggtgcaattatgagattttagataaatcgactattgcaggagaacctattggatctattaaagttaagacttcaaataatttaagatcattcactattgaaggagatattctcccaaaacttatagatgagatacctatcctaactgttgctgcctgtttttgtaatggagtttctgaaattaaggatgcacaagaattaagagttaaggagacagatcgattaaaagtcatggctcgacagttacaaaaattcggcgctgaaataaccgaaaaagaggatgggttaatcattaatgggcaatcaaaatttcattctgcggaggtagatagtgagacagatcatcgagtagcaatgagtcttgctattgcttcacttcttgctaaaggtacctcaaaaatcataagatctgatgctgctagcgtctcgtatcccactttttgggaagagctggcaaaactaactaactaa

SEQ ID NO: 241433 - DNA, 843 bp, Unknown
  Bacterial polypeptide expressing nucleotide sequence isolated from the Sargasso Sea
tttggtttgggaaatgaacattttgttataagaataaaaaactttcgacaaatattaggtaaaaatcatttagaaatttataaattatccagaaaccatattgaagatcaatgcaaaggtttatctcatgttgaacaaatcaacaggaatagtgcctctaaaataataagttctaattctgcaagggttcaagaagctctaagagttattgaagaattttcgaggattcataatagtaaactctctaaaatagcttccgagattagatatgaaatttacactttagaaattgaactattaaatttcaatactcgtaagagagcacaactaataattagaaaaaacaatttatattccataacagaccaaagagaaaacttattagaaataattgaaaaaatattgttaggaggggtaaaaataattcagcatagatttaaagaaggtaatgataaagaccatctcaaagaggcaattgaaataaataacttatgtaagaaatataattctttgttcatcgttaatgacagattagatatagcaatggcatcaaatgccgatggtgttcatcttggtcaaggcgacctagatataaaaactgtaaggaaattacttggtgcctcaaaaatcattggagtttcagccaacaattcaactgatatcaataaggctgtaaaagatgaatgcgattacattggggtcgggccagttttcccaacattaacaaagaagaataaagaatctctcggtgtagaaaaaattaaggccttaacaaaagatcttaatattccttgttttgcaataggaggaattaataaattaaatatctcttctctaaaaaat

SEQ ID NO: 241434 - DNA, 475 bp, Unknown
  Bacterial polypeptide expressing nucleotide sequence isolated from the Sargasso Sea
tttggtgagctccccggcgttgacgttggacaagctcgaagacgcccttcgcgccggcgtgacgatcgtgcagatgcgagacaaggacgcatccacgcgagagctcgtcgaacgcgccaaggcgatgaaagccgtctgcgacaagtattcggtccctttcatcgtcaatgatcgatgcgatatcgccgtcgcgtgcgacgcggacggcgtgcacttgggtcaatcggacatgacgtgcgtcgaggctcgacagatcctcggtccgaacaaatggatcggcgtgagctgtcgagaggagagcttggcgcgcgccgccaaagccgacggggcggattacgtcggctgcggcgcgtgtttcggcacggattccaagggcgacgccaaggtgatcggcgtcgacggcgtcgcgagagtcgccgccgtcgctcgcgagttatcgcttccgatcgtgggcatcggtgggatctctcccgag

SEQ ID NO: 241435 - DNA, 867 bp, Unknown
  Bacterial polypeptide expressing nucleotide sequence isolated from the Sargasso Sea
cgcgatacgatggtgacgcgcgcggaagagctgggagaatgggggtgtgagtgggtgcttctcaagggagggcacgtggacgatgatgaggcgacgtcggtggattatttgtatcattcaaagacgaagacgacgattccgtactcgggcgaacgaattccgacgacgaacacgcacgggaccggatgcacgctggcgagctcgatcgcggcgtctttagcgcagggatacgacgttccgacggcggtacaacgagccaaggcgtacatctcggaggcgattcgaacgaatccgcgatacggcgccggtcacggtcctctgaatcatcttccgttttactcggcgacggcggcgacgggtaagcggttcgatgcgagcgttttacgactctatttggtgagctccccggcgttgacgttggacaagctcgaagacgcccttcgcgccggcgtgacgatcgtgcagatgcgagacaaggacgcatccacgcgagagctcgtcgaacgcgccaaggcgatgaaagccgtctgcgacaagtattcggtccctttcatcgtcaatgatcgatgcgatatcgccgtcgcgtgcgacgcggacggcgtgcacttgggtcaatcggacatgacgtgcgtcgaggctcgacagatcctcggtccgaacaaatggatcggcgtgagctgtcgagaggagagcttggcgcgcgccgccaaagccgacggggcggattacgtcggctgcggcgcgtgtttcggcacggattccaagggcgacgccaaggtgatcggcgtcgacggcgtcgcgagagtcgccgccgtcgctcgcgagttatcgcttccgatcgtgggcatcggtgggatctctcccgag

SEQ ID NO: 241436 - DNA, 853 bp, Unknown
  Bacterial polypeptide expressing nucleotide sequence isolated from the Sargasso Sea
atgaggcgagggtggttggcagcctatttgtcggagctaaacagatacgcaaatacgacaagtaaaaaaactgtaacaagcgtattttttggtggaggaacgcctagcctaatgggttctcaaacattgggtgaaataattacggttatcaaagatctctggaacttatgggaaaatgccgaagtcactttggaggccaatccgtcttctgtagaaaaaaacaaatttattgaatttcagaaaaacggtgtaacccgtttatcgctaggcgtgcaaagtctagatgaagattccttgttgttcttgggcagaaaacactcagcctcggaggctagggaagcagctgttttagccagcgaagtttttgaaaggttttctttagatgtgatttatggactacccggtcagtctttacataaatggaaaagggagctggctgagatattaaaactggttacaactcatatttcagcatatcagttaaccattgaaccggggacacagttctcaagagataaagtggagacctcgggtgaagctgttgagaggaaattgtttgattacacttgcgacttttttgaaaaggaaaatttaaccgcttatgaagtatctaactttgccaaaccaggacacgagtgtttgcacaactgcacttattggacaggtgacgattacataggtgtgggccccgggtctcatggcaggttaacaaagcctgacattgattcattggaaatccagacctatgccacccttggaataaagtccccaaaaaagtggttggaaaacgtagaagaaaaggggtcgggggatcttagaagtacgaaattgaaactttccgagagaattgatg

SEQ ID NO: 241437 - DNA, 451 bp, Unknown
  Bacterial polypeptide expressing nucleotide sequence isolated from the Sargasso Sea
atgaaagaaaataaacttgaggttattattggagcctgtgtgctcgcagttgccttaggttttgtaatttttctttatcaaaaaactggtttttcagtgtcgaactctagacattatgagctaaaagcggattttagatcagccgatggaattcacgttgggaccgacgttcgtttagcgggcgtcaaagttggtactgtaagtaatttggaccttaacttgcaaacttatagagctgaagccgcttttgctattgaaaataaaattgatattccagatgacagtgctttgacggtaagttctgaaggtttattaggtgggaattttatagaaattataccaggtgcttcgtttgagtacatgcagccaggagacgagtttcttgatacacagggctctgtaagtcttatttcgttgttactgaaatttgtttcaggaagcgataattgaa

SEQ ID NO: 241438 - DNA, 628 bp, Unknown
  Bacterial polypeptide expressing nucleotide sequence isolated from the Sargasso Sea
atgacaaaaatatatctaatatctccagaagactttgctttggatgattttaatgcgcgacttgaaaacttgctgcaaaaatttgatattgatatttttcaactcaggattaaaaacaaaagtcattccgaagtaaggcagtatgctaaaaagttgttggatagctgtaataaatatggctgcaagtttataattaacgactatgctgatatagctctggaaattggtgctcatggagttcacgtcggccaagatgatattgatatttcgcaaatcagaagtcgcgctcagaataaagatttcattattggagtgagttgctatgactctattgatattgccactgactacactaaaaaaggagctagctatgtatcatttggaactttttttccaagcaataccaaaaactcccatggtaaacctgatattacaattattccaaaaatgcgtaaatgttatgatgtgccgatagttgccattggcggcatcgattcagataattgcgggcagttagttaagaataaagttgattatctagccattatttcatacatatggaataatccactgggagaagaaaaagcgatgcaaaatctcttaaataaattaaattctatcgattaat

SEQ ID NO: 241439 - DNA, 620 bp, Unknown
  Bacterial polypeptide expressing nucleotide sequence isolated from the Sargasso Sea
attgaaaaaaaatagattaaataaaaaatttgtttatttaatttctcctaataaaattaaagaaaacttattttattacgatcttgaagaagttctaaaaacaggaaaagtaaagtattttcaaatgagatttaaaaagaaaaatttaaaaagaaaaatatttattggaaaaaaaattaaaaaaatttgcaaaaaatataatgtaaattttttagtcaacgatgacccttggttagcaagaagattagaatctgatggatgtcacttgggtcaaaaagatatgaatattatagaggcaaggaaaatcttgaaaaataaaataatcggaattacttgtcacaattcaattaatttaattaataaagcaataaaaaataaagcaagttatatagctttaggagcatttttttcttcttcaacaaaaaaagttaagtttaaggctagcgtagatttattaaattatgcaaaaaatattacaaatataccaattgtggctattgggggaataaaattttcaaattataaaaaacttttattgaataatgcaaactttttagctatctcaggctacatttggaataataaaaaatataaaccagtagatgcaataaaaaaattaa

SEQ ID NO: 241440 - DNA, 732 bp, Unknown
  Bacterial polypeptide expressing nucleotide sequence isolated from the Sargasso Sea
gtcacaatactaagctttctaaaatagcttcagaaattagatatgaaatttatactttagaaattgacttattaaatttcaatactcgtaagcaagcagaattaataattagtgaaaataatctatattgcgttactgatcaaaacaaaaacttgcttgaaataatcgaaaaaatattatctggaggagtaaaaattattcagtatagatttaaagagggtaatgatatagaccatctaaaggaggcaactgagataaaacaactatgtaaaaaatataaatccttgttcatagttaatgacagaatagatatagcattagcatctaatgctgacggtgttcatcttggccaagatgatatggatataattaatgcgagaaaattactggggagctcaaaaattattggtataacagcaaataattcaaatgatataactaacgctataaaaaacggatgtgattacattggaattggtccagttttcaaaagcccaacaaaaaagaataaaaaacctctaggtatagagaagattaagtctttaacaaaagatcttgatttaccttggtttgctataggaggtattaataaaaataatatttcatctctaataagtaaaggaattaaaaaggttgcagttatttctgggctcttagattctcaagatcctagagaagaagctattattattttaaaagaattatcttatgaaaatcacagtaaacggtaag

SEQ ID NO: 241441 - DNA, 679 bp, Unknown
  Bacterial polypeptide expressing nucleotide sequence isolated from the Sargasso Sea
ctgagcgcgcgccggacagacagcgccggcgacgattaccgctgtcggctgtacctgatcagcccgcccaatctcggcggcgacaggctgactaatttcgcagcagcactcgagagcgcgctgggggccggcgatgtcgcctgcctgcagctccgtctgaaggacgtcgacgaggcgccggtggacgacgatgagatcaggcgggctgtgcgcgctctgatgccggtgacccgcgaacatgacgtggccttcattctcaacgaccgcccggacctctcgaccgaactgggctgcgatggggtgcatgtgggccaagacgacgcctcctatgcccaggcccgcgcgatattgggcgacgatgcgatcgtcggcgtcacgtgccacgattcgcgccatctcgcgctcgaggccgcggaggccggcgcagactatgttgcctttggtgccttcttcgagaccggcaccaagtccccgaagagtcgtgccgggatggatgtcctgacttggtggtccgatttcaccgaggtgccctgcgtggcaatcggcggtataagcgccgacaattgccgccccctaatcgcggcaggcgctgactttcttgccgtttccgcaggcgtatgggcccatcccaacggtcccgccgcagcggtctgcgcattcaacgcagcctttagctgag

SEQ ID NO: 241442 - DNA, 598 bp, Unknown
  Bacterial polypeptide expressing nucleotide sequence isolated from the Sargasso Sea
gaagttcgtcgacttgttaaagcggcgattgctggcggcgacatctcggcgctacaagtcaggatcaagccggaaggtgttgtcgacacggcggcgacgcgcaaagtcgcgcaagccgttcagtcgctgtgccaagtcaatcaaatcgcgctaatcatcaatgacagcccgcaattgtgtcgcgcgctcaacgccgacggcgtccatctcggcatggatgatatggatatcggccaggctcgcgagattgtcggcgacgacgcaatcatcggtgcgacgtgcaagaacagccgacaccaggccatggttgcgggtgaaagcggcgcagactatgtcgcgtttggcgcgttctactctaccgacactaaggccgacacaattcgagctgagcctgacgtcctgacctggagccagatgttcctcaccctgccctgtgtggcgattggcgggatcacgaccgaaacagccaaagatctcgtcttagcgggcgcggactttttggcggtatcatctggggtttggaaccatccggacggtcccgccgcagcggtcgatatgttcaatcgggcgattgatcaggcgatggcggagaactaga

SEQ ID NO: 241443 - DNA, 1057 bp, Unknown
  Bacterial polypeptide expressing nucleotide sequence isolated from the Sargasso Sea
atgctaaattccaatcctaaagacgctgaagatttaagaatttatcaaattattgacgctaatctagatagagccagagaagggctaagagtattagaggattgggctagatttggcctaggcaaagaaaaatatgttgaaaagattaaaaattttagacaaattttaggaaaaaatcatttagaagtttataaacaatctagaaatcacattgaggacaaatgtaaaggattgactcatcgcgagcaaatcaatagaaaaacttctgagcaaattataagttctaattcagcacgagttcaagaagcattacgagtcatagaagaattctcaaggctacagaatcatgagctttcaaaaatcgcttccgaaattagatatgaaatttatactattgaaattgacttattaagtaatagcaagtttaagaagtcagaggaaatattaaaagaaaatgatttatatgtaatcacagatcaaaaagacaatttattagaaataatagaggaaattttaattgctggagtaagaattattcaacatagatttaaaacgggaaccgatcaagatcatcttcaagaagcaattcagattaaaaatctatgtaaaagatataattcactgtttatcgttaacgatagacttgacatagctctagcatctaacgctgatggaattcatcttggacaagatgatttagactcaaaaacggcaagaaaactattaggatattcaaagattattgggataagtgcaaataatgaagttgatatctcaaatgctcttagagatggttgtgattatataggcataggaccaatatttgaaactgcaacaaaaaagaacaaaaaacctataggtattgaaaatatcaaaacattaacaaaagatttaaatattccttggtttgctatcggaggaattaaatcaaataatatttcatatttaaaaagaaatgggtttaaaaaagttgccttagtttcggaattaatgaattctgaagatcctaaagaagacgctatgatgattttaaaaaagttgtctcatgaaaattagg

SEQ ID NO: 241444 - DNA, 883 bp, Unknown
  Bacterial polypeptide expressing nucleotide sequence isolated from the Sargasso Sea
gcatcacgacagctacaagcaggcccgctccaccagcaccgacaccggggccggactggagcatccggcccaactcgatcgccacagccccgaccacgtggtggcggccaactgcgcccgggtgcaggaggcgttgcgggtgctggaggagtacggccgcaccatcgatcctgcgctggccgctgaagccgcagcgatccgctacgggctttacgacctggaggtgacctgcctcaacgccaccctgggagcacggcgacgcaacaaactcaaggacgctcgcctctgcctgatcacgaccccctgcgatgacctgagcgatcgggtggaggccgccctgcggaacggcgtggggatggtgcagtaccgctgcaaagcggggaacgaccgcgaacgcctgcgggaagctcagcagctcaggcagctctgcaaccgcttcggggcgctgttgttcatcaatgaccgtgtggacctggccctggcggtggatgcggatggcgtgcacctgggccaggacgacatgcccagcgaggtggcccgcgatctgttgggcgttgatcgtctgctgggccgcagcacccacagcatcgatcaggttcatcaggctcagcaggagccaatcgactatctcggatttggcccgatccattgcacggccgtcaaacccgagcggaagcccgttggtgtggagctcctggcgcaggccactgcgatcagccaacgccccgtcttcgccatcggtggaatcacctcggccaacctgccagcactgctcacggcaggtggccagcgcgcggccgtgatcggcgcgatcatgcacgcagatgacagcggtctggcctcgcggcaactgctccagcagctggaccacgccacgttctga

SEQ ID NO: 241445 - DNA, 418 bp, Unknown
  Bacterial polypeptide expressing nucleotide sequence isolated from the Sargasso Sea
tatgagcaagaataaatcattaacaaaattatatttaatttctccatctgaaataatagttaatgaatttgaaaaatctttagaattggttctaaaaacaggtttggtatcctgttttcaactgaggcttaagaatatagaagatgattttataatctctgcttctaaaaaacttattccaatatgtaaaaaatataatgttccatttatattaaatgataggttagacctcgctaataaaatgaatgctgatggggtacatttaggagaaagtgacggtagtattttggaagctagaaaattattaggtacaaaagcaataataggtgcttcatgttataattctaaacatttagcaatggaggctgccgaaaaaggggctgattacgtagcatttggtgcttttttgaaactacta

SEQ ID NO: 241446 - DNA, 604 bp, Unknown
  Bacterial polypeptide expressing nucleotide sequence isolated from the Sargasso Sea
tttgaagaaattagtatacttaatttcacctaataaaattgataagaatttctttgctagtttagataaagtattgtcttttaagaatgtgaagttctttcaattaagattaaaaaatttgagtcaaaaaaaacttctttatttctctaaaagaattataaaaataaccactaagcataaagttaagtttatcattaatgataattttattttagcagcaaaaataagtgctgacggatgtcatatgggtcaacacgatggatcgtttttaaaagctagaaaaaaactcaaaaacaaaatatttggtatcacatgtcataactcaaaaaaacttgcaattaatgcaattaaaaataatgcaagttatattgcttttggatctttttttaaatctaaacttaaacaaaatgcaataaaggccaatcttaatattttgagatgggcaaaaaagaacataaaaaaacctattgtggcaataggtggaataaataataaaaattacaaaaaattaataagagcaggagcaaaatatattgcaatatcaagttttatttgggataaccccaaattaaaaccggaacttgcaattagaaaattcaaatga

SEQ ID NO: 241447 - DNA, 604 bp, Unknown
  Bacterial polypeptide expressing nucleotide sequence isolated from the Sargasso Sea
ttgaaaaagttagtatatttaatctctccaaataaaattcataatgatttttatgataatttaaaaaaagttttatctaaaaaaaatgttaatttttttcaattaagactaaaaaaagtaaaaaaaaataaaattattaaaatagccaaaaaagtaagaaagattacaaaaaaatataaagttaagctcataattaacgacaatattaataccgcaaagattgtgaaggctgacggatgtcatctaggtcaaaaagatggttcggtaatagaggcaaagaagtatcttaaaaataaaataattggcataacttgtcataattctaaattattagctaaaattgcagttcaaaataaagctgattatttagcctttggatcttttagtaaatccaagctaaaacctaacgctaaaaaagccaatttaaatattttaaaatgggcaaagaaaaatataaaaaaaccaattgttgctataggtggaattgacaatttaaactacaaaaaattcataaaatctggagctaaatatattgcaatatcgagttatatttgggataacccaaaattaaaaccagaaattgcaattagaaagtttaaatgaa

SEQ ID NO: 241448 - DNA, 631 bp, Unknown
  Bacterial polypeptide expressing nucleotide sequence isolated from the Sargasso Sea
catgccaaaatcagggggaatttatgtaattagcgattacagaaatcgtaagactgatgaatttttagaaataacagaaaagatacttaatgctggcatatcactttttcagtttcgcgataaaaactcaaaatatgcaacaaaaagaatgttagcaaaaaaattacaggcactttgtaaaaaatataaaactccatttattatcaatgatgatgtagaactagcaaaggaaatctccgctgacggagttcatctaggtaaatatgatatgaaaattaaagaagctaaagaaattctcggtaaaaaaataattggggcttcatgttacaacaatcttgaatttgcaatatccgcagaaaaatcaggggctagctatattgcatttggatcgttttttaattctcagacgaaaccatacactaatagtgtcggggttgaattgcttattaaatcaaaattaaaactaaaaataccaatagttgcaattggtggaataacaccagaaaatggtaagcagcttattaaaaataatgctgattttttagccgttataagtggaatttatggatcatcgaatgtagaaaataatgttttagcatataaaaaattgttttgcccatcattaaaatga

SEQ ID NO: 241449 - DNA, 1573 bp, Unknown
  Bacterial polypeptide expressing nucleotide sequence isolated from the Sargasso Sea
tctgtcgcccgtgacggactcacgtcctgtggtctggaccatcgccggttccgactccggcggcggcgccggtattcaggccgacttgcacacattgcacgacctcggtgtgcacggctgctcggtcatctccgccatcaccgcccagaactcggtggcggtgaagatggttgaccccgtgctgatgcagaccttcaccgcccagatcgacgccctcggcgtcgatctaccgcccgccgccatcaagatcggcctgctgccgacccggcttcacgtcgaggtgctggcccgtcgactggcggccaccccggcccccttcgtggtctacgacccggtggccatcgccagcagcggcaccccgatggcggagcccaatatgctggcggcggtgcgcgagcagctgttgccgcgcctctccttgatcacccccaacggccccgagctggaggccctgaccggttggccggtcagcagcccagaactggtgcgcctcgccgcccggcggctgcgtgaactgggcgcccgcgccgtgctggtgaaggggggtcatcttgagtggggcggggagctgtgtctggactactaccaggacgagacccgcgaattctggctcgccgcaccgcgcctcgatacccgccacggtcacggtaccggctgctgctacgccagtgccatcgccgccgtggtggcgcaggattatccggtggaagacgccatcaccctggcgcgcgcctacctgcaacaggggctggcggcggcgcaaggagtgggcgcaggccccggccccatcgcccatctcggctggcccgccgatcttgcccatttcccccgtgccgtattggcgggttcaaccctcgatcgccgcttcggactttatgagacaagcagtgcccgcctgccgcagggccccttcgcgccaactgaacacaacctcggtctctatccggtggtggactcggtcaagtggctgcgccgcctgctggggcagggggtcaagaccatccagctgcggatcaagaatctgcccgccgctcaggtagcaccggccattcgcgatgcggtagcgctcggtcgccgccatggggcgcgactctttatcaacgactactggcagcaggccatcgaggcgggcgcctggggcgtgcatctggggcaggaggatatggagaccgccgatctcgccgccatccaggccgccgggctgcgccttggcatctccacccacggctacttcgagctgatgcgggcccgcgagctggccccctcctatatcgcgctgggccatatcttcccgaccaacaccaaggtgatgccgtctcgcccgcaggggctggtgcggctgcatcgctaccgcgccctgatgacggagtggccgacggtcgctatcggcggcatcagcgaggaacggatggcggcggtcaaggcaagcggggtcggcagcatcgcgctggtctcggccattaccgccagtgacgactggcagggggcaaccgagcggctgctcgccgccgtgggggcgggggatgagccacgctcggccactgttatacgggaggcagaacatgcgctctga

SEQ ID NO: 241450 - DNA, 625 bp, Unknown
  Bacterial polypeptide expressing nucleotide sequence isolated from the Sargasso Sea
ttgaggcaaaatagaaaaaataagagatttgtatatttaatttctcctaacaaaattcaaaatgagaaattttattctaaactaaatcaagtattaagttcaaaaaaagtaagtttttttcaattaagattaaaaaaagaaagttttaaaaataagatctatattggaagaaaaattaaaaaaatttgcaaaaagtataaggttaaattcataattaatgatgacccaataattgcaaaaatagtcaatgcagatggttgtcatctgggacaaaaggatatgaatatttcaagagcaaaaaaaatattaaaaaataaaattattggtgttacttgtcacaattcaataaacttagcaaagaaagctatttcaaatgatgcaagctatttagcttttggggcttttttttcgtcaaaaacaaaaaaaactaaatataaagcaagtttaaaaatacttacattagctaaaaaattaacaaatattcctatagtggcaatagggggaataaaagatagtaattataaaaaacttttattgaataaagctaactttttagctatttcaagctacatttggaataataaaaaactaaacccaaaagaagctattaaaaaattaaaatgaa

SEQ ID NO: 241451 - DNA, 451 bp, Unknown
  Bacterial polypeptide expressing nucleotide sequence isolated from the Sargasso Sea
gatgaaagaaaataaacttgaggttattattggagccgttgtgctcgtagtcgccatagggttcgttatttttctttatcaatcaactggtctttcagtttcgaactctagacattatgagctaaaagcagattttcgatcagccgatggaattcatgtggggactgatgttcgtttagcaggcgttaaagttggtactgtgagtgatctgagccttaacgtagaaacttatagagctgaagccgagctcgctattgaaaataaagtcgatattccagatgacagtgctttgacggtaagttctgaaggtttattgggtggaaattttatagaaattataccgggcgcttcttatgagtatatgcagccgggagatgaatttcttgatacacagggttctgtcagccttatttctctgttactgaaatttgtttcaggaagcgataattga

SEQ ID NO: 241452 - DNA, 535 bp, Unknown
  Bacterial polypeptide expressing nucleotide sequence isolated from the Sargasso Sea
gttgcgtgataaaaatgcaaccacagcgcaaatgatccaacatgcaaaggcgttgcagccgatattggcaactcaccatgtcccattaatcatcaatgatgatgttgaggcggcgatcgcctgtggtgcggacggcattcatgtcggccaggacgatttggatgtggtacaggtgaggcaaaaggtcggtcgtgacaaaattgtcggcctttcaattgagaccgctgaggcagcgcggattgttgatgcaggaattgtcgactatatcggtatcagcccaatttttgccacgcagacaaagagtgatcacaaaccgcctgttggctttgacgggcttttagatattgttgcatccagccctgtgccatctgtggcgattggtggtttgaatgcaaatcattgcaagaaggtgtttgcggcgggcgctgcaggaattgctgtggtatcagcaatctgcggcaaaaatgatccatttaaagcaacggtggctatacgtcaacagattgatttagttaaagaaaagggatggaaatga

SEQ ID NO: 241453 - DNA, 904 bp, Unknown
  Bacterial polypeptide expressing nucleotide sequence isolated from the Sargasso Sea
atgggttgcgagtcgtccctggatccccgtgtggcaaggctgatcgatgccaatctcgatcgggcccgcgaagggctgcgggtcgtggaggactggtgccgtttcggcctggaacgggatgatctggtgatcagcctcaaggattggcggcagcgtctcggcaagctgcaccgagagcactacaagcaggcccgctccaccgccaccgaccccgcagctggactggaccatccggctcagcttgaccgtcacagtccccgccaggtggtggaagccaactgcggccgggtgcaggaggccctgagggtgctggaggagtacgcacgcagcgtggatgctcctctggccgctgaggccgccgccatccgctacggcgtctacgacctggaggtgacctgcctgaaggccacgggtgggaacagccgtcgcaaccggctgcaggactgccagctgtgcctgatcacggctccctgccctgatctgatcgaacgtgtgacggcagccctgcgcagtggtgtggccatggttcagcaccgctgcaaatcgggaagcgacctggaacgactggcggaagccaaagccctggcggccctctgccaggaccacggcgctctgctgatcatcaacgaccgcattgatctggccctggccgtggatgccgacggtgtgcatctggggcaggacgacctgcccacggaggtggcccgtggcttgatcggacccgaccgacttcttggacgcagcacccatgagctggaccaggtggcggaagcgaaccgagaggactgcgactacctcggccttggccccgtcaacaccaccgccgtgaagccggagcgtccagccatcggtgctgagctggtgggtcaggcgctggccatcacgcagaagccgggttgccatc

SEQ ID NO: 241454 - DNA, 1051 bp, Unknown
  Bacterial polypeptide expressing nucleotide sequence isolated from the Sargasso Sea
atgggttgcgagtcgtccttggatccccgtgtggcaaggctgatcgatgccaatctcgatcgagcccgcgaagggctgagggtcgttgaggactggtgccgtttcggactggagcgggatgacctggtgatcagcctcaaggattggcgccagcgtctcggcaagctgcatcaggagcgctacaagcgagcccgctccaccgtcaccgaccctggtgcgggcctggagcatccggcgcagctcgaccgacacagcccccggcaagtcgtggaggccaattgcggcagggtgcaggaagccctgagagtgctggaggaatacgggcgcaacgtggatgcccctctggccgctgaggccgccgccattcgctacggcctttacgacctggaggtgacctgcctcacagcgaccagcggcaacaaccgtcggaaccggttgcaggactgccagctctgcctgatcaccagcccatgccctgaccttgtcgatcgcgtgacagctgctctgcgcagcggtgtggccatggttcagcaccgctgtaaatccggaagcgacctggaacgactggcggaagccagaaccctggctgctctctgccgtgatcacggcgctctgttgatcatcaacgaccggattgatctggccctggccgtggatgccgatggcgttcatctgggtcaggacgacctgcccacggatgtggcccgtggcttgatcggacccggacgtctcctcggacgcagcacccattccctgaaccaggtggcggaagcacaccgcgaggactgcgactacctgggtcttggtcccgtcaacaacaccgccgtgaagccggagcgtccggccatcggcgctgccttggtgggtgaagcgctggccatcacgccaaagccggtgttcgccatcggtggcatcacccaggccaaccttgatgcgctcgtggcagtggggtgccggcgcgtggcggtgatcggagcgatcatggggtccgacaatcccgaaaaggccagtcagaacctgctgagcagcctgtcgcgcccaaccctttaat

SEQ ID NO: 241455 - DNA, 482 bp, Unknown
  Bacterial polypeptide expressing nucleotide sequence isolated from the Sargasso Sea
catggccgccattgaactggggcgtcgctatgacgcccgcctgtttatcaacgactactggcggctggcgattaagcacaacgcttacggcgtgcatctgggccaggaagaccttgaaaccaccgatctgaaggcgattcaggcggcggggctgcgcctgggtgtatccactcacgatgatatggagatcgacgtcgcgctggcggctaagccttcttatatcgcactcggccacgttttccccacgcaaaccaagcagatgccttcctccccgcaggggctgacgcagctggcaagccatattaaccgactggccgattacccgaccgtcgccatcggcggcatcagcctggaacgtgcaccatcggtgctggcgaccggtgttggcagcattgccgtggtcagcgccattacccaggcggctgactggcaggcagccacggcgcagctgctcgacatagcgggagtcggcgatgaatgac

SEQ ID NO: 241456 - DNA, 637 bp, Unknown
  Bacterial polypeptide expressing nucleotide sequence isolated from the Sargasso Sea
gatgtatcagcctgatttccctacggttccgtttcgcttaggcctctatccggttgtcgacagcgtggcgtggatcgcgcgtctgctcgacgctggcgtgcgcacgcttcagttgcgcatcaaagataagcgcgatgaagaggtggaagccgacgtggttgcggccatcgaactggggcggaacgccaacgcccgcctgtttattaacgattactggcgactggcaattaaacaccgtgcctatggcgtgcatctgggtcaggaagacctggaaaccaccgatctgaaagcgattcaggcggcgggattacgtctgggcgtctcgacgcacgacgacatggagatcgacgtcgcgctggcgacacgtccctcctacatcgcgctggggcatgtcttcccgacgcaaaccaagcagatgccgtctgcgccgcagggactggaacagctggcgcggcatatcgaccgtctgcacgattaccctactgtcgccattggggggatcagcctggaccgcgcgccggcggtccttgcgactggcgtagggagcattgcggtggtcagcgccattacccaggctgcggactggcgcgcggcaaccgcgcagttgctggcgatagcaggagcaggcgatgaatga

SEQ ID NO: 241457 - DNA, 162 bp, Unknown
  Bacterial polypeptide expressing nucleotide sequence isolated from the Sargasso Sea
tatgaaccctttaaaacatgtagccattatcatggatggtaatggaaggtggggtttaaaaaataaaaattcaagaaatgctggtcataaagctggtttaaattcagtagaaaaaatcataaaggcaactattaaaaatgatattaaatttttaactttata

SEQ ID NO: 241458 - DNA, 306 bp, Unknown
  Bacterial polypeptide expressing nucleotide sequence isolated from the Sargasso Sea
ctataattgttaatttggcgataaattatggatcaaaaaatgaaattttaaatgcaataaagaaaataagaaataaaccaaacttaaaaaaaattgaaaataatttatacactcaaaaaatgcctgatccagatattttgataagaaccggtgggcaacaacgattaagcaattttatgctttggcaattggcttatgcagaattattttttctaaataagttatggcccgattttaatgttacagacttaagaaaagttataaataaatttaagaaaagaaaaagaaattttggagcaatataat

SEQ ID NO: 241459 - DNA, 148 bp, Unknown
  Bacterial polypeptide expressing nucleotide sequence isolated from the Sargasso Sea
tatgaaccctttgaatcatgtagccattattatggatggtaacggaagatggggagtaaaaaacagaagttctagaaatgcaggtcacaaagctggtttaaatacagtagaaaaaataataaaagaatctctaaaacaaaaaattaaa

SEQ ID NO: 241460 - DNA, 493 bp, Unknown
  Bacterial polypeptide expressing nucleotide sequence isolated from the Sargasso Sea
atgaataaactcaaccacgttgcctttattatggatggtaatggtaggtggggcaaaaagaaaaaacgaggaagaaactatggtcatctacagggagttaaaactgttgaaaaggtagtacagtcttccttaagacttaaaattcctattattaccttttatgttttttctactgaaaactggaaaagaccaaagaccgaagttaactttttgtttaatttaattggatcttattttaaaaaagaaattaaaaatgttgttaaaaacggtataaaaataaatattttaggaagcatttcttctttttcaccccctttaaaaaaaatattaaaagatacaattaaaaaaaccgagaaaaataaaaaactaatagtgaatttagccttaaattatggttccaagaatgaaattaaaaatgcattacttaaattaaaagaaaaacgttcatcaataagtgagtctaaaattagcaaacatttattacaggcaaaca

SEQ ID NO: 241461 - DNA, 265 bp, Unknown
  Bacterial polypeptide expressing nucleotide sequence isolated from the Sargasso Sea
tgctttcacaaaattaaataaaaattctattgatcaattagatgaagaaaaatttcgagcttctttattattacctgaaatgccagatccagatttattgatacgtacagcaggggagaagagagtaagtaattttcttctctatcaattaagctacactgagcttatgtttacggatactttatggcctgattttgatgaaaaagaattagattctgctgttcaagaatttcagaatagagtaagaaagtatggaaatgcctga

SEQ ID NO: 241462 - DNA, 367 bp, Unknown
  Bacterial polypeptide expressing nucleotide sequence isolated from the Sargasso Sea
atgtcccttaaacatgtagctatcataatggacggaaatggtagatggggtttaaaaaaaaaaaaatctagaaactttggtcataaacaaggaataaaaactgttgaaaaaatattaaatgcagcaattaaaaaaaaaattaaatttttaacattatatactttttcaattgataactggaaaagaccaattgaagaaattaattacttatttaaattattaaatgtctacatagacaaagaattaaaaaatataaatgatcaaggtataaaaattaaaattataggaaatataaataaatttccgacaaacttaaaaaaaaaactttttagatcagaaaaaataacaaataaaaataaaaaaatac

SEQ ID NO: 241463 - DNA, 559 bp, Unknown
  Bacterial polypeptide expressing nucleotide sequence isolated from the Sargasso Sea
ttgtctttatcaataaatttgtcaaaccttactatttttgcattatcaagcgaaaattttaacagatcttcagtggacataatatatgatattatatatcaaaatttttctacaattttagaaaatttagtcaatgatagggaaataaaaataaatatttttggatcaaaggaaaatctcccaaaaaaagtattagatatatttcaaaatatagaaaaaaattcatctaataacaaaaatcttaatttaaatataggatttaattatggatttaaagatgaaataaaaaatattttaataaaattaaaaaatgaaaatattaatattaacctaaataatcaaagtgaaataaataatttattttatataggatcaatccctgatcctgatttgttaataagaacaggtggatatcaaagattaagtaattttattatgtataatttaacatatacagaacttttttttactaaaacgttatggccagagtttacagagacagaattcaaatcgattattaataaatattttctaattaaaaggaaatatggactataaa

SEQ ID NO: 241464 - DNA, 267 bp, Unknown
  Bacterial polypeptide expressing nucleotide sequence isolated from the Sargasso Sea
aatgcctttagattcatatttacaaaaacaactacctagccatgttgcgtttattatggatggtaatagaagatgggcaaaaaaaaaaagattacaaataattgatggtcataaaaaaggttctgaagttgttaaaaatatagtaaaaaaatctttagaattaaaaatcaagtatttgactttttttagtttttcaactggaaattggaacagaagtaaaaatgaaattgtaaatcttcaaacattattaaacttttatttagattc

SEQ ID NO: 241465 - DNA, 256 bp, Unknown
  Bacterial polypeptide expressing nucleotide sequence isolated from the Sargasso Sea
gatgacagttgaatcatttaaagattatctatcattcaaggatcttccagagctagatttgataatcagaacatcaggtgaaactaggctcagtaacttcatgctatggcaatcggcttattcagagattcattttacagaaacattatggccaaactttgaagagcaagagtttctcgaaattcttcaatcgtattcccaatcagaaagaagatttggcaatgttgatgaagacattgaattaaaggaagcatag

SEQ ID NO: 241466 - DNA, 160 bp, Unknown
  Bacterial polypeptide expressing nucleotide sequence isolated from the Sargasso Sea
tatgaattttccagaacatgtggctatcataatggatggtaatggtagatggggaataaaaaaaaaaaaatcaagaaattatggtcatagccaaggcgttaaaacagttgaaaaaataattgaggaagcaactaataataatataaaatttctaacatta

SEQ ID NO: 241467 - DNA, 469 bp, Unknown
  Bacterial polypeptide expressing nucleotide sequence isolated from the Sargasso Sea
ttggcaaagtggctcctaaaatttagagtagtctcagctccagctagactaatttccaattcccggattgcttggagcttagtctcaagactggacaggattaggacaagaaggcagcgagacaggataacaaaagcgagtttgcctgagcacgtatccataattatggacgggaatagaaggttcgcttggaacatgagcctagaaaccgaaatcggacacaggcatggtaaggagaagctgaagaacgtcatggaatgggttttggatctcggagtaccttatctcacagtatacgcactttccactgagaatctctcaagtagagacccagaggagttgaatgcattatacgacctgtacgttactggcctaaatgaaatttctgaagacccgaagatccactcaagaaacgtaaaggtgagagtcgcaggtaagttagatttgcttcctaaaagagttagagaag

SEQ ID NO: 241468 - DNA, 113 bp, Unknown
  Bacterial polypeptide expressing nucleotide sequence isolated from the Sargasso Sea
aatgagttatttagacaaaattgatctgaaggccctgcctcaacacgttgggataatcatggatggaaacgggcgttgggcattagagcgtcatttgccgaggatacatggtc

SEQ ID NO: 241469 - DNA, 325 bp, Unknown
  Bacterial polypeptide expressing nucleotide sequence isolated from the Sargasso Sea
tatgaacaagcttcagcacattgcatttattatggatggcaatggacgttggggaataaaaaaaaaaaagagtagaaattacggtcatctaaaaggattagaaacggtaaaaaaagttgtaaactattcaatacaattgaaaatacccataattacattttacgtattttcatcagaaaattggaagagaccaagagcagaaattaactttttattcaaattaattgaccaatatttttcaaaagaaatttataatgtaataaagcaagaaataaagttaaatttttttggggaattaaatcaactcccactcaatgtaaagaag

SEQ ID NO: 241470 - DNA, 385 bp, Unknown
  Bacterial polypeptide expressing nucleotide sequence isolated from the Sargasso Sea
ttaggggaaacgaataaactttcaaaagatataaaacaaattttaaagaaaacaacaaatctaacaaaaaaaaataaaaaaatttctgttaatttagcaattaactatggatcaaaaaaagagttaatacgagcatttaagaaaacgaaaaaaagctttaatattaaaaatttcgaaagtaatcttttcactaaaaatatgccaaacccagacattcttataagaacaggtggacatcaaagactaagtaattttatgctatggcaattagcttatacagaattatttttcttaaaaaaattatggccagactttaaaaagcaagatttaatcaaaataattgcaaaatataaaaagtgtaaaagaaattttggcggagtatgat

SEQ ID NO: 241471 - DNA, 670 bp, Unknown
  Bacterial polypeptide expressing nucleotide sequence isolated from the Sargasso Sea
tataatcaaattcaacatattgctatcataatggatggtaacaaaagatgggctgaaataaatcataaaaaattaagtgagggatatacagctggcttgaataatttaaaaaaaattttagaagagtgcattaaatataaaatctgtaatctaacagtgtatgcattatcttctgaaaatataaaaagaaaaaattcaattattatatttaatattattagaaaaatttacaaagatttatttttagaatttaaatcaaaaaaagtaaatttaaatatagtaggtgaaaaagagggtattcctgaagatgttacagatatttttaacaattatataaataaggttaaagatcctcttattaatttaaatgtagcctttaattatggatctcaatatgaaataaaaaatattgttgaaaatatgttaatcaaaagatcaggcgataattttttaaaagaaattaaaaacaatatgtatcttggagacataccagatcccgaaattttgatcagaacaggaggatttcaaagattaagcaattttatgcttttaaacttatcatatactgaattattttttactaaaacgttatggcctgattttagcattgatgaattacataaaatttttgaaaaattttctaaaattaagagaaattatggattataga

SEQ ID NO: 241472 - DNA, 367 bp, Unknown
  Bacterial polypeptide expressing nucleotide sequence isolated from the Sargasso Sea
atgaacaaaatcaaacatttggctatcatcatggatggcaatcaaagatgggctaaaaaaaataataaaactaaattagatggatacaaaaagggactaaaaaaattagaagaatttattgaattttcaattttaaataatattccaattttaacaatttatgcattatcccaagaaaattataaaaggaaatctgttaatttaatatttcagcttatagagaatttttataaaaaatttttagatagattaataaaagataagcaagttcaagttaaaattataggtgaaaaagatacattgtcaccaaaatataaaaatatatttattgaaattgaaaaagcaacaataaatttaaaaaattaaa

SEQ ID NO: 241473 - DNA, 112 bp, Unknown
  Bacterial polypeptide expressing nucleotide sequence isolated from the Sargasso Sea
atgataagacccaaacatgttgccattataatggatggaaacggtagatggggattaaaaaaaaataaaacaaggaatcacggccatcttcaagggattaaaactgtgaaaa

SEQ ID NO: 241474 - DNA, 673 bp, Unknown
  Bacterial polypeptide expressing nucleotide sequence isolated from the Sargasso Sea
ttgagaaacacaattaaacatattgctatcattatggacggcaacaaaagatgggctaaaaaaaatcaaaaaaaaacttatgatggctatgttactggccttaataatttgaaaactcttactgaagagtgtataaggatgaatatatcttatttgacagtatttgcgctttcttcagaaaacattcatagaaacaattctgttattatatttaatataataagaaaagtttttaaaaatttaatatcagatttatattcaaaaaaaattaacttaaatatcattggagaaaaagaaggtataccagaagatattttgcaaatatttgaaaaaaaaattaataaagttcaaaatccagcaattaatttaaatgttgcttttaattatggtactcaatatgagttaaaaaaaatagttaattcaattatactttcaaaatcaaaaaataatcttttagataagataaggagtaatatgtatcttggatcaatccctgaccctgagattttaattagaacaggaggtttccaaagattaagtaattttatgcttttaaatttatcttatacagaattattttttacaaaaacattgtggcctgattttagtattaaagaatttaatgaaataattaaaaaattctcaaatatacaaaggaattatggattataat

SEQ ID NO: 241475 - DNA, 191 bp, Unknown
  Bacterial polypeptide expressing nucleotide sequence isolated from the Sargasso Sea
aatgtgctttgattcaaatttaaaaaagcaattacccaatcacgttgcttttattatggatggtaatagaagatgggcaaagaagaaaaaacttaaaattattgaaggtcataaaaagggctcagaaattgtaaaaaaaattgtaaaaaagtctcttgaatttaatattaagtatttaactttttttagtt

SEQ ID NO: 241476 - DNA, 211 bp, Unknown
  Bacterial polypeptide expressing nucleotide sequence isolated from the Sargasso Sea
gaaaaaaaatcttttcacaaaaaatataccccatccggacatattgataagaacaggtggacaatgtagattaagtaactttatgctttggcaattagcatattctgaactattctttttaagaaaattatggccagactttacctcaaatgatttaattagaataataaaaaaatataaaaagattaaaagaaattttggtgctatatga

SEQ ID NO: 241477 - DNA, 112 bp, Unknown
  Bacterial polypeptide expressing nucleotide sequence isolated from the Sargasso Sea
tatgaattcaataaaacatgtcgccattattatggatggcaatgggcgttggggaataaaacataaaaaatctagaaacttaggacacaaagaaggaattaagggttgttga

SEQ ID NO: 241478 - DNA, 160 bp, Unknown
  Bacterial polypeptide expressing nucleotide sequence isolated from the Sargasso Sea
tatgaattcacctaaacatgttgccataatcatggatggaaatggtagatggggaataaaaaaaaaaaaatcaaggaacttcggtcatacagctggtgtaaaaacagtagaaaaaattattgaagaagcagttaagaataaaataaaatttttaacattg

SEQ ID NO: 241479 - DNA, 196 bp, Unknown
  Bacterial polypeptide expressing nucleotide sequence isolated from the Sargasso Sea
gataatcagaacatcaggtgaaactaggctcagtaatttcatgctatggcaatcggcttattcagagattcattttacagaaacattgtggccaaactttgaagagcaagagtttctcgaaattcttcaatcatattcacaatcagaaagaagatttggcaatgttgatgaagacattgaactaaaggaagcatag

SEQ ID NO: 241480 - DNA, 183 bp, Unknown
  Bacterial polypeptide expressing nucleotide sequence isolated from the Sargasso Sea
tatgaattcaccaaaacatgtagccataatcatggacggtaatggtagatggggaataaaaaaatttaaatcgagaaatttaggccatagagagggcgtcaaagtagtagaaaaaataattaaagcttctgttaaaaaaaagattaaatttttaacattatatacatttttcacagaaaaatt

SEQ ID NO: 241481 - DNA, 523 bp, Unknown
  Bacterial polypeptide expressing nucleotide sequence isolated from the Sargasso Sea
tatgaataaactcaaccatattgcctttattatggacggcaatggtaggtggggtaaaaaaaataacaaaggtagaaattatggtcatctaaaaggtgttgagactgtaaaaaaaattgttaaatcctctattaagcttaaaattccaatattaacattttacgtcttttcatctgaaaactggaaaagaccaaaaaaagagattaactttttatttaatttgataaataattattttactaaagaaattaataatgtgataaaacaaggaataaagctgaatattcttggtgaaattaataagttatcatctaatttaaaaaaaactttaaaaaaaagcacagatttaacaaaaaaaaacaagaagattatagtcaatttggctataaattatggctctaaaaacgaaatccttcttgcatttaagaggacaaaaaagatactaaatataattaattttgaaaagaacctatacacaaaaaggttacctcaccctgatatactaattagaaccggaggccat

SEQ ID NO: 241482 - DNA, 328 bp, Unknown
  Bacterial polypeptide expressing nucleotide sequence isolated from the Sargasso Sea
tatgaatgaacctaaacatgtagccataataatggatggtaatggcagatggggtttaaaaaaaaaaaattctagaaacttaggtcataaaaaaggaatcattagagtagaagaggttatcaatcaatcaataaaaaaaaaaattaaatttttaacattatatactttttcatctgataactggaaaagaccaaaaattgaaatcaaatttttacttaatttattagaaaattatattgataaagaatttaataatttaaaaaataaaaatattaaaattaaagttttaggagatattagtaaattttcttcaggcctaaaaacaaaa

SEQ ID NO: 241483 - DNA, 280 bp, Unknown
  Bacterial polypeptide expressing nucleotide sequence isolated from the Sargasso Sea
atggccataagcctttctaataaccacaatcatcctaagaaaattggcattatcatggatggaaatggaagatgggcaaaattaaataaattaaaaataaataaaggtcatgaaaaaggtgttggtgttgttagagatatcgtcaaagagtgtatagctcaaaatatacaaagcttaactatttatgcttttagcgctgaaaattggtcaagacctcaaagcgaggtaaatggaataaaaaaattaattgttaaagcaatccatgaacaagttccagagc

SEQ ID NO: 241484 - DNA, 534 bp, Unknown
  Bacterial polypeptide expressing nucleotide sequence isolated from the Sargasso Sea
aatgcaaactcgagtcatgtctgacaagctcccagaacacatttctatcatcatggatggcaatcgaagatacgcctccgattctggactggcggccaccttgggtcatcgagcagggaaagaaaaactcgaggatgtgatggattgggtgctggaaatcggtgtaccctatctcaccgtatacgcactcagtacagagaatatatccagtcgtaagccggatgagttggaagcattgttcaacctctatgtggaagggttgaatgatttagcaatcgatgagagaatccacaaaaatcatgtcaaagtcagggttgttggcagaatggatctcctaccacaaaatgtcttagaggccattgaaaatacggagaaagttactgctgattatgacaaatttgtgtttacggtttgcttggcatatggaagtcgtgaggaaatcatcgaagcagttcgagagattgcaaaagagcatgccaagggtaacctggagctagatgccatcgatgagaaagaaatcagcaaccggttgtg

SEQ ID NO: 241485 - DNA, 186 bp, Unknown
  Bacterial polypeptide expressing nucleotide sequence isolated from the Sargasso Sea
tatgattctgcccaaacatgtagccataataatggatggcaatggaagatggggaattcaaaaaaaaaaatcaagaaattatggtcatttaaaaggtatagaggttgtagaaatatcatcgaagaagcagtatcaaaaaaaattaaataccttacgttatttactttttctactgaaaattggaaa

SEQ ID NO: 241486 - DNA, 160 bp, Unknown
  Bacterial polypeptide expressing nucleotide sequence isolated from the Sargasso Sea
tatgaacccattgaatcatgtagccattatcatggatggtaatgggagatggggtcttaaacataaaaattcaagaaatgctggacataaggctggcttaattactgtcgaaaaagtaattaaagagacaattagaaataatattaggtttttaacttta

SEQ ID NO: 241487 - DNA, 160 bp, Unknown
  Bacterial polypeptide expressing nucleotide sequence isolated from the Sargasso Sea
atgaattcaataaaacacgtggccatcattatggatggtaatggtagatggggagaaaaaaaaaataaatcaagaaatataggtcataaagcaggtttaaaatcagctgagaaaataattttaagaacaattaaacacaaaataaattacctaacacttt

SEQ ID NO: 241488 - DNA, 277 bp, Unknown
  Bacterial polypeptide expressing nucleotide sequence isolated from the Sargasso Sea
aatgacatcatttctaccctccgttgacatgctgatacgtactggaaaggaaaaaaggatatcaaattttttgatttgggattgtgcttatgcagaattatatttctctgatagctactggcctgattttggtgttaatgaattgcacgaggcaataaaagactggaattccagagtaagacgtttcggaggcagcgtaaatgtgaaaacaatggaaattagtgaaaaagctgatgctttaattcaagaaagaaaaaaaactgttaatgaaagataa

SEQ ID NO: 241489 - DNA, 195 bp, Unknown
  Bacterial polypeptide expressing nucleotide sequence isolated from the Sargasso Sea
tcttatccgatcaacctgatccagatttacttatacgtacaggaggatatcaaagattaagtaatttttatttaatttatttgtcctattgtgaacttttttttactaaaacattatggccagatttaaaaatatcagaggtaaaaaaaataatttcaaaatataaaaaaactcttagaaaatatggattatagt

SEQ ID NO: 241490 - DNA, 124 bp, Unknown
  Bacterial polypeptide expressing nucleotide sequence isolated from the Sargasso Sea
tatgaaccgtttaacccatgtcgctattataatggatggaaatggtagatggggtttaaaaaaaaaaaaatcaagaaattacggccatttaaaaggtataaaagctgttgaaacagttcttaag

SEQ ID NO: 241491 - DNA, 136 bp, Unknown
  Bacterial polypeptide expressing nucleotide sequence isolated from the Sargasso Sea
taattttttattgtggcaacttgcttattcagaaattttttttgaaaagaaattatggcctgaatttaatgaaaaagattacaatagaataattaaggaatataagaaaattaaacgtaattttggaactatttaa

SEQ ID NO: 241492 - DNA, 187 bp, Unknown
  Bacterial polypeptide expressing nucleotide sequence isolated from the Sargasso Sea
aataagggacggcaatgggagatgggcaactagaaaaggtttgccccgatcatttggacataagcagggagttagtgtattaaaaaaaattctcaaagctgcaaaaaatttaggttgtaaagtaattactgtttatgctttttcaactgagaattggacaagaccctcaaaagaggttgattttctc

SEQ ID NO: 241493 - DNA, 262 bp, Unknown
  Bacterial polypeptide expressing nucleotide sequence isolated from the Sargasso Sea
aatgctttacaaaaaacaaaaaataaaaagaagattagtgtaaatatactaaaaaggaatctttacactaatcatttaccagatcctgatatattgataaggacaggcggacataaaagattaagtaattttatgctatggcaacttgcatatgcagaaatttattttttaaataaattatggcctgactttaatgacaaagacttaaaaagagtgataaatgattttaaaaagataaaaagaaactttggttcaatttaat

SEQ ID NO: 241494 - DNA, 154 bp, Unknown
  Bacterial polypeptide expressing nucleotide sequence isolated from the Sargasso Sea
aatgaacatcacaagtcccgctggcaaggataccaatacgccccgtcacgttgcgatcatcatggatggtaacaaccgctgggcgcgcaagcggttgatgcctggtgttgccggccacaaggctggcgtcgacgcggtcaaggcgagatcgagg

SEQ ID NO: 241495 - DNA, 393 bp, Unknown
  Bacterial polypeptide expressing nucleotide sequence isolated from the Sargasso Sea
cttggcagtaatcatggatgggaattctcggtgggcggaaaaagagaacgtttctaggtctgaagggcaccgtgcgggcgcggaagcggtgcgccgtcttttaaaaaactgtaaaaattatggtgtagacatattaacattatttgtttttagtagtgagaattggcatcgtcctcaaaaagaggtgcggggcttgttagcacttttggtccgatatctaaggaatgatgtttcaaaattgaatgacgagagggtctctattagattcatcggaagtagatatagactgagtccacgcattcgccgtttgttttcaaaggttgaggctgtcacagcagaaaataagggagctagattaatactggctgtagactatggaggaaaatgggatat

SEQ ID NO: 241496 - DNA, 154 bp, Unknown
  Bacterial polypeptide expressing nucleotide sequence isolated from the Sargasso Sea
ctatgctgagctgtatttcacagatgtgttatggccagatttcacaaccgcagacctgtcaatggcgataaaagactattacagcagagacagacgatatggcggcgaccctgctggtgtagctggtgatatagaagcaggtaaaagagcctga

SEQ ID NO: 241497 - DNA, 436 bp, Unknown
  Bacterial polypeptide expressing nucleotide sequence isolated from the Sargasso Sea
aatgcaaactcgagtcatgtctgacaagctcccagaacacatttccatcatcatggatggcaatcgaagatacgcctccgattctggactggcggccaccttgggtcatagagcggggaaggaaaaactcgaggatgtgatggattgggttctggaaatcggtgtaccctatcttaccgtatacgcactcagtacagagaatatttccagtcgtaagccggatgagttgaaggcattgttcaacctctatgtggaaggtttgaatgatttagcaatcgatgagcgaattcataaaaatcatgtcaaagtcagagttgttggcagaatggatctcctgccacaaaatgtcttagaggccattgaaaatacggagaaagtcactgcagattatgacaaatttgtgtttacggtttgcttggcgtatgggaagtcgtga

SEQ ID NO: 241498 - DNA, 168 bp, Unknown
  Bacterial polypeptide expressing nucleotide sequence isolated from the Sargasso Sea
tatgcgacgtgttctaaggaattttctttctccggtttacaaattgtatgaaaagcgtttagaaaggcaaattagaaagaataaagttcctgaacatttggcagttattatggatgggaatagaagatatgcagagacactaggcatcttaccgcatgaagggcatat

SEQ ID NO: 241499 - DNA, 1225 bp, Unknown
  Bacterial polypeptide expressing nucleotide sequence isolated from the Sargasso Sea
tgagaacttcatgcgcgacctggagcagagtccgcttgaagcgtttaagattacgcaaaccgatatgtcggcctttgagcttggtgaaaacctcgccacaacagaaggcaaggtggtgtaccagaatgacctcatgcagctcattcattacacaccgaaaaaagctaaaacctacgcgcctccggtgttgtttgtgccgccgtttatcaacaaatattacatcctcgatctggatgaaaagaaatccgcagtaaaaggactgctcgaaaacggctttagcgtgtttatgatctcctgggtcaacccggataaatccctggccgaccatgacttcgtgagttatatgaagcacggtccgctggccgcgctggatgtggtatgcgagattaccaaacagcccaaagttaacatgaccggcttttgtgtaggcggcaccctgtctgccgtaactgcggcttacctgcgcgcccagggcgatgagcgaattcagtcacttactctgctaaccaccctgaccgacttcagtgagccaggtgaaattggcaattacctgaccgaagaaagtcttaacgccatggagcagaatgccgacattaaaggcgtgtatgatggccgcatactggggcttagcttcagcctgttgcgcgagaacaacctgttctggtcgtactttattaataactacctgaaaggcgaggatcccgctgccttcgatattctgttctggaacagtgatgccaccaatatcaccgccgcctgctttaaacagtatgtgcgtaccatgtactgggaaaacaaactgcgggaaccgggtggtatagtgattgacggcgtacctatcgatttgggcaatatcgacgtacccgtttatttcctggctaccattgccgatcacatcgtgctttggcaagccgcctacaaaggcacccaactggtaggtggtgatacccgctttgtgctggctggttccgggcacttagcaggggtaattaatccacctgctaaaggcaagtaccctcactggatcaacgaagacctgccggcagatgccgccgcctggtttgacggcgccactcagcatgagggttcctggtggccggactggtacaactggctgcagtcacacaatgataaacaggttacttcaccaaaaccggggaaacataagtcttaccctattattgaagatgcaccaggcagttacgttaaacgacgtctcggctaa

SEQ ID NO: 241500 - DNA, 292 bp, Unknown
  Bacterial polypeptide expressing nucleotide sequence isolated from the Sargasso Sea
catgagtgaaatcacaaacttgcctgatcatgttgccataattttagatggtaatagacgatgggcaaggggcaaagagttgcaggatgaagacggtcatcgtaaaggaatagaaacacttgttttgattgccacggctgccgctaattttaatattaaatatttaacactttttagttttagtaaggaaaactggaaaagagatccatcagagatttcaaacttaatggatcttatggaaaagcttgaaagtgaatatcttgatgagataattttaaataatatcagatta

SEQ ID NO: 241501 - DNA, 466 bp, Unknown
  Bacterial polypeptide expressing nucleotide sequence isolated from the Sargasso Sea
atatcctttctttttaaattaattgataaatatttttctaaagaaataaacaacgttttgaataaaggtattagattaaatatttttggtgacttaaaaaagtttcctccaaagctcaaaaaaacattaaaaaatagcattaagttgaccaaaaaaaatagaaaaataattgttaatcttgcaattaattatggctctaaaaatgaaatcataaattcattaaaaaagactaagaaaattactttagaaaattttgaaaaaaatctatatactaaaaatatgcctaacccagacatattaattcgaactggcgggcatcagagattgagtaattttatgctttggcagttggcttatgctgaattattttttcttaaaaaattatggccagattttaacaaaagagatcttttaaaaataataaataaatataaaaaaagtacaagaaattttggagctatatgat

SEQ ID NO: 241502 - DNA, 168 bp, Unknown
  Bacterial polypeptide expressing nucleotide sequence isolated from the Sargasso Sea
aatgaaaaatcctctaccacaacatattgcaataataatggacggaaatagaacttgggcaaaagataatggtatctcaacaattaaaggtcatgataagggactagatgtagcaaaggaaatttgtatctattgtaatcatattggagtcaaaaatctgacacttta

SEQ ID NO: 241503 - DNA, 1305 bp, Unknown
  Bacterial polypeptide expressing nucleotide sequence isolated from the Sargasso Sea
gatgaatcgtagatcttttcttaaaagtttattatttctatttgcttctttgtctttaaaaatttttccaactgaaaaaactaaaaccattgcatttaactatggtgttgccagtggagatccaacgaatactaatgtcattttatggactaaaatatctggcggagatttaaaggataaaaaaattaaatgggaagtatcaaatcaaaaaagtttccagaaaattctggtttctggaaatgctaaagcgaaattcgatgataattttacagtaaaagttgatgcccaaattccttctaattttaatggtaaaactatctactatagattttcattccaaggaatagtctctgatataggaactactaaaactcttcctattaataatccaaataagttcaatatagccttttgtagttgttcaaattacccagccggatattttaatgcttataaggaaatggccaatgatgaggaggtcgatctcgtgctgcatttaggagattatctctatgaatatagtagagaagggtacgcttcctcagatgcaaaaaagatgggtagggtcgtaaacccgcctaatgaaataatttcacttgatgattatagaaaaaggtacgccacttacaggagtgatacagatttacaactgctgcatcaatctaaaccaatgattgcagtatgggatgatcatgaaataactaatgatacatggaaaaaaggggctcaaaatcattctccagatgagggctcattcaataaaagaaagaataatgcaataaaggcttattatgaatggatgcccattagagatacaaataaaaaagaaaaaatctggagaaaatttaaggttggaaatttaattaatttagtaatgcttgatacaagactttacggaagagacaagcagctagagataagctcttatataaaggacgaggtgtttgataaagtgcagtataaaaaagacttaaataagcctagaaatttacttggaagagaacagcttaattgggtgaataaatcggtaagtaaagactttaaatggtcaatatttggacaacaacttctaataggtccgaaatatctacctaacatattcaaatctgaaaaattagcaggatcaagatcttatttaacaaaacaattagccggcgagaaattagcaacaaataccgatcaatgggatggatatccaaaagaaagagaaaaattttatcaatctattatgaactctcaatcaaatataattttggcaggtgattcgcataattcatggttttcaaacttatatgataaaaataa

SEQ ID NO: 241504 - DNA, 166 bp, Unknown
  Bacterial polypeptide expressing nucleotide sequence isolated from the Sargasso Sea
atgaattcacccaaacatgtagccataattatggacggtaatggcagatggggattaaaaaataaaaaatcgagaaatctaggtcatagagctggattaaaaacagtagaaaaaataataaaagcctcgataagaaataatattaaatatttaacattgtatgctt

SEQ ID NO: 241505 - DNA, 407 bp, Unknown
  Bacterial polypeptide expressing nucleotide sequence isolated from the Sargasso Sea
aaggaaattagagcagatggagtccatcacatcggagaatagtggactaaaattgactctagcaattgcttatggtggccaacaagaaatcataaatggaatcaaaaaattaattgatgatcatgacaatcagataattgatgtaaatgatctgacagttgaattatttaatgaatatctatcattcaatgatcttccagagctagatttgataatcagaacctctggtgagactagactgagtaactttatgctatggcaatcagcttactctgaaattcattttacagagacattatggccaaactttgaggagcaagagtttttagaaattcttcaaacgtactctctgtcagagcgaagatttggcaatgtcgatgaagatactgaactaaaggaagcttaaa

SEQ ID NO: 241506 - DNA, 190 bp, Unknown
  Bacterial polypeptide expressing nucleotide sequence isolated from the Sargasso Sea
tttttgatttggcaggcagcatacgcggaattatattttactgaagttctttggcccgacttcaacaaagaagaattatataaagcaattctggagtaccagaacagaaaaagacgtatgggcggaactacttcttcagattttatttccaaatcaaaaaaacaagttttacgtattgtttcagactaat

SEQ ID NO: 241507 - DNA, 256 bp, Unknown
  Bacterial polypeptide expressing nucleotide sequence isolated from the Sargasso Sea
tttagatgagaaattaatttcgcattatttagacacaaaacaacaagacgatcctgatttaatcataagaacagccggcgaaaaaagactatccaattttctgatttggcaatcaacttattcagaattatttttttcaaaaaaaatgtggccagaattttcaataaatgactttaaaatagctttaaatgattattatcaaagaaacagaaaatttggtgaagttactcattcaaaaaaacaattattctcctaa

SEQ ID NO: 241508 - DNA, 286 bp, Unknown
  Bacterial polypeptide expressing nucleotide sequence isolated from the Sargasso Sea
aatggccataagcctttctaataacaacaatcatcccaagaaagttggcattatcatggatggaaatggaagatgggcaaaattcaataaattaaaaataaataaaggtcacgaaaaaggtgttggtgtcgttagggatgtcgtgaaagagtgtatcgctcaaaatatagaaagcttaactatttatgcttttagctctgaaaattggtcaaggcctcagaatgaaataaatgggataaaaaaattaattgttagagcaattgatgattcaagtcccagagcttaa

SEQ ID NO: 241509 - DNA, 187 bp, Unknown
  Bacterial polypeptide expressing nucleotide sequence isolated from the Sargasso Sea
tatacctgatccagagctacttataagaacaggaaatactaaaagattaagtaactttttgttatggcaactagcttatgctgagattttttttattaaaaagttatggccagattttaatgaaaaagatttttctaatatattaagaaaatacaaatcaattaagagaaattttggaaatatctaa

SEQ ID NO: 241510 - DNA, 217 bp, Unknown
  Bacterial polypeptide expressing nucleotide sequence isolated from the Sargasso Sea
tattacagacaacttgtataccaaatctatacctgatcctgaaattttaatcagaacaggtgatagaaatagattaagtaattttttattatggcaactatcttatacagaaatctattttgtaaaaaaactctggccagattttaataaaaaagattttagcaatataatatctaaattttctttagttagaagaaattttggtggaattaaatga

SEQ ID NO: 241511 - DNA, 533 bp, Unknown
  Bacterial polypeptide expressing nucleotide sequence isolated from the Sargasso Sea
aaatttagataggaaaaatgatgaattagattatctttatgatttaatctacaaaagattagaaaaattatacaacgatcctagaatacacaaaaacaaaatgagggtaaaagcaattggaactatagaacttctaccagaatcaatcaaggaagttcttggaagattagataaagttactaaaaattatgacaaacattttctaaatattgcaattgcatatggaggacaaaatgaattagtagatgctgtaaaaaaaattggaatgaaaattaaaaatggtgaattagatgcaaaagaaatcaataaagaggtaatagaatctaatttgtatacatctcatttaccacaatcatccccagacatgattttacgaacatcaggtgaaaaacgtatgagtggatttctattatggcaaagcgcatatagtgaattagtatttttagatattttttggccagaatttagaaaaattgatttgatgagagcaattagaacattccaaaaaagaaagagaagaataggaaagtaaa

SEQ ID NO: 241512 - DNA, 667 bp, Unknown
  Bacterial polypeptide expressing nucleotide sequence isolated from the Sargasso Sea
tatgaataatctcaaccatgttgcttttatcatggatggtaatgggagatgggggaaaaaaaagaataaaggaagaaactttggtcacttaaaaggtgttgaaacagttaaaaagatcgttaaaagctctattaatttaaaaatacccatagtgacattttacgttttttcttctgaaaattggaaaagaccaaaatctgaaatatcctttttatttaagcttataaataattattttacacaagaaatagaaaaggtaatttcacaaggtattaaaataaatataattggtgaaataagtaaacttggaacagacataaaaaaaaatttaaatagaagtatgtttttaacaaggaaaaataaaaaaattattgtaaatttagcaattaattatgggtcaaagaatgaaattataaatgcatttaaaaaaacaaaaaaaattagtttgaaaaattttgaaaaaaatctttatactaaaaatattccaaatcctgaaattcttataaggacaggaggacatcaaaggctaagcaatttcatgttatggcaattagcatatgcagagttattttttttaaaaaaactttggccagaattttcatctaacgatttaaaaaaaattgtgagtaaatataaaaaaagtaaaagaaattttggggctatatga

SEQ ID NO: 241513 - DNA, 631 bp, Unknown
  Bacterial polypeptide expressing nucleotide sequence isolated from the Sargasso Sea
aagatgggctaggcaaaataattttaccatttctcattgggggcatcgcaaaggtgttgaaactctcgtagaaataacaaaagaagccaaaaaaaagaaagtaaaaaaactaattgtttacgcattttcatcagaaaactggtcaagagaaaaatttgaagttaactcactaatgaacttaataagctttggtactgaggtgaagttagatgaaattattaaaaatgaggttcgtatggagtttattggaaaccttgattcgataccgaaaaaagcaaaagaagaggtagataggtgtgtaagatctacaaaaaatttctctgattttactcttgtgattgctctaaattatggaggtgtatgggatattgtaaacgcattaaaaaaaatatctaaaaagggtgaaactataaatgctaaaaactttttaaaatttacggaacttaaaggtgaggaagtagaaatttttattagaacaggaggagaaaaaagagtgagtaactttttgttacctaacattggatattctgagcttttcttttctgataaattatggcctgatttcaatgcgcaagactttaatgctgttcttgatgattttaaaacaagacaaagaaggtttggcaaatga

SEQ ID NO: 241514 - DNA, 426 bp, Unknown
  Bacterial polypeptide expressing nucleotide sequence isolated from the Sargasso Sea
taaaagcaattggaactatagaactgctaccagaatcaatcaaggaagttcttggaagattagatgaagtcactaaaaattatgacaaacattttctaaatattgcaattgcatatggaggacaaaatgaattagtagatgctgtaaaaaaaattggaatgaaaattaaaaatggtgaattagatgcaaaagagatcaataaagaagtaatagaatctaatttgtatacatctcatttaccacaatcatccccagacatgattttacgaacatcaggtgaaaaacgtatgagtggatttctattatggcaaagcgcgtatagtgaattagtatttttagatattttttggccagaatttagaaaaattgatttaatgagagcaattagaacattccaaaaaagaaaaagaagaatagggaaataga

SEQ ID NO: 241515 - DNA, 162 bp, Unknown
  Bacterial polypeptide expressing nucleotide sequence isolated from the Sargasso Sea
ggaccggaaacacaaacagattaagcaattttttgttgtggcaaatatcttattcagaaatttttttttcaaaaaaattatggccagattttaattctaaagattatttggatataatatttaaatatcaaaaaataaaaagaaactttggaaaaatatagt

SEQ ID NO: 241516 - DNA, 465 bp, Unknown
  Bacterial polypeptide expressing nucleotide sequence isolated from the Sargasso Sea
gatggctaatactagcaaaacaaattccccaaaaaatgttggcattattatggatggcaatggaagatgggctatcaaaaactctttaaagatcagtgaaggccataagaaaggagttagcattgtaaaagacatagttgaggaatcagttaagcaagacctatcttctctaacgatttatgcatttagctctgagaactggaaaagacctaaaaccgaggtgaccgctataaaaaaactagttgtggatgcaattaacgatcaagtttctgatcttaaagagcagaaagttagattaaagttttttggacacatatatgactttggtaaaaaggttattgataaaataagttatgcagaagaagaaacatatatacaaaatagtaaactagatttgaatgttgccctagggtatggtggcaagcaagacattgtagacatggcaaaaaaaatatcatcaagcgt

SEQ ID NO: 241517 - DNA, 670 bp, Unknown
  Bacterial polypeptide expressing nucleotide sequence isolated from the Sargasso Sea
tatgaataaactcaaccatgttgcattcataatggatggcaatggacgatggggaaagaaaaaaaataataatagaaattctggacatttcgcaggagttaaaactgtaaaaaaaatagttgaagcttcaataaagcttaaaataccagtagtaacatttttcgtattttcaactgaaaattggaaaagaccaaaaacagaggttaattttttgttcaatttagtaaattcgtattttaaatctgaattacaaaatgtcattaaaaatggtatcaaaattaatattatgggagaactaaacagacttccccaaaaacttaaattagtactcagggaaactgcaaaaaaaactgaaaagaataaaaagattttagttaatcttgcattaaattatggttcaaaaaaagaaattataaatacctttaataaaataaaatccaaaaaaattacagaaaaaattgttaaaaatagtctatatacaaaaaatattcctgacccagatattttgataagaactgggggaaaaaaaaggttaagtaattttatgttatggcaactagcttattcagaactattttttttagacaaattatggcctgattttatgccaagtgacttaaaaaaaattttaacacatttcaatagaacaaaaagaaattttggaggaatt

SEQ ID NO: 241518 - DNA, 280 bp, Unknown
  Bacterial polypeptide expressing nucleotide sequence isolated from the Sargasso Sea
atgaagtctgctccatccttacacgagactatttctagtccacccacccatgttggaatcattatggatggtaatggtcggtgggccgcagcacgaggttggccaagagtagaaggccatcgccgcggagtagaaacggtaagggaagtggtcaggggtagccttcagtcgggtataaagtacttgacgttatatggattttctatcgagaattggaaacgcccctctgaagaaattgattttcttatgggtttgttccgtctttatttgcgtgaagaaa

SEQ ID NO: 241519 - DNA, 362 bp, Unknown
  Bacterial polypeptide expressing nucleotide sequence isolated from the Sargasso Sea
gatgacttcatcacaaaataaccatccagagacaatccctaatcagccaaaacatgttggcatcattatggatggcaatggaagatgggcaaaaatcaggggtaaaagaaggattttcggccatgaagctggtgttcttaaggcaagagagttggttgaaaccgctgtaaaaattaagcttgatgcaatgacactctatgcattcagttctgagaattggtctcgaccaaaaaaagaagtcagcggattaatgagtctttttgaaaagactattgaaaaatataccagtttattgattgataataatgtgcgattcaaaaccgctggtgatccatcaatgttgcctgatgtcttgaaacgaa

SEQ ID NO: 241520 - DNA, 226 bp, Unknown
  Bacterial polypeptide expressing nucleotide sequence isolated from the Sargasso Sea
gattgacacgaatgagatctcgagtcgtctctacgatgcagaaatacccgaccctgacctggtcatccgaacaagcggcgaagaaagggtctcgaacttcctgctttggcagattgcttactctgagctctacttcactgacgttcactggccttcgttctccaaggcggttctgtatgaggcgatagagacctaccagatgaggaggagaaggtttggtggatga

SEQ ID NO: 241521 - DNA, 151 bp, Unknown
  Bacterial polypeptide expressing nucleotide sequence isolated from the Sargasso Sea
aacagattgagtaactttttgttgtggcaatcatcttattcagaaatctattttgtgagtaaactttggcctgattttaccagaaatgattttaataaaattatagaaaaatttgttaaagttaaaagaaactttggcggaattaaatgag

SEQ ID NO: 241522 - DNA, 485 bp, Unknown
  Bacterial polypeptide expressing nucleotide sequence isolated from the Sargasso Sea
caaactcagggttatcggcaacaggtcgcgctttacgccgcgtcttggccggctcattgaatgggccgagcaagaaacggcggccaacaccggcatcaacctgacgcttgcgcttgattatggcggtcgacaggaagttacctctgccgcccgcaaactggcgaacgaggtggcgaacggtatgcttgatccgggcgatatcaacgaggacatgttgaagtcgcgcatggggtcagccgccttgccggatatcgaccttctgatccggacaggtggcgagcagcgtgtctccaatttcatgctctgggacatatcctacgctgaacttcatttcacgccgatcttctggccagacttttcaaccgatgatctggaccgcgctctgagcgattttgccggtcgggaacggcgttttggtggcaacggaattgttgacgtcaacgagaccgtaaactctctggccgacaaacggcgcctgtcctgat

SEQ ID NO: 241523 - DNA, 589 bp, Unknown
  Bacterial polypeptide expressing nucleotide sequence isolated from the Sargasso Sea
catcgaaaaggtgttgagactcttgtagaaataacgaaagaagcaaaaaaaaagaaagtaaaaaaactaattgtttatgcattttcatcagaaaattggtctagagaaaaatttgaagttaactcattgatgaacttgattagttttggtgccgaggtgaagttagatgaaattattaaaaatgaggttcggatggagtttattggagaccttgattcaatcccaaaaaaagcaaaagaagaggtagacagatgtataaaatctacaaaaaatttctcagattttactcttgtaattgctctaaattatggaggtgtatgggatattgtaaatgcattaaaaaaaatatctgaaaagggtgaaactataaatactaaaaactttttaaaatttacagaacttaaaggtgaggaagtagaaatttttattagaactggaggagaaaaaagagtgagtaactttttgctgcctaacattggatattctgagttcttcttttctgataaattatggcctgatttcagtgccgaagactttaatgctgttcttaatgatttcaaaacaaggcaaagaaggtttggtaaatgaa

SEQ ID NO: 241524 - DNA, 324 bp, Unknown
  Bacterial polypeptide expressing nucleotide sequence isolated from the Sargasso Sea
tatgaataaagtcaaccacattgccattatcatggatggtaatgggagatggggtaaaaaaagaggtaaatctagaaattttggccatttaaatggcataaaagttattgaaaaaattgtcaaagagtcaattaaattaaaaattccaatattaacattttatactttttcaacagagaattggaaaagaccaaaaaaagaaattagttttctatttaaattaattgaccattactttaaaaaagaaatatataatttaatcaaaaataatataagaattaatattatagggaatattaacgtattaccccataaagttaaatt

SEQ ID NO: 241525 - DNA, 562 bp, Unknown
  Bacterial polypeptide expressing nucleotide sequence isolated from the Sargasso Sea
cttccgaaaactggaagcggccctccgaggaaagtcgatggcatcatggagctcatttcgaccttcatccatagcgagctggacaattaccatcgccagaacatgcgcttccagatgatcggcgagcgcagcggcctgtcggcaaagatattgaaggccctcgaggtcgccgaggagcggacccgcaataataccgggctgcatgttgtcgtcgccgtcaattatgggtcgcgcgccgagattgccggtgctgcccgcgcgctcgcccgccaggtggcggagggcaagatcgacccggatgatatcgatgaggccgccatcggcgagcgcctcgataccgccggcctgcctgatcccgaccttgttatccgcaccagtggcgagcagcgcctttccaacttcctgctctggcagacggcctattcggaactggtgttcctgccatgcaactggccggatttcagccgcgagatgttttttgaagcgctttcggaatatgcccggcggaaccggcggttcggcgcgctttccgcgccgcaggcggcattgacggatacctgat

SEQ ID NO: 241526 - DNA, 562 bp, Unknown
  Bacterial polypeptide expressing nucleotide sequence isolated from the Sargasso Sea
atgagttcatctcaaaatacacacatagacaaaattcccaatcaaccaaagcatgtcggaatcattatggatggcaatggcagatgggcaaagctcagaggtaagagaaggatatttggtcatgaagcaggtgtccttagggcgagagagctcgttgaaaccggcgtaaaaattgaacttgaggcattgacgctctatgcgtttagctccgagaattggtctagaccgaaaaaagaagtcagtggcttaatgaacctttttgaaaagacaatcgaaaaatatactagtttattgatcgacaataatgttcgattcagaacagctggcgatccttcaatgttacctaagattttaaaaaggaaattggaacaaatggagtctattacatcagaaaatacaggactcaaattgacactagcaattgcatatggaggacaacaagacatcattaatggaattaaacgcttaattgatgatcacgacagtcaagtcattgatataaatcaaatgacagttgaatcatttgaagattatctatcattcaaggatcttccagagctag

SEQ ID NO: 241527 - DNA, 202 bp, Unknown
  Bacterial polypeptide expressing nucleotide sequence isolated from the Sargasso Sea
cttgagccgacctccggccaccagccacgacaccactccatccaggctctgccctgccgagctggatagccagcagctgcccgcccacgtggccgtgatcatggatggcaacggtcgctgggctaaatccaggggactgccccgggtgatggggcatcgcgccggggtggaagcgctcaagtcaacccttcgtctttgcagc

SEQ ID NO: 241528 - DNA, 289 bp, Unknown
  Bacterial polypeptide expressing nucleotide sequence isolated from the Sargasso Sea
tacggctcaaaattggagctaattaatgcttttaaaaaaattactaaaagtaaaaataaaattaatgaaaaaaacttagaaagatatctacaaacaaaaaatattcctgatccagatatactaataagaactggaaatactaaaagattaagtaattttttattatggcaactagcctatacagaaattttttttgaaaagaaattatggccagcatttactgaaaaagactttaataaaataattaaagaatataaaaatataaaacgtaacttcggtaagatttaat

SEQ ID NO: 241529 - DNA, 412 bp, Unknown
  Bacterial polypeptide expressing nucleotide sequence isolated from the Sargasso Sea
atgagttcatctcaaaatacacacatagagaaaatccccaatcaaccaaaacacgttggcatcattatggatggcaacgggagatgggcaaagctcagaggtaagagaaggatatttggtcatgaagcaggcgtccttaaggcgagagagcttgttgaaaccagtgtaaaaattgaacttgaggcattgacactctatgcgtttagctccgagaattggtctagaccgaaaaaagaagtcagtggcttaatgagcctttttgaaaggacaatcgaaaaatatactagtttattgattgacaataatgttcgattcaaaactgctggcgatcctttaatgttacctaagattttaaaaaggaaattggaacaaatggagtctattacatcagaaaatacaggactcaaatgac

SEQ ID NO: 241530 - DNA, 335 bp, Unknown
  Bacterial polypeptide expressing nucleotide sequence isolated from the Sargasso Sea
aaagactataaaaaataaaaaattacaaattaatcttgcattaaattatggttcaaaaagtgaaataattaattcaattaatttattaaaaaaaaataaaattagttttaatgaaaaaaatttagaaaaattcttatacactagtggctgccctgatcctgatattttaattagaactggtaatacaaaacgtttaagtaatttcttgttatggcagatggcatattctgaaatttattttgaaaaaaaattatggcctgattttaataaaaatgattataataaaatcctgaacaactttagaaatttaaaaagaaattttggaagcatatgaa

SEQ ID NO: 241531 - DNA, 242 bp, Unknown
  Bacterial polypeptide expressing nucleotide sequence isolated from the Sargasso Sea
aaaaaagattaaaccttcatataagaacattgaaaaaaatctatatactagtggcatgccagatccacaaattttaattagaactggtggagtaaacagattaagcaactttttattgtggcaaatatcatatactgaaatatactttgttaaaaaactatggccagattttaatgttaaagactataataaaatcattaaagattttaaaagtgtaaaaagaaactttggtaaaatatgac

SEQ ID NO: 241532 - DNA, 613 bp, Unknown
  Bacterial polypeptide expressing nucleotide sequence isolated from the Sargasso Sea
aattagatcaattgaaggtcataagaaaggaatagaaacagctaagtttattgctaaatactgcggcaatcaaaatattaaagaattaacactttatgcattttccatgcaaaactggaaaagaccaaaagtagagatcaagtccttattaaaattgttttcaactctattcgaagataaatctcatttctttataaaaaataattttcaatttaatccaattggaaggattgatgagctcaacgaagccgtaagaaagaagataaattcattgaagaataaaactaaatctaataacggaatggctataaatgttgcaataaattacggtggcatcgaagaaataattgacacttataaaagaatcactttgaatggtgaaaagaatatagatgaaaaaattctaaaaaaatattcttatttacctgaaagtagtgaagttgatctaattataaggacaggaggatatagccggatatcaaatttcttaaatcttcacaattcatattcggaaatagaaataagcaatatactttggccggactttgggcaagaggattttgaaaaaatcctctcgaaatacaaaaaaatagaaaggaattatggtaaataa

SEQ ID NO: 241533 - DNA, 450 bp, Unknown
  Bacterial polypeptide expressing nucleotide sequence isolated from the Sargasso Sea
aatgagttatttagacaaaattgatcctaaggccctgccgcagcatgttggaataataatggatgggaacggtcgttgggcattagagagaaatttaccgaggatacatggtcaccgcagtgcggttaatgctgtacgagctagtgtcgaagcctcagcagagctgggattaaatgtactgactttgtttgcattctcaacagaaaactggcaaaggcccgaaaaagaggtctcagatttgatggagctttttcatgaatttctggaaaaagaacttcacacaatgcttgaaaataatgtgcgttttcagctgattggagatagagacaaattgcctagttttcttcaggataggttgagcaaagcacttaattcgacttcggaaaattccggtttgctcttggatatagcacttaattatggtggcagggatgaaatatcacgtgcagt

SEQ ID NO: 241534 - DNA, 556 bp, Unknown
  Bacterial polypeptide expressing nucleotide sequence isolated from the Sargasso Sea
aattgtcaaaagctgtattaaacttaatgtaccaataattactttttatgttttctcctctgaaaactggaaacgcccaaaaaatgaaattaattacttattcaatctaattaagatttatttttctaaagaaatcaaaagtataattaatcaaggaattaagatcaatattcttggtgaaattaacagactgcctaagggaataaaactcatactaaaaaaaacaataaattctaccaaaagaaataaaaaaattattattaatttggcaataaattacggttcaaagcttgaaattattaatgcaattaaaaaaacaaaaaaaaataaaagcattaaaaacctggaaaaaaatttatatacaaaaaatctaccacatcctgatattttgattagaactggtgggagacaaagattaagtaattttatgctttggcagatggcttatactgagttatttttcttaaaaaaattatggccggatttcaatcctagtgatttaattaaaataataaaaaaatatgataaaattaaaagaaattttggtggtgtatga

SEQ ID NO: 241535 - DNA, 530 bp, Unknown
  Bacterial polypeptide expressing nucleotide sequence isolated from the Sargasso Sea
tatgagttcacctaaacatgttgcgattatcatggatgggaatggaagatggggaataaaaaaaaaaaaatcaagaaattacggacataaccaaggtgtcaaagttgttgaaaaaataattgctgaagcaatctctaatgatataaaatatttaactttattcactttttcaacagaaaattggaaaagaccaaaaaaagaaattagtttcttaatgtatcttctgaaccaatacataaaaaaggaattaaaaaacttagttaaaaaaaatataaaaattaaaataattggaaatataagaaaatttccaataaaactcaaacaaagactaagagaggcagaaatacaaactttaagtaatacaaaaattcaaataaatattgcattaaattatggatcaaaagaagaaataataaaaactgtaaaaaaattaaataagctatcgataccaataaatgaaaaaaatatatcgaaaaacctgtatacaaaagatacgcctgacccagaaatattaattagaacaggaaata

SEQ ID NO: 241536 - DNA, 483 bp, Unknown
  Bacterial polypeptide expressing nucleotide sequence isolated from the Sargasso Sea
attttttaatgttttttaatagagatatattaatcagaagaagagaagaatttaacaataaaggagtaaagtttcattttattggtgatttaggtgatgaaagaattcccgatgaaaataaaaggttaatgagtgagacggaagaattaacaaagaataatacaaatttaaatcttgtatttgcatttaattatggatcaagaaaagaaatttatgatgccattgcaaaaataagtaaaaataattctggttcaatcaatgaagaatctttcaggtctaatttattacttccagaaatgccagatccggacttactcattcgaaccgcgggagagaagagagtaagtaattttcttctctatcaattaagctacactgaacttatgtttgtcgatactctttggccagactttgatgaaaatcagctagatctggctgttaaagagtttgaaaatcgagttagaaagtacggaaatgcctgaa

SEQ ID NO: 241537 - DNA, 175 bp, Unknown
  Bacterial polypeptide expressing nucleotide sequence isolated from the Sargasso Sea
cctgatttaataataagaactagtggagagaagcgggtaagtaattttttgttatggcaacttgcgtattcagaattggtcttttcagacactttgtggccagatttttctgagggtgattttgaaaaagcgttgtcggagttttatcttcgagatagacgatttggctcttaga

SEQ ID NO: 241538 - DNA, 124 bp, Unknown
  Bacterial polypeptide expressing nucleotide sequence isolated from the Sargasso Sea
tatgagattaaaaaaaatatcaacaaataaagaaagtatcaaattatctaatgaaatagatattcaaagaatcccagaacatatagcaataataatggacggtaatggaagatgggctactaaa

SEQ ID NO: 241539 - DNA, 206 bp, Unknown
  Bacterial polypeptide expressing nucleotide sequence isolated from the Sargasso Sea
gatgacggcagccccactcactagcgatattggcgcggtgccgccgcaacacatcgccattatcatggacggtaatggtcgatgggcacaggacaaaggcctggcccggagcgctggccacaagcatggtgcggaagctgctcgcctcgccgtcgaaggtgcggttgaggagggtatccgttacctcacgctttttggattttctt

SEQ ID NO: 241540 - DNA, 145 bp, Unknown
  Bacterial polypeptide expressing nucleotide sequence isolated from the Sargasso Sea
aatgagtttagaaaaagtaatagacgataaaattattgacttattaataaaaatagataagcaaaaattacccaagcatgtagcaataattatggatggcaatgggagatgggcgattagaaaaggtttgccccgatcatttgga

SEQ ID NO: 241541 - DNA, 367 bp, Unknown
  Bacterial polypeptide expressing nucleotide sequence isolated from the Sargasso Sea
ctctcgggcagaaattattagcgcatttaattcccatatcaaagaaaggccaggagagcctatctcagaagaaaagttagactgtcttttatctaaccctgagagtggtgacgttgatcttttgattagaacaggtggtgacgttagaatttcaaattttcttctctggcagtgtgcatatgcagagttttacttttctccagtgccttggccggacttttcaaacagagaatttcgaagaatcttgaatgaagtctcagatagagaaagacggtttggtggtgttaatttacaaactagtcttattcaaagtgctgaaatagccaaaaaaaataagacacttttaagtgagtcactaaggttttaa

SEQ ID NO: 241542 - DNA, 517 bp, Unknown
  Bacterial polypeptide expressing nucleotide sequence isolated from the Sargasso Sea
atgattaaaaactcaattaatcatcttgcaattataatggatggtaacgggagatgggctaaacataaaaatcaaccgaggacttttggccacaagcacggagcacaaacagcaaaaaaaattataaatgattgtgtaaaaaaagaaattcctttcctgactctttacactttttcaaaagaaaattggtctagacccaaagaagaaattgatacattaatgattttgctttctacaatgctaaagaacgaaactgaaaacatgctgaggaacaatataaagtttaatatcgttggaagaatagaagacttaccagaaaaaacaagggattggattttaaccacaattgataagacaaaaaacaacacaggattaactctaaccctagcgctgagctatggaggaaggcaagaaattgtagatgcattcaattctattataaataaagagataaaaattattaaagaagaaattcttaaaaatcacttatattgccctgattgccagatccagacat

SEQ ID NO: 241543 - DNA, 646 bp, Unknown
  Bacterial polypeptide expressing nucleotide sequence isolated from the Sargasso Sea
aggagcaagaaatttaaaaaatatcattcaaaaatctagttcattaaatattcaacaactcacagcatttgctttttcaactgaaaactggaatagaaataaaaatgaaataagtataatttttcatcttttagaaaaatttataaggtcagaaattgcggagataaatgctaacaatataaaattcaatcttattggtgataaatcagtgttcaaagaaagacttactgaaattatcaatagagctgaagatcttactaaatataatgacggcttaaatttcaatttagcatttaattatggtggtgaaatggatatagtaaagtcattcaccaaaatttttgaaaaattgttaaaaagtaaaacccaagttcctataataaacttagagatcattaaagaaaatttactatcatcaagtgttaatgacatagaccttttaataagaacaggtggtgagcagaggatatcaaattttatgcttttacaattaagttatagcgaattatttttcagtgacataaactggcctgattttagtttcagtcatttcgagcaagccataaaaagcttttcaaatagaaaaagaagattcggttctagtaaaagtcacaagagtggtcataggaaaattacatcttattaa

SEQ ID NO: 241544 - DNA, 667 bp, Unknown
  Bacterial polypeptide expressing nucleotide sequence isolated from the Sargasso Sea
gaacaaactctaccatattgctttcattatggacggcaatgggaagggtggggtaaaaaaaaaaataaaggaagaaactacggccatatcaaaggggtagaaactgtcaaaaaagttgtaaagagctcaataatattgaaaatacctgtcgtaactttttatgttttttcttctgaaaattggaagagacctaaaactgaaattgcctttttatttaagataatcaaaaattatttttcaaaagaaattaaaagcgtgatttctcaaggaattaaaataaatattttgggtgagttgaaaaaattatcaccagaattaagaaaagtattaaaaaaaagtgcccagcaaacaaaaaaaaataaaaaaattatagtaaatttggcaattaattatggatcaaaaaatgaaataattcatgccgctaaaaattgtaaaaatttaaattttaaaaattttgaaaaaaatttatttactaaagatttgccaaatccagatatacttataagaacaggaggtcataaaagattgagtaattttatgttatggcaattagcttatgcagagttattttttctcaaaaaattatggccagactttaatagaagtgatttagttaaaataattaaaaaatttaaggtaagtaagagaaatttcggggctatatgat

SEQ ID NO: 241545 - DNA, 151 bp, Unknown
  Bacterial polypeptide expressing nucleotide sequence isolated from the Sargasso Sea
aaatagattaagtaattttttattatggcaatcatcctatacagaaatattctttataaaaaaactatggcctgattttaataaatcagatttcagaaaagttattttaaaatttaaaaatacaagaagaaattttggtggaataaaatga

SEQ ID NO: 241546 - DNA, 185 bp, Unknown
  Bacterial polypeptide expressing nucleotide sequence isolated from the Sargasso Sea
tccagatcccgacatattgattagaactggaagcacccatagattaagtaattttttactgtggcaactggcatattctgaaatattctttgaaaaaaagttatggccagattttaaagaaaatgactacaataaaattttaaaaaaatttaaaaaaactaaaagaaactacggtaatatttaat

SEQ ID NO: 241547 - DNA, 253 bp, Unknown
  Bacterial polypeptide expressing nucleotide sequence isolated from the Sargasso Sea
acatgattttgagcagttcttgtcgttaaagggttctagtcctgatctattaattagaacagctggatatcagcgtctaagtaattttatgctatggcaacatgcttatactgaattatactttactgattgtttgtggcctgactttgatgagaaagagttagatttagctattaaccattactttaccacgactagaaagtttggaaaattagatgaatataatccattattagaagaagatgttgaatag

SEQ ID NO: 241548 - DNA, 628 bp, Unknown
  Bacterial polypeptide expressing nucleotide sequence isolated from the Sargasso Sea
agaatgggcaaaaaaaaataatctaccttctgcttcaggccatagaaaaggtattgagacattaatcgagattgttaaaaccgcaaaaaataattctataaaaagacttgttgtttatgctttctcatcagagaactggagtagagaaaattttgaagttaacgctcttatgaatcttattaattttggggtagatgttaaattagatgaaatcaaagagaatggcatcagtttaacctttattggagatatcgagaatatgccaaaaaaagcaaaagatggtatttcaaaatgcattggcgaaacaaggcatctcaaagaatttaatttaataattgcactgaattatggttctatttgggatatgttaaatgcagctagaatactaaataattctggagaggaactaacccaaaaaaatttcataaaaaatactcaattaggtgaatttgatgttgatattttcataagaacaggtggtgatatgcgtttaagcaattttttgctccctaatattggatattctgaattatttttcactgaaaaattatggccagaatttaactcaagagattttcaaaaaatactcaaagaatttgaagcaagacagagaaggtttggcaaatga

SEQ ID NO: 241549 - DNA, 190 bp, Unknown
  Bacterial polypeptide expressing nucleotide sequence isolated from the Sargasso Sea
atggtccagaaaaagaacttaaatcatttagcggtgatcatggatggcaatgggcgttgggcaaagaagagaggcatgtctaggatttttgggcatgagcgtggtgcagatgttgccattgaattggtagagacttgtgtagaaaaaaagattaaagagctcaccttgtatgcattgagtgttgaaaaca

SEQ ID NO: 241550 - DNA, 619 bp, Unknown
  Bacterial polypeptide expressing nucleotide sequence isolated from the Sargasso Sea
gaaaaaaaaatcaagaaattatggtcacagagaaggacttaatacagttaaaaaaattatagatgaaagcatcaataataatattaaatatttaacattatttgcgttttcaacagaaaattggaaaaggcccaaaaaggaaataaagtatttattcaatttattagaaacatttcttcataaggaaattaacaaactaattgaaaaaaatattaaacttaaaatcattggaaataaaaaacatttttcaaataaattaaaaaaaattctcacaaattcggaaaaaattacaaataaaaattcaggattacagatcaatttagctcttaactatggatttaaggaagaattagtttcttctataaacaatttaatcaaaaaaaaaaaaagaattaacgagaaaagtataaaaagtaatctgtacacttcgaacataccagatccagaaatattaattagaactggtaatactaatagattgagtaactttatgttatggcaaattgcatactcagaaatttttttcattaaaaagttatggcctgatttttcaaaaagcgattttaaaaaagtaattaatacattttacaacacaaaaagaaatttcggtggtttatga

SEQ ID NO: 241551 - DNA, 211 bp, Unknown
  Bacterial polypeptide expressing nucleotide sequence isolated from the Sargasso Sea
aaggaaatatttacagactggaaatatcccagaccctgatgtattaataagaacaggtgatacaaatagattaagtaattttctattatggcaattggcgtattcagaaattttttttgaaaagaagttatggcctgattttaatgaaaaagactataatagaataatcaaaaaatataaaaagataaaaagaaattttggaaatatttaa

SEQ ID NO: 241552 - DNA, 544 bp, Unknown
  Bacterial polypeptide expressing nucleotide sequence isolated from the Sargasso Sea
attgataactgggaagaggccaaaagaagaaacatcaaaattgatgcaattactaagaaagtttatttcaaacgatctatcggaattacatagtaataatgttagaataaaagtaattggtagtcggaatgagattcctaaagatattgtagaccttattaaaggagctgaagcgcttacagtcaataatactggtttgtatcttcaagtagcttttaattatagtggtagacaagagattataaacgctacaaaaaaaatcgctattgcttctgctaagggcgaaatcgatccaaataaaattgataatacagtatttgagagtaatttatattctgccggagtacctgatccagatttaattattagaacaggttctgagaaaagagtatcaaactttctattatggcaattatcctattctgaggtttattttgaagaatgcttatggccagattttaataaaaataagttagatttagcaattaatgattataatagtaggtcaagaaggtttggaaatgttattaatgagtataaataa

SEQ ID NO: 241553 - DNA, 400 bp, Unknown
  Bacterial polypeptide expressing nucleotide sequence isolated from the Sargasso Sea
tttgggtatcagtgaacgcatgggtaatgttcttggccaagcggtcgagtctaagctcctccgttctattcaagaacacccagtcaaagttaaccacctcgcgattattatggatggtaatcgaagattcgcatggtcaaaggctttggaaaccaatattggtcacaagatggggaagcaaaaattagagcaagttcttgattgggtccttgaattagagattggctatcttaccgtttacgcactatctactgaaaacttaactcgtgaaaatcatgaattggatggattgtttaatctctatatcgaaggactcaaagatatagcagatgacccgagaatccatgaaaataaagtgaaggtacagattattggtcgcagagaattattacctgaatct

SEQ ID NO: 241554 - DNA, 602 bp, Unknown
  Bacterial polypeptide expressing nucleotide sequence isolated from the Sargasso Sea
gatgacttcatcacaaaataaccatccagagacaatccctaatcagccaaaacatgttggcatcattatggatggcaatggaagatgggcaaaaatcaggggtaaaagaaggatattcggccatgaagctggcgttcttaaggcaagagagttggttgaaaccgctgtaaaaattaagcttgaggcattgacactctatgcattcagttctgagaattggtctcgaccaaaaaaagaagtcagcggattaatgagtctttttgaaaagactattgaaaaatataccagtttattgattgataacaatgtgcgattcaaaaccgctggtgatccatcaatgttgcctgatgtcttgaaacggaaattagagcagatggagggcatcacatcagaaaatagtggactaaaattgactctagcaatcgcttatggcggtcaacaagaaatcataaatggaatcaaaaaattaattgatgatcatgacaatcagatcatcgacgttaatgatctgactgttgaatcatttaatgaatatctgtcattcaatgatcttccagagctagatttgataatcagaacctctggtgagaccagactaagta

SEQ ID NO: 241555 - DNA, 317 bp, Unknown
  Bacterial polypeptide expressing nucleotide sequence isolated from the Sargasso Sea
aaaactaatagtaaatttagccttaaactatggttctaaaaatgaaataaaaaatgcatttaataaattaaaaggaaatcgatcattaattagtgagtctaaaattaccaaacatttatatacaggaaaacttccagaccccgatattttaatcagaaccgggggacaaaaacgcttaagtaattttatgttatggcagctagcttattcagaactttactttctcgataaactatggcctgattttaattctagtgatttaagaaggattattaaaaactatagatctataaggagaaactttggaaaaatatgac

SEQ ID NO: 241556 - DNA, 521 bp, Unknown
  Bacterial polypeptide expressing nucleotide sequence isolated from the Sargasso Sea
cgaaaattggaaaagacctattaatgagattaaatatttatttaatttattagataattatcttgataaggaattaaaaaatttacaaaaaaataatattaaaattaaaataattggaaatataaatccatttccaaataaattaaaaaataaaatattgaatattcaaaaattgacaaaaaagaataaaagtattcaaataaatatggctttaaattacggttcaagacaagaaattgttaacgcatttaaaatgttaaaaaaaaaatctttaagaatcaacgagtataacatctcaaaatttttgtacacctctggagttccagatcctgacattttaattagaacaggaaatacaaatagaataagtaattttttaatatggcagttgatatatacagaaattttttttataaaaaaaatgtggcctgagttcacaaaaagagatttctttaaaattatatctaaatttaaacatattaatagaaattatggaggtttaaatgacaaatttaagtaag

SEQ ID NO: 241557 - DNA, 493 bp, Unknown
  Bacterial polypeptide expressing nucleotide sequence isolated from the Sargasso Sea
atgactttacctaaacatgtagccataattatggatggtaatggaaggtggggtttaaaaaaaggaaaatcaagaaattttggtcacaggcaaggagtaaaaactgtagaaaaaattataaaccaagcgataaagaaaaaaatttcttttttaacattatacacactgtctacagaaaactggaaaagacctatttttgaaatcaattatttacttaaattattagaaaaatacataaataatgaattagaatcattagttaaaaacaatataaaaataaaaataattggttcaatcaataagttttcaaaaaaattaaaaaataatttaaaaaatgttgaaaatatgacaaaaaaaaataacaaaattcaaatcaatattgctttaaattatggttcaagacaagaaattgttaattcaattaaaaaattaaaatacaattctctttctattaacgaaaaaaatatttctaaattcctatatacaaaagaca

SEQ ID NO: 241558 - DNA, 649 bp, Unknown
  Bacterial polypeptide expressing nucleotide sequence isolated from the Sargasso Sea
attgggtgcaagaaatttaaaaagtattattcataaatcaagctcattaaatattgagcagctcacagcatttgctttctcaactgaaaactggaacagagaaaaacatgaagtagatattatttttcgcttgttagaaaaatttattaaatctgaaatggctgaaatgaataaaaataatattaagtttaaattaatcggtgacaaagttccctttaaagatagcctggttaaaattataaatagggcagaaaatttaactgcaaacaacacaggtctttcctttaacctagcatttaattatggtggggaaatggatatagtaaattcattcaccaaaatttttgaaaaatttttaacaagtaaaacccaaatccctattacaaatttagagatcattaaagaaaacttattatcatcaagtgttgatgacatcgatcttttaattagaactggtggagagcagagaatatcaaattttatgcttttacaattaagttatagcgaattttttttcagtgatattaattggcctgactttagttttagtcattttgagcaagcccttaaaagctttacaaatagaaaaagaaggtttggatctagtaaaaatcaaaagagcgctcataggaaaattacatctttgtaa

SEQ ID NO: 241559 - DNA, 536 bp, Unknown
  Bacterial polypeptide expressing nucleotide sequence isolated from the Sargasso Sea
tatgaattcacccaaacatgtagccataataatggatggtaatgggagatggggaataaaaaaaaaaaaatctagaaattatggtcataaaaaaggattagaggttgttgaaaaaattattgaaacagctattgatgagaatatcaaatatttaactttatttgttttctctacagaaaattggaaaagaccaacaaacgaagtaaattatttatttaagttattaaataattatgttgaaaaaaaaataaataagttattaaaaaaaaacattaaaattaaagttattggtaatattagtccttttccaactgatcttaaacgcaagctcaaaaatgtccaaaaattgacaagaaaaaattcaaatattcaagttaatatggctttaaattatggttcaagacaagaactagttcatgcattaagaaaattaaagaacaaaaatttactaattaatgaaagtaatatcaataataatttatacactaaaggcatgcctgaccctgaaatacttatcagaactggtaatacaaata

SEQ ID NO: 241560 - DNA, 675 bp, Unknown
  Bacterial polypeptide expressing nucleotide sequence isolated from the Sargasso Sea
taaatcatcttgctatgatcatggatggaaataaaagatgggcgaatttacatggagcaagtttacaggaaggttatcaaaaaggtttaaataaactaagggagattatttctgtttgtttggaacaagaaataaagcattttactgtatatgcactttctgctgagaatatgaagagagattcagtttctgcaatctttgatattattataaaacaaagtaaaaaaattattgaagaatttagtttcgataataatgttagggttgcaataattggagagagagaaaaaatacctcagattattaaaaaagaatttctgaaaattgaaaaattgacccagaataataaaaaattaaaactaaacatagcttttaattatggaacagatgtagagtttctaaaaattgtaaaacaaattgtaagttcatataggaataaagaaaataaaattacacatgctttgttaaaaaaacatatgtatttatatggtagtcccgatccagatctcttaattagaacaggtggatttcaaaggttgagtaattttatacttttaaatataagttatacagaaattttttttacaaaaacattatggcctgatctaagtaaaatcgagctattaaaaatatttgataaattttataaaatagaaagaaaatatggactttaag

SEQ ID NO: 241561 - DNA, 130 bp, Unknown
  Bacterial polypeptide expressing nucleotide sequence isolated from the Sargasso Sea
tatgagattgaaaaagatatcaacaaataaagattttattgaagtgtctaaagaaatagatatgaaaagagttccagaacatgttgcaataataatggacgggaacgggagatgggccactaaaaggggc

SEQ ID NO: 241562 - DNA, 427 bp, Unknown
  Bacterial polypeptide expressing nucleotide sequence isolated from the Sargasso Sea
tcaaaattcagttaaaataaatattattggtcaaaaaaataacttgcctaatagcattcttaaaatagtaaatgagattgaaaattttgaaacaaaaaaatttaaattaaatttaaatattgctttcaattatggaacagatgacgaattagtatctatggtaaaaaagataataagaaataaagaaataccaatagaagatattaataaggcatttatctatgaaaatttatatctatcaaaagttcctgatcctgatttattaatcagaacaggcggatataaaagattaagcaatttcatattattgaaattaagatacactgaattattttttactaatacactatggccagatctttcagaaaatgaactatcgaatatttttaatgaatttaaaaagataaaaagaaattatggattataa

SEQ ID NO: 241563 - DNA, 235 bp, Unknown
  Bacterial polypeptide expressing nucleotide sequence isolated from the Sargasso Sea
aaaaaaattacagaaaaacttgtgagaaataacctttatacaaaaagtattccagatccagacattttaattagaacgggtggaaaaaaaagattaagtaattttatgttatggcagttagcctattcagaactatattttttagataagttatggcctgattttacatctcaggatttaggcaaagttttaaaagatttttataaaactaaaagaaattttggaggaatttaaa

SEQ ID NO: 241564 - DNA, 526 bp, Unknown
  Bacterial polypeptide expressing nucleotide sequence isolated from the Sargasso Sea
atgcaattaatgttagaggctatttatgagcatcaacaagagttggttgatcaaggcattacggtgcgcattattggtgataagcgtgcatttaatgcaaatttaataaaagctatggatcagttagaggcagcaacagctaaaggcggtcgtatgcagttaaatttagcgcttaattacagtgggcaatgggatattcttcaagctagttctaagatagcccaagctgcaaaaaacaatcaactagatccaggtgcgctcacagcagaaaatttttcgtcctatcttgcaacagcgccgcataatcgggttgatttattaatcagaaccggcggtgagcaacgcattagtaactttatgttataccaagttgcctatagtgagctttattttagtgatcttttattccctgattttgatgaagcggcttttcaacaggcaataagctggtataatcagaggcagcgtcgttttggcaagacccaagagcaaattaataagcataaggaaaagcaagatggataaa

SEQ ID NO: 241565 - DNA, 539 bp, Unknown
  Bacterial polypeptide expressing nucleotide sequence isolated from the Sargasso Sea
tatgaattcacctgaacatgtggccatcattatggatggaaatggaagatggggaattaaaaaaaagaaatctagaaattttggtcatagtcaaggcgttaaaatagttgaaaaaataatagaggaagccattttaaacaaagttagctacctaactttgtatactttttctacagaaaattggaaaagacctaagaaagaaattacctttttaatatatcttttggaaaaatatatcgatcagaaattggataaatttataaaaaaaaatataaaacttaaaataataggaaatataaataaatttcctagttcattaaaatctaaacttctaaatgctgaaaaattaacaaaaaaaaaagataaaatacaagtgaacatagctttaaactatggttctaaagaggagattatatactctgtaaaaaaattaataaattcatcaattagtataaatgagaagaatatttcaaaaggcttatatactaaaaatatcccagatccagaaatactgataagaactggtgatagacatagac

SEQ ID NO: 241566 - DNA, 365 bp, Unknown
  Bacterial polypeptide expressing nucleotide sequence isolated from the Sargasso Sea
tatggattctaaacaaaaaaataaactaaagcatatagccataataatggatggtaatggcaggtgggctgaaaaaagaaataagacaagaataaaaggccatatccatgcaaaaaaaagcgttaaagaatgtatagagttctgtttagaaaataaaataaaatatctgagcctttttgcattttctaccgaaaattggtctcgacctaaaattgaagtaagtgctttaatgtctctgctagacgttgtaattaatgatgaagctaataatttaatggataaaaatataaagtttagatgtattggagaaataaatgagttaccaaaaaaaactattgaaagcattgaaaaaataaaaatgctta

SEQ ID NO: 241567 - DNA, 339 bp, Unknown
  Bacterial polypeptide expressing nucleotide sequence isolated from the Sargasso Sea
tatgaattctccaaaacatgtagccataattatggatggcaatggtagatggggaattaaaaaaaaaaaatcaagaaattatggtcatacagtaggcgtaaaggtagttgagaatatcattagagaagcaatatttcagaaaataaaatatttaactttatacacattttctacagaaaactggaaaagacctaaaaatgaaattaaatttttaataaaacttttagaaaattatatttacaaagaaattgaaaatttaaaaaaaaataaaattaaattaaaaataattggtaatataaataaatttccggattctttaaaaagtaaattaagacaagc

SEQ ID NO: 241568 - DNA, 292 bp, Unknown
  Bacterial polypeptide expressing nucleotide sequence isolated from the Sargasso Sea
aactatggatctaaatcagagttgattgatgcttttaaaaaaattaataaaagcaaaagtgctattaatgaaaaaaatttaagtaaaaatcttcaaactaaaaatctcccagatcctgatattctaattcgaacaggtaatacgaaaaggctaagcaattttttattatggcagcttgcatattctgaaatcttttttgagaaaaagttatggcctgccttcaacgaaaaagactataatagaattattaaagagtataaaaatattaaaagaaatttcggaaaaatatgat

SEQ ID NO: 241569 - DNA, 199 bp, Unknown
  Bacterial polypeptide expressing nucleotide sequence isolated from the Sargasso Sea
tatgactaaagatatccctgaccctgatttcgttattagaacatctggtgaaatgaggctttctaattttttgctttggcaagttgcatattcagaactttattttactaaaactttatggcctgagtttaatactcaaaaatatattttggcactaaaaaattatattaataggaaaagaaggtttggtggtgattaa

SEQ ID NO: 241570 - DNA, 652 bp, Unknown
  Bacterial polypeptide expressing nucleotide sequence isolated from the Sargasso Sea
gtgggcaaaagcgagagggctgccgcgggccatgggacataaacatggtgttgaaaatgttagagttgtagtagaaggttcgttgagcctagggataaaatatctaacgctatttggcttttcctcagaaaactggaagcggacgcccaaggaaatctttgatttaatgtcattgcttcgaaattatcttgataacgaaattaatgagctgcacagaaaaaatatacgatttaaagtgatcggcgatagagaaaagctcgatacagatatagttgaattgattgaagctgccgaggagcttacaaaagcaaattgtgatttgatgttgacaattgcgctaagctatggcggccggcgtgcgataactttagcggcgaaggaactggcatatagagcatgcaaaggcacaattaaattagatgacatttctgaagaatcattcgaattggttttggagacacagggtgtaccccatccggatttagtcataagaacttctggggagaaaagaatttctaactttttattatgggaatgcgcgtactctgaatttgtcttttttgacaccttatggcccgatttttcgggtgaacatttaacgaaagcagtccaagaatattgcaatcgggaacggcgttttggggcggcctaa

SEQ ID NO: 241571 - DNA, 445 bp, Unknown
  Bacterial polypeptide expressing nucleotide sequence isolated from the Sargasso Sea
aaaaaaaatttaaacaaattaattaaaaataatattagaattaatgtaataggaaacataaatgacctaccatcatcacttaaaaaaaaattaatttcagtacaaaaaaaaactcaaaaaaataaacttatacaggttaatgtagcgcttaattatggatttaaggatgaaattattagatcatttaaattaattaaaaaaaaatcattaacaatttcaaaaaaaaatgtagaaaaaaatttatatactaattctatacctgatcctgaaattttaattcgtacaggggggacaaatagattaagtaattttttgttgtggcaattagcttattctgaaatattttttgttaaaaaattatggccagattttagcgaaaaagactattacaatataatttctaagtttgaaaaaattaatagaaactttggttcagtgaaatgat

SEQ ID NO: 241572 - DNA, 238 bp, Unknown
  Bacterial polypeptide expressing nucleotide sequence isolated from the Sargasso Sea
tatgcaacagtctaaaagagataaggttctttctggttatattccagaacatatagccattattatggatgggaatggtcgttgggcccgttctcggtctttaccacgtatttcagggcacaaagaaggaattaattcagttagagaaataacccggatttgtggtgaaattggggtgaagtatttaacactttatacgttttctactgagaatggaaaagaccacgagcggaggttc

SEQ ID NO: 241573 - DNA, 582 bp, Unknown
  Bacterial polypeptide expressing nucleotide sequence isolated from the Sargasso Sea
atttaagctggttaactgtttatgcattttctactgaaaattggacgagaacaactgaagaagttgattttttaatgttttttaacagagatatattaataaggcgaagagaagagtttcacgaaaaaggagtcaaatttaattttattggtgatctaaaagataaaagaattcctgaagagaacaaaaaattaatgaaagaaacagaacatataaccaaagataacaaaaaattaaatcttgtttttgcttttaattatggttctcataaagaaatacataatgctgtacataaaactgcctttggtcattatttttatcttaaattgaatgcttggttgtttacaaagaaacacatagaagaaaattttaaaaattatatgtacttacctgaaatgcccaatcctgatatattgattcgcacagcaggagagaaaaggttaagcaactttctactatatcaacttagctacactgaacttatgtttattgatacactttggcctgattttgatgaagatgatttttataatattgttgaagagtataaaaaaagagtaagaaaatatggaaaagcctgat

SEQ ID NO: 241574 - DNA, 441 bp, Unknown
  Bacterial polypeptide expressing nucleotide sequence isolated from the Sargasso Sea
taaataatatttcagaaaaaatcagtgaagataatataaatctttcttttattggagatttaacaaatttaccaaaaaaaacaatttctaaaataaataaattaaacaaaataaataaaaatgatcaatcaaacaaattaattattgcatggaattatagtgggcgtagtgacatagttaatgctttgaataatattaaaagcaaaaacagaatcacagaacaagaacttaagtctcatctgatgacaaataaaattcctgatccagatttgataattagaacaggaaatcaaataaggttgagtaatttcatgttatggcaagcagcatactcagaattatacttttcacaaaaactttggcctgatttcaacaaaaatgatttaaataaagcattaaaagaatttgaaaagagaaggcgaaattatggctcgatctaat

SEQ ID NO: 241575 - DNA, 211 bp, Unknown
  Bacterial polypeptide expressing nucleotide sequence isolated from the Sargasso Sea
gcaaagagtttgatgacaagagacattcctgatccggatttagttattagaacatctggcgaaatgagattatccaattttttactttggcaagtcgcatattctgagctttatttcactaaaacgttatggccagaatttaatactcaaaaatatgttctagcacttaaaaattatattaataggaaaagaaggtttggtggtgattgaa

SEQ ID NO: 241576 - DNA, 493 bp, Unknown
  Bacterial polypeptide expressing nucleotide sequence isolated from the Sargasso Sea
tatgaaaataccaaaacatattgccataataatggatggtaatggtagatggggagtaaaaaaaaaaggttccagaacactcggccataaatatggccttaaaacagttgaaaaaattattaaagcgtctttaaaaaaaaaaattaaatttcttacattatatacattttcaacagaaaattggaaaagacccaagtcagagattaattatctttttaatcttttggaattttatatagataatgaaataaataaactccaaaaaaatggtgttaagattaatattttaggtgacttaaaaaagtttcctaaaaatttaagatttaaattaaataaaacacaatctttaacaaaaaaaaataataaaataactgttaatgtagcattaaattatggatctagagaagaaataattaatgcaatgaaactattaaataaaaaatcattgaaaattaatgaaacaaatttatctaaatttttatacactaaaaat

SEQ ID NO: 241577 - DNA, 368 bp, Unknown
  Bacterial polypeptide expressing nucleotide sequence isolated from the Sargasso Sea
aaaattgaatttattattaaattcagcagaaaaaaagacttccaaaaattcaaaaatccaaattaatctcgcattaaattatggttctaaatttgagttagtaaatgcatttaagaaaattataaaaaataatatcaatatcaacgaaaaaaatattgaaaaatttctatataccaaaaatatacccaacccagatatattaattagaactggtaacacaaaaagattaagtaattttttattatggcaacttgcttattcagaaattttctttgaaaaaaaattatggccagattttaatgaaacagattattcaaaaataattaataaatttaaaaaagttaaaagaaattacggaaacatatgat

SEQ ID NO: 241578 - DNA, 463 bp, Unknown
  Bacterial polypeptide expressing nucleotide sequence isolated from the Sargasso Sea
tatgcacgtcggaataataatggatggtaatggacgatgggcagctgaaaagggcaggccaagggcttttggccatagaaaaggagcttctagggtaacagaaatagtagaatcctgtccaaacttgggtattaaaacgttaacgatctacgctttttccacagaaaattggagtagggcagcgcacgaggttgaaagccttatgagattgtttaggggatatctacaaaataagtttctatctttagttaaaaacaatgtgcacgttaaatttattggagatccatctccaatagctaaagatctacggcttcaaatgcgtaagctggagatagcaacaaagaccaacaatggcttaaatttaaacgtagccttaaattacggtggaagagatgaaattgtacgttcagcaaaaaaattcgcaaagctggtttctagcaataagatgaagatttctgatctt

SEQ ID NO: 241579 - DNA, 148 bp, Unknown
  Bacterial polypeptide expressing nucleotide sequence isolated from the Sargasso Sea
aaaacgcttaagtaattttatgttatggcagctagcttactcagaactttactttcttgataaattatggcctgattttaattcaaatgatttaagaagaattgttaaaaattatagatctataaaaagaaactttggaaaaatatga

SEQ ID NO: 241580 - DNA, 192 bp, Unknown
  Bacterial polypeptide expressing nucleotide sequence isolated from the Sargasso Sea
aaaatatagttaatcctgatatacttattcgtactggtggaaaaaaaaggctaagtaattttttactatggcaaattgcttatacagaagtatattttgttaacaagctttggcctgactttaaaataaatgattatattaaaataattaataattttaaaaaagttaaaagaaactatggaaatatatgaa

SEQ ID NO: 241581 - DNA, 662 bp, Unknown
  Bacterial polypeptide expressing nucleotide sequence isolated from the Sargasso Sea
cggccgctgggcggaagaaaaaggattgagtcgtacagaaggccatatagcaggcacacaaaacattcgtcgcgtagttcgccaacttatcgtgaatgatgttcagtacgtaacgctttatgctttctcaaccgaaaattgggataggccagtagatgaggttgatagtttactgcagatactgtcggattctatcgttaatgaaacagctgaaatgaacgatgaaggcgttcgtatacgacatttaggtagaattgacaggctgcctgaaagattgcagaaagctattgaagaaagcgtcgatttaacgagccaaaatactgtcattaatttaaatgttgccttcgattacggtggccgagacgagatagtacaagctgtgcgcaggattgttgattcaaaggttaagtttgaagatataaccgaagaaactctatcatctggactctatactgctgggatgccagatcctgatttgataatccggactgctggtgaaatgaggattagtaactttatgatatggcaagccagctatagtgaatactattcgagtccagtttgttggcctgattttgacgagctggaactgaacaatgcattgtcagagtatagtcgcaggaaacggaaattcggcagccttaacaagactgtaacatagc

SEQ ID NO: 241582 - DNA, 527 bp, Unknown
  Bacterial polypeptide expressing nucleotide sequence isolated from the Sargasso Sea
tgcagaggtaaaagcacttatgactcttttattgaaaacgattaatatagaaataaaagaattacataaaaacaatgttcgttttacaataattggagaactggatttattaccaatttctactgttgaaggattagaaaacggtgttgagctaacatctaaaaatactggattaaatttgtgccttgcacttaattatgggagtagaaaagaaattttagatgctgtaaaatcaatatgtactaaaatacaaaatgaagaattaagattggaacaattagatgaaaatcttttttctaaagaactctatacaaaatctattcctgaccctgatttaatgattagaactagtggtgaatatcgattaagcaattttttattatggcaaagtgcatacaccgaaatctacatgacagaaacttattggccaaactttagggaaaaacaattaatagaatcaatcaatgattaccaaaacagagaaagacgttttgggaaagtcagtgatcaactaaagatcttatgat

SEQ ID NO: 241583 - DNA, 636 bp, Unknown
  Bacterial polypeptide expressing nucleotide sequence isolated from the Sargasso Sea
tatgaatatagatattaaaaagaaggttaatgcagtggagtcagatgctgttttttctgtcccaaatcacttggctgtaatcatggatgggaattctcggtgggcgcaaaaagagaatctctctagatctgaagggcaccgtgcgggcgcagaagcagcgcgtcgtcttttaaaaaattgtaaaacttatggtgtagagatattgacactatttgtttttagtagtgagaattggcatcgcccggaaaaagaggtgcggagcttgatagcacttctggtccgatatttaaggaatgagcttcctacattgaatgaagagagagtctctatcagattcatcggaagtagatatagatttagtcgacgcattcgccgtttgttttcaaaggttgaggctgttacagctgaaaataagggagctagattaatcctggctgtagactatggtggaaaatgggatataacagaagcagctaaatactttgcgaatagagttgccgatggatcgatgtcttccgaagaaatcactccagaattatttgagaaacagatgtcaatggagaatttacctgccccagacctctgtatacggactggaggagatattcggcttagtaatttcatgctttggcaaat

SEQ ID NO: 241584 - DNA, 262 bp, Unknown
  Bacterial polypeptide expressing nucleotide sequence isolated from the Sargasso Sea
atgaataaagttagccatatcgcaattattatggatggcaatggtagatggggaaaaaaacgtagaaaatcaagaaactttggtcatttaaatggaattaaagttattgaaaaagttgttaaagactcgattaaattaaaaattcctattttaacattttatactttttcaactgaaaattggaaaagaccaaagagggaaattttatttttatttaaacttatagatcaatattttaagaaagaaataaataatttagtaa

SEQ ID NO: 241585 - DNA, 227 bp, Unknown
  Bacterial polypeptide expressing nucleotide sequence isolated from the Sargasso Sea
tgagagcaatgtatctgataatttatatactaagggtatacctgatcctgaaatacttattagaacaggaaatcgtttcagattaagtaattttctactttggcaatcatcatacacagaaattttttttattaaaaaattatggcctgattttaataaaaatgactttaaaaaaattatattaaaatttaaaagaatgagaagaaattttggtggtattaaatgag

SEQ ID NO: 241586 - DNA, 276 bp, Unknown
  Bacterial polypeptide expressing nucleotide sequence isolated from the Sargasso Sea
aaattataaattctgtgaaaaagttaaaaaaattggctttacctattaatcaaaaaaatattactaagttcttatatactaccaatatacccgaccctgaaattttaataagaactggagacacaaatagacttagtaattttttattatggcaatcaatttatagtgaaattttttttgaaaaaaaactttggcctgattttaataaaaatgatctaaatagaattttaattaaatttaaaaaaataaatagaaattttggaggtctaagatgac

SEQ ID NO: 241587 - DNA, 541 bp, Unknown
  Bacterial polypeptide expressing nucleotide sequence isolated from the Sargasso Sea
atgaataagttaaatcacgttgctataataatggacggtaatgggcgatggggtttaaaaaaaaaaggttcaagaaactatggacatttaaagggtataaaaactgtagaaaatataatctctgcttctgtaaaaaataatatttcattcttaacactttatactttttcaacagaaaactggaaaagaccaaagcaagaaattaactttcttttcgatttgatcagaaaatctttaaaaagcaaatttaagaaaattgttaaacaaggagttaaggttaatataattggaagtaaaaagggattaccagatgatataaagaaaataataaaatttattgagagtaaaactttaaataataaatcaataactttaaatcttgctcttaattatggatcaaaagaagaaattataaatgcatgcaaaaaactaatcaaaacaagaaaaaaggtgataaatactaaaaattttgaaaagcagctttatactaacaagataccagatcctgatatcttagtgaggacaggggggacaaaaagaa

SEQ ID NO: 241588 - DNA, 225 bp, Unknown
  Bacterial polypeptide expressing nucleotide sequence isolated from the Sargasso Sea
aaaagaatatttctaacaatttgtacactaagggtatacctgaccctgaaatattaataagaactggtgataggtacaggctaagtaactttttattatggcaattatcttatgcagaaattttttttgttaaaaaactttggccagattttaatgaaaatgatttaaataaaatattatctagatacactaaaattagaaggaactttggcggaataaaatgaa

SEQ ID NO: 241589 - DNA, 160 bp, Unknown
  Bacterial polypeptide expressing nucleotide sequence isolated from the Sargasso Sea
acaggaaacactaaaagattgagcaattttctactgtggcagctcgcttattctgaaattttctttgaaaaaaagttatggcctgcttttaatggtaaagactttaatagaataattaaggaatataaatatataaaaagaaattttggtaaaatatgat

SEQ ID NO: 241590 - DNA, 514 bp, Unknown
  Bacterial polypeptide expressing nucleotide sequence isolated from the Sargasso Sea
atgaataatggaattgatattcaaaatctctttccttctcatgttgcctttataatggatggtaacagaaggtgggcaaagaaaaataattttcctattattgatggacataaaaaaggtgctgaaataattaagaaaattgttaataaatcaattaaattaaaaattaaatatctcacattttttggtttttcaactgaaaattggaatagaagtagaaaagaggttgttgaattacaattattactaaaatactatttagattcagagactcataactttatggaaaataaaataaatttttcatttataggtgatgttgataaatttgatgctccaatcaggcaaaaattgtataatttaaaagaagtaacaaatacatttgatagactcttttttactctagctttgggttatggatcaagaggcgagattttaggttcagttaataaacttttaaaaacaaataaaagtgaaattactgaaaaaaatatttctgaaaatttaatgacaa

SEQ ID NO: 241591 - DNA, 124 bp, Unknown
  Bacterial polypeptide expressing nucleotide sequence isolated from the Sargasso Sea
aatgcatagaaagaaaactataaagcatgttgctataattatggatggcaatggcagatgggcctcaagaaaaaatttaattagagcagaaggacataaagcaggagttaaaaattgtatcaaa

SEQ ID NO: 241592 - DNA, 414 bp, Unknown
  Bacterial polypeptide expressing nucleotide sequence isolated from the Sargasso Sea
aaattaaattaaaaataataggtaatttagaaaaattcccaaaatcactcaaattaaaacttaaaaatgccgaaaagttaacaaggtcaaacaataagattcagattattatagctttaaattatggctccaaagaagaaattataaatactgttaaaaaattaaataattcgtcaattcgtattaatgaaaaaaatatatctgaaaacctatacaccagaaatattccagaccctgaaattttaataagaactggaaatagaaatagactaagtaattttttattatggcaattatcttatactgagatttattttgtaagtaaactttggcccgactttacaagaaaagattttagcaaaatcattaataatttttcaaaagttataagaaactttggtggtattaaatgat

SEQ ID NO: 241593 - DNA, 441 bp, Unknown
  Bacterial polypeptide expressing nucleotide sequence isolated from the Sargasso Sea
tatgaattcaccaaagcatgtagccataataatggatggtaatggcagatggggattaaaaaaaaataaaacaagaaattttggtcatgcacaaggaattaaagtagtagaaaaaataattactgaggcaatttttcaaaaagtaaaatatttaacattgtatactttttccacagaaaattggaaaagaccaaaaaaagaaataagatttttaatattcctgcttgattcttatataaaaaaagaacttaaaaatttaataaaaaaaaatataaaacttaaaataattggaaatttaaacaaatttcctaaaacgttaaaatctaaacttagaaaagctgaaaaattgacaaacaaaaacagcaaaattcaattaaatatagctttaaattatggatctaaagaagagatgataagatctattaaaaaaattaataattt

SEQ ID NO: 241594 - DNA, 658 bp, Unknown
  Bacterial polypeptide expressing nucleotide sequence isolated from the Sargasso Sea
atgaataaactcaaccatattgcctttattatggatggcaatggtaggtggggaaaaagaaaaaaaagaagtagaaattttggtcatctaaaaggtgtagaaacagtaaaaaaagttgttaaaaatagtttaagactaaaaattcctattttaacattttatgtattttcatctgaaaattggaaaagaccaaaaaaggaaatatcttttttatttagattaattcaaaattattttttaaaagaaattaaaagcatcgagagacaaggtataaaaataaatatattaggtgaattaagcaaaataccgtttaatataaaatctacattaaaaagcactgttcttcgaactaaaaaaaataagagaataattgttaatttagcaataaattatggttcaaaaaacgaaattttaaatgcattgagaaaaacaaaaaaaatttcaataaaaaactttgaaaaaaatctttatacaaagaatcttcctgatcctgatatactgattagaacaggcggacatcaaagattaagtaatttcatgttatggcaactagcttatgccgaattattttttttaaaaaagctatggcctgattttaattattcagatctaaagctaatcatcgaaaggtttaagaaaagtaaaagaaattttggtg

SEQ ID NO: 241595 - DNA, 400 bp, Unknown
  Bacterial polypeptide expressing nucleotide sequence isolated from the Sargasso Sea
aaagttattggtgatttaaaaaaatttccaaaaaaaatacaagatcaattaataaatgcacagaataaaacaaaaaaaaatagtaagttagaattaattttagcattaaattatggatccaaaaatgaattaattaatgcaatgaaattaattaattataataaaatgaagattagtgaaacctcagttgataattttctttatacaaaaggaattccagatcctgatatattaattagaacaggtaataccaatagacttagcaactttttattatggcaactgtcttattctgaaatattttttgtaaaaaaaatgtggcctgattttaatgaaagagattataaaaatatcttagaaaaatttaaaaaaattaaaagaaattttggaaatatttaat

SEQ ID NO: 241596 - DNA, 346 bp, Unknown
  Bacterial polypeptide expressing nucleotide sequence isolated from the Sargasso Sea
catgtataaaaagctaagagataaagttaaaaataacggcaatcttcccaagcacattgcaattattatggatggcaatgggcgttgggcaaaattaaagaacctccctagagcagctggccatcgtgagggaataaattcagtaagagagattgtaagagtatgcggtgagattggtgtttcttatcttaccctctatactttctctagtgaaaattggtcaaggccaaaaacagaagtctctgcaatcatgaaattgctcttttcaacaataaagaaagaaattgaaaatctgcataaaaacaatgttaagctctcaacaattggtaaccttgaagatttacct

SEQ ID NO: 241597 - DNA, 538 bp, Unknown
  Bacterial polypeptide expressing nucleotide sequence isolated from the Sargasso Sea
tacggcataaacaagttgattgtttatgctttttcaacggaaaattggtctagggaaagtcaggaagtaaatgcattgatgaacttaattaactttggtgtagatgtaaagctacctgatattgtaaagaatgaaatgaaattagaatttataggtgacctatcaaagcttcccacatctgcacaaaagggtattgaaaaatgtgttgaatcaacaaaacaattttcaaatttcacacttgttattgcgctaaattacggagcaatttgggatatagttgagacatttaaaaagatggtaaaaaacaatattgaaatgactgaatcaaattttctaagtaatactcagatatcaaatactaatgtagatatctttataagaacaggtggtgatagaaggttaagcaattttcttcttcataatttaagttacagtgaattatttttttctgataagttatggcctgatttcaatgaaagtgatttaaaggaaattatagattcttttgaatctagacaaagaagatttggaaaatgaa

SEQ ID NO: 241598 - DNA, 328 bp, Unknown
  Bacterial polypeptide expressing nucleotide sequence isolated from the Sargasso Sea
ttggcaaaaaaaaattttcatctaaacttaccaaacttcttaatttgtcagaaaaaaaaacatcaaaataacaaaaaattacaaattaatctagctttgaattatggatcaaaaaacgaaataattaatgctttaaacgaaataaaaaaaaataaactgaaagtaaatgaagtcaatgtatcaaaaaatttatttacaaaaaatacacctgatcctgatatactaataagaacaggtaatacaaaaagacttagtaactttttgttgtggcagattgcttattcagagattttttttgaaaaaaaattatggcctagatttcaatgaa

SEQ ID NO: 241599 - DNA, 403 bp, Unknown
  Bacterial polypeptide expressing nucleotide sequence isolated from the Sargasso Sea
aaaaattttaggaaatttaagtaaatttccaaaatctttgaaaattagattaacacaagctgaaagactgacacgcaaaaataccaaaattcaaattaatatagctttaaattacggcgctaaagaagaaattgtaaaatctattaaaaaattaaataatttatcaaaacaaattaatgaaaaaaatatatcggaatatctctacactaaaggtattccagatccggaaatactaattagaactggtaacagaaaaaggcttagcaacttcttattatggcagttatcatatacagaaatatattttgtaagaaaattatggccagactttacaattaacgattttaataaaataatttcaaattttgtacaggtcaaaagaaattttggtggaattaaatga

SEQ ID NO: 241600 - DNA, 184 bp, Unknown
  Bacterial polypeptide expressing nucleotide sequence isolated from the Sargasso Sea
atggatggtaatggaagatgggcaaaaaaaaatgctttaagtgtaacctcaggtcatgaaaagggtgtagatgttgtaaaaaagattgttgagtctgctgcaaaagctaaactagaatctcttagcttgtatgcgtttagcactgaaaactggtcgcgtcctaaaaaagaaattttggaataaa

SEQ ID NO: 241601 - DNA, 274 bp, Unknown
  Bacterial polypeptide expressing nucleotide sequence isolated from the Sargasso Sea
attgggaactaaaattaagacaggagaattagatactgaagaaattaacaaagaagtcattgagtcaaatttgtatacatcacacttgccacagtcatcaccagatatgattttaagaacttcaggagaaaaaagaatgagtggtttcttactatggcaaagtgcatatagtgaattagtatttttagatattttttggccagaatttagaaaaattgatctaatgagagcaattagaacgttccaaaaacgaaaacgaagagtgggaaaatga

SEQ ID NO: 241602 - DNA, 337 bp, Unknown
  Bacterial polypeptide expressing nucleotide sequence isolated from the Sargasso Sea
aaaaaaacatcaaaaaattcaaaaattcaaattaatctcgcattaaattatggttctaaatttgaattagtaaatgcaattaaaaaaattataaaaaataatcttaatatcaatgagaaaaatattgaaaaatttctatataccaaaaatatacctaatccagatatattaattagaactggtaacacaaaaagattaagtaattttttattatggcaacttgcatactcagaaattttttttgaaaaaaaattatggccagattttaatgagaaagattattcaaaaataattaagaaatttaaaaaagtaaaaagaaattacggaaatatatgat

SEQ ID NO: 241603 - DNA, 477 bp, Unknown
  Bacterial polypeptide expressing nucleotide sequence isolated from the Sargasso Sea
aaataaattatttatttaatttattagagagatttttaaaatctaaaatttatgaatttcataaaaataatattaaacttaaaataattggtgaaaaaaaatttcctagaaaaactaataacttattatcaagatgtgaaaagctaaccaaaaataattcagcaatgcaaataaatctagcattaaattatggatctaaaaatgaaataatcagagctattgaaatattgaataaaaaaaaaattaaaattaccgaggaaaatatttccaattctttatatacaaaagatatacctgatcctgaaatattaattagaactggtggcacaaaaagactaagtaattttttactatggcaattgtcttattctgaaatttttttttcaggtaaattttggccagatttttctgaaaaagattttataaccataattaaaaaatataaaaatattaaaagaaattttggagatatttaat

SEQ ID NO: 241604 - DNA, 670 bp, Unknown
  Bacterial polypeptide expressing nucleotide sequence isolated from the Sargasso Sea
atgaataaactcaaccatgttgcttttattatggatggcaatgggaggtggggtaaaaaaaggaaaaaaggaagaaattttggacacttaaaaggcgttgaaacggtaaaaaaaattgtaagtagttcaataaaattgaaaattccaataattacgttttttgtattttcttcagaaaactggaaaagaccgaaaaccgagattacttttttatttaaaatcatcaaaaactatttttccaaagagatttataatgttgtctcaaaaggcatcaagttaaatataattggagaactaaataaacttccctcggaattaaagggaattttgaaaaggagttcggaattaacaaaagataacaaaaaaattttagttaatctagcaattaactatgggtcaaaaaatgagatattaaaatctgccaaaaaaattaaaacaaatatcaaccttaaaaattttgaaaaaaatctttacacttgtgagcaacctaatccagatatacttataaggacgggcggacataaaagattaagtaattttatgttatggcaacttgcatatgctgagctattttttttaaaaaaactctggccagattttaatggtgaagacttaaaaaaaattataaataaatataaaaaagcaaaaagaaattttggagctatatgat

SEQ ID NO: 241605 - DNA, 585 bp, Unknown
  Bacterial polypeptide expressing nucleotide sequence isolated from the Sargasso Sea
tttggaaaacaattccagtgaaattttaaaagataaaattttaaaagcatttgattcaagcaacctttcaatgccaaatcatgttggcatcataatggacggtaacaggagatgggcagcggaaaataaaaaacctgttttttttgggcacaaagaaggaacaaaaaaccttgaatctttaataaaattttcgatagaaatcggtatcaaatatcttactatttatacattttcaactgaaaactgggagagaccaaaacttgaagttaattatattactaaaactttattgaatgaatctttaaatgaaaactttgacaatctgcataaattaggtgtcaaaattgttatcagggggagtattcaaaagcttgataagtctttgaaagataagattttaaatgctcaaaaaaagactttaaataatacatcaatttcattagttattgctttcgattatggcgggagaaatgaaatagttaacactgtaaaggaaataataaaagataatattgaacttagtaagattaatgaaaaattatttaataattatataaataaggattcaattccggacccagactt

SEQ ID NO: 241606 - DNA, 613 bp, Unknown
  Bacterial polypeptide expressing nucleotide sequence isolated from the Sargasso Sea
gcaaaggcccaaaaaagagatttcggccttgatggaacttttttatgaatttctggaaaaagaacttcacacaatgcttgaaaataatgtgcgttttaagcttattggtgacagagaaaaattgcctgattttcttcagaacaggttaagtaatgcgcttaattctacctcaaaaaattcaggattgcttttaaacctagcacttaattatggtggtcgggatgaaatatcgcatgcttttcgcaaaatctctaaattagtaaaaaaaggggaattgcaaccagaaaatattgatgaaacactaatttccgcaaatacttacactgccgggttaccggatcctgacctaattatccgaaccagtggagaactaagactttcaaattttttgatttggcaagcagcatatgcagaattttattttactgaagttctttggcccgacttcactaaagaggatctacataaagcgcttcttgattaccaaaatagaaaacgacgcatgggccgaacaactacttccactggcatctccaaatcaaaaaaacgtgtttcacgtatggctaaagataagtccaaaaaaagtagactaactgaagaaacatcaacctga

SEQ ID NO: 241607 - DNA, 367 bp, Unknown
  Bacterial polypeptide expressing nucleotide sequence isolated from the Sargasso Sea
ttaaaaacaaaacttcaaaaagttgaaagaaaaacaaataataatactttaatccaaattaatattgctcttaactatggttcaaggcaagaattaattaatgcttttaaaaagataaatattaataaaaaaaaaaaaattacagaaaatcttatatcaaataatttatatacaaaaaatataccagatcctgaaattctaattagaactggggataccaatagattaagtaatttcttattatggcaaattaattatacagaaattttttttgttaagaagctttggcctgattttaaaaaaaatgattttaataaaatattaaataaatttaatcggataaaaagaaattttggcgcaatataat

SEQ ID NO: 241608 - DNA, 340 bp, Unknown
  Bacterial polypeptide expressing nucleotide sequence isolated from the Sargasso Sea
aatgaaacagtcagctaaaaataaaaaaatgcagataaatctagctttaaattatggatcaaaggatgaaattttaaggtcaataaaattaataataaaaaaaaaaataagaccaagtactaaaaattttgaaaaatatctttatacaaaaaatataccagatcccgatattttaataagaacaggtaatacaaatagattaagtaattttttgctttggcaaatatcttattcagaaatattttttataaaaaaactatggccagactttagtaaaaaagatttttattcgatcttaaataattataaaaaaataaaaagaaattttggaaatatttaa

SEQ ID NO: 241609 - DNA, 361 bp, Unknown
  Bacterial polypeptide expressing nucleotide sequence isolated from the Sargasso Sea
acctcaacatctaaaaaaaatattgattagaagctctttattaacaaaaaagaataaaaagatcatcgttaacttggctattaattacggttcaaaatacgagattataagcgcaataaaaaaaatgaaaaagattaatattaaaagtttagaagataatttatacacaaaaaatctcccacatcctgatatactaattagaactggtggttatcaaagattaagtaattttatgttgtggcaactagcatattcagaattgtattttttaaaaaaattttggcctgattttagtaatgaagacttaaaaaaaataattataaaatataaaagaagtaaaagaaattttgggtccatataa

SEQ ID NO: 241610 - DNA, 418 bp, Unknown
  Bacterial polypeptide expressing nucleotide sequence isolated from the Sargasso Sea
cataaacaaaatattaaattcaaagtaattggtaaaaaaaaattttctaaaaaattgaatttattattaaattcggcagaaaaaaagacttccaaaaattcaaaaatccaaattaatctcgcattaaattatggttctaaatttgagttagtaaatgcatttagaaaaattataaaaaataatatcaatatcaatgaaaaaaatattgaaaaatttctatataccaaaaatattcctaacccagatatattaattagaactggtaacacaaaaagaataagtaattttttattatggcaaattgcttactcagaaattttcttcgaaaaaaaattatggccagattttaatgaaacagattattcaaaaataattaatagatttaaaaaagttaaaagaaattatggaaacatatgat

SEQ ID NO: 241611 - DNA, 364 bp, Unknown
  Bacterial polypeptide expressing nucleotide sequence isolated from the Sargasso Sea
tatgatccgtccaaaacatgtagccattattatggatggtaatggtagatggggtttaaagaaaaaaaattcaagaaattttggtcataaaaaaggacttgaaaccgtagaaaagattatttctgcggcaataaataagaatatcaaatatttaactttatatgttttttcaactgagaattggaaaagacctttaaaagaaataaattatcttttttctttattagaaaattatattgataaagaaatcaataatttgattaaaaaaaatattaaaatcaaagtgatcgggaatataaaaaaatttccagctatattaaaaaataaaataaataaagttcaattattaactaaatcaaacaac

SEQ ID NO: 241612 - DNA, 163 bp, Unknown
  Bacterial polypeptide expressing nucleotide sequence isolated from the Sargasso Sea
tatgaattcgcaaaaaatatctacaaaagaaaattcaaaattatctaatgaaatagataaacttcggataccaaagcatattgcaataattatggatggcaacggtagatgggcaatgaaaaaagggttaccaagatcatttggtcataacaaaggagtaaat

SEQ ID NO: 241613 - DNA, 313 bp, Unknown
  Bacterial polypeptide expressing nucleotide sequence isolated from the Sargasso Sea
ttacaattaattcttgcattaaattatggttcaaaaagtgaaatagttaatgctataaagttgataaaaaataaaaatatcaaaattagtgaaagttctattgataaattcctttatactaaaggaattccaaatcccgatattttaataagaactggaaatactaatagattaagtaatttcttattatggcagttgtcttattctgaaatattttttgttaaaaaaatgtggcctgattttaatggaagagattataaaagtatcatagataaatttaaaaaaatcaaaagaaattttggcaaaatataat

SEQ ID NO: 241614 - DNA, 550 bp, Unknown
  Bacterial polypeptide expressing nucleotide sequence isolated from the Sargasso Sea
agtaaaatactgtgtaaaatcaaaaattccaatcgtaactttttatgttttttcatcagaaaattggagaagaccaaagacagaaatatcatttttatttaatcttattaaaaaatattttactcaagaaattcaaagtattatgagtcagggaataagaattaaaattttaggtgaaattaataaactcccatctgatttaaaaaaaattataaataaatgtataaaactaacaaataaaaataaaaaaattttagttaatttagctattaattacggctctaaaaatgagatactaaatgcatctagaaaaactaaaaactttagtattaaaaattttgagaagcacttatatacaaaaaatataccaaatcctgatatattagtaagaactggtggacaccaaagattaagcaatttcatgctatggcagcttgcatatgccgaattattttttttaaaaaaactttggcctgattttaatggagatgatttaaaaaaaattattgataaatttaaaaaaagtaaaagaaattttggtgctgtatga

SEQ ID NO: 241615 - DNA, 290 bp, Unknown
  Bacterial polypeptide expressing nucleotide sequence isolated from the Sargasso Sea
gcgggcgggccaactggaaccctcagacatcaccgatgacctgatccaggagcacctgagtatcggtgatcttcccatgccggatctccttatccggacagcaggcgaacagcgcatcagcaatttcctgttatggcacctggcctacaccgaattctacttttccgaggtattctggccggatttcaagagcgagcaaatgctcaaggcgcttgatgcctatgcccatcgacagcgccgtttcggtcagaccgacgaccagattgctgctcgcgctgcacaacaataac

SEQ ID NO: 241616 - DNA, 561 bp, Unknown
  Bacterial polypeptide expressing nucleotide sequence isolated from the Sargasso Sea
gatgtctatcttaggaaggcctgatttatcccaaacaaaaactgagctttataaaacgtatgacatagattgcgatgctatccctgttcatattgctatgattatggatggaaatgggcgttgggctcagaagaaaaataaaccacgtgttatgggtcataagcagggtgcagagtctgttcggacagtcgttaaatcttgtgtcgagtttgggatccattatgtgactatatatgcgttttccactgaaaactggcagcgatctaaagtagaagttagttttttaatgagtttgtttaagcaattaatcgataaggaagccccagaactaattaagcaaggtgtgcgagtacgaattttaggggatattgaacaactccctaaagcattacaagaaaaaatcatagatattgaaaaaaagactcacaaaaatacggtttttcaacttaatatatgtttgaattatggggcaaaacaggagattctacagggagtaaagaggtgtgtagaggacgttttaaataaaaaatttgagagtcatgatattacagaagacctctt

SEQ ID NO: 241617 - DNA, 121 bp, Unknown
  Bacterial polypeptide expressing nucleotide sequence isolated from the Sargasso Sea
tttgcaaagtgcttattctgaatttgttttccaggatgtctactggccagaattcagaaagattgactttttaaggtgtttaagagaatacgctcaaagggaaagaagatttggaaaataa

SEQ ID NO: 241618 - DNA, 483 bp, Unknown
  Bacterial polypeptide expressing nucleotide sequence isolated from the Sargasso Sea
catggctataaaaaatcaaaatgctaatctaaaaaatgtagccatcattatggatgggaatggaagatgggccagaaaaaattcattaaaaattagtcagggacataaaaaaggagtccaaatagttagagagatcgtagaggaatctattttgcagaatataaactctttaacaatctatgcctttagctctgagaactggcaaagaccaaaatcagaaattaatgcaattaaaaaattagttgtagatgctataaatgatcaagttcctgagctcaaagaacaaaaagtaaaattaaaattttttggacatactgaagactttggtgaaaaggttattaaaaaaattaaatatgctgaatctgagacattttgtgaagattacaaattaaatctaaatgttgctcttagttatggcggaaaacaagatatattggacttggtaaagaaaattagtaaagaggttttagataaaaaattgaa

SEQ ID NO: 241619 - DNA, 715 bp, Unknown
  Bacterial polypeptide expressing nucleotide sequence isolated from the Sargasso Sea
atgtcatcaccaaaattaatttattcaatctatgaaaatcgtctacaaaatagactcaaaaaagaaaaccttcccaaacatataggactaattcatgatggtcacagaagatatgcaaggaaagaaggcctcttaagtttcgaagtatcttataaaattggaatgaccagacttaaagagtgtatagcgtggtgtgatgatgtagggattgattacataaccagctggctgttatctagagaaaatttagcaaggcctaaagaagaactagaaccatattttgagatactaaatgagctatttgaagacttattaattgatgacgttgttgataattttaaaattgaatttattggtagcacagatcttcttccagggtttttgcagacaactattaaacaacttgaggaggtcagaggaggtggccagaaaactttaacaattgcacttggatacggaggtagacaggaaattttagatgcaattaaaggattaatcgacgaaaataggaatcaagaaaacgattttaacagattgatcgaaaacgttactgatgaacagttaagacaacacctttattctcctgaagcccctgatatagatttgataataagaactagtggagaatctagactttctggcttcttgctttggcaaagcgcttattccgaagttattttccaagacgtatatggccagaatttagaaagattga

SEQ ID NO: 241620 - DNA, 406 bp, Unknown
  Bacterial polypeptide expressing nucleotide sequence isolated from the Sargasso Sea
aatgagtgatgccccatctcacgtcgcgatcatcatggatggaaattctaggtgggcaaaaaaaaataaactcacaaaaaaagaagggcatagagcaggtgttaaagctgcgaaaaatataattgagtacgctgcaaagaaacatttagatcatttaaccctttttgcatttagtacagaaaattggggaagatccaaatttgaagtaaattccatcatggatctttttgttgaagcattaagagaagaaacaccagagcttataaagaattcagttaaagtgaatttcataggagatgtatcgaaattaaataaaataataatcaaaaaaattatcgaaacaaaagggctcacaagcaactaccagccaaaattaaatcttaatattgcaataagttacggggga

SEQ ID NO: 241621 - DNA, 168 bp, Unknown
  Bacterial polypeptide expressing nucleotide sequence isolated from the Sargasso Sea
aatgtctccaaagcatgtggcaataattatggacggtaacaggagatgggcaaaatctcatgatttgtcttttttagaggggtataaaaaaggcgtagaaaatttgtatataactgttgaaaattttattgagttaaaaataaagtttttaactgtttttggtttctc

SEQ ID NO: 241622 - DNA, 274 bp, Unknown
  Bacterial polypeptide expressing nucleotide sequence isolated from the Sargasso Sea
gatgaattcacccaatcatgtagcaataattatggatggaaatggaagatgggccgaacaaaaaggaatgcccagagaatttggtcatcaaaatggagttaggtctgtaaaaaaaattgttgaggaagctaataagcataaagtaaagtatttaacattatttgcgttctctattgagaactgggaaagacctagttatgaggtagaaacattaatgaggcttttagtagaaactcttagagatgaatttgaggacttatttaataataatata

SEQ ID NO: 241623 - DNA, 523 bp, Unknown
  Bacterial polypeptide expressing nucleotide sequence isolated from the Sargasso Sea
atcactttctatgttttttctactgaaaactggagacgacctaaaacagaaataaatttcctatttaaattaataacacactattttaaaaaaaatattgatgaagttgtagtcaatgggattaaaataaatttaattggtaaaatttcaaaattaccatttaaaataaaatcaactctgagaaaagtacaattgcttaccaaaaacaacaataaaattttagttaatttagcaataaattatggttcaaaagatgagttattggagtctttcaaaaaaataaaaaaaaaaaatattaacactaatttaattcaaaaaaatctttatacaaaaaatttacctaatccagatattttaataagaacaggtggccaaaaaagattaagtaattttatgttatggcagttagcttatactgaaatttattttttaaaaaaattatggccagattttcgtcataatgatttaaaaagaataatttatgattttaaaaaaataaaaagaaattttggaggaatttaag

SEQ ID NO: 241624 - DNA, 243 bp, Unknown
  Bacterial polypeptide expressing nucleotide sequence isolated from the Sargasso Sea
aaaaaaaacaaaatataaacgttaaaaatattgaaaaaaatttatatacatccaatattccagatcctgatattttgattagaactggaaataccaatagattaagcaattttttattatggcaaatggcgtattctgaaattttctttgaaaagaaattgtggcctgatttcaaggaaaatgattacaataaaatattaaaaaaatttagaaaaataaaaagaaactacggaaatatttaat

SEQ ID NO: 241625 - DNA, 190 bp, Unknown
  Bacterial polypeptide expressing nucleotide sequence isolated from the Sargasso Sea
aaagcggctcagtaattatctactttggcaattagcttatacggaactgtatttcaccgaaaaatactggcccgaatttgatgtgtcggccttcgaggaagccctaatagcattctccagacgagaacgaagatttggaaaaactcatgagcaaattcattcaaaagatgttgaatctctatctcagtaa

SEQ ID NO: 241626 - DNA, 238 bp, Unknown
  Bacterial polypeptide expressing nucleotide sequence isolated from the Sargasso Sea
aattaaaaatagaaaaagtataaataaatttgaaacttatttatatactaataatattccagatccagaaataattatacgaactggcggtgaatatagaatgagtgactttttattatggcaatctgcttattctgaattattttttactaaaatattgtggcctgattttaagtttaataatttaaaaaaattattaaatgactttcttaaaagaaatagaaactatggtagataa

SEQ ID NO: 241627 - DNA, 670 bp, Unknown
  Bacterial polypeptide expressing nucleotide sequence isolated from the Sargasso Sea
atgaaccaactcaaccatattgcctttatcatggatggcaatggaaggtggggaagaaaaaaaaataaaggtagaaattacgggcacataaaaggcgtagacactgttaaaaaagttgtgagaagttctataaaacttaaagtaccagctattacattctatgttttctcatctgaaaattggaaaagaccaaaaagtgaaataaactttttatttaagttgataaaaaattatttttcaaaagaaatacaaagcgtaatctctcaaggcattaaaattaatatcattggagacgtaaataaattaacaccagatttaaaaaaagttttaaaaaaaacaatgtatttaactaaaaaaaattccaaaatcttagtaaacctagcaattaattatggatcaagaaatgaaatcattaatgctgtgaaaaaggcatcaaagaaaattactataaaaagtttccaaaaaaatctttttacaaataatatacctgatcctgacatattaataagaactggaggacataaaagacttagtaattttatgctttggcaattagcatatgcagaactattttttttgaaaaaattatggcctgattttaatgaaaaagatttaaaatctattattaagaaatttaaaagtacaaaaagaaattttggtgctttatgat

SEQ ID NO: 241628 - DNA, 499 bp, Unknown
  Bacterial polypeptide expressing nucleotide sequence isolated from the Sargasso Sea
aattggaagagaccaaaaaaagaagttaattatttatttagattattagaaaattttttactaaatagaatagatgaattaaataaacaaaacataaaactaaaaataattggaaataaaaatttttcacaaaaattaaataaacaattaaattctgtagaaaaaaaaacatcaaaaaacacaaaacttcagattaatttagctttaaattatggatctaagactgagttattaaatgcttttaaaaaattacaaaagaataaagaatatattaacgaaaaaaatttaaaaaaatatttgcaaactaaaaatattcctgacccggaaattttaattagaacaggtaatacaaaaagattaagtaactttttattatggcaacttgcttatgcagaaatattttttgaaaaaaagttatggcctgcttttaatgaaaatgattttaataaaattataaaagagtacaagactataaaaagaaattttggaaatatttaat

SEQ ID NO: 241629 - DNA, 547 bp, Unknown
  Bacterial polypeptide expressing nucleotide sequence isolated from the Sargasso Sea
ttattaaaaattccaattgtcactttttatgttttttccacggaaaattggaaaagaccaaaatctgaaataaattttctttttaaattaatacaaacttattttgagagagagatgaaagacgtaatgaaaaataaaataaaaataaattttttaggcaaaatttctaatattccaaaaaacacaagaaaaatcataaagaagactgttcaaaagacaaaaaaaaataaaaatatattagttaatttagctattaattatgggtcacgtgcagagctaattgactgctttaataaattgaaaaatagtaagagtaaaatttctatcaaatcaattaataataaactttatacacaaaatcttcctgacccagatattcttattagaactgggggaaagaaaaggttaagtaattttatgttatggcaacttgcatataccgaactaaattttttagataaactttggccagactttaacaaaaacgatttgaaaaggattgtattaaaatataaaagaataaaaagaaactttggagggatttaat

SEQ ID NO: 241630 - DNA, 296 bp, Unknown
  Bacterial polypeptide expressing nucleotide sequence isolated from the Sargasso Sea
ggaaataattgatgctgtaaaatcaatatcagataaagttaaaaaaaacataatttctctagaaaatattgacgaaaagataataaatgaccatctttacactcgaaatttagataatgtcgatttattgataagaactggaggagaaattagggttagtaattttctattgtggcaaatatcatatgctgaattgtttttcttagaattattgtggcctgatttcaaaaaaagacatttttttgaagcaatagtcgaatatcaaaaaagagctagaagatttggaaagatttaaa

SEQ ID NO: 241631 - DNA, 367 bp, Unknown
  Bacterial polypeptide expressing nucleotide sequence isolated from the Sargasso Sea
aatggctaattctagcaaaatcaatacaccaaaacacgttggtataattatggatggcaacggaagatgggcgattaaaaactctttaaaaattagtgaaggtcataaaaagggagttagcattgtaaaagacatagtagaggaatcagtaaagcaagacttatcatctttaacaatcttcgcttttagcactgagaactggaaaagacctaaaactgaggtagcagctattaaaaagttagttattgatgcagtaaatgatcaagttccccaactaaaagagcaaaaagttaggctaaagttttttggacacaccaacgactttggtcaaaaagttattgataaaatagattatgcggaaaaagaa

SEQ ID NO: 241632 - DNA, 166 bp, Unknown
  Bacterial polypeptide expressing nucleotide sequence isolated from the Sargasso Sea
atgaacctgaaaaatatagctatcattatggatggtaatgggcgttgggcaaaaaaaaataatcttcaaattagagaaggtcatgctaggggagtatcagcactcaaggaaatagttaaggaatcagttaatcaaaatattgaatctcttacggtttatgcattta

SEQ ID NO: 241633 - DNA, 220 bp, Unknown
  Bacterial polypeptide expressing nucleotide sequence isolated from the Sargasso Sea
aaaaatattgataaaaatctttatacttcagattgtccaaatccagacatattgataagaactggtgataccaaaagattaagtaattttttattatggcaaattgcttatgctgagattttttttgtcaataaactttggccagattttactaaaaataattatactttaattttaaataaatttctaaaaattaagagaaattttggatcaatataat

SEQ ID NO: 241634 - DNA, 130 bp, Unknown
  Bacterial polypeptide expressing nucleotide sequence isolated from the Sargasso Sea
ttttttattatggcaatcagcatatgcagaattatattttactaaaattttatggccaaactttaagataaaatctttaaataaaataatttcaatttattttaatagaattagaaaatatggaagatag

SEQ ID NO: 241635 - DNA, 514 bp, Unknown
  Bacterial polypeptide expressing nucleotide sequence isolated from the Sargasso Sea
tctacagaaaactggaaaagaccaaaaaaggaaatttcttttttaatttatctattagaaaaatatattgaccaacaatttgaaaatcttttaaagaaaaatattaaattaaaaatactaggaaacctaaataaatttcctagttcacttaaaaaaaaacttaacaaagtacaaaaaatttcaaataaaaataataaaattcaaattaatcttgcattaaattatggatcaaaagaagaaataattacttcagtaaaaaaaataatcaatcactcaaaaccaatcaatgataaaaatattaaaaaaaacttgtatacaaaagatataccagacccagaaatactgattagaacgggtaacacatttagattaagtaattttttattatggcaaatttcttatactgaaattttttttgtaaaaaaattatggcctgattttaataaaaatgattttaacaaaataatatgtgaatttaaaaaaatgagaagaaattttggtggaataaaatgag

SEQ ID NO: 241636 - DNA, 457 bp, Unknown
  Bacterial polypeptide expressing nucleotide sequence isolated from the Sargasso Sea
atgaatacacctaatcatgtagcaataataatggatggaaatggaagatgggctgaacagaaaggaatgcccagagagtttggtcatcaaaatggagttagatctgtaaaaaaaattgttgaggaagctaacaagcataaagtaaaatatttaacattatttgcattctctgttgagaactgggaaagacctagctatgaggtagagacattaatgaaacttttagtagaaactcttagagatgaatttgaggatttatttaataacaacattagattaaatactataggtgatgttcaatcacttcccaatgaagtaatatatgaattagacaaaattataaatagtactaaagacaatacaggaatgacattaactttagctttgagttatggaggaaaacaggagatttttatggctgtccaagagatttcagaaaaagttaaaaatgagataa

SEQ ID NO: 241637 - DNA, 502 bp, Unknown
  Bacterial polypeptide expressing nucleotide sequence isolated from the Sargasso Sea
tatgaacagaataaaccatattgccattatcatggatggaaatggtagatgggggagaaaaaggggcaaatcaagaaattacggacatactaaaggagtagaggtaattcaaaaaattgtaaaatactccataaaaaagaaaatacccacattaaccttttatactttttcaacagaaaattggaaaagaccaaaaaaagaaataacatttctttttaatttaattgaaaattattttaaaaaagaaattattaatttaaagaaaaatggtgtcaaaattgatattctaggtaatgtaaatacacttcctaaaaaaattaaaaaatgcttaatcaatagcaaaaaaattaccaaaaaatgtaacaatattagggtaaacttagcaataaattatggttctaaaaacgaaattataaatgcttctaaaaccattaaaaaaaataaaaccaaattcactattaaaagatttagaaaaaaatttatatacaaaaggtattcctga

SEQ ID NO: 241638 - DNA, 410 bp, Unknown
  Bacterial polypeptide expressing nucleotide sequence isolated from the Sargasso Sea
tatgagtgtgactgtacaagataaattgtttaagaaaattgataaaactaaagttcctaaccatgttgcggttattatggatggtaatggaagatgggcaaaaaaaataggtaaagaaagattttttggacataacagtggaattagttctgttagggatactatagaagcttcaattgatattggtattaagaatttaacattatatgtgttttcaatggagaattggaaaagaccagagactgaagttaaagctttaatgcatttattatttagttcaattgatattgaactagaaaacttaaataagaacaatattaaacttgatgtaattggaaaaaaagacttgctacccaaaacaacaaaaaaaagactagaatcagcagttgaagaaactagtaataatgatg

SEQ ID NO: 241639 - DNA, 223 bp, Unknown
  Bacterial polypeptide expressing nucleotide sequence isolated from the Sargasso Sea
aaaaatatatctgaaaacctatacaccaaaaatattccagatcctgaaattttaataagaactggaaatagaaatagactaagtaattttttattatggcaattatcttataccgagatttattttgtaagtaaactttggcctgactttacaagaaaagatttcagcaaaattataaataatttttcaaaagttaaaagaaattttggtggtataaaatgat

SEQ ID NO: 241640 - DNA, 449 bp, Unknown
  Bacterial polypeptide expressing nucleotide sequence isolated from the Sargasso Sea
tatgaaccatttaaatcatattgccatcataatggatggaaatgggagatggggattggagaaaggtaaatcaagaaattttggtcatagaaaaggtgttcttgttgttcagagcataattaaagcctcaattaaaaaaaaaattaaatatttaactttatatacattttccactgagaattggaaaagaccagttcaagaaatcaattttttaatgaatttaatgtcagattatttagaaaaaaatgtacataaattaataaaaaataatattaaagtaaatgtgattggagatattaataaaatcccactaaaacttaaaaaaaaattaatcgttattcagaaaaaaacacaaaaaaattccttaattcaagtaaatattgcattaaactatggatttaaagatgagataattagatcttttaagttaataaaaaaaaatcttaaaa

SEQ ID NO: 241641 - DNA, 364 bp, Unknown
  Bacterial polypeptide expressing nucleotide sequence isolated from the Sargasso Sea
aaattaaaaaatattttaaataatgttattttaaaaacaaaaaaaaataaaaaaatagttataaatttagcgataaactatggatcaaaacacgaaatactgaacgctgttcaaaaaataaaaaattcaaaaaagataaatattaataaaattaattcaaatttatatacttctggtcaacccgatccagaaattctgataagaactggtggaaaaaaaagattaagtaattttttattatggcaattagcttacacggaactattttttttagacaagttatggccagaatttaatgaaattgatttaaaaaaaattataaaaaaatatcatcaaataaaaagaaattttggaaatatttaat

SEQ ID NO: 241642 - DNA, 157 bp, Unknown
  Bacterial polypeptide expressing nucleotide sequence isolated from the Sargasso Sea
agtaattttttgttatggcaatgcgcatactctgaatttatatttacagataccttttggcctgattttactgttgaccatttccacaatgcactggaacagtattcgcagcgagagagaagatatgggagaaataccccaaataagagggtgtgaa

SEQ ID NO: 241643 - DNA, 346 bp, Unknown
  Bacterial polypeptide expressing nucleotide sequence isolated from the Sargasso Sea
attgtcagaaaaaaaaacatcaaaaaataaaagattgcaaattaacttagctttaaattacggatcaaaaagtgaaataattaatgctctaaacgaaattaaaaaaaataaactaaaaataaatgaagcaaatgtatcaaaaagtttgtttacgaaaaatatacctgatcccgatatattaattagaacaggtaacacaaaaagattgagtaattttttgttgtggcagcttgcttattcagagatttttttcgaaaagaagttatggccagatttcagtgacaatgattataatgaaatattaagtaagtttaaaaaaattaaaagaaactatggaaatatttga

SEQ ID NO: 241644 - DNA, 481 bp, Unknown
  Bacterial polypeptide expressing nucleotide sequence isolated from the Sargasso Sea
catggctataaaaaatcaaaatgctaatctaaaaaatgtagccatcattatggatgggaatggaagatgggccagaaaaaattcattaaaaattagtcagggacataaaaaaggagtccaaatagttagagagatcgtagaggaatctattttgcagaatattaactctttaacaatctatgcctttagctctgagaactggcaaagaccaaaatcagaaattaatgcaattaaaaaattagttgtagatgctataaatgatcaagttcctgagctcaaagaacaaaaagtaaaattaaaattttttggacatactgaagactttggtgaaaaggttattaaaaaaattaaatatgctgaatctgagacattttgtgaagattacaaattaaatctaaatgttgctcttagttatggcggaaaacaagatatattggacttggtaaagaaaattagtaaagaggttttcgataaaaaatga

SEQ ID NO: 241645 - DNA, 754 bp, Unknown
  Bacterial polypeptide expressing nucleotide sequence isolated from the Sargasso Sea
ttgcgcgcgccggaaccactcgccgccaactcgcccgtcgcgccgggcgttgtaccgcatccgttacccacgcatctcgccgtcattctcgatggcaaccggcgctgggcagaccggctcggcgtgccggccgccgagggctaccgggccggcggtcgcaacgtgcatgcgctgctgtcgtggtgcgaggaagccggcatcccattcgtcacgctgtggccgctgtccaccgagaacctcggtcgcgacgcaggggaactgcgcgacctgctcgcggtgatcgccgacgtcttcgatgaactcgccgccagcggccgctggcgcctgcatgtgatcggcgacctgacgaagctcccgcgcgccacggccgagcgcatcggcgccgcgcaacgacgcacggcccacacgcgcgggctcgacgtgaacatcgcggtcgcgtacagcggccgcctcgacgtgctgcacgcgatccgctcgctgatcgaggaacacgtcgcggccggcaccgtcgaccagttgctcgcgcagctcagccccgagctgatcgagagccggctctatacggccggccagccggagcccgatctcgtgatccgcacatcgggcgagcagcgcctgtcgaatttcatgctctggcaaaccgctttctcggagttctatttcacgccgacgtgctggccggatttcggacgcgacgatttcgaacaggccatcgctgcctacggcacacgcgcgcgccggttcggcaagtagg

SEQ ID NO: 241646 - DNA, 733 bp, Unknown
  Bacterial polypeptide expressing nucleotide sequence isolated from the Sargasso Sea
atggccataagcctttctaataacaacaatcatcctaagaaaattggcattatcatggatggaaatggaaggtgggcaaaatccaataaattaaaaataaacaaaggtcatgcaaaaggtgttagtgttgtcagagatatcgtcaaagagtgcatcgctcagaatatagaaagtttaactatttatgctttcagttctgaaaattggtcaagacctgaaagcgagataaatggaataaaaaaattaattgttaaagcaatccatgaacaagttccagagcttatggaacaaaatgtcatgctagatttttttggagatatatcaagctggggtgatgaaatcgaaagaaaaattagtaaagctgaggatgatacctttatggaatatccatccttaagattaaatgttgccttaggctatggaggtcgaaatgatatcgtttcagccagtataaggatagctgaaaatttaaaatcagatttaataagcacaggcgatatagatgaagacatgattgcaaaattctcgcaggtaccagacgacaatattgatctgattataagaactggaggtgataaaagacttagcaattttttgttatttcaggctgcttatgcagaaattttttttgtagataaactatggccagattttacgagagatgattttataaattgtttagatgcttttaaaaagacagatcgaagatttggaaaaaggattgaagactagc

SEQ ID NO: 241647 - DNA, 526 bp, Unknown
  Bacterial polypeptide expressing nucleotide sequence isolated from the Sargasso Sea
cctaaagaagaaacctcaaaattaatgcagttacttagaaagtttatttcaaacgatctttcagagttacataataatgatgtaaggataaaagtaatagggagtaggaaagatattcctaaagatattatagatcttattaaaggagcagaatcactcacaattaataattctggcttatatcttcagatagcttttaattatagcggaagacaagaaattataaatgccacgaaaaagattgcatttgctgccgctaaaggcgaattagatccaaataaaattgataaaaatatattcgagagtaatttatactctgcaggcatacctgatcccgatttaataattagaacgggctcggaaaaaagaatatctaattttctattatggcaattatcttattctgaagtttactttgaagaatgcttgtggccagattttaacaagaataaattggatgtagcaattaatgattataaaaacagatcaagaagatttggaaatgttatttctgagtataggtaaa

SEQ ID NO: 241648 - DNA, 547 bp, Unknown
  Bacterial polypeptide expressing nucleotide sequence isolated from the Sargasso Sea
ttttctgctgaaaattggaatagaccaaaatctgaagttgagggacttatggatttattagttcaatctataacgggtgagttagacgaaatgaataacaacggtgtcagacttttaagtgttggaaacacaaatcaactccccaaaaagtgtcgtgaaagtttatttgatgcacaattgaaaactaaagacaatagtgatttgaacttggttttggcattgaattatagtgctcgggaagacatcatagatggtgtaaaaaaaatatcaaaagagattgtcaataataacatatcagagcaagacattactgctgatttattcagtaattatttatctacatctgatataccctctcctgaattattaattagaacaagtggagaaattagaattagtaattttttattgtgggaaatcgcttatacagaattgtattttacagatgttttttggccagattttaaaagagaagattttttaagtgctattgttgaatatcaaaatagagaaagacgttttggaatggtttcagagcaaatttaat

SEQ ID NO: 241649 - DNA, 727 bp, Unknown
  Bacterial polypeptide expressing nucleotide sequence isolated from the Sargasso Sea
atggctaagaagaataccaaaaaaaataattatcctaagaatgttggcatcattatggatggaaatggaagatgggcacttaaaaattcattaaagattagccagggacataaacaaggggtcgaaattgttaaaaaaattgtagaagaatcagtaaaacaaaatattcaatcattaacattatatgcatttagttcagagaattggaaacgacctaaagctgaggttaatgctataaaaaaactagtagtcgaagctatcaatgagcaagttcccgaattaaaagagcagaaggtaagtttgaaattttttggacatctaaatgattttggtaaaaagattcttgaaaagattgcttatgctgaaaatacaaccaaatctaagtttagtaaattagatttaaatattgcattgggttatggaggccaacaagatattgtagatgttgtgaaaaatatctcatcgatggtgcttgctaaagaaataaagataaaagatattaatgaaaagactatttacagaaattcttcagtgcctgtggatgaaatagatcttcttattagaacgggtggggataatagaataagcaactttttattattccagatagcatatgcagagataatgtttgttgataagtattggcctgattttacaaccaatgattatatgaaatgcttaaataattttaaaaaagtgagcagaaggtttggaagaaggatataaa

SEQ ID NO: 241650 - DNA, 742 bp, Unknown
  Bacterial polypeptide expressing nucleotide sequence isolated from the Sargasso Sea
ttaattatggataaaacgggaaaaaatataatagataacaacgtgcctgatcatattgctataattatggatgggaatgggcgctgggcccaaaaaaattcattacctagaatagcgggccataaagaaggaataagttctgttagggctattacaaaaaaatgtgatgaaatcggtgtcaaatatttatcattatatacattttcttctgaaaattggaagcgccctagaagcgaagtaaaagccttgatgcgtttattattgaccaccattagacgtgagattaaagatttaaataaaaacaatgttcgtttaatgacgattggaaatttgaatgagttacctagtgacgcaagaaaaggaatggaagaaggcttggaaaaaacaaaaaataactctggaatcaatttaatattagctttgagttatggaagtagaaatgaaattttgcgaatggttaaaaatattgctaataaagcaaaaaatggtgagacagatccaaataagataaaagaaattgacataattaatgagttggatacctcgaagataccagacccggatttgttaattcgtacggggggtgaatttagattaagtaatttcttactttggcaaattgcctattcagaaatatatataacaaacaaatattggccagaatttcgcgaaaatgaattattaattgctgtaaaagattatcaacagagagaacgtagatttggaaaggtttcaaattaat

SEQ ID NO: 241651 - DNA, 644 bp, Unknown
  Bacterial polypeptide expressing nucleotide sequence isolated from the Sargasso Sea
tgttgccatcatcatggatggaaatggcagatggggtttaaaacataaaaaatctagaaatgcaggacacagagctggattagatactgttgagacaataattaaagagacacttaaatcaaaaattaaatatttaacattatatactttttctactgaaaattggaaaagacccaaaaaagagatattatttttatttgatttactagaaaattttttaactaaaaaattagatgaattgaaaaaaaatggtatcaaattaaaaatcataggtgaaaaaaaaatgcttacgaaaagattgaaagatttattaaaactagcagaaaaaaaaacctcaaaaaataaaaaactccaaatcaatttagccttaaattatggatctaaaaatgaaattataaatgcattaaagataattagtaaatcaagaaaaaaaatatctcaaaagaatattgaaaagaatttatatactaaaaatataccagatcctgacttactaattagaacaggtaatacaaaaaggttgagtaattttttattgtggcaattagcttatacggaaattttttttgaaaaaaagctttggcctgattttaatgagagtgactataaaaaaatacttaatacatttaaaattttaaagagaa

SEQ ID NO: 241652 - DNA, 560 bp, Unknown
  Bacterial polypeptide expressing nucleotide sequence isolated from the Sargasso Sea
aatgtatagaaaaaaaacgatagatcacattgctatcattatggatggtaatggtagatgggcagttcggaaaggcttaaaaagatcttttggtcatcgtgcaggtattaaaaattgtataaatcttattaaaaatctagataagttagattataaaataaaaaatctaacgctattcattttttcaactgaaaactggaaaagaccttcaagtgaagtaaatgatctttttaatttaattgaagatttttacattaatttcaagaatgtagctaatgaagaaaatattagaattcgacatcttggatcaacaagaaatattcctaataaattaattaaaataattaaagacgtagttaaaattactagggcaaatgatggaacttctattaatcttgcttttaattatggcggtagagcagaaataattgatgcagtaaataataatacaggtcttattacttataagaaattgtctaagaatttatacatttcaaatcttcctgatccagatttgattataagaactggcggtgagatgagattaagtaactttttat

SEQ ID NO: 241653 - DNA, 574 bp, Unknown
  Bacterial polypeptide expressing nucleotide sequence isolated from the Sargasso Sea
aacagttgaaaaaataataagagaatcaataaaaaataatattaaatttttaactttatttgccttttcaactgaaaattggaaaaggccaaaaaaggaaataaattttttatttaatctccttgaaaattttctacaaaacaaaatcgacgatttatataatcaaaatataaaattaaaaattttaggtaaaaaaaattttccaaaaaaaattaataaacttttatatttatcagaaaaaaaaacttttaaaaataataggttgcaagttaatttagctttaaattatggatctaaatctgagctaataaatgcttttaagtctattaaaaaaaataaagataaaattactgaaaaaacattgtctaaacatttgcttactaaaaatataccagatcctgatattttaataagaaccggaaatactaaacgattaagcaattttttattatggcagatagcctatacagaaattttttttgaaaaaaaattatggccagctttcaatgaagcagattataataaaattattacaaactataaaaaaatcaaaagaaattttggtaatatttaa

SEQ ID NO: 241654 - DNA, 664 bp, Unknown
  Bacterial polypeptide expressing nucleotide sequence isolated from the Sargasso Sea
ggcggaatccagggggctgccgcgggtgatgggtcaccgcgccggagtggaagcgctcaaggcgacccttcggctctgcagcgattggggcgttggtgccctcaccgcttacgccttctcaacggagaactggtcccggccaggggatgaggtgaatttcctgatgaccctgtttgaacgggtgctgcagagggagttgcgcaccctcgaggaagagcaggtgcgcattcgtttccttggggatctggaggccctgccgctcaaattgcaggagctgatctccgatgccacggatcgaaccgccggcaacggcggcattcacttcaacgtctgcaccaattacggcggtcggcgggagctggtgcgtgcggcccagcgcttggcgcgccaggccgccaacggcgatctggctcccgaagacatcgatgaaaacagcctggcagcggaattgttcaccgccggcgagcaggatcctgatctgctgattcgcaccagcggcgaacaccggatcagcaacttcctgctctggcagctggcctatgccgaaatccacgtgaccgatgtgttctggcctgatttcaacgagaaggccctgaaacaagccctgctcgatttccagagccgctcccgccgcttcggaggccttgatccactcacgccatga

SEQ ID NO: 241655 - DNA, 301 bp, Unknown
  Bacterial polypeptide expressing nucleotide sequence isolated from the Sargasso Sea
ctgggcgatataaaacctaacgaagtcaatgaagaattatttgaatctgaattactcacaaaagggtctaaagatccagaactattaataagaactagtggagaaaaaagaattagtaattttcttctatggcaactagcttattctgaaatttatataactgatgtgttatggccagactttaatgaagttgaatttctaaaagcaataattgattatcaagcaagaaataggcgttttggaggtatagaatcaatatcgaatgattcttttaatgattcctactataacccaaactaaa

SEQ ID NO: 241656 - DNA, 366 bp, Unknown
  Bacterial polypeptide expressing nucleotide sequence isolated from the Sargasso Sea
tatggatttagctccatctagtaacaatcaacaagcaaacactccaaaccatatagcaataattatggatggaaatggacgctgggctgaagcaaggggattacctagaatagctggtcaccataaaggagcagaatctcttcgaataataattaaggcatgtatcgatctacaaattaactttttaacaatttatgctttttcatctgaaaactggaaacgaccatcaaatgaagtatcagacctcatgggattacttcaaaactacctgcgtagcgaaataagtgagatttcatcaaacggaataaaattacaatttattggagatagggaacgacttactgacgacattaagaaactttattt

SEQ ID NO: 241657 - DNA, 420 bp, Unknown
  Bacterial polypeptide expressing nucleotide sequence isolated from the Sargasso Sea
aatgataaatgataggcctttaaaacatcttgccataatcatggatggcaatggaagatgggcgttaaaccaagatttacctcgaacagcaggacatgctgcaggagagcattctctttcaaaaactattgattgggcaatagcaaataaactagaatggttaaccgtttatgctttttcaaccgaaaactggctcaggtctgaagaggaagtcgattttctaatgtttttcaatagagatatattaattcgaagaagagaagagtttaatcaaaagggggtaagatttaagtttttaggtgatttatcagattcaaaaataccagaagaaaataaaaatttaatgaaagaaactgatgaattgactaaaaacaataatactttaaatcttgtatttgcattcaattatggatctcataa

SEQ ID NO: 241658 - DNA, 721 bp, Unknown
  Bacterial polypeptide expressing nucleotide sequence isolated from the Sargasso Sea
tagactcaaaaaagaaaaccttcccaaacatataggactaattcatgatggtcacagaagatacgcaaggaaagaaggtctcttaagtttcgaagtatcttataaaattggaatgaccagacttaaagagtgtatagcgtggtgtgatgatgtagggattgactacataaccagctggctgttatctagagaaaatttagcaaggcctaaagaagaactagaaccatattttgagatactaaatgagctatttgaagatttattaattgatgacgttgttgataattttaaaattgaatttattggaagcacagaccttcttccagaattcttacagacaaccattgaacaacttgaggaagtcagaggaggtggccagaagactttaacaattgcacttggatacggaggtagacaagaaattttagatgctattaaaggattaatcgacgaaaataggaataaagaaaacgattttgacagattgatcgaaaacgttactgatgaacagttaagacaacacctttattctcctgaagcccctgatatagatttgataataagaactagtggagaatctagactttctggattcttgctttggcaaagcgcttattcagaagttatttttcaagacgtatattggccagaatttagaaagattgattttttgaggtgcttaagagagtacgcacaaagagaaagaagatttggacagtaa

SEQ ID NO: 241659 - DNA, 763 bp, Unknown
  Bacterial polypeptide expressing nucleotide sequence isolated from the Sargasso Sea
atggctttaaacgctgatacaatttcacaacaatgtttacctaagcatgttgctatcatcatggacgggaacgggcgttgggcgcaagctagaaataggcctcgtgtgtatgggcacaaaaaaggcgtggacgctgttcgtcaatctgttcagttttgtactaaattaggcgtacaatcgttaaccttatttgcatttagcagtgaaaactggcgccgccctgaagacgaagtaaatacgttaatggagctttttttgtttgtattaacaaaagaggttaaaaagcttcacaaaaacaatgtaaaactaaccatcattggagacctatctcggttttctgaagggttgcaaaacaaagtacatagtgcgcagcaactgacagaaaataacacagggttgtgtttaaatgtggctgccaattatggtggccgttgggatatggcaaacgcggctaaacaactcgcaatgcaagttgcaagcggtgacatagacgcacaagatattactgaagagcgtattgcgcagcatatgagcatggccgatcaacctgaacccgatttacttattcgaacggggggcgatgttcgcattagtaactttttactatggcaagcagcttacgcagaactttactttaccgaaacactttggcctgattttaatgaagcagcatttgctgaggccattgcatgttacgttgccagagagcgacgatttggttgtacgggcgaacaaataaaacaattactcgctcaaacctaaa

SEQ ID NO: 241660 - DNA, 727 bp, Unknown
  Bacterial polypeptide expressing nucleotide sequence isolated from the Sargasso Sea
atgcctgatagtaatagaaacaaaaataattctccaagaaatgttggcattattatggatggtaatggaagatgggctctaaaaaattctttaaaaattagccaaggccataaacaaggagtcaaaattgttagagatattgttgaagaatcggcaaagcaaaatattaaatcattaacattatatgcatttagctcagaaaattggaaacgacctaaaacagaggtaaatgctataaaaaatttagttattgaagctattaacgagcaagtcccagagcttaaaaaaaagaaagtaaggttaaaattttttggacaccttgatgattttggtaagaaaattcttgataagattgcttatgcagaaaatgagactgcatgtaggtcatgtaaattagatttaaatgttgcactcggctatggaggccaacaagatattgttgatgcagttaaaaaaatatcctataaggtggcttccaaagaaataaagataaaagatattgatgaaaaaactatcaatcaaaattcctctgtacctattaatgaaattgatctcttaataagaacaggtggagataatagaataagtaacttcttattattccaaatagcttatgctgaaataatgtttattgataagtattggcctgactttacaaccaatgattatataaaatgtttaaataaatttaaaaaagtgaggagaaggtttggaagaagggtataaa

SEQ ID NO: 241661 - DNA, 640 bp, Unknown
  Bacterial polypeptide expressing nucleotide sequence isolated from the Sargasso Sea
atgaacccaattaatcatgtggccattattatggatggaaatggtcgctggggcataaaacataaaaaatcaagaaacttaggacatagagcaggcctaaatactgttgaaagaattattaaatcgacaattaaaaacaaagttaaatatctaacactttatgctttttcaacagaaaactggaaaagacctcaaaaagaaattaaatttttatttaaactattagatagttttattgataaaaaaataagtgaatttaataaaaataatataaaattaaaaattattggtaatattaatgtttttaataaaaaattaaaaaaaaaactccaaaaatcagagcaattaactaaaaataataagagacttcaagtgaaccttgctcttaattacggatctaaatcagaattaataaatgcttttaaaagaataaataaagataaattaaatattagcattaaaaatatagaaaagtgtctatatacatcaaatattctagatcctgacatattgattaggacaggaaacactcaacggttaagtaattttttactatggcaactagcatattctgaaatattcttcgaaaagaaattatggccagatttcaaagaaagtgattacaataaaattttaaaaa

SEQ ID NO: 241662 - DNA, 625 bp, Unknown
  Bacterial polypeptide expressing nucleotide sequence isolated from the Sargasso Sea
atgaattctccaactcatgtagccataataatggatggaaatggcaggtggggtttaaaaagaaagaattcaagaaattatggacactccaagggtataagtgttgtaaaaaatataattaatgcagctatatcaaataaaataaagtatttaacattatatacattttcaactgagaattggaaaagacccaatcaggagattaattttttaattaatttgttaaaaacttacattgaaaaggaacttggtaacttaatcaaaaataacattaaattaaaaattataggtaatataaaaaaatttcctaaatctttaaaaataaaattaattagagcagaaaaattaacgaattataatgataaaattcaaattaatatagctttgaattatggatctaaagaggaaatcgtaaaatcaataaaaaaactaaacaaattatcaaagcccattaatgaaaaaaatatatcaaaatatctttatactaggggcatcccagatccagagatattaataagaacaggcaacagaaataggcttagtaattttttattatggcagttgtcatatactgaaatatattttgtaagcaagcttggccagattttacagacaatgatttaaa

SEQ ID NO: 241663 - DNA, 427 bp, Unknown
  Bacterial polypeptide expressing nucleotide sequence isolated from the Sargasso Sea
atgtcaccaaaaaaattatctcatatttctattatcatggatggcaatggaaggtgggccaacagcaaaggcatgccaagagcttatggtcatcgagccggtatcaaatcagttaataaaattgtgtctgcatgttcagtaagacaaattcaagaactaactctatttgctttcagtagcgagaattgggaaagacccaattatgaagttaaatttctcttatctttgtttgaagagtctattaacttatatattgctgatcttcataaaaacaatgtacagattaattttataggtgatctttctcagttcagtcaaaaactcctaaaaaatattaagaaggcagaagcattgaccaaaaacaacaataatctaaaattaaattttgcaataaactatggtggaaaatgggatattataaattcaa

SEQ ID NO: 241664 - DNA, 437 bp, Unknown
  Bacterial polypeptide expressing nucleotide sequence isolated from the Sargasso Sea
tataaaactagaaatcatcggtgatacatctaaattacctgatataacaagaaataaattgcttgctggagttcaagaaacctctcaaaacgatgtgctaattctttctttagcaataagctatggagcaagacaagaactaataagagctacaaagctgatttcagaaaaagttaaaaaaaatataatttcagtggaaaatattgatgaaaacataataaatgagcatctttacactcgcaatttaaaaaacgttgatcttttgattaggacaggaggagaattaagattaagtaattttttattatggcaaatttcatatgctgaactttgttttcaggatgtgctttggcctgattttaaaaaggaacactttttaaatgcaataattgactatcaaggaagaacaagaagatttggaaaaattaataagtaga

SEQ ID NO: 241665 - DNA, 199 bp, Unknown
  Bacterial polypeptide expressing nucleotide sequence isolated from the Sargasso Sea
tatgaaccctttaaaacatgtagccattatcatggatggtaatgggaggtggggtttaaaatataaaaattctagaaatgctgggcataaagctggcctaaaaaccgtagaaagagttataaaagaaacattaaaaaataagataaagtttttaacattattcgcattttctacagaaaattggaaaaggcctaaaaag

SEQ ID NO: 241666 - DNA, 521 bp, Unknown
  Bacterial polypeptide expressing nucleotide sequence isolated from the Sargasso Sea
aatgaaaatagataagcagaaattgcccaaacatgtagcaataattatggacggcaatgggagatgggcgactagaaaaggtttaccccgatcatttggacataaacagggcgttagtgtattaaaaaaaattcttaaagctgcaaaaaatttaggttgtaaagtaattactgtatatgctttttcaactgaaaattggacaagaccaacaaaagaagttgattttcttatcaatctttttagcgaagttttaaaaaacgaaattaaagaaatacatgaagaatcaacaaaaataaaatttattggagatttatctcctttcccaaaaaatttaaaagaaataatctctagatcagaatcacttactaaaaacaataataaatttttattcaatgtttgtgttaattacggaggtagacaagaaatagtaaacgttgcaaaagaactagcatttaaatcttctgctggggaaataaaaccaagtgaaaataatgaagaattattcaattcacagctattaa

SEQ ID NO: 241667 - DNA, 646 bp, Unknown
  Bacterial polypeptide expressing nucleotide sequence isolated from the Sargasso Sea
tatgaataagcttaaccacgttgcattcatcatggatggtaatggacgatgggggaagaaaaaaaataagaacaggaattttggacattacgctggtgttaaaacagtaaaaaaaattgttgaatcatcaataaaatttaaaatacctattgttacattctacgttttttcaacagaaaattggaaaagaccaaaagcagaaataaattttttatttaatttgattaattcatattttaaatctgagttacaaaatgtaatcaaaaatgaaataaaaataaatattattggagaattaaataaacttccgaataagcttaaatcaatacttaaagagacaacacaaaaaacaaaaaaaaataaaaaaattttagtaaatttagctctaaactatggttcaaaaagggaattaattaacgcttttaaaaagattaggtcaaaaaaattaacagaaaataatattaaaaattatttatataccaaaaatattcccgatcctgacattcttgttcgcactggcggaagaaaaagattaagtaatttcatgctgtggcaactagcttatgcagagttgtatttcttagataaactttggccagattttacacctaaagatttacatagtattttaaaaacattactataa

SEQ ID NO: 241668 - DNA, 545 bp, Unknown
  Bacterial polypeptide expressing nucleotide sequence isolated from the Sargasso Sea
aaaaagaaaaataaaatttctaactttgtatgccttttcgaccgaaaattggaaaagacctaaaaaagaaattaactatttatttgcattattagagaatttcttagcaaaaaaaataaatgatttaaataaacaaaatataaagttaaatgttataggtataaaacaattttcaaaaaaacttaataatttattaaacaatgctgaaacaatgaccattaacaatgataagctccaggttaatttagctttaaattatggctctaaaacagagttactaaatgcatttaaacaactaaataaaaacaaaaaaaaaatcactgaaaaaaattttctaaattatttacaaacaagaaatatacctgatccagatatattgattaggactggaaataccagaagattaagtaactttttattatggcaattagcatattctgagattttttttattaaaaaattatggccagattttaatgaaaaagactatttggaaatcattaatgaatataaatcaattaaaagaacctttggaaatatttaat

SEQ ID NO: 241669 - DNA, 781 bp, Unknown
  Bacterial polypeptide expressing nucleotide sequence isolated from the Sargasso Sea
catgagtcggccccaagtggcggctgccaggccatccacccgtactgccctgcctgcctgtctggactccggccggctccccgcccatgtggccgtgatcatggatggcaatggccgttgggccaaccagcgaggcctgccccgcgtcatgggtcaccgccagggtgtggaggcgctcaagcgcacgctcaggctctgcagcgactggggcatcggcaccctgacggcttatgccttctcgacggagaactggtcacgccctggcgaggaggtgagctttctgatgacactgttcgagcaggtgctggcccgtgagctggaggccctgcagcaagagcaggtgcgcatccgctttcttggcgacctctctgccctgcccgatggcctgcaggccttgatcgcggaagccaccaagcgctcggctgccaacagcggaattcatttcaatgtctgcaccaactacggcagtcgtagtgaactggtccatgccacccgtgccctggcccgccgggtccatgccggtgagctcgacccagaagccatcgacgagaatctgatggcctctgaattgcacacctccggtgaggtggatcctgacctgttgatccgcaccagcggcgagcaccggctcagcaacttcctgctctggcagttggcctacgccgagattcatgtgaccgatgtgctgtggcccgatttcgatgctgaggccctgaccttggccctgcaggattttcagggtcgtcggcgtcgctttggtggtgtggaggctggcgaatga

SEQ ID NO: 241670 - DNA, 226 bp, Unknown
  Bacterial polypeptide expressing nucleotide sequence isolated from the Sargasso Sea
taatgaaaaaaatgtgtcaaagaatttacttactaacggaataccagatcctgatctattaattagaacaggtaatacaaaaagactaagtaattttttattatggcaaatggcttatacagaaatttattttgaaaaaaaattatggccagaatttaacataattgactataaaaaaattataaaaaaattcaaatctacaaagcgaaattttggtaagatttaa

SEQ ID NO: 241671 - DNA, 637 bp, Unknown
  Bacterial polypeptide expressing nucleotide sequence isolated from the Sargasso Sea
aaaaaaaattctcaaagctgcaaaaaatttaggttgtaaagtaattactgtttatgctttttcaactgagaattggacaagaccaacgaaagaagttgaatttcttattaacctttttagcgaagttttaaaaaacgaaattaaagagatacatgaagaatcaacaaaaataaaatttattggagatttaactcctttcccaaaaaatttaaaagaactaatctctagttcagaatcacttactaaaaacaacaacaaatttttattcaatgtttgtgttaattacggaggtaggcaagaaatagtaaaagttgcaaaagaactagcattaaaatcttctgctggggaaataaaaccaagtgaaattaatgaagaattatttaattcagagctattaactagagggattaaggatccagaattattaataagaactagtggtgaaaaaaggataagtaattttttattatggcaattagcatattcagaaatttatatatctgacgtactttggccagagttcgatgagcatgaatttcttaaagcaataattgattaccaatcaagaaatagacgtttcggcggtatagaatcattaccaaatgaatcctttgaagattctcaatatttttcctaa

SEQ ID NO: 241672 - DNA, 650 bp, Unknown
  Bacterial polypeptide expressing nucleotide sequence isolated from the Sargasso Sea
aatggaaggtaatcaaactgaaaccttacctaaacatgttgccataataatggatggcaataaccgatgggcatcagagaaaaatcttcccggagttgcaggacacaaaaaaggcgttgaaagggcaagagagtctgttgaatatgctgtccaaaggggtttatctactctcactttatttgcgtttagcagcgagaactggggcagatcatcagaagaagttaaccttctgatgcaactattaaatagtgctcttcaagaagaggtgcctaatctcattaaaaattcagtccagctaagctttataggtgatttgtctcaatttgatcagaaacttatagagcaaatgaaagaatcagaaaaactaactcattgcgataccaaaagaaaaaaattggatttagttgttgctgcaagttacggcggaagatgggatattgtcaatgcaataaataaacatctagattcaggatcaaatggagaactaaccgaggagggttttgataaatttctatcgacatcaaaatttacagatcctgatttatgcattagaactggcaatgaacttagaataagcaattttttgttatggcaattagcatactcagaattatatttctctgaagtgctttggccagactttgatgatc

SEQ ID NO: 241673 - DNA, 805 bp, Unknown
  Bacterial polypeptide expressing nucleotide sequence isolated from the Sargasso Sea
aatgagtttagggaaactaattgacaagaaaaataacgacttatttaacagaatagataagcataaagttcctgaacatgttgcaataattatggatgggaatgggagatgggcgataaaaaaagggttacctcgtacatatgggcacaaaagaggagtggatgttttaaaagaaattcttaaagcatcaaaaaaattaggttgtaaagtacttactgtttatgctttttcaactgagaattggacaagaccgacaaaagaggttgacttccttataaatcttttcagagaagttttgagaagcgaaattgaagagatacatgaagaatcaacaaaaataaaattcattggggatttaactcctttcccagaaactttaaaaaaaataatctctagatcagaatctcttactaaaaataacgacaaatttttattgaatgtatgtgtcaattatggaggcaggcaagaaatagtaaaagttgcaaaagaattagcattaaaatcttctactggtgaaataaaaccaagtgaagttaatgaagaattatttaattcagagctattaactcgaggaatcaaagatccagaattactaatcagaactagtggagaaaaaagaattagtaattttcttttatggcaattagcttattcagaaatttacatatctgacgtactttggccagactttaatgagtttgaatttctaaaagcgatcatagattatcaatcaagaaatagacgtttcggcggtatagaatcattaccaaatgaatcttttggagattctccatattcttcctag

SEQ ID NO: 241674 - DNA, 550 bp, Unknown
  Bacterial polypeptide expressing nucleotide sequence isolated from the Sargasso Sea
actggtctctcaagcgaaaattgggcgtagaccaaaagccgaactcgatttcctcatgctccttctcgaacagtacatgattgaagaacgaacgctcctgatgcgggaacgtataagaccagtcatgataggaaaccgagctggcttaccaaacagtacactcgcagctattgatgaaacggttgatatgtgtcgcaataataccggcatgcggctttgtcttgcggtcaactacggagggcgggctgaaattgttgaagccaccaaaacactcgcacatcaagtggccgaaggaatgctacagccagatgaaatcactgagaaaagtattgaagatcaccttgaaacaaacggaatgcctgatccggaccttcttatacgaacggctggcgagatgcgactcagtaattttttattgtggcagatgagctatgcagaattctgggtcacttcagacctctggcccgatttcaccgagaatcatctcgatcaggcgctaaccgcttttcagtcgcgcgaacgtcgattcggaggcctttcgtcaacatga

SEQ ID NO: 241675 - DNA, 271 bp, Unknown
  Bacterial polypeptide expressing nucleotide sequence isolated from the Sargasso Sea
attaatagaggcttttaagaagatgaatagaaaaaaaaccgctataagtgaaaaaaatttaagcttaaatttacaaacaaaaaacataccagatcccgatctattaatcagaactggtgatacaaaaagattgagtaattttttattatggcagattgcttattcagaaatattttttgaaaaaaagctatggccagcttttaatgaaaaagattataatagaattattagagaatacaaaaatataaaaagaaattttggtaaaatatga

SEQ ID NO: 241676 - DNA, 285 bp, Unknown
  Bacterial polypeptide expressing nucleotide sequence isolated from the Sargasso Sea
tatgaatcaaattcaacatgtcgccattattatggatggtaatggaagatggggattaaaacataaaaaatctcggaatttaggtcataaagaaggtttaaaaactgtcgaaaaaataatcaaaatatctgttaaaaaaaaaattaaatatttaacattatatgcattctcaacagaaaattggaaaagaccaagaagagaaattaaatatttgtttagtttgcttgaaaatttcttaaataataaaatttctgacttaaataatgaaaatattaaattgaaaat

SEQ ID NO: 241677 - DNA, 717 bp, Unknown
  Bacterial polypeptide expressing nucleotide sequence isolated from the Sargasso Sea
gacgagaaggtatcttcaaaagaaaaagaaataatgacaatatgaaccctcttaatcatgtagccattatcatggatggtaatggaagatggggaataaaaaataaaaaatctaggaatgctggtcataaagcaggtttaaatacagttgagaaaattattaaagaaacgattaaaaacaaaataaagtatttaactctgtatgctttttcaacagaaaattggaaaagacctaaaaaagaaataacttacttatttaatttattagaaaactttttaattaatagaattgaagatctacataaacaaaacattaaacttaaaattattggtataaaaaatttttcaaaaaagttaaacaatcttttagttcaatccgaaaagaaaactttcaaaaataccaaacttcaaattaatctagccttaaattatggatcaaaatatgaattaattaatgcttttaaaaaattaaataaaaataaagaaaaaattaatgagaaaaatttaattaaaaatttatttactaaaaatttgcctgatcctgatatattaattagaactggaaacacaaaaagattaagtaattttctattgtggcaattagcttactcagaaattttttttgaaaaaaaattatggcctgattttaatgagtttgattttaataaaattattaaaaaatataaaaaagttaagagaaattttggtaatatataat

SEQ ID NO: 241678 - DNA, 650 bp, Unknown
  Bacterial polypeptide expressing nucleotide sequence isolated from the Sargasso Sea
accacgcattgcgggacataaagaaggaataaactccgttagagaaataaccagagtttgtggtgaaattggcgtaaagcatctaactctttataccttttcaactgaaaattggaaaagaccatcctcagaggttagtgcacttatgagtttattgctcaaaacaataaaagaagaaattattgagcttcacaagaaaaatgtgagattcactattattggagatctcgatactattccaataaaaactgcaaatggattacgggatggaattgatatgacaaaaaataataaaggattaaaccttaatcttgctttgaattatggtagccaccaagaaattatcagagcagtgaaaaatttggctttaaaagtgcaacagggggaaattgatccagaaaatattgataaagaaaaaattagtgaatttttatatacaagcaatatatcggatcctgaattgttgatcagaacaagtggagagcataggttaagcaactttctactttggcagattgcttacacagaaatatacatgacagatctattttggcctgaatttcgtgagcaagaactttttgatgccatattagaattccaatcaagagaacgtcgtttcggtaatgttaaaaaaatgattcaaggataaa

SEQ ID NO: 241679 - DNA, 592 bp, Unknown
  Bacterial polypeptide expressing nucleotide sequence isolated from the Sargasso Sea
aatgggtgtcctaaatgttgaaaaaattataaatgcatcaattaaaaaaaaaattaaatttttatcattgtatacattttcaacagaaaattggaaaagacctaagtcagaaattaactttttattaaaattattagagaattatatagataaagaattaacaaaccttaaaaaaaaaggtgttaaaataaaaattattggagatattgataaatttcctaactcgttaaaaaaaaaattaaaaataactgaattaatcactaaaaataataattttattcaagttaatgttgcattaaactatggatcaagacaagaattaattaactgcttaaaaaaaattcaaaagaaaactttaaaaataaatgaaaaaaacatttcagaaaatctttacacaaaaggtatacctgatccagacatattaattagaactggaaatacaaaaagattaagtaattttctactttggcaattaacttattctgaaattttttttgagagaaaactttggccagattttactgaaagagattatacaagaattataaataaatttaaaaaaacaaataggaatttcggaggactcatttaa

SEQ ID NO: 241680 - DNA, 693 bp, Unknown
  Bacterial polypeptide expressing nucleotide sequence isolated from the Sargasso Sea
aagaaataatgacaaatatgaacccattgagacatgtagccattattatggatggcaatggaagatggggtttaaaaaataaaaattcacgtaacgcaggtcataaagcaggattaaatactgtagaaaaaattataaaacaaacaattaaaaacaagataagttttttaactttatttgctttttctacagaaaattggaaacgtccaaaaaaagagataaattttttatttagtttattagagaactttttaaaaaaaagaattgaagagcttcatagtcaaaatataaaacttaagattttaggatctaaaaaattttcatcaaaattaaataagcttttgaataaatctgaaaaaaaaacttcaaaaaataccaagttacaaattaatcttgcattaaattatggctctaaatctgagttaatagaggcttttaaaaaaatgaaaaaaaataaaagtatgattaatgaaaaaaacttgagtaaaaatttacaaactaggaatataccagatcctgatttattaattagaactggtgatactaaaagactaagcaattttttgttgtggcagcttgcttattccgaaatcttttttgaaaaaaagttatggcctgccttcaatgaaaaggactataatagaataattaaggagtacaaaaatattaaacgaaattttggtaaaatatgat

SEQ ID NO: 241681 - DNA, 709 bp, Unknown
  Bacterial polypeptide expressing nucleotide sequence isolated from the Sargasso Sea
aaaaaaccgagtacaaaaataataacccctaaacacgtagcaattattatggatggaaataatagatggacgaaaaaacataaatttagaggttttaaaggacatgaaaaaggaattgaagcaatacaaaacgctattgatgttgctaaaatatacaaaataaaatttctcacactttttagtttttcatctgagaattggtcaaggcctaaaaaggaagttaattttttaatgaatcttttaagaaattatctttcagataaaattaatgatttaattaaagacaatatatcaattaagatgattggtgaaaaatcaaggataccaaaagatatattaaataaaataaaaaaatacgaagaattaacttcaaaaaaaaaaggcttaaagcttattttggcattaaactatggcagtagaaaagaaataacaattgctattaaaaatttatttagtaattcaaaaaaaaaaaatattataataaatgaaaaaactatatctgctaatttatttacaaataattttcctgatcctgatcttcttattcgtacaagtggagaaaaaagactaagtaattttttattgtggcaattagcttatacagagcttgtatttttaaaagtattatggcctgattttaaaaaaaaacactttgttgatgctttaatgcaatattcaaaaagaaaaagaagatatggttcaaggtagt

SEQ ID NO: 241682 - DNA, 496 bp, Unknown
  Bacterial polypeptide expressing nucleotide sequence isolated from the Sargasso Sea
tatgaacccattaaatcatgtagccattatcatggatggtaatggaagatggggtttaaaatataaaaattctcgcaatgctggtcacaaagcaggcttaaaaactgttgaaaaaataattaaagaaacaattaaaaacaaaataagttatttgactttatttgcattttctacagaaaactggaaaagacctaagaaggaaataaactatttattcaatctattggaaaattttttgtctaatagtgtttcagatctacacaaacaaaatattaaacttaaaattttgggatctaaaaaattttcacctaaattgaataaacttttgaataactctgaaaaaaaaacttcaaaaaataataaattacaaattaatcttgcattaaattatgggtctaaatcagagctaattgatgcatttaaaaagattaagaaaagtaagattattgttaacgaaaaaaacttgagtataaaccttcaaactaaaaatatacca

SEQ ID NO: 241683 - DNA, 601 bp, Unknown
  Bacterial polypeptide expressing nucleotide sequence isolated from the Sargasso Sea
aatgctggtcatcgtgcaggtttaaatactgtagaaaaaataataaaagaaacaattaatcaaaaaattaaatatttaacattatatgctttttcgacagaaaactggaagagaccaagaaaagaaataaaatatctttttggtttgttggaagattttttgataactaaaattgacgaattaaatgatcaaaatattaaacttaaaatcatcggtattaaaaacttttcaataaaattaaataaattactgaatttagctgaaaaaaaaacttgtaaaaatacaaaattacaaatcaatttagcgctaaactatggctcaaaatctgaaataattagtgctttaaaaaaattaaaaaaaaataaaaagcctataagtgaaaaaaatttgacagaaaatttacaaactaaaaatattcctgatcccgagatattaatacgtacaggtaatacacaaagattaagtaattttttattatggcaagccgcctattcagaaatattctttgaaaaaaaattatggccatcttttgaaagaagtgattttaaaaaaattataaaaaaatataaatcaattaaaagaaattttgggtcaatttaat

SEQ ID NO: 241684 - DNA, 649 bp, Unknown
  Bacterial polypeptide expressing nucleotide sequence isolated from the Sargasso Sea
aggccataaggctggtgtaaaagtattaagaaatttaattgaacatgcagttcatctcgaattaaagacgcttactgtttatgcttttagtcgtgagaattggcagcgtccaaagaaagaagttgagctattactcgatttgtttatctcatcactcgaatcagaagttaaagatttgcatgagaataatataaaattaaattttatcggagagacagataaattttccgaaaaattgaagaaatctatgagcaaatctgaatcactgacatccaacaattcaaaactaacattaaatgttgctttaaattatagcggccgatgggatgtttataaagctctgttgtctataatagatgatatgacagctaagaaaattactaaaaatgatgtcaatgaagagctaataaatacaaaattgtcgctagcagattacgatgagccagatctcctaatcagaactggcggtgaaaagagattaagtaactatttgttatggcagattgcgtatacagaattgtattttactaatactctgtggcccgactttaatactgatcagtttgatctagctttagattggtacacaaaacgacaaagaagatttggtaaaacatctgaacaaatcgagaaaaataaaaatgcttaa

SEQ ID NO: 241685 - DNA, 670 bp, Unknown
  Bacterial polypeptide expressing nucleotide sequence isolated from the Sargasso Sea
atgagcttaggaaatataattgataagacaaatattgacttatccaagagaatagataagcaaaaaatacccgaacatgtagcaataattatggacgggaatgggagatgggccactaaaaaaggcttacctcgatcattcggtcataacaaaggcgttagcgtattaaaagatattattaaagcatcaaaaaagttaggttgtaaggtacttactgtttatgctttttcaactgaaaattggaacagaccaacgcaagaagttgacttccttataaatctttttagcgaagttctgaagaacgaaatagaagaaatccatcaagaatcaattaaaataaaattaattggggacataacacctttcccagaaaacttaaaaaaaattattaatagttcagagtctctaacaaaaaaaaataattcttttttattgaatgtttgtgtcaattatgggggcaggcaagaaatagtaaaagttgcaaaagaacttgcttttaaatgttcttctggtgaaataaaaccaagtgaagttaatgaaaaattatttaattcaaagctattaactcgaggaattaaagatccagaattactaataagaactagtggagaaaaaaggataagtaattttcttttatggcaattagcttattcagaaatttacatttctg

SEQ ID NO: 241686 - DNA, 679 bp, Unknown
  Bacterial polypeptide expressing nucleotide sequence isolated from the Sargasso Sea
aatatgaaccctttaaaacatgtagccattatcatggatggtaatgggaggtggggtttaaagaataaaaattcaagaaatgcaggtcacagagctggcttaaatactgtagagaaaatcataaaggagactattaaaaataatataaaatttctaaccttatacgctttttcaacagaaaattggaaaagacctaaaaaagagattaattttctattcaatcttttagagaattttcttaaagaaaaaattgaagatcttaataaacaaaaaattaaattaaagattattggcaaaaaaagcttctcaactaaattaaatagtcttttaaacttatccgaaagaaaaacatcaaagaataaaagacttcaaataaatttagctttaaattatgggtcaaaagctgagcttatatctgcatttcaagaattgggaaaaaataaagaatcgattaatgaaaaaaatgtaaggaaatatctacaaacaagaaatataccagatccagatttattgattagaacaggaaatacaaaaagattaagtaactttttattatggcaaatagcttattctgagattttttttgaaaaaaaattatggcctgattttaatgaaaaagattattataaaataatcaagaaatacaagaatataaaaagaaattttgggaatatttaat

SEQ ID NO: 241687 - DNA, 643 bp, Unknown
  Bacterial polypeptide expressing nucleotide sequence isolated from the Sargasso Sea
atgaagaatcttccaaaaaatatcggaataataatggatggtaacagaaggtgggcatccaacagaaaattgccaactgcctatggtcatagtcaaggcgttaaggctcttaaaaaaattgtaaaatcatgttctgaaataaatatttcacaacttaatatctttgcattttcgtcagaaaactggaaacgtgatcctttagaaattagaagcataatgcatcttattgaaacatatttaaaatctgaaattgcagagctaaactctcaaaatatatgttttaaggtatttggcaataaagaaaagataaataaaaaaattaatatattgattgagagcgctgagaaaataacttgtaataataatggtcttaaattaaatattgctcttagttatagcggtagaaacgatatattatattcaactaaaaatatagcagaaaaagtcagtttaggtaaattaaaggtaaatgatataagtgaagacttatttcaaaaaaacctattatcttcatatgtagatgacattgatttgttaataagaactagtggagagcagagattgtcaaattttcttctttggcaacttcagtactcagaaatatatttttcaaataagctttggccaagattttacctctgaa

SEQ ID NO: 241688 - DNA, 584 bp, Unknown
  Bacterial polypeptide expressing nucleotide sequence isolated from the Sargasso Sea
attaaatacggtagaaaaaattattaaatgttcaataaaaaaaaaaataaaatatttaactttatttgctttttcaacagaaaattggaaacgaccaaaaaaagaaataaattttttatttaaaatgcttgaaagtttcttagagaaaaaaattaacgactttaatactcaaaatataaagttaaaaattattggaaatattaatgtttttaataaaaaattaaagagtaagttaaaatattcagaaaaattaactaggaataacaaaaaattacaaattaatctcgctttaaactatggatctcagtatgagattttaaatgcaataaaaataattaataaaaaaaataaaaaatttaatattaaaaatttagaaaaaaatttatataccaaaaatattcctaaccccgatatactaataagaactggtaacacttttagattaagcaatttcctactttggcagatggcttataccgaaattttttttgttaaaaaactatggcctgactttttagaaaaagattatgtaaaaattttgtcaaaatatgaaaatacaaaaagaaattttggtaatatttaat

SEQ ID NO: 241689 - DNA, 565 bp, Unknown
  Bacterial polypeptide expressing nucleotide sequence isolated from the Sargasso Sea
atgagtttaggaaaaataattgacaccaagaataataacttatccatgaaaatagataagcaaaaagttccagaacatgttgcaataatcatggacggtaatggtagatgggcaacaaaaaaaggtttccctcgtacatatggtcataaaaaaggggttagtgttttaaaagagattctcaaagcatcaaaaaatttaggttgtaaagtactaactgtttacgctttttcaaccgagaattggacaagaccaacaaaagaagttgacttcctaataaatctttttagcgaagttttgagaaacgaaattggaaagatacatgaagaatcaacaaaaataaaattcattggagatttaactcctttcccagaaaatctaaaaaaaataatatctaattcagaatctctaacaaaaaataacaataaatttttattgaatgtttgtgttaactacggaggtagacaagaaatagtaaaagttgcaaaagaattagcattaaaatcttcttctggtgaaataaatccaagtgaggttaatgaagaattatttaattcggagctattaa

SEQ ID NO: 241690 - DNA, 340 bp, Unknown
  Bacterial polypeptide expressing nucleotide sequence isolated from the Sargasso Sea
gatcgagtcgttctgcaaactaaggataatacagggacttacgtaaatcttttgtttaactatggatcaagagacgaaattaatgatgcgataaaatccattataaaaaataataataaagcagtgaacataagaaactatttttatgtgccaaaatctcaagatcctgatctgattattcgaacgggaggtgaaaaaaggcttagtaattttatgttgtggcaagctgcatatgctgagctatattttacaaaagttttgtggccagatttttctattattcatttaagaaaagctattatagattattttaaaagagtaagaaagcatggtaaatgat

SEQ ID NO: 241691 - DNA, 388 bp, Unknown
  Bacterial polypeptide expressing nucleotide sequence isolated from the Sargasso Sea
ggagttaatattacgaaggataacaatggcctgaacctttgtctggctttgaattatggaagtcgtcaagagataattgatgccgtaaagacaacggcaataaaagtaacacaacgagaaataaaacccgatgatataacagaagaatatttttctgatttattatataccaaaggtgttcctgatcctgatctgttaattagaacaagtggtgaatgtcgattaagtaattttttgctttggcagattgcctacacagaaatctttatgacagatacatattggccggcatttagggaaaaagaattgatggatgctatctttgactttcaatcaagggagcgtcgatttggaaaagttagtgagcaggtagcgaatacgatatgaa

SEQ ID NO: 241692 - DNA, 429 bp, Unknown
  Bacterial polypeptide expressing nucleotide sequence isolated from the Sargasso Sea
ttatagaatttaacaaaaataatattaaattaaaaattataggaattaaaaaattttcaccaaaactaaatgctttattaactcaatctgaaaaaaagacaaaaaataataaaaaattacaaatcaacttagcattaaactatggatctaaacacgaaattatccatgcaataaaaaaattaattaaattacaaaaaaaaattgatgaaaaaaatatttcaaaatgtctttttactgaaaatgttccagatccagatttattaattagaaccggaaatactcatagattaagtaattttctactatggcaaatagcatattctgaaatattttttgaacaaaaaatgtggccagattttaatgagaaagattataataaaattttaaataaatttaaaaatattaaaagaaatttcggaaatatttaat

SEQ ID NO: 241693 - DNA, 525 bp, Unknown
  Bacterial polypeptide expressing nucleotide sequence isolated from the Sargasso Sea
taacattatatgcattttctaccgaaaattggaaaagaccaaaaaaagaaattaattatttattcagtttattagaaaattttttgattagtagaatagatgaactacataaacaaaatataaaactcaaaataataggtgttaaaaatttttcatcaaagttaaataatcttttaaataaatctgagaaaaaaacttcaaaaaatagtaaattacaaattaatcttgcattaaattatggatcaaaatttgagttaattaatgcttttaaaaatttaaagaaaaaaaatgaaatgataaatgagaaaaatttagctaaatatttacaaacaaaaaatattccagatccagaccttctaattagaacaggaaatactcaaagattaagtaattttctgttatggcaagcagcatatgcggagattttcttcgagaagaagttatggccagaatttaatgaaaaagactataataagattattaagaaatttaaaaatataaaaagaaattttggaaaagtttaat

SEQ ID NO: 241694 - DNA, 670 bp, Unknown
  Bacterial polypeptide expressing nucleotide sequence isolated from the Sargasso Sea
tatgaataaactcaaccatgttgcttttattttggatggcaatggaaggtggggtaaaaaaaaaagaaaaggaagaaatttcggtcatttaaaaggggtagaaacagttaaaaaaattgtcaaagccgcaataaaattaaaaatacctattatcactttttatgttttttcgtcagaaaattggaagagaccagagaatgaaaaaaagtatatatttaagcttataaaaatttattttaataaagaaataaaaaatatagtcaaagaagggataaaaataaatattttaggtgagttaaataagttttcatcagatttaagaatatcattaaaaaaatctgttgatttaacaaaaaaaaataagagaattattgtaaatttagcaattaattatggttcaaaaaatgaaattttcaaagctttgaaaaaaacaaaaaatagcttgacaattaaaaattttgaaaaaaatctatatacaacaaatatgcctaacccagatattttgattagaactggtggataccagcgtctaagtaactttcttctttggcagctagcatatgcagaactatttttcttaaaaaagttgtggccagattttaattcaaatgatttgctgaagattattaaaaaatataaaaaaattaatagaaattatggaaatatatga

SEQ ID NO: 241695 - DNA, 388 bp, Unknown
  Bacterial polypeptide expressing nucleotide sequence isolated from the Sargasso Sea
cttggtaagtcaaatgcacatcggaattataatggatggcaacgggagatgggcagtggaaaaggggcgtcctcgagctttcgggcatagaaaaggcgcatctcgagtaactgaaatcgttaaagcatgtcctcagcttggtgttgagactttgacactttatgcattttccactgagaactggaatagagcagctcacgaagttgaaagtttaatgaggcttttcaggggatatcttcaaaacaagtttctatcgttagtagaaaataatgttaaagttaagtttattggtgatccttcacccattgcatctgatcttcgattgcaaatggggaatttagagaaagccactgaatccaactatggtctgaacttaaatgttgcttta

SEQ ID NO: 241696 - DNA, 434 bp, Unknown
  Bacterial polypeptide expressing nucleotide sequence isolated from the Sargasso Sea
tatgaactcacccaaacatgtagccataattatggatggtaatggccgatggggtataaaaaagaaaaaaagtagaaattttggacacaaagctggattaaaaacagttgaaaatataattaaagaaacaataaaaaataaaataaaatttctaacactttttgcattttctactgaaaattggagaagacctaaaaacgaggtaacttatttatttaatcttttagaaaattttataaaaaatagaataatagaatttaacaaaaataatataaaattgaaaattataggtgttaaaaaattttctcctaaactaaatagattattaacagaatctgaaaaaaaaactgaatataataataagttacaaattaatttagcattaaattatggttcaaaagatgaaataatttatacagtaaaaaagttaataa

SEQ ID NO: 241697 - DNA, 370 bp, Unknown
  Bacterial polypeptide expressing nucleotide sequence isolated from the Sargasso Sea
aatgaaaatagataagcaaaaattgcccaaacatatagcaataattatggacggcaatgggagatgggcgaccagaaaaggttttccccgatcatttggacataaacaaggcgttagtgtattaaaaaatattctcaaatctgcaaaaaatttaggttgtaaagtaattactgtttatgctttttcaactgagaattggtcaagaccaacaaaagaagttaatttccttataaatctttttagcgaagttttaaaaaacgaaattcaagagatacatgaagaatcaataaaaataaaatttattggagatttaacacctttcccaaaacatttaaaagaaataatctctagttcagaatcacttactaaa

SEQ ID NO: 241698 - DNA, 325 bp, Unknown
  Bacterial polypeptide expressing nucleotide sequence isolated from the Sargasso Sea
aaaaataaaagattacaaataaatttggctcttaattatggatcaaaaacagaattgattaatgcatttaaagaattaaaaaaaaacaaagaaaatataaacgaaaaaaatttaaaaaaatatttagaaacaaaaaatattccagatccagatttattaatcagaactggaaatactatgagattaagtaattttctattatggcaactagcatattctgagattttctttgagaagaaattatggcctgattttaacgaaaaagactataataagataattaagaattataagaatattaaaagaaattttggaaatatttaat

SEQ ID NO: 241699 - DNA, 521 bp, Unknown
  Bacterial polypeptide expressing nucleotide sequence isolated from the Sargasso Sea
tatgattactgaagaattagacatagataatattccaaaccatatagcaatcataatggatggtaatggaaggtgggctaaagagaaagggctgcctaggatagctggacacaaagaagggataaattctgttcgtgatattacgagggcatgtggagagataggcgtcaaatatttaactctctatactttttctactgaaaattggaacaggcctaaaaaagaagtcaatgcgcttatgagtttattgttaaggaccattaaaaaggaggtaagggagcttcataagaataacgttaagttttctactattggtgacctctcatttttaccaaatattactgaaaacggactaaaagagggtatggatttaacaaaaaacaatacgggtttaaacttaattctagcattaaactatggaagcaggcaggaaataattgattctgttataaatatatctggcaaggtaaaatcaggagagatcgatattagccatattgatgaaaccctattttcatcat

SEQ ID NO: 241700 - DNA, 613 bp, Unknown
  Bacterial polypeptide expressing nucleotide sequence isolated from the Sargasso Sea
aaaatcaagaaattatggacacaatgaaggcgtcaaagttgttgagaaaataattgctgaagcaatctctaataatatcaaatatttaacattattcaccttttcaacagaaaattggaaaagaccaaaaaaagaaattagttttttgatgtatcttctggaacaatacataaaaaaggaattaaaaaacttattaaaaaaaaatataaaaattaaaataattggaaatataagaaaatttccaaaaaaactaaaacaaagactaagagaagcagaaatacaaactttaagaaatacaaaaattcaaataaatattgcactaaattatggatctaaagaagaaataataaaaactgtaaaaaaattaaataagcaaagtataccaataaatgaaaaaaatatatcgaaaaacttgtatacaaaagatatgcctgatcctgaaatattaattagaacaggaaatagatttagacttagtaattttttattgtggcaatcttcttatacagagattttttttgttaaaaaactatggccagattttagcaaaaaagattttaattatattataaaaaattttaaaaaaataagaagaaattttggtggaatttag

SEQ ID NO: 241701 - DNA, 594 bp, Unknown
  Bacterial polypeptide expressing nucleotide sequence isolated from the Sargasso Sea
atcaaaaaggcgtcaaagttatagaaaagattgtaaaagcctcaattaatgcaaatataccaatactaacattttatacattttcaagtgaaaattggaaaagacccaaaaaagaaataagctttctctttaaattaattaattattattttattaaagaaattaataatttaataaaaaacaatattaaaattaaagttataggaaatattaaaaatttacctggaaaggtaagattgagtttaattgattctatgaaaaaaactaaacattgtaataaaattttagtaaatttggcaattaattatggctcgcaaaatgaaatactagaagcaacaaaacagatgtataagaaaggattgtcattcaatagtaaaaatttacaaaataatttgtataccaagggtattccaaatcctgatattctgataagaacggggggaaaaaaaagactaagtaatttccttctttggcaaatggcttatacagagatttatttcattaataaattatggccagactttaaagttatagattattttaaaattattaataattttaaaaaagtaaaaagaaattttggaaacatatgag

SEQ ID NO: 241702 - DNA, 745 bp, Unknown
  Bacterial polypeptide expressing nucleotide sequence isolated from the Sargasso Sea
atgcaacaatctaaaaaagagaagattctttctggctatattcctgaacatatagccattattatggatggaaatggtcgttgggctcgttctcgttcactccctcgtattgcagggcacaaagaaggaataaattcggttagagaaataacacgaatatgtggtgaaatcggtgtcaaatatttaacactttatactttttcaacagaaaactggaaaagaccacgagcagaagttagtgccctcatgacgcttttgctcaaaacagttaatcatgaaattgaagcattgaataagaataatgtaaggttcactattattggggatttaaatattttaccaagtaatacaactaaagggctaatcgatggagttgatattacgaaaaacaatgacggcctgaacctttgtctggctttgaattatggaagtcgtcaagagatcattgatgccataaaaacagcggcaataaaagtaaaagaaggagaaataaaacccgatgatatcacagaacaaactttttctaatttattatacactaaagacattcctgatcctgatctgttaattagaacaagtggcgaatgtcgattaagcaactttttgctttggcagattgcttacacagaaatcttaatgacagatacatattggccggcatttagagaagaagaattgatggatgcaatatttgacttccaatcaagggagcgtcgatttggaaaagttagtgagcaggtagcga

SEQ ID NO: 241703 - DNA, 539 bp, Unknown
  Bacterial polypeptide expressing nucleotide sequence isolated from the Sargasso Sea
catggctaataagagtagcaaaaaaaataactatcctgcaaatattggcattatcatggacggcaatggaagatgggcgcttaaaaattcattaaagattagccaaggccacaagaagggcgtagatattgtcaaaaaaattgtagaagaatcagtcaaacaaaatattaaatcattaacattatatgcattcagttcagaaaattggaaacgacctaaacctgaggttaatgctataaaaaaacttgtagttgaagctattaatgagcaagttcctgaattaaaagagcagaaggtgaggttgaaattttttggacatctggatgattttggtaaaaaaattcttgataagatagcttatgctgaacatacaaccaaacttgagtctagtaaattagatttaaatatagcactgggttatggaggtcaacaagatattgtagatgttgttaaaaatatatctttaaaggtgctttctaaagaaataaagataaaagatatcaatgaaaagactattaacaaaaattcttcagtgcctg

SEQ ID NO: 241704 - DNA, 654 bp, Unknown
  Bacterial polypeptide expressing nucleotide sequence isolated from the Sargasso Sea
tatgaacccactaaatcatgtagccataataatggatggcaatggtagatggggtttaaaaaataaaaattctagaaatgctggacacaaagctggtttaaaaactgttgagaaaattattaagcattcaattaagagaaaaataaaatttttaacattatacgctttttcaacagaaaactggaaaagaccagattcagaaattaaatatttatttaatttgttagaagtttttctaaaagaaaaaatacaacaactacatagtaatggaataaaaataaaaattttaggaaacaaaaatctaaataaaaaacttaagacactgttaacttatgctgaaaaaaaaacctcaaaaaataaaaaaatacaaataaatttagccctaaattatggttcaaaaaaagaaatattagatacaattaaaaaattaataaaatataaaaaaaaaattactgaggaaaattttaagaataatctgtatactaaaaatatcccaaatccggatatattaattagaacaggaaatactaaaagactaagtaattttttaatgtggcagttaacttattcagaaatgtactttgaaaaaaaattatggccagattttaatgaaattgattatgacaaaataataaaaaaatatagtcaaattaa

SEQ ID NO: 241705 - DNA, 703 bp, Unknown
  Bacterial polypeptide expressing nucleotide sequence isolated from the Sargasso Sea
catgtcccctgccgcctcaccacccgtgccccgccatctggccgtcatcatggacggcaacgggcggtgggcggagcgccggcgtcgtccgcgcgcgatcggccaccgcgccggcgcgcgcgcggtcaatgtctgcatcgacttctgcctggagcgcggcatcggcgcgctgaccctgttcgccttctccagcgagaactggggacggccagaggaggaagtcggcgcgctgatgaagctgttcctcaatgcgctggaccgcgaggtggaggaactccaccggcggcaggtgcgggtgcgtttcatcggcgaccgtgcgcgcttctcggcggatatccgcgcacgcatggacgcggccgaagccctgaccgccggcaatacccggctgcacctggtcatcgccgccagctacggcggccgccaggacatcgcgttcgcggccagggcgctggcagccgacgtggcggccgggcgcctgcggccggaggacatcgacgaggcggcgctgggcgcgcacgtcgcgctggccgacctgcccccgcccgatctgttcatccgcaccggcggcgaccatcgcatcagcaacttcctgctgtggcagctggcgtacacggaactctggttcaccgacgtactgtggcccgacctggacgcgacgctgctgcagcgcgcgctggacgacttcgcccggcgcgagcgccgc

SEQ ID NO: 241706 - DNA, 763 bp, Unknown
  Bacterial polypeptide expressing nucleotide sequence isolated from the Sargasso Sea
catgacttcatcacaaaataatcatccagagacaatccctaatcagccaaaacatgttggcatcattatggatggcaatggaagatgggcaagaattaggggtaaaagaaggatatttggccatgaagctggcgttcttaaggcaagagagttggttgaaaccgctgtaaaaattaagcttgaggcattgacactctatgcgttcagttccgagaattggtctcgaccaaagaaagaagtcagcggattaatgagcctttttgaaaagactattgaaaaatataccagtttattgattgataataatgtgcgattcaaaactgctggtgatccatcaatgttgcctgatgtcttgaaacggaaattacagcagatggagtccatcacatcagagaatagtgggttaaaattgactctagcaattgcttatggcggtcaacaagaaatcataaatgggatcaaaaaattaattgatgatcatgataaccagatcattgatgttaatgatctgactgttgaatcatttaatgaatatctgtcattcaatgatcttccagagctagatttgataatcagaacctctggtgagactagactgagtaactttatgctatggcaatcagcgtactctgaaattcattttacagagacattatggccaaactttgaggagcaagagtttttagaaattcttcaaacatactctctgtcagagcgaagatttggcaatgtcgatgaagatactgagctaaaggaagcttaa

SEQ ID NO: 241707 - DNA, 676 bp, Unknown
  Bacterial polypeptide expressing nucleotide sequence isolated from the Sargasso Sea
atgaacccattaaatcatgtagccattatcatggatggtaatgggagatggggtttaaaatttaaaaactcaagaaacgcaggtcataaagaaggtctaaaaacagttgaaaaaataattagagcatcaattaaaaaggatattaagtttttaaccttatttgcattttcaactgaaaattggaaaagacctaaaaaagagattaattatttattttctttacttaaaaattttcttgaaaatcaagcgaaagagcttgaaaaaaaaaatataaaattaaagttttttggaattaaagtttcggataaaaatttacaaaaacttataattcaatcagaaaaaaaaactcaaaaaaataaaaaacttcaattaaatattgcaattaactatggagctaaaaacgagataattagtgccgttaataaactaaataaagaaaataaaaagattactgaaatgaatattgaaaaaaatctttataccaaaaatatacctgatccagatattttaataagaactggaaatactaagagacttagcaactttctcttatggcaattagcatactctgagatattttttgaggaaaaattatggccagatttcaatgaaaaagattttaataaaataattaggaagtacttaactataaaaagaaactttggatcaatatgaa

SEQ ID NO: 241708 - DNA, 673 bp, Unknown
  Bacterial polypeptide expressing nucleotide sequence isolated from the Sargasso Sea
atgaatcatcttgcaattataatggacggcaatgggagatgggcaattcatcaaaaaaaaccaagagtttttggccatcaagctggtgcccaaactgctaaaaaaatcataaatgactgtgttgagaaaaaaataccttacttaaccttatatactttttcaaaagaaaactggtctaggcctaaggaagaaatagaaactttgatggatttgttgtcagtaatgcttgagggtgaattagagaatatgcttaggaacaatataaggtttaatgtcgttggaaggatagaggatttacctaaaaaaacaagggaatttactttatctacaattgagaagactaaaaataatacaggcttagttttgactttagcacttagttacggaggaagacaggaaataattgatgccatcaattcaatgataaaaagtggagagaaaataattaatgaagatattcttaaaaatcacttatattgccctgaattgccggatcctgacctaattattagaacaggaggagaatataggttgagtaattttttattatggcaatcagcgtatgcagaaatttatacaagcggcaaaaattggccggattttgatagcgaagacttaaaaaaagcaataaaagaatatgataacagaaacagaacttatggaaaagtataaa

SEQ ID NO: 241709 - DNA, 796 bp, Unknown
  Bacterial polypeptide expressing nucleotide sequence isolated from the Sargasso Sea
attattaacggaataaaagacgcagcactatatctttcaggattttattcaatctattcaaagagactagaaagtgagatacttgaaggcgatatgcctaatcatatagcaataattctagacgggaatagaagatgggctaaaagaaatttaacaattcaagaaaaaggtcatttcaagggtgcagatgcagtagaaaatctgttagactggtgtgaagaatttgatatcaagattattacattatacgtattatcagctgagaatttagataggaaaaatgatgaattagattatctttatgatttaatctacaaaagattagaaaaattatacaacgatcctagaatacacaaaaacaaaatgagggtaaaagcaattggaactatagaacttctaccagaatcaatcaaggaagttcttggaagattagataaagttactaaaaattatgacaaacattttctaaatattgcaattgcatatggaggacaaaatgaattagtagatgctgtaaaaaaaattggaatgaaaattaaaaatggtgaattagatgcaaaagaaatcaataaagaagtaatagaatctaatttgtatacatctcatttgccacaatcatccccagacatgattttacgaacatcaggtgaaaaacgtatgagtggatttctattatggcaaagcgcatatagtgaattagtatttttagatattttttggccagaatttagaaaaattgatttgatgagagcaattagaacattccaaaaaagaaagagaagaataggaaagtaaa

SEQ ID NO: 241710 - DNA, 515 bp, Unknown
  Bacterial polypeptide expressing nucleotide sequence isolated from the Sargasso Sea
catggccataataatggatggtaatggtcgttggggtctaaaacacaaaaactcaagaaatttgggccataaagagggactaaaaactgttgagatggtcatgagacattgtatcaaaaaacaagttaaatttttaaccttatatgcattttctacagaaaattggaaaagacctaaaaaggaaagaaattatctttttaatcttttagagatttacttgaaagaaaaactagaggaaataaacaacaaaaaaataaaaattaaaattctaggagaaaaaaatttttcaaaaaatctcaataagttgttagattttgctgaaaaaaaaacgatgaaaaacaaaaaacttcaaataaatttagctttaaattatggatctaaaaaagaaatagtatatgcttttcataagtttaagagaaaaagtaggatttcagaaaatgatattaataataacttatacacaaaaaacatcccagaatccagaaattcttatacgaacaggaaacacccaaaga

SEQ ID NO: 241711 - DNA, 559 bp, Unknown
  Bacterial polypeptide expressing nucleotide sequence isolated from the Sargasso Sea
atgaaccctttaaatcatgtggccataattatggatggcaatggtaggtggggtttgaaaaaatacaattcaagaaacaaaggtcacaaagctggtttagatgtaattgaaaaggtaattaaagtaagtattgatagcaaaataaagtatttgactctatttgctttttcaacagaaaattggaaaagaccaaaatcagaagtaaaatatctatttaatttgttagaaaattttttattggttaaactaaacgaacttcataaaaaaaatataaaattaaaaatcataggagaaaaaaaattttcaaaaaaaataaataatttattagttaagtgtgaaaaacttactaaaaataattctatattacaaattaatttagccttaaattatggatccaaacaagaaataatcaatgcagttaaaaatattaataataaaaaactcaaaataacagaaaaaaatttaacagaatctttgtatacaagaggtgtaccagatccagacatattaattagaaccggaaaaacaaaaagattaagtaattttttattgtggcaga

SEQ ID NO: 241712 - DNA, 661 bp, Unknown
  Bacterial polypeptide expressing nucleotide sequence isolated from the Sargasso Sea
catgtagccattatcatggatggtaatgggagatggggtttaaaacataaaaattctcgaaacgcaggtcatcaagctgggttaaaaactgttgaaaaaattataaaagaatcaattaagcataaagttaaatttttaactttatatgcattctcaactgaaaattggaggagacctaaaaatgagatagattttttatttagtttattagaaacatttttaataaatagaattgatgaattacataaacaagatattaaacttaagataattggagttaaaaatttttcagttaaattgaataaactacttaattctgcagaaaaaaaaacatcaagaaataaaaaacttcaattaaatcttgctttaaattatgggtctaaatttgaattgataaatgcatttaaaaaattgaaaaaaaataaaaaaacaatcaacgaaaaaaacttatctcaatatcttcaaacaaaaaatatacctgatccagaacttttaataagaactggtaatacaatgagattaagtaattttttattatggcaactcgcatattctgagattttttttgaaaagaaattatggcccgaatttaacgataaagattatgataaaataatcaaaaaatttaaaaatattaaaagaaattttgggaatatttaat

SEQ ID NO: 241713 - DNA, 322 bp, Unknown
  Bacterial polypeptide expressing nucleotide sequence isolated from the Sargasso Sea
ctgggtcgagaaaaagacgctcgggaacaggcggagctgagagcgcacggttccattcctaagcacattgccatcatcatggacggcaatggtcgctgggcggagcgacgcgatctgacgaggacagagggacaccgatccgcccgagatgtggtcaggggaacggtacgggcctgtggcgagttacaggtggacgtgctgacgctgttcacgttcggtacggaaaactggaatcggccttggggcgaggtgctttcgctgatgcagttgattcgggacagctcgatggaagagttgcctgaactccaagacaacaacgtcc

SEQ ID NO: 241714 - DNA, 766 bp, Unknown
  Bacterial polypeptide expressing nucleotide sequence isolated from the Sargasso Sea
ttatcagtaaaaatagataagcaaaaagttcccaaacatgtagcaattattatggacggcaatgggaggtgggcaactagaaaaggtttgcctagatcatttggacataaacagggtgttagtgtattgaagaaaattctcaaagctgcaaaaaatttaggttgtaaagtaattactgtttatgctttttcaactgagaattgggcaagaccaacaaaagaagttgattttcttataaatctctttagcgaagttttaaaaaacgaaattaaagagatacatgaagaatcaacaaaaataaaatttattggggatttaactcctttcccaaaaaatttaaaagaaataatatatagttcagaatgtctaacacaaaacaacaacaaatttttattcaatgtttgtgtcaattatggaggtaggcaagaaatagtaaaagttgcaaaagaattagcattaaaatcttcttctggagaaataaaaccaagtgaaattaatgaagaattatttaattcagagctattaactagagggattaaggatccagaattactaataagaactagtggcgaaaaaaggataagtaattttctattatggcaattagcatattcagaaatttatatatctgaagtactttggccggacttcaatgagtatgaatttcttaaggcaataatcgattaccaatcaaggaatagacgtttcggcggtatagaatcattaccaaatgaatcttttaaagattctcaattttcttcctaac

SEQ ID NO: 241715 - DNA, 481 bp, Unknown
  Bacterial polypeptide expressing nucleotide sequence isolated from the Sargasso Sea
aatgagttatttagaacaaattaacgaaaataaattacccaaccatttagcaattataatggatggcaatggtcgttgggcaaaacaaaaaggttttttaagagcatttggtcatgaaaacggtactaaatcagtacgtgtaactgttgaaacttgtgcaaaattaggaattaaaaacctaacactatatgctttttcaaccgaaaactggaacagacctaagctagaagtagacactttaatgaagttgttaatttcttctcttaaacaagaagaagctactttaatgaaaaacaatataaaactaaatgcaataggaaatttaacaactttacctaaaaatgtctataaagaattgcatgaagttattgaaaaaacaaaaaacaacaatagaatgacattgactttagcattaagctatggttcaagagaagaactcattcaagttgttaaaaatattagcaataaagtaaaaataata

SEQ ID NO: 241716 - DNA, 616 bp, Unknown
  Bacterial polypeptide expressing nucleotide sequence isolated from the Sargasso Sea
ttggataatgattccagtgaaattttaaaagaaaaaattcaagaaatttttaagtctagtaaactctctgtgccaaatcatgtaggttttattatggacggcaacagaagatgggccgctgaaaataaaaaaccagtcttttatggacataaagaaggaacaaagaaccttgagtcattagttgatttttcaataaaaattggaattaaatttcttactatttacactttttcaactgaaaattgggaaagaccaaaattagaagtaaattatattaccaaaacattgctatctgaatcattaaatgagaattttgataatttgaatgaactgggtgtgaaaatattaattaaaggaagtatagataagttagacaatccgttaaaaaataaaataattaatgcacagaaaaaaactcaacaaaataaatcaatttctctcgtaatcgcatttgattacggaggaagaaatgaaattgtaaatgctgttaagaaaattttagatgataatatcgattcaaaaaatgttactgaagaactatttgataaatatattaataaaaatgaagtgcctgatccagatttaattataaggactggaggagagtatagattaa

SEQ ID NO: 241717 - DNA, 544 bp, Unknown
  Bacterial polypeptide expressing nucleotide sequence isolated from the Sargasso Sea
atgaacgccacaaagattcaaacactaccttcccatgttgcgatcattatggatggcaataacagatgggcgaaagcaaaaaatttaccgggtgtttctggtcatcaacaaggggtggaaagggcgcgggaagcagttgaatatgcagttgaaaaaaaactagatactttaactttgtttgcttttagcagtgagaattgggggaggtctaatgaagaagtcagtcttctaatgaagttattagctcaagccctagaagaacaggtacctaatttaataaaaaataaagtacagctctcattcatcggtgacttaactaaatttgatgctgaccttcaagacagaatgaagaaagcagaaaaattaacagagtgcgacaaagaaaagaatctagatttaataattgctgcaagttatggaggtaggtgggatattgtgcaagcattagaaaaaataaatgcttcacagggggaaatagaaataaacgaagagttaattagctccaacacgtctttgggtcctttctctgatccagatctttgta

SEQ ID NO: 241718 - DNA, 522 bp, Unknown
  Bacterial polypeptide expressing nucleotide sequence isolated from the Sargasso Sea
tatgaatccaattaaacatgtggccatcattatggatggaaatggccgttggggattaaagaaaagaaaatcaagaaattatgggcataaaaaaggacttgataccgtagaaaagataataaaagcttcaattaaaaataagattaaatacttaactttatatgcattttcaactgaaaattggaaaagacccaaaaaagaaattcattttttgtttaatttactagaaaattatttagaaaataaaattacacaactaaataaacaaaatataaaacttaaaataatcggtaataaaaaattttcaaaaaagttgaataatctattaatctcttcagaaaaaaaaacctctaaaaataataaattgcaaattaatcttgccttaaattatggttcaaaaaatgaattagtggatacatttaaaatgataaaaaaaaataacattaaaataaatgagaaaaacatatcaaaacatttgtttacaaaaaatataccagatccagactttttaataagaacagg

SEQ ID NO: 241719 - DNA, 259 bp, Unknown
  Bacterial polypeptide expressing nucleotide sequence isolated from the Sargasso Sea
tttaaagaattaaaaaaaaataaagaggatattaatgaaaaaaatttaaataaatacttacaaacatataatactccagacccagacttattaattagaacaggagacacaaagaggttaagtaatttcttactatggcaactagcatattcagagatattttttgaaaaaaaattatggcctgattttaatgaaaaagattataataaaataataaagaagtataagaatatcaaaagaaattttggaaatatctaat

SEQ ID NO: 241720 - DNA, 571 bp, Unknown
  Bacterial polypeptide expressing nucleotide sequence isolated from the Sargasso Sea
agaaaagatagttcaagcatctattaaattaaaaataccaataataacattttatacattttcaagtgagaactggaaaagacccaaaaaagaaataggttttctttttaacttaatcaaatattattttacaaaagaaattaataacttagttaaaaatagtattaaaataaatattataggcaatattaaacctttacccaaaaatgttaagatttgtctaattaattctatgaagaaaacaaaaaaatgtaacaaaattctcgttaatttagcaattaattatggatcacaaaatgaaattattgaaacaactaaaaaaatttataaaaagaaaataccaataaatatgaagaattttgaaaaaaatttgtatactaaaaatatagttaatcctgatatacttattcgtactggtggaaagaaaagactaagtaattttttactttggcaaatggcttacacagaattatattttgtgaacaaactttggcctgacttcaaaataaatgattacactaaaataattaataattttaaaaaagttaaaagaaactatggaaatatatga

SEQ ID NO: 241721 - DNA, 304 bp, Unknown
  Bacterial polypeptide expressing nucleotide sequence isolated from the Sargasso Sea
atgaaccctttaaaacatgtagccattatcatggatggtaatggaaggtggggtttaaagaataagaattcaagaaatgctggtcatagagctgggctgaatactgtagaaaagattattaaagaaacaatcagaaataaaattaaatttcttacattatatgctttttcaactgaaaattggaaaaggccaaaaaaagagataaattttctatttaatcttttagaaagttttctaaaagaaaaaattgaagatcttaataaaaaaaaaattaagctaaaaatcattggtaaaaaaaattttc

SEQ ID NO: 241722 - DNA, 752 bp, Unknown
  Bacterial polypeptide expressing nucleotide sequence isolated from the Sargasso Sea
acaaaataatcatccagagacaatccctaatcagccaaaacatgttggcatcattatggatggcaatggaagatgggcaagaattaggggtaaaagaaggatatttggccatgaagctggcgttcttaaggcaagagagttggttgaaaccgctgtaaaaattaagcttgaggcattgacactctatgcgttcagttccgagaattggtctcgaccaaagaaagaagtcagcggattaatgagcctttttgaaaagactattgaaaaatataccagtttattgattgataataatgtgcgattcaaaactgctggtgatccatcaatgttgcctgatgtcttgaaacggaaattacagcagatggagtccatcacatcagagaatagtgggttaaaattgactctagcaattgcttatggcggtcaacaagaaatcataaatgggatcaaaaaattaattgatgatcatgataaccagatcattgatgttaatgatctgactgttgaatcatttaatgaatatctgtcattcaatgatcttccagagctagatttgataatcagaacctctggtgagactagactgagtaactttatgctatggcaatcagcgtactctgaaattcattttacagagacattatggccaaactttgaggagcaagagtttttagaaattcttcaaacatactctctgtcagagcgaagatttggcaatgtcgatgaagatactgagctaaaggaagcttaaa

SEQ ID NO: 241723 - DNA, 616 bp, Unknown
  Bacterial polypeptide expressing nucleotide sequence isolated from the Sargasso Sea
atgaacaaactcaaccatgttgcctttataatggatggcaatgggaggtggggaaaaaaaaaaaataaaggtagaaattttggtcactttaaaggtgttgaagttgtaaaaaaaattgtaaaaagttctataaaaattaaaattccaatagttagtttttttgttttttcaactgaaaattggaagagaccaaaaaaagaaattttttatctatttaaacttatcaaaagttattttgataaagaaatttcaatgatagttaaagaggggattaaaataaatattttaggggatcaaagaaaattgccttcaaatattaaatcaacattaaaaaaaacgatcaaacttacaaaaaaaaataaaaaaataatagttaatctagcaataaattacggctcaaaaaatgaaattttaaattcttttaaacaggtaaaaaaaaaaattaatactaaaaattttaaaaaatatctttatactaaaaatatgcctgacccagatattttgataagaactggtggccacaaaagattaagtaactttatgctttggcaattagcttatacagaactatattttttaaaaaagttatggccagatttgaaacaaaagatttaaa

SEQ ID NO: 241724 - DNA, 784 bp, Unknown
  Bacterial polypeptide expressing nucleotide sequence isolated from the Sargasso Sea
cttgagccgaccaccggtcaccagccacgacaccactccatccagcctctgccctgccgagctggatagccagcagctgcccgcccacgtggccgtgatcatggatggcaacggtcgctgggctgaatcgaggggactaccccgggcaatggggcatcgcgccggggtggaagcgctcaagtcaacccttcgtctttgcagcgactggggcatcgctgccctcaccgcttacgccttctcaaccgagaactggtctcggccaggtgatgaggtgaatttcctcatgaccctgttcgaacgggtgctgcagaaggagctgcgcacccttgaagacgaacaggtccgcatccgttttctcggcgacctggacgccctaccgctgaaactgcaggagctgattggtgatgccacggagcggaccgctgccaacggcggcatccatttcaacgtctgcaccaattacggcggtcggcgggagctggtgcgagcggcgcagcgtctggcgcgtcaggccgccaacggcgatcttgtgcccgaagacattgatgagaacagcctggcggcggaattgttcaccgccgaagagcaggatcctgatctgttgattcgcaccagcggcgaacaccgcatcagcaactttctgctctggcaactggcctatgccgagatccacgtcaccgatgtgttctggcctgacttcaatgccaaggccctgaagcgggcgttgctggatttccaaagccgctcccgccgcttcggaggccttgatccactcacaccatga

SEQ ID NO: 241725 - DNA, 226 bp, Unknown
  Bacterial polypeptide expressing nucleotide sequence isolated from the Sargasso Sea
aagtgaaaaaaatataaacaaaaatttacagactcaaaatattccagatcctgatttattaatccgaactggtaatacaaaaagattaagtaattttttattatggcaactagcttactcagaaattttttttgaaaaaaaattatggccagatttcaacgaaaatgattacaacaaaataattaacgaatataaaagtataaaaagaaacttcggaaatatttaa

SEQ ID NO: 241726 - DNA, 348 bp, Unknown
  Bacterial polypeptide expressing nucleotide sequence isolated from the Sargasso Sea
aatgagttttttagaaaaaattgacccaaaatctttgcctcagcatgttggtataattatggatggaaacggtcgctgggcagcagaacgtcatatgccgaggatacatggtcaccgcagtgccgttaatgctgtgcgtgcgagtgtcgaagctgcagcagagatgggattaaatgtccttactttgtttgcattctcaacagaaaactggcaaaggcccaaaaaagaagtttctgccttgatggagcttttttatgaatttttggaaaaagagcttcacacaatgcttgaaaataatgtgcgttttcagctaattggtgacaggtataaattgcctgattttcttca

SEQ ID NO: 241727 - DNA, 649 bp, Unknown
  Bacterial polypeptide expressing nucleotide sequence isolated from the Sargasso Sea
catggacggtaatggaagatggggtaaaaaaaggggaaaatcaagaaactttggacatttaaacggtataaaagtaatagaaaaattagttcaagattctattaaaataaagattccaattttaacattttatactttttcaagtgaaaattggaaaagaccaaaaaaagaaataacatttttgtttaagttgatagatcattattttattaaagagataaataatctagttaaaaacagcgttaaaattaatataattggaaaaataaatggtcttcccaatcgagtaaagacacgcttattggattctatgagaagaacaaaaaaatgtaagaagattttagttaacttagcaattaattatggttcaaaaaacgaaattattagtgcgataaaaggattaagaagaaaaaatcagagtatatctgctataaatttaaagaaaaatctttatacttggaatattccagatccagacattttaataagaacaggcggtaaaaaaaggttaagcaattttcttttatggcaattagcttactctgagctatactttataaataagctttggccagattttacaaccaaagattatcataaagttataaaacactttaaaagagtaaaaaggaattttgggaatatatga

SEQ ID NO: 241728 - DNA, 808 bp, Unknown
  Bacterial polypeptide expressing nucleotide sequence isolated from the Sargasso Sea
tgctaacgttgacgcaattcatcctggaattggaatgttatctgaaaatttcagttttgcaaaaattgtaaatgatcatggattcaagtttattggtccaaaatatgatcacattgaaaaaatgtctgacaaagtaaaagcaaaaaattttgctaaagaattagggcttccaattattccaggaagtaaaaaaaatattaaaaatttctcagaagcaaagactatttcgaaagaaattggatatccagttttagtgaaagcaaccaatggggggggaggaagaggaatcaagaaagtttctaatgaaagtgaactaaaagataattttttattggcaaaaaaagaaacaattcaaagttttggtaatgataatgtatacatcgaaaagtttattgaaaatccaagacacatagaagtacaaatcattggagataataatggaaatttaattcatgtaggagagagagaagacatcctgcaggcgacgaagaagctcgtcgagcaggccgtgcgcgagggtcgcgaggtcgaagtgaccgaggacgcgttcgcgccgcacctggcgatggcctatgcgccggagcccgatctcttcatccgtaccggtggcgagcagcgcgtcagcaacttcctgctgtggcagctcgcgtacgccgaattctatttcaccgacaaatactggccggatttcgacggcgcggcactggccgacgccatggcgtcgtatacggagcgcgaacgccgtttcggccgcacgagcgcacagctcgaaccgcaatcgcagaacgccgactccctttcatgctga

SEQ ID NO: 241729 - DNA, 679 bp, Unknown
  Bacterial polypeptide expressing nucleotide sequence isolated from the Sargasso Sea
atgaacaaaattaaccatattgccattattatggatggtaatggtcgatggggaaaaaaaaggggtaaatcaagaaagtttggtcattcaaatggggttagggtaattgaaaaagtagttaagtcttccatcaaatcaaagatttcaatactaacattttatactttttccactgaaaactggaaaagaccaaaaactgaaataaacttcttatttaaattaattgagaactattttgttaaggaaattaacaatctggtaaaaaacaacattagaattaatgtaattggtaatacaaaaaaacttccagaaaaaataaaacaaagattaaaagaatcggttaatcgaacaaaaaaatgcaaaaaaattttggttaatttagctttaaattatggatcaaaagatgagataataaactcgattaggttaatgaaaaaaaagagacaaaacatatctgttaaaaattttgaaaagaatctatatacaaacaggattccgaacccggatcttttgataagaactggaggaaagaagagactaagcaactttttattatggcaattagcttattccgagctatattttatggataaattatggccagattttacaacagcagatttttataaaataataaaaaattttaaaaaagttaaaaggaattttggaaaaatatgaa

SEQ ID NO: 241730 - DNA, 421 bp, Unknown
  Bacterial polypeptide expressing nucleotide sequence isolated from the Sargasso Sea
tatgagttcacccaaacatgtagccataataatggatggtaatggtagatggggattaaaaaataaaaattcgagaaatttaggtcacaaagctggaataaacactgttgaaaaaattataaaatcttcgataaaaaataacattaagtatttaactttatatgcattttcaacagaaaattggaaacgacctatttttgaaataaattttttaataaatttattagaatcttatttaaaagaaaaaattgacgaattatattcaaatggaataaaattaaaaataattggcgatataagtaaatttccaaaaaaaatacaaaatagtttaaaatttgcacaaaacaaaacaaaaaaaaataaaaatttaaatttagttcttgcacttaattatggttttaaaagtgaacttatattaatg

SEQ ID NO: 241731 - DNA, 370 bp, Unknown
  Bacterial polypeptide expressing nucleotide sequence isolated from the Sargasso Sea
taataataaaggtctgaaattaaatattgcccttaactatggtgggaaaattgatatattaactgctgttagaagtatggttgatgatgttcaaaaaggtgttttagaaagtactaatataaatgaatcaactttagaaaattatcttttatcaaatagtgttagtgaaatagatcttcttataagaacaagtggtgaaagtagaatttcaaattttttactctggcaaatatgttactcagaaatttattttactgaaactttatggccggattttaacgaaaagcactttgatcttgctatacaaacatttagatgtcgcaatagaagatttggcaacaactcttccaaattaaagatggaaggatga

SEQ ID NO: 241732 - DNA, 363 bp, Unknown
  Bacterial polypeptide expressing nucleotide sequence isolated from the Sargasso Sea
taaaagaaaaactaaatgagtctatgaaaaggacacaaaaatgtaaaaaaattttagttaatttagctatcaattatggttcaaaagatgaaattttaaattcaataaaaaaattaattaaaacaaagcaaaaaatatctaaaaaaaatttaaatagaaatttgtatacaaaaaatttagttgatccggatattttaattagaactggtggaaaaaagagattaagtaattttcttctatggcaattggcctattctgagttatattttgagaaaaaactttggccagattatactgtttctgattataaaaaagttatagataattttaaaagagtcaaaagaaattttgggaatatatgaa

SEQ ID NO: 241733 - DNA, 709 bp, Unknown
  Bacterial polypeptide expressing nucleotide sequence isolated from the Sargasso Sea
atgacgagcaattcatccaataagattggtcatgtggccataataatggatggaaactcaagatgggcaaggcaaaggaatctaaagacaattgaaggccataggcagggcgtaaatagattaagagatattgttgagtattctgcaaaatctgaaataacccatttatctgtatttgcttttagctcagaaaattggaaaagatctgcttctgacgtttcagatttaatgaaactctttcttcaatcaataattaaagaagttccagaattaattgaaaataaggttcagctaaattttattggtgacatccctcgattctctaagtctcttgtatcccaaattaattctgccatgaaggatactcaagccaagaaaccaaatcttaatctcaatgttgccataagttacggtggtagatgggatattctgaatgctataaagagaatgaaagatcataaaataaatatagacaaattaaatgaagatgacttctctaaccttctatcgacttctaattttccggatccagatttgttgataagaacaggagacgaaattcgtataagtaacttttttctttggcagatatcatactcggagttgtatttctcagaaattacctatggcactgattttaaattatctaattttaaatttgcattaaataaattctctgcaagagatagaagatttggaaaggaataat

SEQ ID NO: 241734 - DNA, 679 bp, Unknown
  Bacterial polypeptide expressing nucleotide sequence isolated from the Sargasso Sea
atgaatccaattcaacatgttgcaatcataatggatggcaatggaagatggggcaaaaaacataaaaattcacgaaatgcaggacataaagctggtttaaatacagtagaaaatataattaattcctcaattaaaaataaaataaaatatttaactttatatgctttctcaacagaaaattggaaaagacctcaaagtgaaattaaatttttatttaaattactaaataattttatagatcaaaaaatagatgaatttaataaaaatgatattaaattaaaaattttaggaaatattaatatatttaatttaaagcttaaaaaaaaactcattaaatcggaagaaataacaaaaaataatatgaggttgcaggtcaatctagcattaaattatggttctaaatctgaacttatttatgcatttaataaattaaaaaaaaagaaacttagtataactgaaaaaaatttagaaaaatatttatatactgataaaattcctgatcctgacattttaataagaacaggcaatactaaaaggctcagtaattttttactatggcaacttgcatatactgaaattttttttgaaaaaaaattgtggcctgattttaatagaaaagattatagtaaaattttaaaaaaatttaaagttactaaaagaaattatggaaatatataat

SEQ ID NO: 241735 - DNA, 194 bp, Unknown
  Bacterial polypeptide expressing nucleotide sequence isolated from the Sargasso Sea
tgatttaattattagaaccgggggagaaaatagattaagtaattttttgttatggcaatctgcatattcagaaatttatataagtgaaaaaaattggcctgaatttggagaagatgatttaacttctgcattaaatgattttagcagtagaacaagaaaatatggtaaagttttagggcaagatgaaaattaaa

SEQ ID NO: 241736 - DNA, 679 bp, Unknown
  Bacterial polypeptide expressing nucleotide sequence isolated from the Sargasso Sea
atgagcgaaattagtcacgttgccataataatggatggtaatggtagatggggtttaaaaaagtataaatcgagaaaatttggtcatcaaaaaggtatcgaaactgttgaaaatataatcgaagcatctattaaaactaaaataaaatatttaacactatacactttttctactgaaaattggaaaaggcctaaatatgaagtaaattttttatttaagttattatcagagtatctaaaaaaaaatttagatatattgcttaaaaataatcttaaactcaaaattttaggagatataaataaatttccaagacagcttaaaaattcgctcaataaagcaatgaaactaacttcaaaaaataaaaaactacaaattaatttagcactaaattacggatcaaaggatgaaattgttaattcatttaaaataatacaaaagaaaaaaatagctataaacataaataatatcgaaaaaaatctttatactcaaaacattccagatccagatattctaattagaaccggaaatacaaatagacttagtaattttttactttggcaactttcttattctgaaattttttttgttaaaaagctatggccagattttaataaaaaagactattatagaattttgaaaaattataaaacaataaaaagaaaatttggaaatatttaaa

SEQ ID NO: 241737 - DNA, 274 bp, Unknown
  Bacterial polypeptide expressing nucleotide sequence isolated from the Sargasso Sea
aataaaaacaatttggatacaaattcaattgatgagaatattttttcctcatatttagatacaaataattgcccagatcctgatcttttaattcgtaccagtggagagctgcggattagtaattttttattatggcaatcagcatatactgaaatgtatctaacagatacttattggccgtcatttcgtaaaaatgaactttttcaagcaatctttgaatttcaaaatagagaacgaaggtttggaaaaatcagtgagcaagtagagaattaaa

SEQ ID NO: 241738 - DNA, 613 bp, Unknown
  Bacterial polypeptide expressing nucleotide sequence isolated from the Sargasso Sea
aaaagaattgggttgtaagatacttactgtttttgcattttcaactgagaattggtcaaggccaagaaaagaggttgatttcctaataaatcttttcagcgaagttttggaaaaagaaattgaagaaatccataaagattcaattaagataaaatttatcggagacctaacccctttttcagaggcttttaaagaaagaatctatagttctgaatctcttactaaaaataataattttctattaaatatttgtttaaattatggaggtaggcaagaaattgtaaatgttgccaaagaaatagcattaaaaacttcttctggggaaattaagccaagtgaagttaatgaagaattatttaattcagagatattaacacgtggaattaaggatccagaattactgataagaactagtggagaaaaaaggatcagtaattttcttttatggcaattagcttattcagaaatttacatatctgaggtactttggccagatttcaatgagtctgaatttctaaaagcaataattgattaccaatcaagaaatagacgttttggcggtatagaatcattaccaaatgagtcttttgaagattctcaatattcttcctaa

SEQ ID NO: 241739 - DNA, 490 bp, Unknown
  Bacterial polypeptide expressing nucleotide sequence isolated from the Sargasso Sea
tatgaacccattaaaacatgtagccattatcatggatggtaatgggaggtggggaattaaaaataaaaattcaagaaacgctggacataaagccggtttaataactgttgaaaatataattaaggcatcattaaaaaaaagaattaaatttttaacattgtatgttttttctacagaaaattggaatagaccaaaaaaagaagtcaattatcttttcaatttattagaaaattttttaaagaaagaattagactctctcaataaaaataatattaaattaaaaatattaggaaaaaaaaaattttcgaaaaaattaaataacttgctctctttatgtgaaaaaaaaacaaaaaataatgaagatttacaagttaatttagcattaaattatggttctaaaactgaaataattaatgcttttaaaataattgataaaaaaaatttaaaaattaatgaaaaaaatatttctaaaaatttgtatactaataaa

SEQ ID NO: 241740 - DNA, 239 bp, Unknown
  Bacterial polypeptide expressing nucleotide sequence isolated from the Sargasso Sea
aaaatctgatataaatgaaaaaaatataagcaaaaatttacaaactagaaatattccagatccagatttattaatcaggactggtgatacaaaaagattaagtaattttttattatggcaactcgcttatgcagaaattttttttgagaagaaattatggcctgcttttaatgaaaaagattatagtaaaataattaaagattataaaaatatcaaacgaaattttggtaaaatatgat

SEQ ID NO: 241741 - DNA, 356 bp, Unknown
  Bacterial polypeptide expressing nucleotide sequence isolated from the Sargasso Sea
tctcctgagaatttctgagaaaaaaacatccaaaaataaaaaactacaaataaatttagctttaaactatgggtctaaagcagaattaattaatgcatttaaagaattaaaaaaacgcaatgaagctattaatgaaaaaaatttaaaaaaatacctacaatcaaataatacaccagatccagacttattgattagaacaggagacacaaagagattaagtaatttcctattatggcaactagcttattcagagatattttttgaaaaaaaattatggcctgattttaatgaaaaagactataataaaataattaggaaatataagaacatcaaaagaaattttggaaatatttaat

SEQ ID NO: 241742 - DNA, 490 bp, Unknown
  Bacterial polypeptide expressing nucleotide sequence isolated from the Sargasso Sea
ggtacaataaataaagagatagacaacttagataaaaataatgtaaaactatcaacaatcgggaacttaaatgatttaccaaaagagccgcttcaagggatggctaatggagttaaaaaaacaaaaaataatacaggtcttaatcttatattagctttgagttatggtagtagacaggaactaataatggcatttaagcgtattgtaaataaaattgaaataggtgaaatgaaattagaagatatttcacaagaaaatatatcaaaggaactttatactagtaatattcctgatccagatttattaattcggacaggaggcgaaaatcgtattagcaactttttattgtggcaatcagcatatacagagctatacatgacagataaattttggcctgactttcgagaggctgaattattacattcaattcttgattatcaaactagacaaagacgttatggccaaacaagtgagcaggtttcagaatgag

SEQ ID NO: 241743 - DNA, 487 bp, Unknown
  Bacterial polypeptide expressing nucleotide sequence isolated from the Sargasso Sea
tatgatttccaataaattaaaacccaatcatattgctattatcatggatggaaatggaagatgggctattgatcagggtttagatagatcagctggtcacctaaaagggtatgaaaatataaaaccaacagttatagctgctaagaaacttggaattaaacatcttaccatatttgcattttcaacagaaaactggacaagatcatcagaagaaattaaatttatattaaatcttgctacagacgtaatcgattctgaaaccgatgaattgaacaaaaatggtgtaaaaatcaggcatattggaagtaaaaaaaatctcccaaaaaatattttgaaaaaaatagatagatctgaagaaattacaaaaaataatgatgatttctttctaactgtagcttttaattatggatctaggaatgaaattgttcaaagtgtccgtaaattaaaagtatctgaccttaaaaaccttacagaaaattctttttca

SEQ ID NO: 241744 - DNA, 217 bp, Unknown
  Bacterial polypeptide expressing nucleotide sequence isolated from the Sargasso Sea
gccaacctgccgctgccagatttgtgcattcgcactggcggcgagaaacgcatcagcaacttcctgttatggcagctggcctatgccgagctgtatttctccgacctttactggcccgacttcaagcaggctgccctgcgtgaggcgatggccgactttgccggtcgtcaacgccgctttggcaaaaccagcgaacagattgcaacgggggcctgat

SEQ ID NO: 241745 - DNA, 592 bp, Unknown
  Bacterial polypeptide expressing nucleotide sequence isolated from the Sargasso Sea
gtgtatagcttggtgtgatgatgtaggaattgactacataactagctggcttttttctagagaaaatttagcgaggcctaaagaagagctagaaccatattttgaaatactaaatgagctattcgaagaactgctaatcgatgatgttgtagacaactttaaaattgaatttattggaagcacagatcttcttccagattttttacaaacaaccattaatcaacttgaagaggtcagaggaggtggtcagaaaactttgacaattgcacttggatacggtggtagacaggaaattttagacgctattaaaggattaatctacgaaaacaggaatcaagaaaacgattttgacagattgatcgaaaacgttactgatgaacagctaagacaacacctttattctccagaaacccctgacatagatctgataataagaacaagtggagaatcaaggctatctggttttttgctttggcaaagcgcttattcagaagtcatttttcaagatgtatattggccagaattcaggaagattgatttcttgagatgcttaagagagtatgcacaaagagaaagaagatttggacagtaa

SEQ ID NO: 241746 - DNA, 666 bp, Unknown
  Bacterial polypeptide expressing nucleotide sequence isolated from the Sargasso Sea
aatgcacgttgggttgataatggatgggaacggccgttgggctactcggaagggatttaaccgaatagaaggtcacaagagtggtgcaaaagttgtcgaggaaatcataagatcttgctctcaagctggtgtaaaaacattaaccctgtatgcattttcgacagaaaattggtcaagggccaaagatgaaattaagggcttaatggatctttttaattactatatttcaagacatcttacagaaatgatatctaatggaataaggataaaatttttgggcagtaaggatggattgccagataaaatagttgatttaatcaataatgctacggaaaaatctgcgtacaataacaaatttttccttaatattgcaataaattatggtggtcgagatgagattgtccgagccgtaagaaagatagcaaaaaacgtaaaaaatggtttaattgatgttgatgatatagatgaaaaaaccataacatccatgttagatacatcgtctcaaaaggatccagatttaattatcagaactgctggagagcagcgactttcgaattttctttcatggcaaagtgcatactccgagttttatttttcaggattagagtggccagaatttaataagacagaattttttaaggctttggagagctataaaagtagagt

SEQ ID NO: 241747 - DNA, 537 bp, Unknown
  Bacterial polypeptide expressing nucleotide sequence isolated from the Sargasso Sea
cggtttatgcatttagtacggaaaattggaaaagaccaaagtctgaagtcaaagccataaataatcttattgttaatagtattaataatgagctggatgagttaattgagcaaaaggtaaaagtcagattttttggtgattattctaattttggcaaaaaaacttatgaaaagatcaaatttgctgaagagaaatctttcagcaataaacctcaactaagactgaatgtagcacttggttatggtggtaaaatggatattattaatattgctagagaggtatctagattgaaaattaaagcatctgatatcgatgaccaaacaattaatgaattatcgcaagttcctgaatctaacattgatttactaattagaactggaggagatacaaggataagcaattttcttttatatcaaatagcttattctgagattcattttgtaaaaaaactttggccagattattcaaaacaggattttaaaagaaacataaacaaatattttaattcggagcgaagattcggtgagcgaacttaaa

SEQ ID NO: 241748 - DNA, 557 bp, Unknown
  Bacterial polypeptide expressing nucleotide sequence isolated from the Sargasso Sea
atatcttacaatcttcgctttctcgactgaaaactggaaacggacgcaattagaagtttcgggactaatgaaattatttaaaagatacatttataaagaaacccaaccgcttgttgaggctggggttcgcgttcggtttataggtgatcgcgtgcgcttagagccttctttagttaatttaatggatcaattggaacaacttactgaaaataattcagccgttaatctcacaatagcaataaattatggagctcgagatgaagttactcgagcagcaaaaaggatggcaaaagacgtactgagcggtgaactcaatgtggatagtataaacgaagaaacattacctaaatacttagacacccatgttctgccagatccaggtttagttattaggacttcaggtgaagcgcgtatttccaatttcttactgtggcagtcggcttatgcggaatatgaattcatagacactctgtggccagactttacgaaagagattttttccagtttagtgagtgaatttggtaatcgtgagcgtcgttttggtggcgtattataat

SEQ ID NO: 241749 - DNA, 259 bp, Unknown
  Bacterial polypeptide expressing nucleotide sequence isolated from the Sargasso Sea
atgcaaaaaaaactaaatgcagcaacaatgccaaagcatattgccattattatggatggaaatggtcgttgggctaaaaaacaaaaaaaaccacgttcatttgggcataaagctggcgtttctacgctgagagaaaccattaaacattgtctagaattcaaaataaaacacctttctgtatatgcattttccacagaaaactggaaacgccctgaaaaagaagtcaccttcctattaaagcttctagcaacaatgatca

SEQ ID NO: 241750 - DNA, 676 bp, Unknown
  Bacterial polypeptide expressing nucleotide sequence isolated from the Sargasso Sea
gaagctgcggcagagctgggattaaatgtgctgactttgtttgcattctcaacagaaaactggcataggccagaaaaagaggtctctgctttgatggaacttttttatgaattcctggaaaaagaacttaatacaatgcttaaaaataatgtacgttttcggctgattggtgataggaaaaaattacctagttttcttcaggaccgattgagcaacgcactaaattccacgtcaaataattcagggttgctgttaaatatagcacttaattacggtggcagggatgaaatatcgcgtgcggtgcgtaaactctctgaattagtaaaaaaaggagaattgcaaccagaaaatatcgatgaagcattaatttcagcaaatacttacactgcagatttaccggatcccgatctgataatccgcaccagtggggaactgcgactttccaattttttgatttggcaggcagcatacgcagagttttattttactgaagttctttggccagactttaacaaagaagatttacataaagcacttctggattaccagaacaggaaacgccgcatgggccgaacaaactcttctgcattaattcccaaaccaaaaaaatactcttctcgaatggtttcagataaatcaaaaaaagcaaacttactgaagcttcaacttgaataat

SEQ ID NO: 241751 - DNA, 186 bp, Unknown
  Bacterial polypeptide expressing nucleotide sequence isolated from the Sargasso Sea
aatgaatcctctcaatcatgtagctatcataatggatggcaatggtagatggggattaaaacataaaaattcaagaaatgctggtcatagagctggattaaatacagtagaaaaaataattaaagagtcaattaaacagaaaataaagcatttaaccttatacgcattttctactgaaaattggaa

SEQ ID NO: 241752 - DNA, 637 bp, Unknown
  Bacterial polypeptide expressing nucleotide sequence isolated from the Sargasso Sea
aatgaatcctctcaatcatgtagccataataatggatggcaatgggagatggggtttgaaaaacaaaaagtcaagaaatgaaggtcatagagctggtttaaatacaattgaaaatattttaaaagagacaataaaacaaaaaattaagtttattactctatttactttttctaccgaaaactggaatagaccaaaaaaagaaataaagtatttatttaatttattagaaaatttcctacataataaaattgaaaatcttaataaaaaaaatattaaacttaaaattattggatataaaaatttttctccagagttaaataaacttttaagaaagtcggaaaatttaacagcacaaaacaccaaacttcagattaatttagctttaaattatggttcaaaaatggaattaattgaaacgtttaaaaaattaaaaaaacttaaaaaaaaattcactgaaaaaaatgtgtcaaagaatttattcaccaatgaaataccagatccagatttattaattagaactggtaatacaaaaagactaagtaattttctattatggcagttagcatatactgaaattcactttgaaaaaaaattatggccggacttcaatgtcattgactataaaaaaaattattaa

SEQ ID NO: 241753 - DNA, 698 bp, Unknown
  Bacterial polypeptide expressing nucleotide sequence isolated from the Sargasso Sea
aaaaagaaaaagaagttttacaattatgaacaaactcaaccacgttgcattcataatggatgggaacggacgctggggtaagaaaaaaaataagaacagaaattctggtcattatgcaggagttaaaactgttaaaaaagtagttgagacatcaataaaacttaaaattccaatagttactttttatgttttttccaccgaaaattggaaaaggcctaaaacagaaataaattttttgtttaatttagttaattcatattttaaatcagaattaataaatgtaattaaaaatggcattaaaataaacataatgggagaattaggccgacttcctaaaaaattaaaacatgtattaaaagaaacggtaaaaaaaacaaaaaaaaataaaaaaattttagttaatcttgccttaaattatggttcaaaaagagaattaattaatgcctttaaaaaaattaaattaagaaaaattacagaaaataacgtcaaaaataatttatataccaaaaaaattccagatccggatattttgataagaacagggggcaaaaaaagattaagtaattttatgttatggcaattagcgtactcagagctttattttttagataagttatggcctgattttaaggctaaagatttacagaaaatcttaaaacattactataagataaaaagaaattttggaggtatataat

SEQ ID NO: 241754 - DNA, 364 bp, Unknown
  Bacterial polypeptide expressing nucleotide sequence isolated from the Sargasso Sea
atgaacccaatccaacatgttgcgatcataatggacggaaatggtcgctggggtttgaaacataaaaaatctagaaatttaggtcataaagcaggattaaatacagtagaaaaaattattaaagaaacaattaaaaataaaattaaatatttaacattgtttgctttttctacagaaaactggaaaagaccaaaaaaagaaattacttatttatttaatcttttagaggaatttcttactaaaaagattgaaaatctaaataaaaataaaataagattcaaattaattggtaataaaaagaaatttagtcgtagattaaaaaatatacttcaaaaatcagaacaaattacaaaaaaaaataaaa

SEQ ID NO: 241755 - DNA, 676 bp, Unknown
  Bacterial polypeptide expressing nucleotide sequence isolated from the Sargasso Sea
atgaatcatattaaacatgtcgctatcattatggatggtaacggtcgttggggtatcaagcataaaaattctagaaatctaggtcataaagaaggtcttaaaactgttgagagaattattaaatctacagttaaaaatagaattaaatatttaactttatatgcattttcaactgaaaattggaaaagaccaaagaaagaaattaattttttatttagtctactagaaagttttctcaaaagtaaaatttcagatcttaataagcagaaaattaaattgaaagtcattggtaataagaagttttctaaaaaaataaataatcttttaaaaaaatcagaaaaattaacattaaaaaataaaagattgcaaataaatttagctttaaattatggatcaaaaaatgaaataataaatgccataaatgaaattaaaaaaaacaaattaaaagttactgagacaaacctttcaaagaatttatttacaaaaaaaatacctgatccagatattttaataagaacaggaaatacaaaaagattaagtaattttttattatggcaactagcttattcagagatttattttgaaaaaaagttgtggccagattttaatgaacaagattataataaaatactgaataattttaaaaaagtaaaaagaaactttggtaatatttaat

SEQ ID NO: 241756 - DNA, 220 bp, Unknown
  Bacterial polypeptide expressing nucleotide sequence isolated from the Sargasso Sea
aatgccgcaaattcttaatcatttagctattataatggacggtaatcgcagatgggcccgcaatctgggaattgaggtcctaaaagggcatcatcgtggcgccgatacattaaaagatatcagtcaaacggccattaacctgaaaattgagtggatgactgtttttgcgttttcgtcggaaaattggcaacgtcctcgagccgaagttaggggtttgctg

SEQ ID NO: 241757 - DNA, 181 bp, Unknown
  Bacterial polypeptide expressing nucleotide sequence isolated from the Sargasso Sea
tagaacaggtggagagtatcgattaagtaattttttattatggcagtcagcatactctgaattattaatatcagaaactttttggccggattttcgtgaaagtgacttattaaatagtattgctgattaccaaaacaggcaaagaagatttggtcaaactgctgagcaggttaaatcatga

SEQ ID NO: 241758 - DNA, 553 bp, Unknown
  Bacterial polypeptide expressing nucleotide sequence isolated from the Sargasso Sea
ctccataaaaaagaagatacccatattaactttttatactttttctacagaaaattggaaaagaccgaaaaaagaaataaaatttctttttaaattgattgaaaattattttaacaaagaaattatcaatttaaagaaaaacggtgttaaacttgatattctaggtaatataaatacacttccaaaaaaaattaagaaatgtttaattaatagtaaaaaaataacaaaaaagtgtaataatataagagtaaacttggcaataaattatggatcaaaaaatgaaattataaatgccttcaaaaacataaaaaaaaacaaaactaaattcacgattaaagattttgaaaaaaatttatacacaaaaggcatccctgatccagatcttttaataagaactggtggtaagaaaagattgagtaattttttactatggcaattgtcttattctgaaatatactttattaataaattatggcctgactttaaagtaaatgattttattaagatattgaatcattttaaaaatgtaacaagaaattttggaaaagtatga

SEQ ID NO: 241759 - DNA, 794 bp, Unknown
  Bacterial polypeptide expressing nucleotide sequence isolated from the Sargasso Sea
aggtggcaaattattaacggaataaaagacgcagcactatatctttcaggattttattcaatctattccaagagactagaaagtgagatacttgaaggggatatgcctaatcatattgcaataattctagatggcaatagaagatgggctaaaagaaatttaacaattcaagaaaagggacatttcaaaggtgcagacgcagtagaaaatctgttagactggtgtgaagaatttgatatcaagattattacattatacgtattatcagctgagaatttagataggaaaaatgaggaactagattatctttatgatttgatttacaaaagattagaaaaattatacaacgatcctagaatacacaaaaacaaaatgagggtaaaagcaattggaactatagaacttctaccagaatcaatcaaggaggttcttggaagattagataaagttactaaaaattatgacaaacattttctaaatattgcaattgcatatggaggacaaaatgaattagtagatgctgtaaaaaaaattggaatgaaaattaaaaatggtgaattagatgcagaagagatcaataaggaagtaatagaatctaatttgtatacatctcatttaccacaatcatcgccagacatgattttacgaacatcaggtgaaaaacgtatgagtggatttctattatggcaaagcgcatatagtgaattagtatttctagatattttttggccagaatttagaaaaattgatttgatgagagcaattagaacattccaaaaaagaaagagaagaat

SEQ ID NO: 241760 - DNA, 727 bp, Unknown
  Bacterial polypeptide expressing nucleotide sequence isolated from the Sargasso Sea
atggaaggtatccagcctgcaacattgccaaatcatgtagcgattatcatggatggcaataacagatgggcatctgagagagaacttccaggagtttcaggccataaaagaggggttgagagggctcgagaggctgtagaattttctgtaaaaaaaggaatatcagttctcaccctatttgcttttagtagcgaaaattggggacgttcagctgacgaagttaatttattaatgaaattgctctatacagctcttcatgaagaagttcccaatcttatcaaaaattctgttcaattaaatttcataggtgatctgtctcagttcgacaaagatctcattgaacaaatgaggaattcagagtaccaaactcgctgtaaaaaaggagacaaaaaacttgatttagttgttgctgcaagttatggaggaagatgggacatagtaaatgcagttaatgaaatacaaaaatccaaccaaaaaaaaattataactgaagaaatattcaactcttatttatctacggcttcatttccatatccagacttgtgtattagaacaggtcatgaaaaaaggataagtaatttcttgttatggcaacttgcttattcagagttatattttccagacttactttggccagattttgatgacaatcaatttgaacaagctataaatgaatacgcgaaaaggacaagaagatttggggataaatcaaattttaaaatttaaa

SEQ ID NO: 241761 - DNA, 415 bp, Unknown
  Bacterial polypeptide expressing nucleotide sequence isolated from the Sargasso Sea
taaacaaaatattaaattaaaaatattggggtccaaaaagttctctcctaaactaaacaaactacttaataaatcagaaaaaaaaacatcaaaaaacaataaattacaaattaatcttgcattaaattatggatctaaatctgaactgataagtgcatttaaaaaaattaagttgagaaaaaacattataagtgaaaaaaatgtggctaaaaatttacaaacaaaaaatatacctgatccagatttattaattagaacaggcaatacgaaaagattaagtaattttttattgtggcaactagcttatgcagaaattttttttgaaaaaaaattatggccagcttttaatgaaaaagactataatagaataattaaggaatataagagtataaaacgaaattttggtaaaatatga

SEQ ID NO: 241762 - DNA, 226 bp, Unknown
  Bacterial polypeptide expressing nucleotide sequence isolated from the Sargasso Sea
tatgaatccaataaaacatgtggccgtaataatggatggcaatggcagatggggtttaaaaaataaaaaatcaaggaacttaggtcacaaagcaggattaaaaactgtggaaatgataataaagcacagtataaaaaaaaaaataaaatttttaactttatacgcattttcaacagaaaattggaaacgaccatcaagtgaaaaaaattttttgttcaacttatta

SEQ ID NO: 241763 - DNA, 556 bp, Unknown
  Bacterial polypeptide expressing nucleotide sequence isolated from the Sargasso Sea
taaaaaatcaataaaatataatattaaatttttaacattatttgctttttctaccgaaaattggaaaagaccaaaaaaagaaatagattatttattcaatttattagaaagttttttaattagtagaattgatgaatttgataaacaagatattaaatttaaagttattggtaaaaaaaatttttctaaaaaattgaatttattattaaattcagcagaaaaaaagacttccaaaaattcaaaaatccaaattaatctcgcattaaattatggttctaaatttgagttagtaaatgcatttaagaaaattataaaaaataatatcaatatcaacgaaaaaaatattgaaaaatttctatataccaaaaatatacccaacccagatatattaattagaactggtaacacaaaaagattaagtaattttttattatggcaacttgcttattcagaaattttctttgaaaaaaaattatggccagattttaatgagaaagattattcaaaaattataaataaatttagaaaagtaaaaaggaattatggaaacatatga

SEQ ID NO: 241764 - DNA, 366 bp, Unknown
  Bacterial polypeptide expressing nucleotide sequence isolated from the Sargasso Sea
catgtcgcgatcgcagactgacgaagcaacgctggacgagagactgacgttgctgaatatgcctaagcacgtggccattattatggatggcaacggacgctgggccaaaaagaaagggaagattcgtactttcgggcatcgcgctggtgtggagtcagtgcgcgctgcagtgcgttttgcacgcaaaaatgccatccagtctctcaccttgtttgcatttagcagtgagaactggaagcgtccggaagaagaagtcagtgttttaatggacttgtttaatctggtattgaacagcgaagctaagcgtttaaataaaaacggtgtgcgattaaaggtgttgggtgatacttcgcgttttgatcgcaa

SEQ ID NO: 241765 - DNA, 451 bp, Unknown
  Bacterial polypeptide expressing nucleotide sequence isolated from the Sargasso Sea
tttcttggtgatcctagcccgatacaaagcgatattgttgatcagatgcaaaacctcgaagaagctaccaaaaaaaacgatggattaactcttaacatagcactaaattatggcgggcaagatgaaattgtgagggcggcaaaaaagtttgggttagagactgcaaaaggaacacaaaatcctgcagatttgacggtggcaggttttgaaaaatatttagataccgcgaatcaatcgcacccagatcttataattagaaccgcaggtcagcagagactttcaaactttcttctttggcaagttgcctattcagagttttatttcacaaaaacaaactggccagatttttccataaaggaattagttcaaatactatcggaattttctgaacgtgaacgtacttttggaggcaataataccgttgatcaaaaacaacagcttagcttgtgag

SEQ ID NO: 241766 - DNA, 377 bp, Unknown
  Bacterial polypeptide expressing nucleotide sequence isolated from the Sargasso Sea
tataatagaaagtacaaaggataatacaggtatgacattgacactagcactaagttatggtggaaaacaagaaattttcaaagcagtcaaagagatttctgagaaagttaaaaatgatataatttgtcttgataattttgatgattccgtaattaatgatcatctttacacaagtaatttgcctgatgtagaccttcttattaggacaagcggggaaaaaagaattagtaattttttactttggcagatagcatatgccgaattatattttactgatgtttattggcctgattttacagaagaagatttggaaaaagctattgttgaatatcaaaatagagaaagaagatttggaaaaacaagtaaacaactttaga

SEQ ID NO: 241767 - DNA, 676 bp, Unknown
  Bacterial polypeptide expressing nucleotide sequence isolated from the Sargasso Sea
tatgaacccattaaatcatgtagccattatcatggatggtaatgggagatgggggttaaaatatagaaattcaagaaatgcaggtcataaagcaggcttaaatacagttgaaaaaataattaaagaaacaattaaacataaaataaaatttcttactctttatgccttctcaacagaaaattggaaaagacctaaaaaagaaataaattatttatttaatctattggaagtttttttattaaagagaattgaagatctacataaacaaaatataaaaattaagataataggaaataaaaatttttcaaaaaaacttaatagacttttgaaattagctgaaaaaaaaacagttaataatactaaactacatattaatcttgcacttaactatggttcaaaatttgaattaatcaatgcttttaaaattttatctaaaaaaaaagatccaattaatgaaaaaaattttgttaaatatttacaaacaaaaaatactcctgatcctgatttgttaattagaacaggtaatacaaatagactaagtaattttcttttatggcaacttgcttattctgaaatattttttgaaaaaaaactatggccagcatttaatgaaaaagattataatttaattattaaaaaatttaaaaaaattaaaagaaattttggtaggatttga

SEQ ID NO: 241768 - DNA, 647 bp, Unknown
  Bacterial polypeptide expressing nucleotide sequence isolated from the Sargasso Sea
tatgaacccactaaatcatgtagccataataatggatggcaatggtagatggggtttaaaaaataaaaattctagaaatgctggacacaaagctggtttaaaaaccgttgagaaaattattaagcattcaattaagagtaaaataaaatttttaacattatatgcattttcaacagaaaactggaaaagacctgactcagaaataaagtatttatttgatttgttagaaatttttctaagaaaaaaaatacaacagctatatagtaatggaattaaaattaaaattttaggaaacaaaaatctaaataaaagactcagaaatcttctaataaacgttgaaaaaaaaacttcaaaaaataaaaaaatacaaataaatttagctcttaattatggttctaaaaaagaaatactagatacaataaaaaaattaataaaatataaaaaaaaaattactgaagaaaattttacaaataatttgtatactaaaaatatcccaaatccagacatattaattagaacaggaaatacaaaaagattaagtaattttttagtgtggcaattagcatattcagaacttttctttgaaaaaaaattatggcctgattttaatgaaaatgattatgataaaattataaaaaaatacagcc

SEQ ID NO: 241769 - DNA, 666 bp, Unknown
  Bacterial polypeptide expressing nucleotide sequence isolated from the Sargasso Sea
taattcatgtagctattatcatggacggtaatggcaggtggggattaaaaaataaaaattcacgtaatgctggtcacaaagcaggattaaattcggttgaaaaaataataaaagaaactatcaagcatgatataaaatttctcacattatatgcgttttcaacagaaaactggaagcgaccaaaaagagaaataaagtttttattcaatttattagaagattttctcattaataaaattgaggatcttaataaacaaaaaattagattgaaaattattggaaaaaaaaatttttcaacaaaattaaataaccttttgagattatccgaaaaaaaaacatttaaaaataaaagattacaaatcaacttagcacttaattacggttctaaaatagaattaatagatgcatttaaagagttaaaaaaaaatagagatgcaatcaatgaaaaaaatttaaagaaatatttacagacaaaaaatataccagatccagatatattaattagaacaggaaatacaaataggctaagtaattttttattatggcaattagcttattcagagattttttttgaaaaaaaattatggcctgattttaatgaaaatgactataataaaataatcaagaaatataagggtatcaaaagaaattttggaaatatttaat

SEQ ID NO: 241770 - DNA, 610 bp, Unknown
  Bacterial polypeptide expressing nucleotide sequence isolated from the Sargasso Sea
aattcaaggaatgcaggtcataaagctggattaaatacagttgaaaaaataataaaagaaacaataaaaaataaaattaaatttcttacattgtatgcattttcaactgaaaattggaaaagaccaaaaaaagaaataaattacttatttaatttgttagaaaactttttagtaaatagaatagaggaacttcataagcaaaatataaaacttaaaattattggaattaaaaatttttcttctaaattaaataaacttttaaatttatcagaaaaaaaaacatcaaaaaataataaacttcaaattaatcttgctttaaattatggatcaaaatttgaattaattaatgcatttaaaagtttaaaaaaaagtaaagaaaaaattacagagaaaaacctaaataaatttttattaactaaaaatatacctgatccagatttattaattagaactggaaacacaaaaagattaagtaattttttattgtggcagcttgcttattcagagattttctttgaaaagaaactatggccagattttactgaaaaggattataatataatcattaaaaaatttaagaatattaaaagaaattttggtaaaatttaat

SEQ ID NO: 241771 - DNA, 277 bp, Unknown
  Bacterial polypeptide expressing nucleotide sequence isolated from the Sargasso Sea
atgaaccctctaaatcatgttgctattatcatggatggcaatggaagatggggtataaaatataaaaaatcaagaaatgcaggtcataaagctggcttaataacagtagaaaaaattattaaagagtcaataaaaagaaatataaaatttcttacactttatgcattttctactgaaaactggaaaaggcccaaaaaagaaattaattatttatttgatttattggaaaaattcttggcaaaaaaattaaataaattaaataaccaaaaatattaaa

SEQ ID NO: 241772 - DNA, 748 bp, Unknown
  Bacterial polypeptide expressing nucleotide sequence isolated from the Sargasso Sea
atgacttcatctgaaaataatcatctagagaaaatccctaatcaaccacaacatgttggcatcatcatggatggtaatggaagatgggcaaaaatcagagggaaaagaaggatatttggccatgaggccggtgttgtcaaggcaagagagttacttgaaaccgccgtaaaaattgaacttgaggcattaacactctatgcattcagttctgagaattggtctcgaccaaaaaaagaggtcagtggattaatgagtcttttcgagaagacaattgaaaaatataccaatttattaattgaaaaaaatgtccgattcaaaatagctggtgatccttcaatgttgcctgatattttgaagcggaaattagagcagacagagtctatcacatcagagaatagtggactaaaactgactctcgcaattgcatatggtggtcaacaagacatcataaatggaattagaaacttaattaatgatcatgaaaataaaatcattaatgttaatgatctcacagttgaatcatttaaagattatctatcatttaaagatcttccagagcttgatttgataatcagaacctctggtgagactaggctgagtaactttatgctatggcaatcagcttactctgaaattcattttacagagacattatggccaagctttgaagagaaagagtttctagatattcttcaaacgtactctctatcagagcgaagatttggtaatgtcgatgaagatacttaac

SEQ ID NO: 241773 - DNA, 622 bp, Unknown
  Bacterial polypeptide expressing nucleotide sequence isolated from the Sargasso Sea
ggacatcttatgggtaaagggaccctcgagaatctttcggagtggtgtcgtaatttagacatcaagtatctaacagtttatgccttttcattggagaattttagcagagacgaaaaggaattagaccctttaatggatttatttgaagaatcctttttgaatgcagcagatgatccccaagtccataagaataaagttagaataagatctataggccatcgtgaactacttccggagagagttatcaaggctatagattatgccgaagacaaaactaaagattatgaggattataactacaatcttgctgtggcatacggtggaaggcaagagatagttagatcaatgactaaaatagctgaaaaaataaagactggagaattagattctaaagatatagatgtggatcttatctcagataatctgtataccagtaatcttccagatccagatttaattctaagaacttcaggtgaggaaagagtaagtaactttcttctttggcagttagcctattctgagctatactttgcagatgttttctggccggagatgagaaagattgattttttgagagcaatacgatcctttcagcaaagacaaaggaggataggtcgttgac

SEQ ID NO: 241774 - DNA, 620 bp, Unknown
  Bacterial polypeptide expressing nucleotide sequence isolated from the Sargasso Sea
tcgaaaaggcgttgaaagagctagagaagcagttgaatttgctgttaagaaagggatatcaactttaactatattcgcttttagcagtgaaaattggggaaggtctaatgaagaggtaaatcttttaatgcaacttcttaatacagcgttaaaagaacaagttcctaatcttatagaaaactcagtacaattaaattttataggagatttaacacagtttgatagcgatttacttaatgaaatgaagaaatctgaagatctaactgtttgcaatgagaaagaaaagaaattagacctagttgttgcagcaagttatggaggaagatgggatattattaatgcatttaatagtctaaaggaatcaaacaaagataaaatttcagaagaagacctcacatctttattgtccacttctaaattcagagaccctgatttatgcattagaactggtaaagagaaaagaattagcaattttttactatggcaattggcttacactgaactttattttcctgatcttttatggcctgactttgatgatgacgaatttgagaaagccattttagaatattcaactagaactagaagatttggcgataaatccaatttttctttataaa

SEQ ID NO: 241775 - DNA, 661 bp, Unknown
  Bacterial polypeptide expressing nucleotide sequence isolated from the Sargasso Sea
aaaacatattgcaattattatggatggtaatggatcctgggcactagaaagaggcttaaacagagacaagggacatatagaaggattaaagacattacaaataatagtaagttgttgtttggatatgcacataaaaaatcttacagtatttgctttaagtcatgaaaatgtaaatagaccaaaaagtgaaattagaaacctttacaatttgtttattgaatctattcaaaaaaatttagagtttgcacaccaaaagaaaattaaaatttcatttgtaggtaacttttctgtatttccaaaatcccttttaacaaaaattaaagttgctcaagagtccacaaaaaattataaaaatatgaatcttaatatcgcaataaattatggaggtattcaagatattgaacatgctgtaaagggaattatagccagtggtaaaaaaaaatataatataaaagaatttttgtacacaaaagatttgccagatgtagacttacttataagaactggcggataccaaagaatgagtaatttcttattatggcaaattacatatagcgaaatatattttacaaaaacaaaatggccaagtttcaaaaaaagtaattttttaaaatcccttgattggtataataagattgagagaaaatttggcaaattataa

SEQ ID NO: 241776 - DNA, 668 bp, Unknown
  Bacterial polypeptide expressing nucleotide sequence isolated from the Sargasso Sea
ggctgaaaaaagaggtgaaaaaagaattaaaggtcatataaaaggagtaaaatctgtaaaaatagttgtagaagaagccgctaaattaaagattaagtttttaacactttttactttctcaactgaaaattggaatagaccaaaaaccgaaatagataccttaatgaaacttttagtttcatctcttaaagatgaatttgaagagttaaacaaaaacaacattaaactaaatactataggtaatattaataatcttccaaataaagttcagaaagaattaaattatgttgaaaataaaacttcaaaaaacagtggtatggttttaactttagcattaagttatggagcaaaagaagaaataacaaatgctttaaaaataattagtgacaaagttaaaaataatataatttcaatcgaaaaagttgatcaatacactataaataaccatctttatacccataatttaccggatgtagatttattaattagatcaagtggtgaacaaagaattagtaactttttattatggcaaatagcatatgctgaattatatttcacagatattttatggcctgatttcaataaattagatttttataaggcacttgatttttataatgaaagagaaagaaggtttggtaaaactagtaaacaaatcaatgattaaa

SEQ ID NO: 241777 - DNA, 703 bp, Unknown
  Bacterial polypeptide expressing nucleotide sequence isolated from the Sargasso Sea
ttgagtaatttaaaacatgtagccataattatggatggcaatggcaggtgggctcagaataagggcttaagtcgtgctgaaggacatatagctggcacacagaatattcgcagagtggtccgtcagctaatcgttgaaaacgtgcaatatgtaagcctgtacgcattctcaactgaaaattgggatagacctgtggctgaagttgatagtttactgcagattctgtctgattctattgcaaatgaaacagcggaaatgcatgaagaaggtgtccgtataaggcatttgggtagaattgacaggcttccaaacagtttgcaaaaagctatcgagaatagcgtcaatttaacaagcaggaatacggtcatcaatttaaatgttgctttcgattatggcggaagggacgagatagttcaggctgttcgacgtcttgtagaatctgaggtcaagcctgaccaaatcacggaagaaactttgacagagcgcctttatactggagggatgcctgatccggatttgataatacgaactgcaggtgaaatgaggataagtaacttcatgatttggcaggccagctatagcgaatattattccagtccagcttgttggcctgattttgatgaaattgaattgaaaaacgcgcttgctgagtatagtcgtaggaaacggaaatttggtgctctcaacaaggctgtaacatagc

SEQ ID NO: 241778 - DNA, 700 bp, Unknown
  Bacterial polypeptide expressing nucleotide sequence isolated from the Sargasso Sea
gatgcacattggaataataatggacggcaacggtagatgggcggctaacagggggcgtcccagagcttttgggcatagaaaaggagcttctagggtgaccgaaattgtcaaagcatgtccagacttaggcgtcaagaccctcactctgtacgcattttcaactgaaaattggaaccgggcagcgcatgaagtggaaagcttgatgagactttttcggggctatcttcaaaataagtttatttctttggtagaaaacaacgtaaaagtacgtttcattgggaatccgacaccgatagccgcagacctgcgtctgcaaatgagagacctagaaaaagctaccgctaccaatgatggccttaatctcaatgttgcgttgaattatggcggtagggatgaaataattcggacctgtagaaaaattgcagcgcagattcaaaacaaccaaatagggttatcagacataaacgaaactctctttgaaacccatcttgatacagccaaacaagaaaatcccgattttatattacgtaccgccggagaacaacgaatttcaaactttctgttatggcaggctgcatactcagagttctattttacggatttaacctggcctgaattcaccgccgatgatttaagaggggcagtctatgacctcacggaaagaagccgaacgttcggtaagaataaaattggaaaatag

SEQ ID NO: 241779 - DNA, 206 bp, Unknown
  Bacterial polypeptide expressing nucleotide sequence isolated from the Sargasso Sea
atatttacaaacaaagaacattccagatccagatttattaataagaactggtaacacaaaaagattaagtaactttttgttatggcaacttgcttactctgaaatcttttttgaaaagaaattgtggccagaatttactgaaaaggattataataaaataattagaaattttaaaaaagttaagcgaaattttggtaatatttaat

SEQ ID NO: 241780 - DNA, 415 bp, Unknown
  Bacterial polypeptide expressing nucleotide sequence isolated from the Sargasso Sea
atgccgcaaattctcagtcatttagccatcataatggatggtaatcgccgttgggcccgcaatcttggaattgaggtcttaaaaggccaccatcatggcgctgatacattaatgaatattagccaaacagccataaatgagaaaattgagtggttaactgtttttgcgttttcatcggaaaactggcaacgccctcgagccgaagttagaggcttgctggaattgatgaaacggtttgtcactgcccaatctaaggatcttatagataacaatatccggttgcgagttgttggtcgccgggaccggttttcgtccgaattacagcaatcaattgcggatgtggagcgtcgctcttcccataacactggactcaatttaacagtggcattggattatggcggaaggcaggacatgc

SEQ ID NO: 241781 - DNA, 404 bp, Unknown
  Bacterial polypeptide expressing nucleotide sequence isolated from the Sargasso Sea
gatgtcatctacagttgagtttgaaccagacccaaatgctgaattggagcaagtgacttcgaatatgttgccgtgcaaattatctgatgttgttaaacaatctctgccaaagcatgtagcaataatcatggatggtaatggtcgctgggcacaacagcagggcaaagctcgtgtgtttggccataaagccggtgttaaggctgttcgtcgtgcggtgagcacggcaagtcaattaggtattgaatcattaaccttgtttgcgttttcaagcgagaattggcgcaggccagataaagaagtcaatttattgatggagctattttttacagtattgcagcgtgagcttaaattactcgataaaaaccaagtcaaactgaatattattggtgatatcagccgttttt

SEQ ID NO: 241782 - DNA, 742 bp, Unknown
  Bacterial polypeptide expressing nucleotide sequence isolated from the Sargasso Sea
atggctaatattaacgaaataaataaggagaatatacccaaacacgttgccattataatggacggaaacggaagatgggctaagcaaaaaggtaaacttcgtgtttttggacacaaaaatggtgttaaagctgtccagtctacaatagagggtgctgcaagaattggcattaaatatattactctttatgctttttctacagaaaactggaatcgtccaaaatttgaagtaaatgctctgatggaactgctggtcgatacaattcaaaaagaaataaacacgttaaacaaaaataaaatccgattaaaagccattggtgatttaagtaccctgcctaaaaaagcaaaagataagctaaaaaatgctatcgaagaaacggctaaaaatgaccacatgacgttggttttagccttaagttattcatcaaaatgggaaatcattaatgcagtcaagaaaatttgtaaaaaggtaaaatcagacgaactttcttcggatgagatcaatgaaagaataatagataattgtttatctacgaaaggaattcctgatcctgagttaatgattagaacttcaggagagcatagagtaagcaacttcttactttggcaactcgcatatgcagagttatatttcactccaaaactttggccagactttagggaagatgatttattcgaagcattattaagctttcagaaaagagaacgaaggtttggaaaaacaagcgaacagattacggaat

SEQ ID NO: 241783 - DNA, 215 bp, Unknown
  Bacterial polypeptide expressing nucleotide sequence isolated from the Sargasso Sea
tttgatatcttctaacttatacactagtggcctaccggatccagatttaatactacgtacttccggtgaggagagaattagtaattttcttttatggcaattggcttattctgaattatactttgcagacgttttttggccagaaatgcgaaaaatagattttctgagagcaattcgtgcatttcaaatgcgaaaaaggcgtctaggtcattgac

SEQ ID NO: 241784 - DNA, 733 bp, Unknown
  Bacterial polypeptide expressing nucleotide sequence isolated from the Sargasso Sea
atgaatattaaagaattaggaatccaacacgttgcaataattatggatggcaacggtaggtgggctactgaaaaaaatttagacagaacagctggacatgctgcaggtgaacatgctctttcaaaagcaatctactgggctttagaaaataatttaagctggttaactgtttatgcattttctactgaaaattggacgagatcaactgaagaagttgattttttaatgttttttaacagagatatattaataaggcgaagagaagagtttcacgaaaaaggagtcaaatttaattttattggtgatctaaaagataaaagaattcctgaagagaacaaaaaattaatgaaagaaacagaacatataaccaaagataacaaaaaattaaatcttgtttttgcttttaattatggttctcataaagaaatacataatgctgtacataaaactgcctttggtcattatttttatcttaaattgaatgcttggttgtttacaaagaaacacatagaagaaaattttaaaaattatatgtacttacctgaaatgcccaatcctgatatattgattcgcacagcaggagagaaaaggttaagcaactttctactatatcaacttagctacactgaacttatgtttattgatacactttggcctgattttgatgaagatgatttttataatattgttgaagagtataaaaaaagagtaagaaaatatggaaaagcctgat

SEQ ID NO: 241785 - DNA, 559 bp, Unknown
  Bacterial polypeptide expressing nucleotide sequence isolated from the Sargasso Sea
gttaaaaatctgactttatatgtcttttcaatggaaaattggaaaagacctgaaacggaagttaaggctttaatgcatttattatttagctctatagatagcgaattggaaaatttaaataaaaataatattagactgagtgtgattgggcaaaaagatttacttccagaaaaaactaaaaaaagattaattgaggcagtagatcaaacaagtaagaatactggacttaaattaaatttggcaataagttatggttctaagcaagaaattattgaggcagtaaaatcaatttcaaataaagttaaaaaaaacataatttctcttgaaaatattgatgaaaacataataaatgaccatctttacactcgaaatttagataatgttgatttattgataagaacaggtggagaaataagattaagtaatttcttattatggcaaatttcttacgcagaattgttttttctagatcttttatggccagattttaagaaaaaacacttttatgaagcagtaattgagtatcaaaatagagctagaagatttggaaaagtttaaa

SEQ ID NO: 241786 - DNA, 614 bp, Unknown
  Bacterial polypeptide expressing nucleotide sequence isolated from the Sargasso Sea
tatgcatatcggctttattttagatggcaatggaagatgggcctccaacaaaggtttacctcgggctataggacacaagaaaggtgccgaaaacgtagaagctatactaaggcattgtatagacttaaatatagagagagtgacgctgtatgctttctctactgaaaactgggatagaccagtgtacgaagtaaaagcactaatgagtctattcaaatattacctcaataaaaagcttattcaattacatgaagaaaatgtaaaagtatctattatcggtgatattgaaccatttccaaaaatcataaaaaagtacattcaaaaccttacaaagttaactaaacacaatgacggaatgtacctaaatttagcgctcaattatgggggaagggcagaaattgtacgggccacaaaacgtattggcttgcaacttttgcaaaagaaaattttgttagaggacgtaaatgagaaaaattttgctcttaatttagatacagggactcaaccatatccagatcttattgtcaggacagctggtgagagacgtttatcaaactttcttttatggcaatctgcttacagtgagctttatttttcaaagaagacatggccag

SEQ ID NO: 241787 - DNA, 215 bp, Unknown
  Bacterial polypeptide expressing nucleotide sequence isolated from the Sargasso Sea
tcttaaaaatcacttatattgccctgatctgccaaatccagatatgataattaggactggaggtgaatacagactgagcaattttttattatggcaatcagcatattcagaaatttatgtttgtgataaaaattggccagattttgatgtagaagaacttgaaaaagctttaaaagagtatgataacagaaatagaacatttgggaaagtttaga

SEQ ID NO: 241788 - DNA, 676 bp, Unknown
  Bacterial polypeptide expressing nucleotide sequence isolated from the Sargasso Sea
tatgaaccccttaaaacatgtagccattatcatggatggtaatgggagatggggtttaaaatataaaaaatcaagaaacgctggtcacaaagaaggacttaaaacagttgaaaaaataataaaagagacaataaataataatatacaattcttaacattgtatgcattctcaacagaaaattggaaaagaccagaaaaagaagtaagttatttattaaatttattagaaaattttttagtaaatagaattgaagatttttataagcaaaatattaaactaaaaattattggtaaaaaaaagttttcaaaaaaattaaataaactactaaatgattcagaaaaaaaaactttaaataataataaattacagatcaatttagcacttaactatggctctaaatctgagctggttagtgcatttaagaagacaataaaaaataaagaaaaaataaatattaaaaatatcgaaaaaaatttacaaactaaaaatattccagatcctgatataataataagaactggaaatacaaatcgattaagcaactttctattatggcaattagcatattctgaaatttttttcgaaaaaaaattatggcctcaatttaatgagaaagattataataaaataattaaaaaatttaaaaaaataaagagaaattttggtagtatttga

SEQ ID NO: 241789 - DNA, 800 bp, Unknown
  Bacterial polypeptide expressing nucleotide sequence isolated from the Sargasso Sea
tttagaaaaaataattgacaaaaaaaatgccgacttatccaaaagtatagataagcaaaaagttccggaacatatagccataatcatggacgggaatgggagatgggctactaaaaaaggcttacctcgatcatttggtcataacaagggtgttagtgtattaaaagaaattattaaagcatcaaaaaaattaggttctaaaatacttactgtttatgctttttcaactgaaaattggacaagaccaacaaaagaggttgattttctaataaatctttttgacaaagttttgaaaaacgaaattaaagagatccatcaagaattaattaagataaaatttataggagatttaaccccttttccagagaatttaaaagaaactatctataatgcagaatcaataactaaaaataacaataattttttattaaatgtttgtgccaattacggaggtagacaagaaatagtaaaagttgcaaaagaacttgtattaagatcttattctggggaaataaaaccaagtgaagtcaatgaagaattatttaattcagagctattaacccaaggaattaaggatccagaattactaataagaactagtggagaaaaaaggataagtaattttcttttatggcaattagcttattcagaaatttatatatctgaggtactttggccggacttcaatgagtttgaatttcttaaagcaataattgattaccaatcaaggaatagacgtttcggcggtatagaatcattaccaaatgaatcttttcaagattctggatgttcttcctaac

SEQ ID NO: 241790 - DNA, 271 bp, Unknown
  Bacterial polypeptide expressing nucleotide sequence isolated from the Sargasso Sea
aatgaaaaatgataggcctttaaaacatcttgccataatcatggatggcaatggaagatgggcattaaaccaagatttacctcgaacagcaggacatgctgcaggagagcattctctttcaagaactattgattgggcaatagctaacaaactagaatggttaaccgtttatgctttttcaaccgaaaactggctcaggtctgaagaggaagttgattttctgatgtttttcaatagagatatattaattcgaaagaagagaagagtttaa

SEQ ID NO: 241791 - DNA, 679 bp, Unknown
  Bacterial polypeptide expressing nucleotide sequence isolated from the Sargasso Sea
atgacctcccctaaacatgtggccataattatggatggtaatggtagatggggtttaaaaagaaaaaaaacaagaaattttggtcatcagcagggcatcaaaactgttgaaaaaataattaacgcttcaatttatttcaatattaaatttttaacattatacacattctcaactgaaaattggaaaagaccaactaatgaaataaattttttatttaggctattagaaaattacctagttaaacaaatcaataatttaattaagaaaaatgttaaaattaagattataggtaatataaataaatttcccttatcattaaaatcaaaattaaaagaagcagaatttttaacaaaaaaaaataataaaatccaaattaatgtagcattaaattatggatcaagagaggaaataatatattcagttaaaaaaataaataaattatcattatctataaatcaaaaaaatattacaaattttttatatacttcaaaagtgccggacccagaaattttaataagaactggaaatacgaatagactaagtaattttttattgtggcaatctatttatactgaaatattttttgaaaaaaaactttggcctgattttaacaaaaatgatttaaaaagaattttagataaatttaaaatgataaatagaacttttggaggtatatgac

SEQ ID NO: 241792 - DNA, 457 bp, Unknown
  Bacterial polypeptide expressing nucleotide sequence isolated from the Sargasso Sea
tatgaatcacataagacatgtagccattattatggatggcaatggaagatggggattaaaacaaaaaaagtctagaaactttggacataaagctggtttaaaaactgtagaaaaaataattaaagaaacaattaaaaataaaatcaaatttcttacattatatgctttttcaacagaaaactggaaaagaccaaaaaaagaaattaattttttatttaatttactggaaaattttttacttaataggctcgagcaatttcataaacaaaatataaaactaaaaattattggaattaaaaatttttcttcaaaactgaataaacttcttaatgactcagaaaaaaaaactgcaaagaataataaattacagattaatttagcattaaattatggttcaaaatctgagttaataggtgcatttaaaaatctgtataaaagtaaagataagttaaatgaa

SEQ ID NO: 241793 - DNA, 727 bp, Unknown
  Bacterial polypeptide expressing nucleotide sequence isolated from the Sargasso Sea
aatgttagtcccgaacactaacgataataatctagagcacgtcgctatcattatggatggtaatggtcgctgggcacaaaataaaggaaggccgaggctttttggtcatcaggccggcgccagacgtgtaagggaaatcgtagaaagttgccctgatttgggaataaagtacttaacgatttttgctttctctactgaaaactggaaaagaactcagatcgaagtttctggattgatgaaactatttaagcattatatttacaaagaaacaaagccccttattgatgcgggcgttcgtgttagattcataggtgatcgtgtaagattagaggcatctctagtgaaacttatggatcagctggaaaatctgactaaggaaaatactgaggtcaatttaactatagccataaattatgggggccgcgatgaagttgctcgtgccgcggaacgtatggctagagatgttcaaagtggtaatttgagcgtagaaaacattaatgaagaaactttacccagatatttagatacgcacgttttgccggatccaggattagtaattagaacctcaggcgaggcacgtatttctaactttttgctttggcaatcagcttactcggaatatgagtttattgatacactatggcccgatttcacggcagaaattttttctagcatcgtaaatgaatttgaaaatcgagagcgacgttttggtggcataataaaatga

SEQ ID NO: 241794 - DNA, 775 bp, Unknown
  Bacterial polypeptide expressing nucleotide sequence isolated from the Sargasso Sea
aatgccctccaaacacccaacaggaacgagcgacggtgtgaataaccctgttgctatcccatctacaaaccaacccactcggacggcagatcaacagaaagccgaaccgagcgataaatctttaccgcagcacgttgcaattattatggatggcaacggtcgctgggcaaaaaaacgaaatctccctcgaatcgagggccacaggcagggcgtcactagtgttcgcaaggtcaccgaacatgctgcgaggcgaaacatcaagcagctcactctgtactgtctttcaagtgagaattggcgacgaccaaaagccgaacttgattttctcatgctccttctcgaacagtacatgattgaagaacgttcgctcctcatgcgcgaacacattcggcccgtgatgataggaaaccgaactggtctgccaaacagaacactcgcagcgatcgatgaaacgattgatatgtgtcgcaataataccggcatgcgactttgtttagcagtcaactatggagggcgggctgaaattgttgaggccaccaaaacacttgcacgtcaagtggcatcaggaagcctgcagccggatgaaattgatgagaaaagtgttgaatctcaccttgaaacaaacggaatgccggatccggaccttctcatacgaactgctggcgagatgcgactgagtaattttctgctgtggcagatgagctatgcagagttctgggttacgtcagacctctggccagatttcacggagaatcatctggaccaagcgcttgcc

SEQ ID NO: 241795 - DNA, 793 bp, Unknown
  Bacterial polypeptide expressing nucleotide sequence isolated from the Sargasso Sea
tatgagtgctactgtccataatactttaatcgataagatagattactctaatattcctaatcatgtagcaataattatggatggtaatggaagatgggcaagaaaattaaatagagaaagattttttggacataatactggaataaattcagttcgtgagtcattggatatttctatcgaactaggaattgaaacattgactttatatgcattttcaattgaaaactggaatagacccaaaaatgaagttaatgctcttatgagtttattatcaaacacaattgaaaaagagcttactaatattcaagaaaacaacattaaacttaatgtaattggaaatttagatctactaccaaaaaacacaagagataagttattaaatggtgttgaaaaaactaataataataatggtttaaatttaaatttagctgttagctatggagcgaagcaagaaatgataagagctgtaaagcttatttcagataaagttaaaaaaaacataatttctcaagaaaatattgatgaagacacaataaatgagcatctttacactcgcaattcaaaaaatgttgatttattgattagaactggtggagaatatagaattagtaattttttactgtggcaaatttcatatgcagaattaaattttcaggatgttttatggccagattttaagaagaaacattttttaaatgctatcattgattatcaaaaaagaactagaagatttggaaaaatgaagcttaggttatttacatttattttaatctttttatctggattttcactt

SEQ ID NO: 241796 - DNA, 448 bp, Unknown
  Bacterial polypeptide expressing nucleotide sequence isolated from the Sargasso Sea
tatgaatcaaattaaacatgtcgccattattatggatggtaacggtcggtggggcattaagcacaaaaaatctagaaatctaggtcacaaagaaggcattaacacagtagaaaaaattattaaagcttcgattaaaaataaaattaaatatttaaccttatacgcattttcaacagaaaattggaaaagaccaaaaaaggaaattaattttctttttaatttacttgaaaattttttgttaaacaaaattagtgaattcaatagacaaagtataaaacttaaagttattggtaaaaaaaaatttagtaaaaaaataaatttacttcttaaaaaatctgaaaaatctacatttaaaaataaaaaactacagattaatttagcattaaattatggttcaaaaagtgaattagttcattcatttaatatgattaaaaaaaataaaaaaaaa

SEQ ID NO: 241797 - DNA, 643 bp, Unknown
  Bacterial polypeptide expressing nucleotide sequence isolated from the Sargasso Sea
tatgaatcccattcgtcatatagccgtcattatggatggtaatgggagatggggagttaaacataaaaagtcaagaaatttaggtcacaaagaaggtcttaaaacagtagaaaagattattaggatttcagtaaagaataaaattaaatacttaaccttgtttgcattttctacagaaaactggaaaagacccaagaaagaagtaaatttcttgttcgaacttttggaaaattttttaaaagacaaaataaacatgctagtagaaaataatataaaacttaaaattataggaaatcaaatatttttatctaaaattaataaattattaaaaaaatcagaaaaattaacaaaaaaaaatacaaaattacagattaaccttgcactaaactatggttctaaaaatgaattagtaaattcatttaagaatatttataaacaaaaaaaaaaaataaatgaaaaaaatgtatcaaaatatctgtatacctctaaaattccagatcctgatttacttataagaactggaaatactcatagattaagtaattttatgctttggcaattagcatattcagaaatatattttgaaaaaaaactgtggccagactttactgagaaagatttcaataaaattttaaaaaatttt

SEQ ID NO: 241798 - DNA, 553 bp, Unknown
  Bacterial polypeptide expressing nucleotide sequence isolated from the Sargasso Sea
tatgaaccatctacatcatgtagccattataatggacggtaatggacgttggggaattaaaaaaaaaaaatcaagaaattttggacataaagcaggtttaaatacagtagagaaaattattaaatcctcaataaaaaataaagttaaatatttaacactttatgcattttcaacagaaaattggaaaagacccaaaaatgaaatcaaatttttgtttaacttattagatagcttcatagataaaaaaataaatgaatttataaaaaataatataaggtttaaagttataggtgatattagtgtttttaataaaaaacttcaaaaaaaacttaatgactcagaaaaaataaccttaaaaaacaaaaaactacaagttaacctagcgcttaattatggatcaaaagttgagcttattagagcgttcaagcgattaaatgaaaaaaggcttaatgtaaatcttaaaaatttagaaaaaaatctatacaccgctggtattcctgatcctgaaattttaataagaactggaaatactcatagattaagcaattttttt

SEQ ID NO: 241799 - DNA, 355 bp, Unknown
  Bacterial polypeptide expressing nucleotide sequence isolated from the Sargasso Sea
ttgttaaacataattgatgatgttacttcattaacaagggataataagggcactatagtaaatttattatttaactatggatctaggcaagaaattattgatgcaatagataaaataaaaaaacttaaaaatccatcaagaaatttaaaagattatttctatgttcctgagtcaaaagatccagatctcattattagaactggcggtgaaatcagattaagtaattttatgttgtggcaaagtgcttatgctgaattgtattttacaaaagtattgtggcctgattttaagataggtaatctgagtcgagcacttgatcagttaatgaaaagaaatcgaaattatggtcaataaa

SEQ ID NO: 241800 - DNA, 628 bp, Unknown
  Bacterial polypeptide expressing nucleotide sequence isolated from the Sargasso Sea
tatgaacccattatatcatgtagccattataatggatggtaatggcagatggggattaaaaaataaaaattcacgaaatgctggtcatagagctgggttaaatactgttgaaaagattattaaagaaactattaagaataaaattagatttctaactttatatgcattttctacagaaaactggaagcgaccaaaaaaagaaataaagtttttatttaaattattagaggattttctcagagataaaattaaggatcttaataaacaaaaaataagattaaaaattattgggaaaaaaaatttttcaccaaaattaaataatcttttaagattttctgaaaaaaaaacaattaaaaataaaaggttgcaaattaatctagctctaaattacggttcaaaactagaattgatagatgcttttaaagaattaaaaaagaataaagatgctattaatgaaaaaaatttaaagaaatatctacaaacaaaaaatatacctgatccagacttattgataagaacaggaaacacaaatagactaagtaatttcttattatggcaattagcttattcagagattttttttgagaaaaaattatggcctgatttcaatgaaaaagactataataaa

SEQ ID NO: 241801 - DNA, 649 bp, Unknown
  Bacterial polypeptide expressing nucleotide sequence isolated from the Sargasso Sea
atggatggtaatggtagatggggaataaaaaaaaaaaattcaagaaatttaggtcataaagctggacttaaaacagtagaaacaattatcaaagcatctattaaaaataatattaagtttttaactttatatgcattctctacggaaaattggaaaagacctaaattagaagttaaatttttaataaatttattagaatcttttttgatagaaaaaataaataatttagttaatcaaggaatatcattaaaagttattggtgatttaaaaaaatttccaaaaaatatacaaaaccatttaataaatgcacagaaaaaaactaaaaaaaatagtaaattaaaattaattttagcattaaattatggatccaaaaatgaattaattaatgcaatgaaattaattaattacaataaagcacaggttaacgaaagttcagttaaaaatttcctttatactaaaggaattccagatcctgatatattaattagaacaggcaatactaatagacttagtaactttttattatggcaactgtcttattctgaaatattttttgtaaaaaaaatgtggcctgattttaacgaaagagattataaaaatataatagaaaaatttaaaaaaattaaaagaaattttggaactatttaat

SEQ ID NO: 241802 - DNA, 685 bp, Unknown
  Bacterial polypeptide expressing nucleotide sequence isolated from the Sargasso Sea
atggcatctgccaacccagcaaataatccaaaaaatgttgggatcattatggatggaaatggccgctgggctaaacaaaattcaatgattacaaatcgtggacatgaaaaaggtgttgcagttgtcaaagaagtagttaaagaggcagttcgtcaaaaacttcagtccctaactttgtatgcttttagtacagagaactggtctaggccaaaaaaggaaatttctggcattaaacgattaattattgaggcaattcacgaacaagttcctgagttagctgaacaaaaagttaaacttaatttttttggtgatatagaaacttttggaaaaaaagtacatacaaatatccttcaggctgaaaaagctacttcttttactaaaccagccctcaatttgaacattgctttaggctatgggggtaggtcggacataattaacggcattagaataattgtggatgaggcaaaaaaaaccaagaaagatttacaaatcgatgaaactagtttttttaattacttgagcgcaccaattaatgatcttgatgttttaataagaaccggtggcgatcatagaattagtaattttcttttgtatcacattgcatacaccgaactaatttttgttgataagctttggccagattttagttcaaatgattttcaggattgtttgaatttcttttaaa

SEQ ID NO: 241803 - DNA, 629 bp, Unknown
  Bacterial polypeptide expressing nucleotide sequence isolated from the Sargasso Sea
gggtagaaaaaaaaacaaatcaagaaattttggccatataaaaggaataaaaattattgaaaaacttgtaaaagattcaataaaaataaaagttccaattcttactttttatactttctctacagaaaactggagaagaccaaagaaagaaataaactttcttttcaaattaatagatcattattttttcaaggagattaataatttggttaaaaataatataaaaattaatattgttggtaatattaaaatcttaccaaaaaaagtaagattacgtttaattgaatcaatgaggagaacaaataagtgtaaaaaaattttgataaatctggctatcaactatggatctaaaaatgaaattttggaagcggttagaagcatgagaagaaaaaaagtgtctacatcggttaaaaattttgaaaacaatttatatacgaaaaatcttccagatcctgatattttaataagaacaggtggaaaaaaaagacttagtaattttttattgtggcaattagcatactcagagatctatttcgtagataagctttggcccgactttaatgttacagattatcatagagttataaaagattttaaacgagtaaaaagaaattttggcaatatatgaa

SEQ ID NO: 241804 - DNA, 616 bp, Unknown
  Bacterial polypeptide expressing nucleotide sequence isolated from the Sargasso Sea
tatggccataattatggatggaaatggtcgttggggtttaaaacataaaaactcaagaaatttaggacataaagaaggtcttaaaactgttgagatggtcattaaatattgcattaaaaaaaaaattaaattccttacattgtacgcattttcaaccgagaattggaaaagacctttaaaggaacgaaactatttatttagacttttggaaatttacttaattgaaaaattagagaaattaaataatgaaaaaataaagataaaaattataggggaaaaaaaattttataataaactcaataaattattagattttgctgaaaaaagaaccaaaaaaaatacaaaacttcagataaatttagctcttaattatggatcaaaaaaagaaatagtatatgcttttaataagttgaagaaaagaaagaagatttcagaaaatgatattaataataatttatatacaaaaaatattccagatcctgaaattcttatacgaacaggtaatacccaaagacttagtaacttccttttatggcagtccgcatatacagaaatattctttgaaaaaagactatggccagattttaagtatgaagatttaaataagattatttaa

SEQ ID NO: 241805 - DNA, 760 bp, Unknown
  Bacterial polypeptide expressing nucleotide sequence isolated from the Sargasso Sea
atgaaaatagataagcaaaaattgcccaaacatgtagcaataattatggacggcaatgggagatgggcaactagaaaaggtttaccccgatcatttggacataaacggggcgtgagtgtattaaaaaaaattctcaaagttgcaaaaaatttaggttgtaaagtaattactgtttatgctttttcaactgagaattggacaagacctacaaaagaagttgattttctaataaatctttttagcgaagttttaaaaaacgaaattaaagagatacatgaagaatcaacaaaaataaaatttattggagatttaactcctttcccaaaaaatttaaaagaaataatctttagttcagaatcacttactaaaaacaacaataaatttttattcaatgtttgtgttaattatggaggtagacaagaaatagtaaaagttgcaaaagaactagcattaaaatcttctgctggggaaataaaaccaagtgaaattaatgaagaattattcaattcagagctactaactggaggtattaaggatccagaattactaataagaactagtggcgaaaaaaggataagtaattttttattatggcaattagcatattcagaaatttatatatctgacgtactttggccagagttcaatgagcatgaatttcttaaagcaataattgattaccaatcaagaaatagacgtttcggcggtatagaatcattaccaaatgaatcttttgaagattctcaatatttttcctaat

SEQ ID NO: 241806 - DNA, 679 bp, Unknown
  Bacterial polypeptide expressing nucleotide sequence isolated from the Sargasso Sea
tatgagtaaaattaatcacgttgccataataatggatggtaatggtcgatggggtataaaaaaatataactcaagaaaaataggtcatcaaaaaggtattaaaacagtcgaaaaaataattgaagcttctataaagaagaaaattaaatatttaacattatttacattttctacagaaaattggaaaaggccaaagtatgaaattaattttttatttaaattgttatcagaatatttaacaaagaatttaaaaattttgttaaaaaataatttaaaacttaatatcttgggtgatacaagtaaatttccaaataacctcaaaaaatccttagctaatgcaacaaaattaacttctaataatacaaagttacaattaaatcttgctttaaattatggatcgaaagacgaaattagcaggtctataaaattattaattaaaaaaaaacaaaaacccaatattaaaaatattgaaaaaaatttatatacaaaggatatgccagatccagatattttaattagaacaggtaacacaaatagactgagtaattttttgttatggcagctttcgtattctgagattttttttgttaagaaattgtggccagaatttagcaaaaaagacttttacataatacttaatgaatacaaaaaaataaaaaggaaatttggaaatatttag

SEQ ID NO: 241807 - DNA, 823 bp, Unknown
  Bacterial polypeptide expressing nucleotide sequence isolated from the Sargasso Sea
atgagattgaataacttacaattaaaaaaaaataatcttaatttatcgaatgaattagataaggagagaattccagaacacattgcaataattatggatggaaatgggagatgggctacaaaaaaagggttacctagatcatttgggcataataagggtgttagtgttctaaaggaaattattaaggcatctaagaacatagattgtaaagttcttactgtttatgccttttcaactgagaattggaatagaccctccaaagaggttgattttcttataaatctgtttgaaaaagttttgaaaaaagaaatttctgagatacatcaagaatcaataaaaattaagtttattggagatttatcacctcttcctaattcattaaaattactgataaagagttcagaagctcttactaataacaataaaaaatttaccttgaatatttgtataaattacggaggtaggcaagaaatagtaaaagctgctaaagaaatagccatcaaatcttcccaaggtaaaataaaactcagtgacatcgatgaacaattatttaattcagaactactaactaagggaagcaaggatcctgaactactaatacgaacaagtggtgaaaaaaggattagtaattttcttttatggcaattagcttattctgaaatttatattactgatgtattatggccagattttactgagagggaatttttaaaagcaataatagattatcaatcgaggaataggcgttttggaggtatagaatcattatcaaatgaatcttttgaagattcttgctattcttccgtaagtaaaaatgattaat

SEQ ID NO: 241808 - DNA, 751 bp, Unknown
  Bacterial polypeptide expressing nucleotide sequence isolated from the Sargasso Sea
catggaaatagaaaacattaatagaagtcatttaaaaaatgttccaaaacatattgcgataattatggatggtaatggaagatgggctaaagaaagaggtcttcctagaattgctggacatcgagaaggaataaattcagttcgtgaaataactcggatatgcggcgagattggggttaaatatttaacgttatttactttttctactgaaaattggaatagaccaaaaagagaagtaaaagctttaatgacattattgttatctactattaaaaaagaaacaaaagagctacataaaaataatgttaagttttcaacgattggtgatatatctattctgcctaagagcactgaaaagggtatcaaggagggtataaagctcacatctaataattcaggcttaaatctaattcttgctttaaattatggtagccggcaagagatattatcggctgtaaacaatattattagcgacataaataaaaaagatattgaaattgattcaattgatgagaatatattttcttcatatttatatacaaataattgcccagaccctgaccttttaattcgaacaagtggtgagttaagaattagtaattttttattatggcagtccgcatatactgaaatgtatttaacagatacatactggccttcatttcgtgaaaatgaattattccaagccatacttgatttccagaatagggagagaaggtttgggaaaacaagtgagcaattagatagctaa

SEQ ID NO: 241809 - DNA, 727 bp, Unknown
  Bacterial polypeptide expressing nucleotide sequence isolated from the Sargasso Sea
atgttagtcccaaatactaacgataataatctagagcatgtcgctatcattatggatggcaatggtcgctgggcacaaaacaaaggaaggccgaggctttttggtcatcaagctggcgccaggcgtgtaagggaaatcgtagaaagttgccctgatttgggaataaagtacttaaccatttttgctttttctactgaaaattggaaaagaactcagatcgaagtttctggactaatgaaattattcaagcgatatatttataaagaaacaaagccacttattgatgcgggcgttcgtgttagattcataggtgatcgtgtgcgattagaagcatctttagtgaagctaatggatcagttggaaaatttgactaaggaaaacactgaggtcaatttaactatagccataaattatgggggccgcgatgaagttgctcgtgcggcgaagcgtatggctagagatgttcaaagtggtgatttgagtgtagaaaaaattaatgaagaaactttacccagatatttggatacgcacgttttgccagatccgggattagtaattagaacctctggcgaggcacgtatttctaactttttgctttggcaatcagcctattcggaatatgagtttatcgataccctatggcctgatttcacggcagaaattttttcaagcatcgtaaatgagtttgaaaacagagagcgacgctttggtggcataacaaaatgaa

SEQ ID NO: 241810 - DNA, 676 bp, Unknown
  Bacterial polypeptide expressing nucleotide sequence isolated from the Sargasso Sea
tatgaaccccttaaaccacattgctattatcatggatggcaatggaagatggggcattaaacataaaaaatcaagaaacgctggtcataaaaaaggtcttggtactgtagaaaaaattatcaaaacatcaattaaacaaaaaattaaatttcttactttgtttgctttttccactgaaaattggaagagaccaagacaagaaattaactacttatttaaattattacaatcttttttaataagtagaattgatgatttagataaacagggtataaaattaaatataattggaaaaaaaaatttttctaaaaaattaaataaaattttaaaattttctgaaaaaaaaacatcatctaattcaagaatacagattaatttagcacttaactatggttcaaaatcagaattaatcaatgcttttaaaaaattaaaaaaaaaaaatgaatcaataaacgaaaaaaatataaaaaaaaatttacttacatataacgtgcctgatcctgaaattttaatcagaactggtaacaccaaaagattaagtaactttttattatggcaaatagcttattctgaaatcttttttgaaaaaaaattatggcctgattttaatgaaaaagattatgaacaaataataaaaaaatataaaaatacaaaaagaaattttggctctatttaa

SEQ ID NO: 241811 - DNA, 751 bp, Unknown
  Bacterial polypeptide expressing nucleotide sequence isolated from the Sargasso Sea
atgccctccaatcgcgaactgctcgatccttcaaggatgccccgtcatgttggaatcattatggatggtaacggacgttgggccaccgaaaggcgttaccctcgggtttatggccaccgtaatgcagtcaaagcggtgagggccacggttgaagctgcggtcgaattggaattggaggtactcactctctatgccttttccactgagaactggaagcgtccagtccaggaggtgtccaccttaatggacttgtttgccgaataccttcaaaaagaattgaaaaccatgctggacaacaacgtccggtttcaggtcgcaggagaaagtcaggggctccctcagtttctccagcagcctttaaatcacgcgctggagtctacttcggaaaataccgggcttcttttgaacctggcggtcaattacggcgggagggcagaattagtccgtgcggtgaagaagatctcttccctggtccagagtggaaatctcaaactcgaggaaatcaatgaggatttgatttcagaacacacttttacacctggtatacctgatcctgatttgatcattcgaaccagtggtgaaaaacgtctttccaatttcctgatctggcaggccgcctacagcgaatactttttcaccgatgtgctctggcctgattttgacaaggaagatttttttcaggcccttcttgagttccaaaaacggaataggaggttgggacgtactgaacccctgaaagaaactgcctgaa

SEQ ID NO: 241812 - DNA, 673 bp, Unknown
  Bacterial polypeptide expressing nucleotide sequence isolated from the Sargasso Sea
tatgaacaagcttaaccacatcgcatttataatggatggcaatgggcgatgggggaagagaagaaataaaaacagaaactttggtcattacgctggagtaaaaactgttaaaaaaattgtaaaatcttcaattaaatataaaattccatttgtaacattttatgttttctccacagaaaattggaaaagacctaaaaaagaaataaattttctttttaatttagttagcaactattttaaggctgagatcaatgatgttataaaaaatggcattaaaattaatattattggagagcaaaatagattgcctaaaaaattgaaaaaaattcttaaagacactacaaaaaaaactctaaaaaacagaaaaattacggtaaatttagcactaaactacggttcaaaaaaagaacttataaacacatttaaaaaactcaatacaaaaaaaattactgaaaaagatgtaagtaaaaatttatatacaaaaaaattacctgaccctgaaatacttataagaacaggcggaagaaaaaggttgagtaattttatgttatggcagttagcctattcagagttatattttcttgataaattatggcctgattttggagaaaaagatttaaaaaaaattattaaagattatcataatataaaaagaaattttgggggagtttaa

SEQ ID NO: 241813 - DNA, 760 bp, Unknown
  Bacterial polypeptide expressing nucleotide sequence isolated from the Sargasso Sea
tttgaagcctattggtaaagagcccaataatagttttgaatctatagtcttagattcttttaaagaaaattcctctttaatgccttctcatattgctataattatggatggaaatagaagatgggctgcaaagaaaaaaatcccagttttttcaggccataaagctggaacgaaaaatattgagtcaatattgaaattcatggaactgttaggaattaagtttctaacactatttacattttcaactgaaaattggaatagacctaagaaggaagtgaactatattacgaaaactttgttggcagagtctttggcagagaatttttctaatctgcataaattaggagtgaagattttaataaaagggagtatagaaagattagataataaaacaagagataatatattagaagcagttagaaaaactgagaataataaaagtatcaacctaatcattgcatttgattatggcggaagaaaagagatcatagaaactacaaagaaaatcgtaaatagcaaagtgaattctgaaaaaattaatgaagatttgtttaataaatttctaaacgatggagttccagaccctgatttagttattaggactggaggagaatataggttaagtaactttttaatttggcaaactgcttatagtgaattttttacaagtaatgctttatggcctgattttgatatttctgaattttcgaaagctttaattgaattttcaaaaagaaaaagaaggttcggagtagattaa

SEQ ID NO: 241814 - DNA, 699 bp, Unknown
  Bacterial polypeptide expressing nucleotide sequence isolated from the Sargasso Sea
ttttttcatccaataagattggtcatgtggccataataatggatggaaactcacgatgggcaaggcaacggaatctaaagacaattgaaggtcataagcagggagtaaatcgattaagagatattgttaaatattctgcaaaatctgaaataacccatttatctgtatttgcttttagcacagaaaattggaaaagatctgcttcagacgtttcagatttaatgaaactctttcttcaatcaataattaaagaagttccagaattaattgaaaacaaggttcagctaaattttattggtgacatccctcgtttctctaaatctcttgtatcccaaattaattctgccatgaaggatactcaagccaagaaaccaaaccttaatcttaatgttgccataagttacggtggtagatgggatattctgaatgctataaagagaatcaaagatcataaaataaatacagacaaattaagtgaagatgacttctctaatcttctatcgacttctgattttccggatccagatttattgataagaacaggagacgaaattcgtataagtaacttctttctttggcagatatcatattcggagttgtatttctcaaaattactatggcctgattttaaattatctaattttaaatctgcattaaataaattctctaaaagagatagacgatttggaaaggaataat

SEQ ID NO: 241815 - DNA, 760 bp, Unknown
  Bacterial polypeptide expressing nucleotide sequence isolated from the Sargasso Sea
aatgaaaatagataagcaaaaattgcccaaacatgtagcaataattatggacggcaatgggagatgggcaactaaaaaaggtttacccagatcatttggacataaacagggcgttagtgtattaaaaaaaattctcaaagctgcaaaaaatttaggttgtaaagtaattactgtttatgctttttcaactgagaattggacaagaccaacaaaagaagttgattttcttataaatctttttagcgaagttttaaaaaatgaaattaaagagatacatgaagaatcaacaaaaataaaatttattggagatttaactcctttcccaaaaaatttaaaagaaataatctctagttcagaatcacttactaaaaacaacaataaatttttattcaatgtttgtgttaattacggaggcagacaagaaatagtaaaagttgcaaaaagactagcattaaaatcttcttctggggaaataaaaccaagtgaaatcgatgaagaattatttaattcagagttattaactagagggattaaagatccagaattactaataagaactagtggtgaaaaaaggataagtaattttttattatggcaattagcatattcagaaatttatatatctgacgtactttggccagagttcaatgagcatgaatttcttaaagcaataattgattaccaatcaagaaatagacgtttcggcggtatagaatcattaccaaatgaatcttttgaagattctcaatatatttcctaa

SEQ ID NO: 241816 - DNA, 676 bp, Unknown
  Bacterial polypeptide expressing nucleotide sequence isolated from the Sargasso Sea
atgaacccattaaatcatgtagccattatcatggatggtaacggaagatggggtaaaaaaaataaaaattctagaaattcaggtcataggcaaggtcttaaagcaattgaaaaaataattaagcaaactataaaaagaaaaatctcatatttgacattatacgctttttcaaccgaaaattggaaaagaccaaaaaaagaaattgattacttattcaatctacttgaatattttttaactaaaaaattggatgaatttcataaaaataagattaaattaaaaataattggtaaaaaaaatttttcacgaaaactaaatatacttctgagatatgcagaaaaaaaaacctttaataataaaactttacaagttaacctagcattaaattatggttcaaaatctgaattaattgatgctattaaaaagttaaagaattctaaaaaaaaggttactgaaaaaaatttaattaaatatttacaaacctctaatataccagatcctgattttttaattagaactggcaatacaaaaagattaagtaattttttattgtggcaattagcttactctgaaatatttttcgtaaagaaattatggccagactttaatgaaaaggattttgataaaattattaaagaataccaatctattaaaagaaattttggtaatatttaat

SEQ ID NO: 241817 - DNA, 691 bp, Unknown
  Bacterial polypeptide expressing nucleotide sequence isolated from the Sargasso Sea
tatgattggaaagcgtttaagcgcagccaaatcgacaaaagcagaggtgccagcagagtctgctggcccgaagcacgttgcaatcattatggatggcaatggtcgatgggcgcaaaggaaagggaaaattcgtacctttggtcataaagccggggtagagtctgttcgttctgttgtgcgctttgcacgtcaaaacggtattgaatcacttacgctattcgcgttttcaagtgagaactggaaacgtcctgaggaagaagtcagtgtcttaatggagctgttcaatcttgtcctcaatagcgaagcaaaaagactacacaaaaatggtgtacgtctacaggttattggtgatgttgaggcgtttgatgccaagcttgtcgaaaaaattcgtaaagctgaagacatgaccaaagacaacaaagatttggtcttgaatatcgccgcaaattacggtggtagatgggacattgtaaacgcggctaagcagcttgctacgcaagtgaaaagcggcgaacttgatgtggaaagcatctgtgaagacgcactgaatgcgcacatttcaacagctaaccttcctgagttagaccttcttattcgcacaggtggcgaacaccgtattagcaacttcttgctgtggcaatgtgcctatgcagagttgtactttaccgacgtactatggcccgacttcaac

SEQ ID NO: 241818 - DNA, 613 bp, Unknown
  Bacterial polypeptide expressing nucleotide sequence isolated from the Sargasso Sea
agaaattcaagaaatgtaggacataaagaaggtttaaaaacagttgaaataataattaaatcttcaattaaaaataagattaagtttctaacattatatgctttttcaactgaaaattggagaagaccaaaaaaagaaatcaattatctttttaaattattagaaaattttttatcaaaaaaacttgatgatattcacaagcaaaatattaggattaaagttttagggtacaaaaaattttcaaaaaagttgaattttcttttaaattttgcagaaaaaaaaacaataaaaaattcaaaattacaaattaacttggcgttaaattatggctcaaaatcggagattataaatgcctttaaaaaaattaaaagaaataagattaaaattaatgagaaaaacttagaaaaaaatcttcaaactaacaatatcccagatccagatatattaattagaactggaaatacgaaaagattgagcaattttttattatggcaactagcttatgcagaaattttttttgaaaaaaaattatggccagcattttctgaaaaagattacataaaaattattaaagaatataagaatgttaaaagaaattttggaagaatatgat

SEQ ID NO: 241819 - DNA, 727 bp, Unknown
  Bacterial polypeptide expressing nucleotide sequence isolated from the Sargasso Sea
aatggaaggtaacaacactgaaaccttacctaaacatgttgctattattatggatggcaataataggtgggccacagaaagaaacctaccaggcgttgctggacataaagaaggagtaaagagggctagagaggccgtcgagtacgctgttcaaaaagggctctctactttgaccttgtttgctttcagcagtgaaaactggggaagatcatcagaagaggtaaatttacttatgaggcttctaaataccgctcttagagaggaggttcctaatctagtaaagaattctgttcaattaagcttcattggggatttgacccaatttgataaagacttaatcgatcaaatgaagagatctgaggaattaaccagttgtgatcctaaagtaaaaaaattagatttggtagttgccgctagttatgggggaaggtgggacatagtaaatgccatacaaaaactacaagagtcttcacctaacgaaactataactgaagatatttttagtagttatttatcaacttctgccttcgaggatcctgacttgtgcataagaacaggtaacgaacttagagtgagtaactttttactatggcaattggcttattctgaattatattttccaaatattctttggcctgattttgatgataatcaatttgaatatgctttgaaggaatactctaaaagaacaaggcgttttggcgataaatcaaactttaagcaataa

SEQ ID NO: 241820 - DNA, 511 bp, Unknown
  Bacterial polypeptide expressing nucleotide sequence isolated from the Sargasso Sea
ttgagaaacgaaattgatcagatacatgaagaatcaacaaaaataaaatttattggagatttatctccattcccagaaactttaaaaaaaataatctctagctcagaatctctaactaaaaacaacaataaatttttattgaatgtttgcgtcaattacggaggcagacaagaaatagtaaaagttgcaaaagaattagctttaaaatcttcttctggtgaaataaaaccaagtgaagtgaatgaagaattatttaattcagagcttttaacacgagggattaaagatccagaattactaataagaactagtggagaaaaaaggatcagtaattttcttttatggcaattagcttattcagaaatttacatttctgacgtactctggccagacttcaatgagtttgaatttctaaaagcaataattgattaccaatcaaggaatagacgttttggcggtatagaatcattaccaaatgaatcttttgaagattctcaatattcttcctaac

SEQ ID NO: 241821 - DNA, 679 bp, Unknown
  Bacterial polypeptide expressing nucleotide sequence isolated from the Sargasso Sea
tatgaattcattgcaacatgttgctattatcatggatggtaacggacgttggggaattaaaaaaaaaaaatcaagaaattttggtcacaaagcaggtttagaaactgtagaaaaaataattaaatcatcgattaaaaataaaataaaatatttaacactttttgcattctcaacagaaaattggaaaagacctaaaaatgaaataaaatttttatttaaattattagatagttttatagttaaaaaaataattgaatttaaaaaaaataatataagattaaaaattataggagatattagtaattttaataaaaaacttaaaaaaaaacttaacgattcagaaaaaataacgttaaaaaacaaaaaacttcaagttaatctagcactcaattatggatctaaagcagagattgttagagcattcaaacaattaaataaaaaaagaattaatataaatcttaaaaacttagaaaaaaatctatacaccagtagtatacctgaccctgaaattttaataagaactgggaatacacgtagattaagcaattttttactatggcaattagcttatacagaaatattctttgagaaaaaactttggccagattttaatgaaaaagattatactaaaatattaaataaatataaaaaaactaaaagaaattttgggaatatttga

SEQ ID NO: 241822 - DNA, 721 bp, Unknown
  Bacterial polypeptide expressing nucleotide sequence isolated from the Sargasso Sea
atggctataaaaaatcaaaatgctaatctaaaaaatgtagccatcattatggatgggaatggaagatgggccagaaaaaattcattaaaaattagtcagggacataaaaaaggagtccaaatagttagagagatcgtagaggaatctattttgcagaatattaactctttaacaatctatgcctttagctctgagaactggcaaagaccaaaatcagaaattaatgcaattaaaaaattagttgtagatgctataaatgatcaagttcctgagctcaaagaacaaaaagtaaaattaaaattttttggacatactgaagactttggtgaaaaggttattaaaaaaattaaatatgctgaatctgagacattttgtgaagattacaaattaaatctaaatgttgctcttagttatggcggaaaacaagatatattggacttggtaaagaaaattagtaaagaggttttcgataaaaaattgaacatagatgatattgatgaaagcaaaattcatgagagttcatgtgcgcctgttaatgaaatagatcttctcatcaggactggtggcgacaaaagaattagtaattttttactttatcaaattgcatatgctgagattatgttcattgataaattttggcctgaattctctaaaaaagatttcaaagaatgtgtaagtaatttccaaaaagtgagtagaagatttggtaaacgagtataag

SEQ ID NO: 241823 - DNA, 763 bp, Unknown
  Bacterial polypeptide expressing nucleotide sequence isolated from the Sargasso Sea
atgacttcatcacaaaataatcatccagagacaatccctaatcagccaaaacatgttggcatcattatggatggcaatggaagatgggcaaaaatcaggggcaaaagaaggatattcggacatgaagctggtgttcttaaggcaagagagttggttgaaaccgctgtaaaaattaagcttgaggcattgacactctatgcgttcagttctgagaattggtctcgaccaaaaaaagaagtcagcggtttaatgagtctttttgaaaagactattgaaaaatatacaagtttattgattgataacaatgtgcgattcaaaaccgctggcgatccatcaatgttgcctgatatcttgaaacggaaattagagcagatggagtccatcacatcggagaatagtggactaaaattgactctagcaattgcttatggtggccaacaagaaatcataaatggaatcaaaaaattaattgatgatcatgacaatcagataattgatgtaaatgatctgacagttgaatcatttaatgaatatctatcattcaatgatcttccagagctagatttgataatcagaacctctggtgagactagactgagtaactttatgctatggcaatcagcttactctgaaattcattttacagagacattatggccaaactttgaggagcaagagtttttagaaattcttcaaacgtactctctgtcagagcgaagatttggcaatgtcgatgaagatactgaactaaaggaagcttaaa

SEQ ID NO: 241824 - DNA, 766 bp, Unknown
  Bacterial polypeptide expressing nucleotide sequence isolated from the Sargasso Sea
atggtgacaccaaagtttgtttattcgttatatgaaacaaggcttcaaaataatttaaaaaacgagactcttccaaaacatattgggatcatccatgatggacacagaaggtatgcaagaagagaaaatttgttaagttacgaagtttcttaccgaattggaatggtccgatttaaagagtgtctggcttggtgtgacgagctaggcattgacaatataacaagctggcttttatctaaagagaatttatccagacctgaagatgaacttaactcttattaccttgtactaaacgaattgttcgaagaacttttaattgatgatcttgttgataattttaaaattaattttgttggcagcatagatcttcttcctgattatttgcaaaattcaattaaaaaacttaaagaagtcaggggtggaggagaaaagttattaactattgcgcttggttatggaggaaggcaagaaattgttgacgcaatgaaaagtttactacaagaaaatcaagaattagaaattcaagatttaataaaaagcattaacgacgaacaaattagagaccatctttattcaccaaattcacctgacatcgatctaattattagaacaagtggtgagtcaagactttcaggatttttattgtggcaaagcgcttattcggaagtagtttttcaagatgtttattggccagagttcagaaagattgactttttaagatgcttaagggagtacgttcaaagagatcgtagatttggtaaatgaa

SEQ ID NO: 241825 - DNA, 766 bp, Unknown
  Bacterial polypeptide expressing nucleotide sequence isolated from the Sargasso Sea
atggtttctccaagatttatctactcactatatgaatcacgtcttcaaaaaggacttccaaaaactgaattaccaaaacatattggactgatacacgatggacacagaaggtatgctcgaagagagaaccttttgagctacgaagtttcatacaaaataggaatggttagatttaaagagtgtctttcatggtgtgatgagttaggaatagactatgtaacaagctggttattatcaaaagaaaacttatcaagaccagaagaagaacttgaaccttactttactgttctaaatgagctttttgaggaactaatcatagatgatcttgtcgataattttaaaattcaatttattggtagtattgatcttcttccagattatttaaaagagacaataaaaaaacttcaagaagttagagcaggaggagagaaaacaataacaattgctcttgggtatggaggtaggcaggaaattctagatgctataaaaagtcttgtgatagaaaataaagaaaaagacttagaagaattagtagaagagataaatgatgagcagattagagagcatctatatttacccgatgcacctgatattgatttaataattagaaccagtggagaatccaggctttcaggatttttactttggcagagtgcttactcagaatttgttttccaagacgtttattggcctgaattcagaaagattgactttttaaggtgtttgagagagtatgttcaaagagaaagaagatttgggaaataac

SEQ ID NO: 241826 - DNA, 829 bp, Unknown
  Bacterial polypeptide expressing nucleotide sequence isolated from the Sargasso Sea
atgtcatccacagtggaatttgatccgcaatctaggtcgactgagcaggatgcttgtgctcagacaagcttaccggaggtattacccgaactcgttaaacagtcattacctaaacatgttgcgattattatggatggtaatggacgttgggcccaaacccagggcaaaccacgagtgatggggcataaagccggcgtaaaggcggtgagacgtgcggtgagtgcggccagtcagttagggatacaatcgctgacgctatttgcgttttccagcgagaattggcgtagacccgataaagaagtcagcttgctgatggaattgttttttaccgtgttacaacgggaaattaagttactcgataagaaccaagtcagattgaatatcatcggcgatatcagccgtttttctgcgcgtttacaaaaacaaattcgtgccgcagaagaaaaaaccgcaggcaatagtggattgatattgaatgtagcggccaattacggtggccgttgggacatactgcaagctgcgcaaaagttagctgaaaaggtggaaaatggcgaaatgaccagcagtcagttcaccgaagaagccttgagtgaacatttgtgcatgcaaaatcagagtgaagttgatttaatgatccgtacgggtggggattaccggatcagcaattttgtgctctggcaggctgcctatgctgaattggtgtttatggacaccctttggcctgatttcgatgaacaggcttttcatgaagcgattgctacttttgccagtcgccagcgccgttttggtttgaccggaagtcaaattgatgagatgcgcgcattgtaaa

SEQ ID NO: 241827 - DNA, 671 bp, Unknown
  Bacterial polypeptide expressing nucleotide sequence isolated from the Sargasso Sea
tggggctaattcacgatcccttcctcgcattgcagggcataaagaagggattaattcggtcagagaaataacgcgtatttgtggtgaaattggtgttaaatatttaacactatatactttttccaccgagaattggaaaagaccaccaatggaagttcgtgctctcatgacacttttactaaaaaccattaatattgagattatagaattaaataaaaataatgtaagatttacaattattggagatttaggtgttttaccttcagatacaagtatggctttacaaaatggaattgaactcaccaaagagaacgatggtttaaatctctgtttagcattgaattacggaagtcgtcaggaaattattgaagctataaaactatttgcaattcaggtaaaggaagaatctatcgaaccacatgacattacagagaataaattttctcaattattatatacaaaagacatccctgaccctgatctgttaattagaacaagtggagaatgccgtttaagcaactttctactttggcaaagtgcttatacagagatatttatgacagataccctttggccagcatttagagaaaatgaattgatggatgcaattttggattttcaatctagagaacgtcgttttggaaaagttagtgaacaggtaaattcgtaat

SEQ ID NO: 241828 - DNA, 727 bp, Unknown
  Bacterial polypeptide expressing nucleotide sequence isolated from the Sargasso Sea
atgtctaataaattagtagataataatataccagctcatattgcaataataatggatggaaacggtaggtgggcaaagacaaattcacttccaaggattgcagggcacaaagagggtataagttctgttagagcaataactaagaaatgcgatgaaattggtgtaaaatatttatctctttatactttttcttctgaaaattggaagcgaccaaaaaatgaagtaaaggcgttaatgcgtttattattatctacaataagacgcgagattaaagatttaaataaaaataatgtacgtttaatgacaataggaaatttagaagatctccccaccaatgctaggaaaggaatggaagaaggtttagagaaaacaaaaaataattccggattgaacttaattcttgctttaagttatggtagcagaaatgaaatattacgaatggtaaaaaatattgcaataaaatctatgaatggtgatttagatccaaataaaattaatgaagacaatattatacatgaattagatacatcaaaaattcctgatccagacttattaattcggactggaggtgaatttagattaagcaattttttactttggcagattgcatattctgaaatttatgtaacaaaaaaatattggccagagtttcgagaaaatgaattatctaaagccataaaagaataccaaacacgtgatcgtcgttttggaaagatttttgattaat

SEQ ID NO: 241829 - DNA, 466 bp, Unknown
  Bacterial polypeptide expressing nucleotide sequence isolated from the Sargasso Sea
atggccataataatggatggaaatggtcgttggggtttaaaacataaaaactcaagaaattcaggacataaagaaggcttaaaaaccgttgagatggtcataaaatattgcataaaaaaaaaaattaagtttcttacattgtatgcattttcaactgagaactggaaaagacctttaaaagaacgaaattatttgtttagacttttagaaatttacttaatagagaaattggagaaattaaacaacgaaaaaataaagattaaaattttaggagaaaaaatattttctaataaacttaataatctactagattttgctgaaaaaaaaacggttagaaatacaaaacttcagataaatctggcccttaattatggatctaaaaaagaaatagtatatgcttttaataagttgagcaaaagaagtaaaatttcagaaaatgatattaataataatctttatacaaaaa

SEQ ID NO: 241830 - DNA, 763 bp, Unknown
  Bacterial polypeptide expressing nucleotide sequence isolated from the Sargasso Sea
aatgagttcatctcaaaatacacacatagagaaaatccccaatcaaccaaaacatgttggaatcattatggatggcaatgggagatgggcaaagctcagaggtaagagaaggatatttggtcatgaagcaggcgtccttaaggcgagagagctcgttgaaactagtgtaaaaattgaacttgaggcattgacgctctatgcgtttagctccgagaattggtctagaccgaaaaaagaagtcagtggcttaatgagcctttttgaaaggacaatcgaaaaatatactagtttattgattgacaataatgttcgattcaaaactgctggcgatccttcaatgttacctaagattttaaaaaggaaattggaacaaatggagtctattacatcagaaaatacaggactcaaattgacactagcaattgcatatggaggacaacaagacatcattaatggaattaaacgcttaattgatgatcacgacagtcaagtcattgatataaatcagatgacagttgaatcatttgaagattatctatcattcaaggatcttccagagctagatttgataatcagaacatcaggtgaaactaggctcagtaacttcatgctatggcaatcggcttattcagagattcattttacagaaacattgtggccaaactttgaagagcaagagtttctcgaaattcttcaatcatattcccaatcagaaagaagatttggcaatgttgatgaagacattgaactaaaggaagcatag

SEQ ID NO: 241831 - DNA, 679 bp, Unknown
  Bacterial polypeptide expressing nucleotide sequence isolated from the Sargasso Sea
atgaacaaaattaaccatattgccattatcatggatggtaatggtagatggggtagaaaaaagggtaaatcaagaaattttggtcatttaaacggaataaaagtcatagagaaaattgtaaaagagtcattaaaaataaaaataccaactctaactttttatactttctcaacagaaaattggaaaaggcctaaaaatgaaattagctttttgtttagactcatagatcattattttaataaagaaataagcaatttgattacaaataatattaggataaatattatcggcaacacaaagactttacctaaaaaagtgagatcccgtttattggagtctatgcgcagaacaaaaaaatgtaaaaaaatattagtgaatttggctataaattatggatcaaaagatgaaataataaaagctgctcaaatgactaaagtaaaaaataaaaaaataacggttaaaaattttgaggataatttgtatactaaaggcatttcaaatcctgatattttaatcagaactggaggcaaaaaaagactaagcaatttcttgttatggcaactcgcatactcggaattatattttatagataaactttggccagattttaatataaatgattacagaaaaattattaaaaattttaaaaaagtgaaaagaaattttggaaatatatgaa

SEQ ID NO: 241832 - DNA, 409 bp, Unknown
  Bacterial polypeptide expressing nucleotide sequence isolated from the Sargasso Sea
taagaaaccatttgatagaattaatgatggaatccttatgactaaggaaaacacaggtttaaatttaacattggctttgagctatggaggaaggcaggaactaatctccgccgtaaagagtattataagaaaatttatcgaaaaacctcaagaatacgatatgatagatgaaaaagaatttaagaagcatctttacacaagcgatatgcctgatccagacctgctgattagaacaggcggtgaaaaaagaattagtaattttctactatggcagatagcttacactgaactattcatgacagacgcatattggcctgacttcagagaagaattattgatgaaaagtatttttgatttccaaaatcgacaaagaagatttggtaaaactggagaccaggtttcattatga

SEQ ID NO: 241833 - DNA, 751 bp, Unknown
  Bacterial polypeptide expressing nucleotide sequence isolated from the Sargasso Sea
atgcaaaaatctaaaagagataaggttctttctgataagatcccagaacatatagcaatcattatggatggaaatggtcgttgggctaattcgcaatcacttccacgtattgcaggacataaagaaggaattaattcagttagagaaataacgcgtatttgtggtgaaattggtgttaaatatttaacactatatactttttccaccgagaattggaaaagaccaccaatggaggttcgtgctctcatgactcttttactaaaaaccattaatattgagattatagaattaaataaaaataatgtaagatttacaattattggagatttaggtgttttaccttcagatacaagtatggctttgcaaaatggaattgaactcaccaaagagaacgatggtttaaatctctgtttagcattgaattacggaagtcgtcaggaaattattgaagctataaaactatttgcaattcaggtaaaggaagaatctatcgacccacatgacattacagagaataaattttcgcaattattatatacaaaagacatccctgatcctgatctgttaattagaacaagcggagaatgtcgtttaagtaactttctactttggcaaagtgcttatacagagatattgatgacagatacattatggccagcatttagagaaaatgaattgatggatgcaattttagattttcaatctagagaacgccgttttggaaaagttagtgaacaggtaaattcataat

SEQ ID NO: 241834 - DNA, 883 bp, Unknown
  Bacterial polypeptide expressing nucleotide sequence isolated from the Sargasso Sea
atgggaagggggaggaagagggcaggtcgattaatcgacaacatagccaaggggctcctcagattccgtattttttcggttccagcgagagtcatttccaactcatggctagcttggagtttcgtgtcaagattagatcgagttcgagtcaagaggcaaagggacagaatctcgagaggggagcttccgaagcatgtctccatcatcatggatggaaatcgcagattcgctttgagcctcagtctcgggaccgaaataggacatgtccacggtaaggagaagctgaaggaagtaatggattggataatggatttagggataccatacctgacggtatacgcgctttcgacggaaaatctctctagcagagaggaggatgagttggaggcgctattcgacctatatgtggcaggcctgaatgagatctccgaagatgagaggattcattccaaaggagtcagagttagggttgtagggaggaaagaagaactcccagagagagtgaacgaggcaataagaaatgcagaggataggactggtgattactccaatttcaccttcacggtttgcctagcatatggtgggagggaggagattgtcgatgcagtgaaggaaattgcttccgaccatgcaaccggcgaattgtcattggatcagattaacacgaatgagatctccagacgtctctacgatgcagaaatacctgaccctgatctagttatccgaacaagcggcgaagaaagggtctcaaacttcctactttggcagattgcttactcagagctatacttcactgacgttcactggccttcgttctccaaggcggttctctatgaagcgatagagacataccagatgaggaggagaaggtttggtggatgaa

SEQ ID NO: 241835 - DNA, 736 bp, Unknown
  Bacterial polypeptide expressing nucleotide sequence isolated from the Sargasso Sea
cttgcctcgtcacgtcgccatcatcatggacggcaacggacgctgggcccagaaccgtggcaagatgcgggtctatggccacaaggcaggtgtgaagtctgttcgcgaggcggtaacctttgctgcgcgggccaagatagacgcgctgaccctgtttgcgttttccagcgagaactggcgtcgcccggaaggagaggtcagcgccttgatggagctgttcatgacggtgctgggccgtgaggtgcagaagctgcacagcaacggcatccggctcaaggtgatcggcgataccgctcgtttcagcgagcgtctgcaggccaagattgccaaggcggaggcgctgaccgccaacaatcaggggctgaccctcaatatcgccgccaattatggtggtcagtgggacatcgcccaggcggcccgcaagctggcccgtgccgtggcgagcggggaactggctgccgaccagatagatgaagccatgcttggccgcgaggtatgcatggccgacctgccgccggtggatctgctgatccgcaccgggggcgatcatcgcatcagcaattttgtgttatggcagctcgcctatgccgagctctattttaccccggtgctgtggcctgatttcaacgaggccgagttcagcgaggccgttgcctccttcgtggcccgtgagcgtcgtttcggctgcacgggtgaacagatccgggaattgatcgccgagcaacagaccggctaa

SEQ ID NO: 241836 - DNA, 784 bp, Unknown
  Bacterial polypeptide expressing nucleotide sequence isolated from the Sargasso Sea
ttgagccgacctccggccaccagccacgacaccactccatccaggctctgccctgccgagctggatagccagcagctgcccgcccacgtggccgtgatcatggatggcaacggtcgctgggctaaatccaggggactgccccgggtgatggggcatcgcgccggggtggaagcgctcaagtcaacccttcgtctttgcagcgactggggcatcgctgccctcaccgcttacgccttctcaaccgagaactggtctcggccaggtgatgaggtgaatttccttatgaccctgttcgaacgggtgctgcagaaggagctgcgcacccttgaagacgaacaggtccgcatccgttttctcggcgacctggacgccctaccgctgaaactgcaggagctgattggtgatgccacggagcggaccgctgccaacggcggcattcatttcaacgtctgcaccaattacggcggtcggcgggagctggtgcgagcggcgcagcgtctggcgcgtcaagccgccaacggcgatcttgtgcccgaagacattgatgagaacagcctggcggcggaattgttcaccgccggagagcaggatcctgatctgttgattcgcaccagcggcgaacaccgaatcagcaactttctgctctggcaactggcctatgccgagatccacgtcaccgatgtgttctggcctgacttcaatgccgaggccctgaagcgggcgttgctggatttccaaagccgctcccgccgcttcggaggccttgatccactcacaccatgac

SEQ ID NO: 241837 - DNA, 772 bp, Unknown
  Bacterial polypeptide expressing nucleotide sequence isolated from the Sargasso Sea
atgtcctctccaagattaatttactcaatttatgaaaaccgtttacgtaataaattagttaatgaaagcataccaaaacacatcggattaattcatgatggtcacagaaggtacgcaaggaaagaaggattacttagttttgaagtttcatacaaaataggcatgacaagacttaaggaatgtattggatggtgtgatgaggtaggtattaatttcatcacaagttggcttttatcaagagaaaacttatcaagaccacaagaagaacttgaaccatacttccaagtgcttaatgaactctttgaagaactattaattgatgatgtagttgataactttaaaattgaatttattggatccacagaccttttaccggatttcttacaagaaactattaaacagctaaaagaagttagaggtggagggcaaaaaactttaacaattgccttgggttatggaggtcgacaagaaattctagatgccattaagggattgattgaccaaaatagaaaagatcacaatgattttgatgaattaattgagaatgtaacagatgaccaattacgaaaacatttatactctccggaaaccccagatattgatttaattataagaacaagtggggagtcaaggttgtcagggtttttactatggcaaagtgcttactctgaagtaatttttcaagatgtttactggcctgaatttagaaaaatagattttcttcgttgcctgagagaatactctcaaagagaacgtcgcttcggtcaataaa

SEQ ID NO: 241838 - DNA, 547 bp, Unknown
  Bacterial polypeptide expressing nucleotide sequence isolated from the Sargasso Sea
agaagttgattttcttataaatctttttggcgaagttttaaaaaatgaaattaaagagatacatgaagagtcaacaaaaataaaatttattggagatttaactcctttcccaaaaaatttaaaaaaaataatctctacttcagaatcacttactaaaaacaacaataaatttttatttaatgtttgtgttaactacggaggtagacaagaaatagtaaaagttgcaaaagaactagcattaaaatcttctgctggggaaataaaaccaagcgaaattaatgaagaattatttaattcagagctattaactggagggattaaggatccagagttactaataagaactagtggcgaaaaaaggataagtaattttttattatggcaattagcatattcagaaatttatatatctgaagtactttggccagagtttaatgagcatgaatttcttaaagcaataattgattaccaatcaagaaatagacgtttcggcggtatagaatcattaccaaatgaatcttttgaagattctcaatattcttcctaa

SEQ ID NO: 241839 - DNA, 436 bp, Unknown
  Bacterial polypeptide expressing nucleotide sequence isolated from the Sargasso Sea
tatgaaccctttgaatcatgtagccattatcatggatggtaatggaagatggggtttaaaatataagaagtcaagaaatgctggtcataaagctggattgaatacagtcgaaaaaataattaaagaaacaataagaaataaaattaaatttttaactctttttgcattttctacagaaaattggaagagacctaaaaaagaaataaattacctatttaatttgttagaaaattttttaattaatagactagaagagttagataaaaaaaatatcaaacttaaaatacttggtgtaaaaaatttttcccctaaactcaataagcttttaaacaaatctgaaaaaaaaacatctaaaaatacaaaactgcaaataaaccttgctttaaactatggttcaaaatttgagctaattaatgctttaaaaaatttgaaaaaa

SEQ ID NO: 241840 - DNA, 727 bp, Unknown
  Bacterial polypeptide expressing nucleotide sequence isolated from the Sargasso Sea
gatggctaatttaaacaaagaaaatattccaaagcatgttgcaattatcatggatggtaatggaaggtgggctattgaaaactcttttaaaattagtgaaggacataaaaaaggcgttttaactgtcaaagatatagttgaggaatcagttaaacaacagctatcttctttaacaatttatgcatttagctctgaaaattggaaaagaccaagatctgaaataaatgctattaaaaaattagtgatagatgctattgatgaacaagttcctgatttaattgagcaaaaggttagactaaagttttttgggcatacaaatgatttcggtaatagaattattaaaaaaattgattttgctgaagaaaaaacatttgttaagaagagtaaactagacttaaatgttgcgcttggatatggcggaaaacaggatattgtagatatcacgaaaaaaatatcttcaaatattttgaaaaataaaataaagttgcaagatataaatgaaaaaattgttcatgaatcttcatctgttccagttaaggaaatcgatctattaattagaacaggcggtgataaaagaattagtaactttcttctttatcaaatagcatatgctgaaattatgtttatagaaaaatattggcccgattttagtagaaaagactttataaaatgtttaagcgattttaagaaaattaaaagaagatttgggagaaggaaagttaactaa

SEQ ID NO: 241841 - DNA, 543 bp, Unknown
  Bacterial polypeptide expressing nucleotide sequence isolated from the Sargasso Sea
ttttatcaagagaaaatctatcaagaccgcaagaagaacttgaaccgtacttccaagtactgaatgaactctttgaagagctattaattgatgacgtagttgataactttaaaattgaatttattggatccacagatcttttgccagattttttacaagaaactattaaacagcttaaagaagttagaggtggagggcaaaaaactttaacaattgctttgggttacggaggtcggcaagaaattctagatgccattaagggattgattgaccaaaacagaaacgatcacaatgattttgacgcattacttgagaatgtaactgatgagcaattacgacaacatttatattccccggaaactccagatattgatttaattattagaacaagtggagagtcaaggttgtcagggtttttattatggcaaagtgcttactctgaagtaatttttcaagatgtttactggcctgaatttagaaaaatcgattttctccgttgcttgagagaatactcccaaagagaacgccgcttcggtcaataaa

SEQ ID NO: 241842 - DNA, 403 bp, Unknown
  Bacterial polypeptide expressing nucleotide sequence isolated from the Sargasso Sea
tatgaaccttcttaatcatgtagccattatcatggatggtaatggaagatggggagtaaagtataaaaattcaagaaatgctggccataaagctggtttaaaaatagtagaaaaaattattaagcaatcaattaaaaataaaattaaatatttaactttatacgctttctcgacagaaaattggaaaagaccaaaaaaagaaataaattatttattcaatttacttgaggaatttttattaaataaaattgaagatattcataaacaaaatgtgaaacttaaaatcataggaaaaatgaatttttcaaaaaaattaaataaattactaaagttatctgaaacaaaaacatcaaaaaatacaaaattacaaattaatcttgctttaaattatggctctaaaata

SEQ ID NO: 241843 - DNA, 739 bp, Unknown
  Bacterial polypeptide expressing nucleotide sequence isolated from the Sargasso Sea
ttgacatccaagaaaaacggcgcggttccgcgccatatcgccgtcatcatggacggcaacgggcggtgggccaagcgccgtctgcttccacgtcttgcaggtcacaagcagggcgtggagtccctgcgccgctgcgctcgtgcctgcgtagagcgtggcgtgcaggtgctcacggtatttgcgttttcctccgagaactggaaccggcctcaggaagaggtctcaggcctcatgagcctgctggccaatgccctggccaaggaagttgcgcaactcagccgcgacggcgtgcgcctgtactttgtcggagaccgtcagggtctgagcgacaaggtccgtgagggcctggccgaggccgagcgcatcactgcgcacaacacgcgcctggttctcaatgtctgcttcaactacggtggccgctgggacatcgcgcaagcagcgcagaagctggtggcccaggggctggaactgagtccggagaatctggatagggccatggccctggcgcatgtgcctgatcctgatctgatgatccgcacaggcggcgaaacccgcatcagcaattttctgctttggcaggctgcctacaccgagctgttcttcagcaatgccctgtggcctgatttcgacgaggccgctcttgacgaggccattgccgtgtttggcggtcgggagcgccgtttcggccagacttcagagcagattcaaccatcatctgccgtcaccctgacggcataac

SEQ ID NO: 241844 - DNA, 535 bp, Unknown
  Bacterial polypeptide expressing nucleotide sequence isolated from the Sargasso Sea
tggtctcggccaggtgatgaggtgaatttcctgatgaccctgttcgaacgggtgctgcagaaggagctgcgcaccctcgaggaagaacaggttcgcattcgttttctcggtgacctggacgccctgccgctgaaactgcaggagctgatcagcgatgccacggagcggacggctgccaacggcggcattcatttcaacgtctgcaccaattacggcggtcggcgggagctggtgcgtgccgcgcagcgtctggcgcgtcaggccgccaatggtgatctgatgcccgaagacatcgatgagaacagcctggcagcggaactgttcaccgccggcgagcaggatcctgatctgctgatccgcaccagcggcgaacaccgcatcagcaacttcttgctctggcaactggcctatgccgagatccacgtcaccgatgtgttctggcccgacttcaacgccgaggccctgaagcgggcgttgctcgatttccagagccgctcccgccgcttcggaggccttgatccactcacgccatgac

SEQ ID NO: 241845 - DNA, 805 bp, Unknown
  Bacterial polypeptide expressing nucleotide sequence isolated from the Sargasso Sea
gatgagtttaggaaaaataattgacaagaaaaataacgacttatctaagagattagatatgcagaaagttccacaacatattgcaataattatggatgggaatgggagatgggcaacaaaaaaaggcttacctcgtacatatgggcacaagagaggagtgaatgttttaaaagaaatcctaaaagcatcaaaaaaattaggttgtaaagttcttactgtttatgctttttcaactgagaattggacaaggccaataaaagaggttgacttccttataaatctttttagagaagttttgagaaacgaaattgaagagataaatgaagaatcaataaaaattaaatttattggggatctaactcctttcccagaaaatttaaaaaaaataatctctagttcagaatcactaactagaaacaacaatgaatttttattgaatgtttgcgtcaattatggtggcaggcaagaaatagtaaaagttgcaaaagaactagcaataaaaactttttcaggtgaaataaaaccaagtgaagttaatgaagaattatttaattcaaagctattaactcgaggcattaaagatccagaattacttattagaactagcggagaaaaaaggataagtaattttcttttatggcaattagcttattcagaaatttacatatctgacgtactttggccagacttcaatgagattgaatttctgaaagcaataattgattatcaatcaaggaatagacgtttcgggggtatagaatcattaccaaatgaatctcttgaagcttctcaatattcttcctag

SEQ ID NO: 241846 - DNA, 745 bp, Unknown
  Bacterial polypeptide expressing nucleotide sequence isolated from the Sargasso Sea
atgataaatcattcctctaaaaatgaagtaaaaaaagaaatctcgcatattgctttaatcatggatggtaatggaaggtgggctagctcaagaggattacctagatatgaaggtcatgttaaaggtttaagaacattaagaaaattacttcgtgatctaaaagattcaaaattagattatttaactttatttaccttttcaattgataattggaaaagaccaaaagaagaaacatcaaaattaatgcagttattaagaaagtttatttcaaatgatctttctgagttacataataataatgttagaataagagtaataggcagtagagctgagattcctagagatatagttgatcttattaagggagcagaaacacttaccgctaataatactggtttatatcttcagatagcctttaattatagtgggagacaagaaattataaatgctacaaaaaaaattgctattgcttcttctaaaggtgagatcgaccctaataagattaataatacaatttttgagaacaatttatattccgctggtgtacctgacccagatttaattattagaactggttcagagaaaagaatatcaaacttcctattgtggcaattatcttattcagaagtttattttgaagaatgtttatggccagattttgataaaaataagttagatattgcaattagtgattataaaagtagatcaagaaggtttggagatatccttaatgagtatagatgaa

SEQ ID NO: 241847 - DNA, 673 bp, Unknown
  Bacterial polypeptide expressing nucleotide sequence isolated from the Sargasso Sea
gatgtctgagcctaagacagttgccatcattatggatggaaacaggagatgggcaaaaaaaaataatttaccaataccgtcaggccatagaaagggcattgaatcgcttattgagattgtaaaaacagcaaaaaaattaaagatagaaagactcatagtctatgctttttctaccgaaaattggtctagagataattttgaagtaaatgctttaatgaatcttattaactttggtgtagatgtaaaattaaacgaaataaaagaaaatggcatcaagttagatttcattggtaatttagctgatttaccagagaaggcaaaaaaaggcatagataagtgcattaatgaaactaaagatttatcagaacttacattaacggtagctttaaattatggagctatttccgacattctagaagccgcaagaactatcaataaaaataatatcgaactcaatgaagaaaattttttaaatgcaacacaaattgggggtcaagaagttgatatttttataagaacagggggggatagaagattaagtaactttctgttggccaatattggttacactgaactattcttttcagataaactgtggccagaattttcgaataatgatttcattaagatcttagacgaatttagagaaaggcagaggagatttggtaaatga

SEQ ID NO: 241848 - DNA, 700 bp, Unknown
  Bacterial polypeptide expressing nucleotide sequence isolated from the Sargasso Sea
aatgaatcttaaggatataaatcttaatcacattgccataattatggatggtaatggtagatgggcaaccaaccagggattagagagaacagcaggacatgctgctggtgaattctccctttcacgttcaattgattgggcacttaaaaacaatctgcaatggctaacggtttatgctttttcaactgaaaattggtcaaggtctgatgatgaagttgattttttaatgttttttaatcgtgatattttaatcaggagaagagaagaatttaatgataaaggtgttcgatttcattttattggtgatttagaagacaatagaattcctgatgaaaataaattcctgatgaatgaaactgaacaattgaccaagaacaataaaaagttgaatcttgtatttgcatttaactatggttcaagaaaagaaattcatgatgcttatacaaaattaaataaaaattctattgatcaattagatgaaaaatcatttcgagctaatttattattacctgaaatgccagacccagatttattaatacgtacagcaggggagaagagagtaagtaattttcttctctatcaattaagctacactgagcttatgtttgtggatactctatggcctgattttgatgaaaaagaattagattcggccgttgatgaatttcagaatagagtaagaaagtatggaaatgcctga

SEQ ID NO: 241849 - DNA, 727 bp, Unknown
  Bacterial polypeptide expressing nucleotide sequence isolated from the Sargasso Sea
atggaaggtagtcaaactgaaagcttacctaaacatgttgccataataatggatggcaataaccgatgggcatcagagaaaaatctccccggggttgcaggacataaaaaaggtgttgaaagggcaagagagtcagttgaatatgctgtccaaagaggtctatctacacttactttatttgcttttagtagcgagaactggggcagatcatcagaagaagttaacttgctgatgcagctattaaatactgctcttcatgaagaggtgcctaatctagttaaaaattccgtccagctaagctttataggtgatttgtctcaatttgatcaggagcttatagagcagatgaaagaatcagaaagattaacttattgcgataacgaaagaaaaaaattggatttagttgttgctgcaagttatggaggaagatgggatattgtcaacgcaataaataaacatctagattcaggatcaaatgaagaacttactgaggaaagttttgatgaatttctatcgacatcaaaatttacagatcctgatttatgcattagaactggcaatgaacttagaataagtaattttttgttatggcaattagcgtattctgaactatatttcccggatgtgctttggcctgactttgatgatcaacacttcgataacgcactgaaagaattttcaaaaagatcaaggcgtttcggagacaaatctaactttcagttgtaaa

SEQ ID NO: 241850 - DNA, 691 bp, Unknown
  Bacterial polypeptide expressing nucleotide sequence isolated from the Sargasso Sea
ttgatcatggacggtaatggaaggtgggctagctcacgaggactacctagatatgaaggccatgctcagggattaagaacattaagaaaattacttcgtgatctaaaagattctaaattagattatttaactctatttaccttttcaattgataattggaagaggcctaaagaggaaacatcaaaattaatgcaattattaagaaagttcatttcaaatgatctttctgaattgcataataataatgttagaataagggtaataggcagcagaagtgagattcctaaagatattgttgatctcattaatggagcggaattacttactgttaataatactggtttgtatcttcagatagcctttaattatagcggaagacaagaaattataaatgctacaaaaaaaattgctattgcttcttctaaaggtgagattgatccaaataagattaacaatacaatttttgagagcaatttatactctgcaggtgtacctgatccagatttaattattagaactggtttcgagaaaagaatatctaatttcttattgtggcaattatcttattccgaagtttattttgaagaatgtttgtggccagattttgataaaaataaattagatatagcgattaatgattataaaagtagatcaagaagattcggaaatgtccttaatgagtatagataaa

SEQ ID NO: 241851 - DNA, 712 bp, Unknown
  Bacterial polypeptide expressing nucleotide sequence isolated from the Sargasso Sea
atgaatacacccaatcatatagcgataattatggatggaaatggaagatgggctgaacaaaaaggaatgcctagagaatttggtcatcaaaatggagttaggtctgtaaaaaaaattgtagaggaagccaataagcataaagtaaagtatttaacattatttgcattctctgttgagaactgggaaagacctagttatgaggtagagacattaatgagacttttagtagaaactcttagagatgaatttgaggatttatttagtaacaatataagattgaatgccataggtgatgttaaatcacttcccaacgaagtaaaatatgaattagacaaaattattaataatactaaagaaaactcaggaatgatattaaccttagctttgagttatggtggaaaacaggagatttttaaggctgtcaaagagatttcagaaaaagttaaaaatgagacaatttgtctagataattttgatgattccatcattaatgaccatctttacactaaaaatttaccagatgtagatttgctaattagaactagtggtgaacagcgaattagtaatttcttactatggcaaatagcatatgctgaattatatttcactgaaacatattggcctgacttttccgaagaagattttacagatgcaattattgaatatcaaaaaagagaaagaagatttggaaaaactagtaaacagctttagg

SEQ ID NO: 241852 - DNA, 727 bp, Unknown
  Bacterial polypeptide expressing nucleotide sequence isolated from the Sargasso Sea
atggcagatagccaaaacaataacaaatattacccaaagaacatcggaataattatggatggaaatggaagatgggcgataagaaattctttaaaaataagtgagggacataaaaagggtgttggtgttgttagagatatagttgaagaggctgtaaagagaggtattcaatcgctaactttatatgcatttagttctgaaaattggcaaagaccaaaaagagaaataaatgcaataaaaagattagtaattgaagcaataaatgaacaagtgcctgagctcaaggaaaagaaagttaaattaaaattttttggtcacttagatgattttggagaaaaaattcaaaacaaaatattctttgctgaaaacgaaacctgttttgaagaagcaaaattaaatctgaatgttgctctaggttatgggggccaacaagatattgttgatatcgttcataaagtctcagaagaagtttcatctgggaatttgaattcaaaagatatttcaaaagaaacaattaacagctattcatctgtgccagttgatgaaatagatcttttgattaggactggaggagataaaagaattagtaactttcttttatatcaaatagcgtatgctgagattatgtttatagataaattttggccagattttactaataatgattttgttaattgtttagataattttaaaaatgtgagcagaagatttggaaaaagaatataag

SEQ ID NO: 241853 - DNA, 733 bp, Unknown
  Bacterial polypeptide expressing nucleotide sequence isolated from the Sargasso Sea
atggcagaaagtaagaacccaacacttaaacttccaggaataaatgctgcaattattatggatggtaatggaaggtgggcaaaaaaaaatgccttaagcgtaacatcaggtcatgaaagaggcgtagaagttgtaaaaaaaatcgttgagtctgctgcaaaagctaaattagagtctttaagtttatatgcatttagcaccgaaaactggtcgcgtcccaaaaaagaaattctaggaataaagaaacttattatcaaggcaatagactctcaattatcagaattaattcagcaagaggtaagattaaatttttttggagattattcttcatttggaaaaacagtgattgaagcaatatttaaagctgagagatctactgcatttgaagacccaaggcttaaattaaatattgctcttggttatgggggtcgtgcagatattattcaagctacaaagcttatagctcaggaaatcaaattagataaactctcattggaggaggtatcagatgagactatttttaaatttttaaaagctccgataagtgatttagatctacttatcagaactggcggtgatcagagaataagtaattttttgttatatcatcttgcttattctgagatccaatttactgatacactttggccagattttacagaagaggaatttttgcaatgtttagaagcattttttaatacggagaggcgatttggcaaaagaactatataaa

SEQ ID NO: 241854 - DNA, 739 bp, Unknown
  Bacterial polypeptide expressing nucleotide sequence isolated from the Sargasso Sea
atggcggaccaagctccagatttcataccgcgtaatttaacattacctaaacacatagggtttatcatggatggtaatggaagatgggctaatagccatggattacaacgagaagacggtcacaaatacggagttgattcaatagaaaatttgatccaacatatgtctgatgttggaatccaatatgtaactctttacgcattttcaaccgaaaactggaataggcccaaatcagaagtcacttccattttcagcctacttaggtctactctaagcaataaactcgaacgtttaatagaagctaacattcaagtacgacatataggaaatttgaaaggtattaacaacaccacacgcatagcaattgagcgagcgattgatgcaacaataagtaatacaggaatgacagttatagtagccattaattacggcggaagaaaagaaatagtagatgcagtgaagaccattattgcggctgacatcaaaccggaagaaataacagagactacgatagaagaacatctgtacacctcaagtatccctcatccagatttgatcatacgaacaggaggagaatttaggactagtaattttcttctgtggcaatcagcatattcggaatactatataacagatacattatggcccgatttcacagtggagcatcttaaacaagccatactatcctatcaaaccaggcaaagaagattcggtcgagtgaagtcggatgaagactagg

SEQ ID NO: 241855 - DNA, 379 bp, Unknown
  Bacterial polypeptide expressing nucleotide sequence isolated from the Sargasso Sea
gaaacgataaacaaacttcaagaagttagagcaggaggagagaaaacaataacaatagctcttggatacggaggtaggcaggaaatattagatgcaataaaaagccttgttattgaaaataaagaaaaagatttagaagaattagtagaagagataaatgatgagcagattagagaacacctatatctacccgacgctcctgatattgatttaataattagaactagtggggaatcaaggctttcaggatttttactttggcaaagtgcttattcagaatttgtttttcaggatgtttactggcctgaatttagaaagattgactttctaaggtgtttaagagaatatattcaaagggaaagaagatttggaaaataac

SEQ ID NO: 241856 - DNA, 265 bp, Unknown
  Bacterial polypeptide expressing nucleotide sequence isolated from the Sargasso Sea
aatgcttctaaaaccattaaaaaaaataaaaccaaattcactattaaaagatttagaaaaaaatttatatacaaaaggtattcctgatccagatcttttaataagaactgggggtaaaaaaagattaagcaattttttattatggcaattgtcttattctgaaatatactttattaataaattatggcctgactttaatgtaaaagattttaataaaattttaaaccattttaaaaaagtgagaaggaattttggaaatatatga

SEQ ID NO: 241857 - DNA, 533 bp, Unknown
  Bacterial polypeptide expressing nucleotide sequence isolated from the Sargasso Sea
tagacctaaaacagaggtcaatgcacttatgagtttattgttaagcactattaaaaaagaggtagcggagcttcataaaaataatgttaggttttctactattggcgatctttcatttctaccaaaaaatactgaaaatgggttaaaagaggggatggatttaacaaaaaataatactggtctaaacttaattcttgcattgaattatggaagccgccaggaaataattgattctgtcatcaagatatctaaaaaggtaaagttaggcgaattaaatagtaacgaaattgatgaagccctattctcatcatttttatatacaaaaagttatccagacccagacttattaattcggactagtggtgagttaaggataagtaattttcttttatggcaatgtgcttatactgaaatgtatttaacaaatacatattggccgtcatttagagaagatgatttatttaaagctattttagattatcaaaatagagaacgtagatatggcaagattagcgagcaattcagtagttaaa

SEQ ID NO: 241858 - DNA, 706 bp, Unknown
  Bacterial polypeptide expressing nucleotide sequence isolated from the Sargasso Sea
aaatgataagtctttaagacatcttgccataatcatggatggcaatggaaggtgggcactaaataaagatttacctcgtacagcaggtcatgctgcaggtgagcattctctatcaaaaactatagattgggccatagctaacaaactagaatggttgacagtctatgctttttctactgaaaactggctaaggtctgaagaggaagttgattttttaatgtttttcaacagagacatattaattcgaagacgagaagaatttaatcaaaagggagtcagatttaaatttttaggtgatttgacagattcaaaaataccagaagaaaataaagacctgatgaaagaaactgaagaaataacaaaaaataataacactctaaatcttgtgtttgcatttaattatggatctcataatgaaattcacaatgcagttttaaatttacacaatgaaaatattaatgaaaatcttgaattgggtgatatagaaagtaatttctataatttttttcagtacccagaagttcctttccctgatgctttattaagaactgcaggtgagaaaagaattagtaattttttgctatatcagctttcatattctgagcttatttttattgatgctttgtggcctgatgtaaatgaagacatattagacgatgtcttactagaatttaacaaaaggaatagaacttatggaagaaactaa

SEQ ID NO: 241859 - DNA, 727 bp, Unknown
  Bacterial polypeptide expressing nucleotide sequence isolated from the Sargasso Sea
atgtctattcagaatttaccaattcatgtatccataatcatggatggcaataatagatgggctgcaaaaaaaggtttgcctggggtttcagggcatgagcaaggtgtcaagaaagctagactagcaatagaattagctgtagaaaagaaaattaaaacactaactctatttactttcagtagtgaaaattggaatagatctcaagaagaagtagatcttttaatgaaactattatctaaagctcttaaagaggaagttccgaatctaatagagaataaagtaagcttgaaattcattggtgacttaagcaaattcacaatagagctgcaggatgagatgaaggaatctgaaattcaaacccatcaagaggaaaaggataaacagttggatttattgattgccgcaagttatggcggtcgctgggaaatattagaaacggtaaacaaactaagatctctggaactaaataaagaagtagatgaagagttattttcgctacatacttccctatcaggtttctctgacccagatctctgtataaggactggaggagagaaaagaataagtaactttttgttatggcatttagcttatacagagctttttttcacggatatcttatggcctgattttgatgaagaagagtttgatagagcgctagaagattactctattagaaaaagaaattttggagataaatctaactttcagggcagtaatggataag

SEQ ID NO: 241860 - DNA, 495 bp, Unknown
  Bacterial polypeptide expressing nucleotide sequence isolated from the Sargasso Sea
aatggaaggtagtcaaactgaaaccttacctaaacacgttgccataataatggatggcaataaccgatgggcattagataaaaatctccccggggttgcaggacacaaaaaaggcgttgaaagggcaagagagtctgttgaatatgctgtccaaagaggtttatctacactcactttatttgcgtttagcagcgagaactggggcagatcatcagaagaagtaaaccttctgatgcagttattgaatagtgctcttcaagatgaggtgcccaatcttattaaaaattcagtccagctcagctttattggtgatatgtctaaatttgatcagaaacttatagagcaaatgaaagaatcagaaaaactaacttattgtgattccgaaagaaaaaatttagatttagttgttgctgccagttacggcggaagatgggatattatcaaatgcataaataaacatctagattcagggtcaaagaaagacttactgaggaa

SEQ ID NO: 241861 - DNA, 709 bp, Unknown
  Bacterial polypeptide expressing nucleotide sequence isolated from the Sargasso Sea
atgattcccaagcatatagctataattatggatggaaatggtaggtgggccgaggaaagaggtatgacaagaatatttggacatcaaagtggagtttcagcagttagaaaaatagttgaagctgctaacaagtttaatattaaatatttaacgctatttacattttctttagaaaattggaatagaccacaaagtgaaattgatacattaatgggtcttttagttcaaactcttaaagatgaatttgaagatatattaaaaaacaatataaagctcaatgctattggtgagttgaacacactcccagatgaagtcagaaatgagttacactcaataattcatggcacaaaggataacacagggatggtattaactcttgctttaagttatggaggaaaacaagagatatttaaggcagtcaaagaaatttcagataaagttaaaaatgatgtaatatgtcttgataattttgatgattcattaattaatgaccatctttacacaagtaatttacctgatgttgatcttctaataagaacaagtggagaacaaagaattagcaattttttactttggcaaattgcatatgctgaattatattttacagatgtttattggcctgactttactgaagaagatttagaaaaagctattgttgaatatcaaaatagagaaagaagatttggaaaaacgagtaaacaactataaa

SEQ ID NO: 241862 - DNA, 193 bp, Unknown
  Bacterial polypeptide expressing nucleotide sequence isolated from the Sargasso Sea
tcctgatctatgcattagaactggcaatgaactaagaataagtaattttttgttatggcaattagcatattcagaattatatttccccgatgtgctttggccggactttgatgataaacacttcgataatgcactcaaagaatattcaaaaagatcaaggcgtttcggagataaatctaattttcagttataa

SEQ ID NO: 241863 - DNA, 688 bp, Unknown
  Bacterial polypeptide expressing nucleotide sequence isolated from the Sargasso Sea
tatgattaaaaactcaattaatcatcttgcaattataatggatggtaacgggagatgggctaaacataaaaatcaaccgaggacttttggccacaagtacggtgcgcaaaccgcaaaaaaaattataaacgattgtgtaaaaaaagaaattcctttcctcactctttacactttttcaaaagaaaattggtctagacccaaagaagaaattgatacattaatgattttgctttctacaatgctaaagaacgaaactgaaaacatgttaaggaacaatataaagtttaatatcgttggaagaatagaagatttaccagaaaaaacaagggattgggttttaaccacaattgagaaaacaaaaaataacacgggattaactctaaccctagcgctaagctatggaggaaggcaagaaattgtagatgcgtttaatgctattatgaataaagagataaaaattattaatgaagaaattcttaaaaatcacttatattgccctgatttgccagatccagacatcatcattaggactggaggtgagtacagactaagtaattttttactttggcaatcagcatatgcagaaatttatatatgtcaaaaaaattggccagattttgatgaaaacgatttggaaaaagctttagaagagtatgaaaatagaaacagaacatttggtaaagtttag

SEQ ID NO: 241864 - DNA, 829 bp, Unknown
  Bacterial polypeptide expressing nucleotide sequence isolated from the Sargasso Sea
gatgtcatccacagtggaatttgatccgcaatctaggccgactgaggcggatgcttgtgctcagacaagcttaccggagatattacccgaactcgttaaacagtcattacctaagcatgttgcgattattatggatggtaatggacgttgggcccaaatccagggcaagccacgagtgatggggcataaggctggggttaaagcggtgagacgtgcggtgagcgcggccagccagttagggatacaatcgctgacgctatttgcgttttctagcgaaaattggcgtagacccgataaagaagtcagcttattgatggaactgttttttaccgtattacagcgggaaattaagttactcgataaaaaccaggtcaaattgaatatcatcggcgatatcagtcgcttttctgcgcgtttacaaaagcaaattcgtgccgcagaagcgaaaactgcgagcaatacgggattgatattgaatgtggcggccaattacggcggtcgttgggacatactgcaagctgcgcaaaagttagctgaaaaggttgaaactggcgaaatgaccagcagtcagttcactgaagaagccttgagtgaacatttgtgcatgcaaaatcagagtgaagttgatttaatgatccgtacgggtggggactaccggatcagcaattttgtactctggcaggctgcctatgctgagttggtgtttttggacaccctttggcctgattttgatgaacaggcttttcatgaagcgattgccacgtttgccagtcgccagcgccgttttggtttgaccggaagtcaaattgatgagatgcgcgcattgtaa

SEQ ID NO: 241865 - DNA, 688 bp, Unknown
  Bacterial polypeptide expressing nucleotide sequence isolated from the Sargasso Sea
aatggtagaaaatactattccaaagcacgtagcaattattatggatggcaatggaagatgggcatcagaaaaaaatcttcatagatcaaaaggtcatattaagggttatcaaaatataaagcccattacacttcatgctaaaaaattaggcattaaataccttactcttttcgcattttctacagaaaattggaaaagatctaaagaagaagttggttttataatgaatcttgctttagaagtaataattaaagaatcaaatgaattaaatcaaaataatattaatattactcatttaggaagtaatgaaaatttacctaatgaaatgcttgcaaaaataaacaaatcagaaaaattgactgaaaataatgatgatttttttttatcggttgcatttaactacggaggaagaaatgagattattaatactgtaaacaaactactggaaagtaatattcagaaaattaatgaagatatattttcgtctaacttgatgactaagaattatccagatccagatattataatccgaactggtggtcaaaaaagactttcaaattttctactttggcaatctgcttattcagaacttttttttcatgaaaaattttggccagatttcagtacagatgacctagatatgattattaaaaattattcattaagggaaagaaattttggaaattag

SEQ ID NO: 241866 - DNA, 733 bp, Unknown
  Bacterial polypeptide expressing nucleotide sequence isolated from the Sargasso Sea
cgtttacgtaataaattactcaacgaaagcctacctaaaccacatcggattaattcacgatggtcacagaaggtacgcaaggaaagaaggattacttagttttaaagtttcatacaaaattggcatgacaagacttaaggagtgtattggatggtgtgatgaagtggggattgatttcatcacaagctggcttttatcaagagaaaacttatcaagaccacaagaagaacttgaatcttattttcaagtgctgaatgaactctttgaagagctattaattgatgacgtagttgataactttagagttgaatttattggatctacggatcttttaccggatttcttacaagaaactattaaaaagctcaaagaagtaaggggtggagggcaaaaaactttaacaattgctttgggttatggaggccgacaagaaattctagatgctattaagggattgattgaccaaaatagaaacgaacataatgattttgatgaattacttgagaatgtaactgatgagcaattacgaaaacatttatactcaccgaaaacaccagatattgatttaattattagaacaagtggagaatcaaggttgtcaggttttttattgtggcaaagtgcttactctgaggtaatttttcaagatgtttactggcctgaatttaggaaaatagactttcttcgttgcctgagagaatactctcaaagagaacgccgtttcggtcaataa

SEQ ID NO: 241867 - DNA, 742 bp, Unknown
  Bacterial polypeptide expressing nucleotide sequence isolated from the Sargasso Sea
atgagtactaaagaattagatacagataatatcccaaaccatatagcaatcatcatggatggtaatggaagatgggctaaagcgaaagggcttccaaggatagctggccacaaagaagggattaattctgttcgtgatattacaagaatatgcggagagataggggttaactacttaactctttatactttttctactgaaaattggaataggcctaaaaaagaagtcaatgcacttatgagtttattatttaacactattaaaaaggaggtaagggcgcttcatgagaataacgttaagttttctactattggtaatctcgcatttttaccaaataatactgaaaacggattaaaagagggaatagatttaacaaaaaacaatacgggtttaaacttaattttagcattaaactatggaagcaggcaggaaataattgattctgttattaatatagcgaataaggtaaaatcaggagagatagatagtaaccatattgatgaaaccctattttcatcatttctatacacaaaaaactttccggatccagacttattaataagaactagtggtgaattgaggataagcaattttcttttatggcaatgtgcatatactgaaatgtatttaacaaatacgtattggccctcatttcgcgaagatgaattatttaaagcaatcctagattttcaaaatagagaacgcagatatggcaagattagcgagcaagttaatagttaga

SEQ ID NO: 241868 - DNA, 700 bp, Unknown
  Bacterial polypeptide expressing nucleotide sequence isolated from the Sargasso Sea
aatgaatcttaaggatatagatctcaatcacatagccataataatggatggaaatggaagatgggctacaaaccaagggctggatagaacagctggacatgcagctggtgaattctctctttctcgttcaatagattggtccctggacaataatctagagtggctaacggtgtttgctttttcaacagaaaactggtcaaggtctaaagaagaggttgattttttaatgtttttcaacagagatatattaatcagaaggagagaggaatttaatgataaaggagttaaattccattttattggtgatttagcagatgaaagaattcctgatgaaaataaaaggttaatgagtgagactgaagaaataactaaaaataattcaaatttaaaccttgtttttgcatttaattatggatcaagaaaagaaatctacgatgctataacaaaagtaattaaaaatgatattgatgcaatcaatgaagaatcttttaggtctaacttactgcttccagaaatgcctgatcctgatttactcattcgtaccgctggtgagaagagagttagtaattttcttctctatcaattgagctacactgaacttatgtttgtcgatacactttggccagactttgatgaaaatcaattagatttggctgttaaagagttcgaaaatcgagttagaaagtttggaaatgcctga

SEQ ID NO: 241869 - DNA, 730 bp, Unknown
  Bacterial polypeptide expressing nucleotide sequence isolated from the Sargasso Sea
tatggaaggcgaacatttcgatattattcctcagcatgtagctattattatggatggcaacaatcgttgggcttcagaaagaaatctacctggtgttgctggtcatcaaaaaggagtcgaaagagctagagaagcagttgagtttgctgtaaaaaaaggtatatcgacattgaccatatttgcttttagtagtgaaaactggggacgatcaaacgaagaagtaaatcttttaatgaaactcttgaataccgccctaaaagaacaagttccgaatcttgttaaaaattctgttcagttaagtttcataggagatttatcgcaatttgataaagacttattagatcaaatgaaaaaatctgaagaaatgactatctgcagacacgaggaaaagaagttggatttagttgttgctgcaagttatgggggtagatgggacatcattaatgccgttaataaacttagagctgataataagtttatttcagaagctgatatgacttcagcgttgtctacttctaattttgaggaccctgatttatgtataagaactggtagagaaaaaagaataagcaattttttattatggcaattagcctacacagaactttattttcctgatcttttgtggcctgattttaatgatgatgaatttgagaaggctttattggaatactctactagaaatagaagatttggagataaatcaaatttttcctctaacaatgattaa

SEQ ID NO: 241870 - DNA, 784 bp, Unknown
  Bacterial polypeptide expressing nucleotide sequence isolated from the Sargasso Sea
catgacctataccagctctaccgttcgcgtgcctgacgtcggcgtcgtgccgcgtcacatcgcgatcatcatggacggcaacggccgttgggcgaccgaacgccgcttgccgcgcgtcgcggggcacacccgcggcgtcgatgccgtgcgggcggtggtcgaaggctgcgcgcgcgccggcgtcgaatacctgacgctgttcgcgttcagttcggagaactggcgccgtccgaacgacgaagtgtcgttcctgatgcgcctcttcatcaccgcgctcgagcgcgaggtcggcaagcttcacgcgaacgggatccgcctgcgtgtcgtcggcgatctcgaccgcttcgagccgcgcatccgcgaactgattcgccgcgccgaaaccaagacggcgcgcaatacccgtctcacgctcaccatcgcggccaactacggcggccggtgggacatcctgcaggcgacgaagaagctcgtcgagcaggccgtgcgcgagggtcgcgaggtcgaagtgaccgaggacgcgttcgcgccgcacctggcgatggcctatgcgccggagcccgatctcttcatccgtaccggtggcgagcagcgcgtcagcaacttcctgctgtggcagctcgcgtacgccgaattctatttcaccgacaaatactggccggatttcgacggcgcggcactggccgacgccatggcgtcgtatacggagcgcgaacgccgtttcggccgcacgagcgcacagctcgaaccgcaatcgcagaacgccgactccctttcatgctga

SEQ ID NO: 241871 - DNA, 682 bp, Unknown
  Bacterial polypeptide expressing nucleotide sequence isolated from the Sargasso Sea
tatggatggaaatggacgttgggctaaatcgcatagttttaagcgtatttctggacataaagaagggattaactctgttcgtgaaattgttagagtatgcggtgaaattggggttaaatatcttactctatatacgttttcaagtgaaaattggactagaccgaaatcagaggtttcatcaataatgaatcttcttttttcaacaataaaaaaagaaatagaaaatcttcataaaaataatgtcagattgtcagctattggggaattggatgatttacctaataaatcttataaagaaataatggaaggaattaataagacaaaagataatacggggttaaatttaatacttgctttaagctatggaagtcggcaggaactattaatggctgtacgtcgtattgtagatagatttaaagaaaaagaaataaatattaaagatatttcagaaaatatgattagtaaagagttatatacatctaaaatacctgatccagatttgttaattcgcactggaggagaaaatagaattagtaattttttattatggcaatcagcatatacagagttttatatgacagatatacattggcctgattttagagagaaggaattacttgacagcatcatagattaccaaatgcgtcaacgacgttttggcaaaataagtgagcaaatttag

SEQ ID NO: 241872 - DNA, 721 bp, Unknown
  Bacterial polypeptide expressing nucleotide sequence isolated from the Sargasso Sea
tatggctaattctagcaaaattaatacaccaaaacacgtcggtataattatggatggcaatggaagatgggccattaaaaactctttaaaaattagtgaaggtcacaagaaaggagtgagcattgtaaaagatatagttgaggaatcagtcaagcaagatctatcatctttaacaatctacgcttttagtactgagaactggaaaagacctaaagctgaggttaccgctattaaaaaattagttattgatgcaatcaatgatcaagttcccgaactaaaagagcagagagtaaggctaaagttttttggacacacatacgactttggaaaaaaagtcattgataagatagattatgcggaacaagaaacgcacataaaaaagagtaagctagacttgaatgttgcccttggatacggtggcaagcaagatattgtggacataactaaaaaaatagcatcaagtgtttcggctaaacaaatcaaaatagaagatatcaatgaaaaagttatacataatgcatcatccgttccagttgaaaacatagacctattaattagaactggtggtgataagagaataagcaattttcttctttatcaaatcgcatatgctgagataatgtttgttgataaatattggcctgattttaataggaaagactttttaaaatgtattgataattttaaaaaaattaatagaagatttggcaaaagaaaatga

SEQ ID NO: 241873 - DNA, 319 bp, Unknown
  Bacterial polypeptide expressing nucleotide sequence isolated from the Sargasso Sea
gatgaagcatgtagccataataatggatggcaatggtcgctggggtataaaaaataaaaaatctcgtaacttaggacatagacagggcttaaagactgttgaaatggtaattgaagagacaataaaaaataaaattaaatttttaacattgtatgcattctctacagaaaattggaaaaggccaagaattgaaattagatttttattaaatctacttgaaacttttttgaaggaaaatattgataaattagataaaaataacatcaggcttaaagtcattggaaacttagttaggtttcctactaaaatacaaaattta

SEQ ID NO: 241874 - DNA, 643 bp, Unknown
  Bacterial polypeptide expressing nucleotide sequence isolated from the Sargasso Sea
atggatggtaacagaagatgggctaggcagaataatttaccattctcattgggacatcgcaaaggtgttgaaactcttgtagaaataacaaaagaagccaaaaaaaagaaagtaaaaaaactaattgtttacgcattttcatcagaaaactggtccagagaaaaatttgaagttaactcactgatgaacttaataagctttggtactgaggtgaagttagatgaaattattaaaaatgaggttcgtatggagtttattggagaccttgattcaataccgaaaaaagcaaaagaagaggttgataggtgcgtaagatctacaaaaaatttctctgattttactcttgtgattgctctaaattatggaggtgtatgggatattgtaaatgcattaaaaaaaatatctgaaaagggtgaaactattaatgctaaaaactttttaaaatttacagaacttaaaggtgaggaggtagaaatttttatcagaacaggaggagaaaaaagagtgagtaactttttgttacctaacattggatattctgagcttttcttttctgataaattatggcctgatttcaatgccgaagactttaatgctgttcttgatgattttaaaaaacgacaaagaaggtttggcaaatgaa

SEQ ID NO: 241875 - DNA, 709 bp, Unknown
  Bacterial polypeptide expressing nucleotide sequence isolated from the Sargasso Sea
tatgattccaaaacatgtagctattataatggatggtaatggaagatgggcaaaggataaaggtctcccgagagaatttggtcaccaaaatggagttaattcagtgaaatctattgttcaagaagcctacaaatcaggaattgaatatttgacactgtatgcattttcgattgaaaattgggatagaccatccgatgaggttagctcattaatgtctttgttggttagtactttaagggatgaatttgatgaaatttttgataaggatataaaacttaatgctgtaggagaaattaatagtctccccaaagaagtagtttctgaattagagtttattattaataaaacaaagaataaccggaagatgaatttgacactagcattaagttatggaggcaaacaagagatttttaatgctgttaaaatgattgctgataaagttaaaaataatttaattgaattaaataattttgatgattcgataataaatagccatctttacacgaaaaatttaccagatgttgatctattaataagaacaagtggtgaacaaagaattagtaattttctgttatggcaaattgcttatgctgaattatattttactgatgtatattggcctgatttttcgaaagatgattttaatttagcattagagaattataaaagtcgcgaaagaagatttggaaaaacaagtgaacaaatataa

SEQ ID NO: 241876 - DNA, 394 bp, Unknown
  Bacterial polypeptide expressing nucleotide sequence isolated from the Sargasso Sea
tatgaaagattttaatttagaccataaaagaattccaaagcatgtagcaataattatggatggaaatggcagatgggctaaaaagaaaggtgaattgagaatttttggacatacaaacggagttgattcagttagagaagctttaactgctgcagttgaaataggagtccaatatctcacattatatgcatttagcactgaaaattggaatagacctaaagaagaaattgccgctttgatggatttattagttaagtctatttatgatgaagttgatgaattaaatagcaagggtgttaaaataactacaattggagatgttgaaatattacctaagtcttgtcaaaatgctttaattgaagctaaagaaaaactaaaaataataataaaataa

SEQ ID NO: 241877 - DNA, 200 bp, Unknown
  Bacterial polypeptide expressing nucleotide sequence isolated from the Sargasso Sea
tatgaaccaaatccaacatgtagccattataatggatggcaatggtcgttggggattaaagcataaaaattctagaaatttaggtcataaagcaggtttaaatacagtagaaaaaatccttaaagaaacaattaaaaacaaaatcaaatttcttacactatttgctttttctacagaaaattggaaacggccccaaaaag

SEQ ID NO: 241878 - DNA, 268 bp, Unknown
  Bacterial polypeptide expressing nucleotide sequence isolated from the Sargasso Sea
atgaaaatagataagcaaaaattacccaagcatgtagcaataattatggacggcaatgggagatgggcgactagaaaaggtttgccacgatcatttggacataaacagggcgttagtgtattaaaaaaaattctcaaagctgcaaaaaatttaggttgtgaagtaattactgtttatgcattttcaactgagaattgggcaagaccaacaaaagaagttgattttcttataaatctttttagcgaagttttaaaaaatgaaataaaga

SEQ ID NO: 241879 - DNA, 673 bp, Unknown
  Bacterial polypeptide expressing nucleotide sequence isolated from the Sargasso Sea
aatgaatcatcttgcaattataatggacggcaatgggagatgggcaattaatcaagaaaaaccaagagtttttggtcatcaagttggtgctcaaactgccaaaaaaatcattgatgcttgtgttcagaaaaaaataccttatttaaccttatatactttttcaaaagaaaattggtctagaccaaaggacgaagtagaaactttgatggacttgttatcaataatgcttgaaggtgaattagaaaatatgcttaggaacaatattaggtttaatgtagttggaaagatagaggatttacctaaaaaaacaagggaatttactttatatacaattgagaaaactaaaaataatacaggtttagttttgacgttggcgcttagttatggaggaagacaagaaataattgatgccataaattcaattatagaaagtggagagaaaataattaatgaagatattcttaaaaatcacttatattgccctgaattgccagatcctgacctaattattagaacaggaggagaatatagattgagtaattttttattatggcaatcggcatatacggaaatttatacaagtgctaaaaattggccagaatttgatagcgaagatttaaaaaaagcatttaatgaatatgaaaacagaaacagaacttatggaaaagtgtaa

SEQ ID NO: 241880 - DNA, 516 bp, Unknown
  Bacterial polypeptide expressing nucleotide sequence isolated from the Sargasso Sea
gatgccagttaatttgaaaaacaaccctcttaatcatgttgccattataatggatggaaatggcagatgggctcaggcgcgttctcactcgagagtttggggtcatatacgtggtgttagaactgtttctaagattgttgaggaggcagatgaatgtggtgtgaaagctttaacattgtatgctttctcaaccgaaaactggagcagacctttaacagaggtaaagacgcttttttctcttttaaaaaagtttttgcagagggaaaaagagagaattattagaaataggattaagttcaaaataattggagatcttacttctctaccgtcttccacttatgaacttgttaaagatttggaagaaataacaagagaacatgagggccttaaattaacttttgccttcagttatggctctcggtcagaaattattagcgcctttaattcccatataaaagaaagaccgggagagcctatctcagaagaaaagctagactgtcttttatctaacctctg

SEQ ID NO: 241881 - DNA, 641 bp, Unknown
  Bacterial polypeptide expressing nucleotide sequence isolated from the Sargasso Sea
cggtagatgggctaaacaaaaaaatcatccaagagcttttggtcatgaaactggagcgcaaaccgcaaaaacaatcataaatgactgtgttaaaaaggaaataccacatcttacactttataccttttccaaagaaaactggtcaagaccaaaagaagaaatagatattttaatggtcttactctctacaatgcttgaaaaagaaactgaaaatatgttaaggaacaatattaggtttaatatcgtaggaaaaatagaggacttaccggataaaacaagggattgggtattatctacaatagaaaaaacaaaaaataacacaggattaattttaactttagcgcttagctacggaggacgacaagagattgttgatgcattcaattcattgataaaatcggacgtaaaaattattaatgaagaaatccttaaaaatcacttatattgccctgaactgccagatccagatatgataatcaggactgggggtgaatatagattgagcaattttttactatggcaatcagcatatgcagaaatttatgtttgtaataaaaattggccagattttgatatagcagaacttgaaaaagctttaaaagaatatgataacagaaatagaacatttgggaaagtttaga

SEQ ID NO: 241882 - DNA, 754 bp, Unknown
  Bacterial polypeptide expressing nucleotide sequence isolated from the Sargasso Sea
catgtataaaaagttaagagataaagttaaaaataacggcaatcttcccaagcatattgcaattattatggatggcaatgggcgttgggcaaaattaaagaacctccctagagcagctggccatcatgagggaataaattcagtaagagagattgtaagagtatgcggtgagattggtgtttcttatcttaccctctatactttctctagtgaaaattggtcaaggccaaaaacagaagtctctgcaatcatgaaattgctcttttcaacaataaagaaagaaattgaaaatctgcataaaaacaatgttaagctctcaacaattggtaaccttgaagatttacctgctgatacaaaaaaacacatattagaaggtattgcaaaaacaaaaaacaacactggtctcaacttaattttagctttaagctatgggagtaggcaggaactcataagggctattaagcgtataggtaaaaaaatagaactatcagatttaaaatctgatgatattagtgaagaattatttgtagaggagctttattcttcaggtattccagatccagatctattaattcggactggcggcgaatatcgactaagtaattttttgctttggcaggctgcttattcagagttacttatttccgagaaattttggcctgattttagagaaaaagaattattaaatggaatttatgattatcaaaatagacaaagaagatttggtcaaacaggtgaacaaataagcgcatga

SEQ ID NO: 241883 - DNA, 766 bp, Unknown
  Bacterial polypeptide expressing nucleotide sequence isolated from the Sargasso Sea
atggtcactcctagatttgtctactctgtatatgaaaatagacttcaaaacaaaataaaaaatgaaaaccttccacaacacatcggcctaattcatgatggacatagacgttacgcaagaagggaaaacctccttacttatgaagtttcttataggattggaatggtccgatttaaagagtgtttagcctggtgtgatgagcttggaattaatcatgttacaagttggttactttctaaagagaacttatcaagacctgaggaggaattaaattcttactatcttgttttaaatgaactatttcaagaattactcatagatgacttagttgataattttaaaataaattttgtaggaagcattgatttacttcctgaatatcttcaaaactcaattaaacaattgcaagaaatcagaggtggaggtgaaaaaatcctaacaattgctttgggctacggtgggaggcaggagatagttgatgccataaagagcttgcttaaagaaaataaagaattagaaatagatgatttaataaagagcattaatgatgaacaaataagagaccatttgtactctcctgactcaccagatattgatttgataattagaactagcggtgaatcaagactgtctggatttttactatggcaaagtgcttattctgaagttgtattccaagatgtttattggcctgaattcaggaagattgatttcctaaggtgtcttagagaatatgttcagcgggatagaagatttggtaaatgaa

SEQ ID NO: 241884 - DNA, 784 bp, Unknown
  Bacterial polypeptide expressing nucleotide sequence isolated from the Sargasso Sea
atgacctataccagctcaaccgtgcgcgtgcctgatgtcgccgcggtgccgcgacatatcgcgatcatcatggacggcaatggccgttgggcgacccagcgccgtctgccgcgcgtggccggccatacgcgcggcgtcgacgcggtgcgtgcggccgtcgaggcctgcgcccggcagggcgtcgaatacctgacgctgtttgctttcagttcggaaaactggcgccgcccgaacgacgaggtgtcgttcctaatgcgcctgttcgtcaccgcgctggagcgcgagatcggcaagctgcacgcgaatggcattcgtctgcgcgtggttggcgatctgtcccgattcgatacgcgcattcgcgacctgatcaagcgcgcggaaaccaaaaccgcgcgcaatacccgtctgacgctcaccatcgccgccaattacggcggccgttgggacatcatgcaggccacccgcaagcttgccgagcaatcggcgctggcgggcaaagcggtcgaagtgaacgaggattcgttcgccgaacacctgtcgatggcctatgcaccggagccggatctcttcatccgcaccggcggcgagcgtcgcgtcagcaacttcctgctgtggcagcttgcttacaccgagttctacttcaccgacaccttctggccggatttcgacgccgacgcgctcggccacgccatcgcttcctatgcggagcgcgagcgccgctttggccgcaccagtgctcaactcgagccgcaatcgcaaaacgtcgattcgcttccatgctaaa

SEQ ID NO: 241885 - DNA, 673 bp, Unknown
  Bacterial polypeptide expressing nucleotide sequence isolated from the Sargasso Sea
atgcctgaacctaaaacagtggccatcattatggatggaaacaggagatgggcaaaaaaaaataatctaccaataccgtcaggccatagaaagggtattgaatcacttattgaaattgttaaaactgcaaaaaaatctaagattgaaagacttatagtctatgcattttcaacagaaaattggtctagagataatttcgaagtaaatgccttaatgaatcttattaactttggtgttgacgttaaattaaacgagataaaagaaaatgggataaagttggatttcattggtaatcttgatgatctaccagagaaagctcaaaaaggtatcggtaaatgcattaaagagacaaaagatttaacagaacttacattaacagtagctttaaactatggagctatttctgatattttgaaagctgcaaaaactattaatgaaaagaatatcgagttaaatgaagaaaattttttaaaagcaacacagattggagagcaagaagttgatatttttattagaactggaggcgataaaaggctaagcaactttttattagctaacattggatatagtgaacttttcttttctgataaattatggccagaattttcaagaaatgatttcattcagatattagatgaattcaaggaaagacaaaggagatttggcaaatgaa

SEQ ID NO: 241886 - DNA, 727 bp, Unknown
  Bacterial polypeptide expressing nucleotide sequence isolated from the Sargasso Sea
atggctaataagaataccaaaaaaaataattatcctaaaaatgttggcattattatggatggtaatggaagatgggcgcttaaaaattcattaaagattagccagggccataaacaaggggtcgaaattgttaaaaaaattgtagaagaatcagtaaaacaaaatattaaatcattaacattatatgcattcagttcagagaattggaaacgacctaaagctgaaattaatgctataaaaaaactagtaattgaggctatcaatgagcaagttccggaattaaaagagcagaaggtaagtttgaaattttttggacatcttaatgattttggtaaaaaaattcttcaaaagattgcttatgctgaaaataaaactaaatgtaagtctagtaaattagatttaaacattgcattaggttatgggggtcaacaagatattgtagatgttgtgaaaaatatatcgtcgatggtgctttctaaaaaaataaagatagaagatattaatgaaaagactattaataaaaattcttcagtacctgtggatgaaatcgatcttcttattagaacgggtggggataatagaataagcaattttttattattccagatagcatatgcagagataatgtttgttgataagtattggcctgattttacgaccaatgattatatgaaatgtttaaataattttaaaaaagtgagtagaagatttggaagaaggatataaa

SEQ ID NO: 241887 - DNA, 649 bp, Unknown
  Bacterial polypeptide expressing nucleotide sequence isolated from the Sargasso Sea
agagcctatggtcatagggctgggattaagtctatcaatcgttttgtatctgcatgttctgttagacaaattcaagagttaactttatttgcttttagtagtgaaaattggaagaggcctgactatgaggttaagtttttattatctttatttgaagaatcaatagatttatatgtaaaaaagttacatgataacaatgtccaaataaacttcattggtaacttatctgaatttaatcaaaaacttttaaagaaaatccatgcggcagaaagattgactaagaataatacaaatttaaaattaaacttcgcgattaattatggtggtaagtgggatattatagattctatcaatagaatgattacttctaaatcattagatggaaaaatagttacacctgataatttcgagcctttcttgtcattgcaagggtcaagcccagacctacttataagaacagctggtcatcaacgtctaagtaattttatgctatggcaacatgcatataccgaactgtattttaccgattgtttgtggccagattttaatgaagatgaattagatttagggattaagcattacttaaaaactactagaaagttcggtgcaattgaagaatatgacataatttctgaagaagatgcttaat

SEQ ID NO: 241888 - DNA, 836 bp, Unknown
  Bacterial polypeptide expressing nucleotide sequence isolated from the Sargasso Sea
accgggtaccaggcgacgtctctgggacaggcggtgcgcgaggtgaatcgcatgctcgcgtggcgactgagcgatgaaccggtgaccgaggagacggacccggacgagcgcgacgaggcgtaccgcgcgggcgtgcgaacgaagattttcctgggttggacgagcaacctcacgagcagcgggacgagggaaaccataaagtatctcgtgaagaataagatgatcgacgtgctgtgcacgacggctggtggggtggaggaggatttcatcaagtgcatgaaaccgacgtatctcggtgatttcgcgctgcgaggaaaggatttgagaaagcaaggattgaatcgcatcggtaacttgattcagccgaacgacaactattgcgacttcgaggattggatcatgccggtcttggacgcgatgctcaaggaacagaacgaacaaggcgtgaaatggacgtgctcctcggtgatcaaacgtttgggtttagagattaaccacgaagattcaatcttttattgggcggcgaagaacgatatcccgtgttactgtccagcgttgacggacggttcgatcggagacatgttgtatttccactcgtacaagaacccgggtttggtgattgacgtcgtcgcggacgtcagggcgatgaacgacgagtccatcaaggtgaagcgtccgagaaagacgggaataatcatcctcggcggcggggtcgcgaagcatcacatttgcaacagcaatttgatgcgtaacggtgcggattacgccgtcttcatcaacacggcgcaagaattcgacggtagcgattcaggtgcacgcccagacgaagccgtgtc

SEQ ID NO: 241889 - DNA, 651 bp, Unknown
  Bacterial polypeptide expressing nucleotide sequence isolated from the Sargasso Sea
cgatggcagccgccatcaaaggctataaaatgaagctgattatgccggacaatatgaccgacgaacgtaaggcatcgatgcgggcttatggcgccgagctgattttggtcagtaaagaacaaggcatggaatacgcccgtgatttagccaaacaaatgcaagctgaaggtacgggtttagtgctggatcagtttaataacaccgacaatccggcggcgcactatgcctctactggccctgagatctggcaacaaagtttcggtaaagtaacgcatttcgtctccagcatgggcaccactggcactattatgggtgtgtcacgttacctgaaacaacaaaaacctgagattcaaattataggcctgcaaccggctgaaggcagtagtattcctggtattcggcgttggccagaagcttatttaccaggcttttatgaaaaacagcgggtcgatcaaatcatagatattactgcggatcatgctctagccactatgaggcaactggcacagcaggaagggatcttttgtggtgttagttctggcggtgctgtgtatgcagcattgcgtctggcagagcaactggataacgccgtgatagtggccattatctgcgaccgcggtgatcgttatctatcttcaggaatatattagt

SEQ ID NO: 241890 - DNA, 139 bp, Unknown
  Bacterial polypeptide expressing nucleotide sequence isolated from the Sargasso Sea
catgagcaaaatttttgaggaacacagccagaccataggcaacaccccgcttgttcgtctcaaccgtgttacaaagggccgcgtgctggccaagatcgagagccgcaacccgagcttcagcgtccagtgccggatcggt

SEQ ID NO: 241891 - DNA, 703 bp, Unknown
  Bacterial polypeptide expressing nucleotide sequence isolated from the Sargasso Sea
tatgatattaaataatattttagaagctattggtaatacaccaatagtaagacttgataaagttggatctgaattgaaatgcaatttatttgcaaaatgcgaatattttaacccaggaggatctgtaaaggatcgtattgggtttcggatgatcgatgaagctgaaaaatctggtcaaattaagccaggggacacactaattgaaccaagttccggtaatactggaattggtctagctttagctgctgcggtaaagggatataaattgattattactatgccagagaaaatgagcctagagaaagaggtcgttttagaagctctgggtgcaaagataattcgaacacctactgaagtctcccatgatgatccaaaaagtctttttggtgtagcaaaaaggcttcaggaagaaacaccaaattcgcatattcttgatcagtacagtaataataataatcctgatgctcactacaatggaacagctcaagaaatattagatgagttcggagataatcttgatatggttgttatttcagcaggtacaggaggtacaattactggaattgcaaaaaaattaaaagaatcaattaccaatattgaaatagttggagttgaccctatcggatcaatacttggaggtggatcagaagttttgccttatcatgttgaaggtattggatatgacttctttccagatgtttta

SEQ ID NO: 241892 - DNA, 222 bp, Unknown
  Bacterial polypeptide expressing nucleotide sequence isolated from the Sargasso Sea
aatgaataacacacaaaacgattttatttcaggaataggaaacaccccactaattaaattaagagcagcatccgagattactggatgcaatatttatggaaaagcagaatttttaaatccaggaggatcagttaaagatagagctgctcttgcattaattaaagatgctcaggaaaaaaaattaattgctaaaggtggaacagttgttgaaggaacagccgg

SEQ ID NO: 241893 - DNA, 950 bp, Unknown
  Bacterial polypeptide expressing nucleotide sequence isolated from the Sargasso Sea
cctggtaggtattaatatatttgtaaaagctgaatactttaatcctggcggttcggtaaaagataggttagccttaagcattattgaaaaagctgaaaaagatggagagctctcccccggtcaaactgtagttgaagcaacgagtggtaatactggaattggcttagcaatggtctgtgctaccaaaggttatccatgtgttgtaaccatgcctgacagtacttctatagagcgaagaaagttaatgagatttcttggtgctcaagttttgttaacccctgcttctgaaggtacaactgctgcatatgatcttgcaaaaaaactttcagataagaataattggttctatgcacaacaatttgaaaataaagctaatgctgatattcatgaaaaaactacagctattgaaattcttaacgattttaaagacataggattagattattgggtttctgggtatggaacaggtggaactttcagcggtgtctctagagtattaaaagacaagtcccctaatacgaaattaattattacagaacctgataatgctcaattaattaatagcaaaatatcacaggaaagaaattcagaaaatgctccagtatcaactcatgacgcttggaatcctcatccaatacaaggatggactcctgactttattccatttgttcttcaggagactattgataataattattttgatcaaaatattcctgtttctggtgatgatggaatattttgggccaaagaactcgcatctaaagaaggaattataaccggggtttctggtgggtctacttttgcaattgctatggaagttgcaaaacaagctagtaaaaattctaatattttatgcatgattcccgatacagctgaaaggtatatgagttcagttttgtttgaggatatagaagcagaaatgaatattaaagagcaagaaatatataatt

SEQ ID NO: 241894 - DNA, 378 bp, Unknown
  Bacterial polypeptide expressing nucleotide sequence isolated from the Sargasso Sea
tatgaaaactttacaaaataattttgtcgaagcaataggaaatactcctttatttaaattaaaagccgcatcagaagttactggttgtaatatttatggaaaagcagagtaccttaacccaggtgggtctgtaaaagatagagcagctttagctctgattagagatgctgaagaaaaaaaactaatttcaaaaggtggaacaattgttgagggaactgctggtaatactgggattgggttgtgtcttttaggaaattctattggttataaaactattatcgtgatgaacgataatcaaacacaagaaaaaaaagatttattaagaaatattggagctgatttaaggttggttccacctaaaactcttataaagatgaa

SEQ ID NO: 241895 - DNA, 523 bp, Unknown
  Bacterial polypeptide expressing nucleotide sequence isolated from the Sargasso Sea
tatgcccatcgctccggacatcaccgccttaatcggcggcacgccattggtgcggctgaatcgcctgccccaagcctgcggctgccgtgccgagatcctggccaaattggaaagtttcaatccatcggcgtcggtgaaggaccgtatcgccagcgccatggtgctggaggcggagctggccggcacgatcagccccggccgcaccgttctggtggaacccaccagcggcaacacggggattgccttggcgatggtggcggcagctcggggctaccggctgattctcaccatgccggattcgatgagcaccgagcggcgagcaatgttgcgggcctatggcgccgagctgcagctcaccgacggtgccctggggatgaatggcgccattgcactggctagagagctggtggcggagatccccgaggcgtatctgctgcagcagttcgacaatccagccaatccagccgtgcatgaacgcaccacggccgaggagatctggcgcgatacggcaggtcagatcgat

SEQ ID NO: 241896 - DNA, 313 bp, Unknown
  Bacterial polypeptide expressing nucleotide sequence isolated from the Sargasso Sea
atgaaaaattcacaaagtaactttatcgaaggtattggaaatacaccattaataaaattaaaatcagcctcagagttaactggctgcaatatttatggtaaggcagaatatttaaatccaggcggttctgttaaagatagagcagcccttgcattgataaaggatgctgaagataaaaagttaattagtaaaggtggaacaatcgttgaaggtactgcaggaaataccggtatcggattgtgccttattggaaattctgttggctataagacaataattgtaatgaatgataatcaaacccaaagaaaaaaaa

SEQ ID NO: 241897 - DNA, 789 bp, Unknown
  Bacterial polypeptide expressing nucleotide sequence isolated from the Sargasso Sea
gaggaacaattgtgaaaggaacatctggaaatactggaatgggacttgccctagcctcaattgttaaaggctataaacttatatgtgtatctaatgataaacagtcaaaagaaaaactagatgtcttaagggcaatgggggctaaagtagttgtatgtcccactgatgttgaggcagatgacccaagatcatactatagtgtatctaaaaagatagctgaagatactccaaactcatggtatgttaatcagtatgataatctctctaactctaaagctcattatgaaaataccggtcctgaaatatggaaccaaactgaaggtaaaataactcattttgttgttggagttggaactggaggtactatttcaggagttggaaggtttctaaaagagaaaaataaattggtcaaaatatggggtattgacacttatggttcggtctttaaaaaatatcatgagacaggtattttcgataagaatgaaatttatccatataaaacagaaggaataggagaagacattttaccaaaaaatgtagactttaaaataattgaccatttcgaaaaagtaacagataaagatgctgcagtttttacaagaagactagcaagagaagaagggatttttggtggatactcttgtggggctgctatatctggtattgcacagttaaagaataaattgtctaaagatgatattgttgttgtattgctccatgattctggaagtcgatatattggaaaagtatataatgatgaatggatgaaagataatggatttatttaat

SEQ ID NO: 241898 - DNA, 678 bp, Unknown
  Bacterial polypeptide expressing nucleotide sequence isolated from the Sargasso Sea
catgacaagcgcccccgtccgtagcgacacactcgaccttatcggcaacacgccgctcgttctcctgtccggcccgagcgaggcggcgggctgcgagatctggggcaagtgcgaattcgccaatccgggtgccagcgtgaaggatcgcgcggcgctgtggatcgtgcgcgatgccgaagcgcgcggcgagctgaaaccgggcggcacggttgtcgaaggcacggcgggcaataccgggatcggcatcgcactggtggccaatgcgctgggctaccagacggtgatcgtgatgcccgacaatcagtcgcaggaaaagatggacacgctgcgcgcgttgggcgcgcaattggtcaccgttccgccaaccaagttcgctgatcccaaccatttcgtccacaccagccgccgcattgccgaggaaaccgataatgcgatctgggccaatcagttcgacaatgtcgccaatcgccgcgcgcatatcgaaggcaccgcagaggaaatctgggaccagctcgaaggccgggttgacggcttcacctgcgcagttggcaccggcggcacactggcaggcgtgggcatggggctgaaggcgcaggatgagaatgtccgtatcgccctaaccgatccgcatggcgcggcgctctacaattactacgccaatggcgagctcaagtccga

SEQ ID NO: 241899 - DNA, 343 bp, Unknown
  Bacterial polypeptide expressing nucleotide sequence isolated from the Sargasso Sea
aatgaaaaataatcaagaagattttacctcaggtattggaaatacacctttaattaaattaaggtcagcctcagaaataactggatgtaatatttatggtaaagctgaatttttaaatccaggtggttctgtaaaagatagagctgcattagctttaataaaagatgctcaagaaaaaaaattaatatcaaaaggcggtataattgttgagggaactgctggtaatactggaataggtctaggactattaggtaattctcttggctacaaaacaatcattgtaatgaatgataatcaaacacaagaaaagaaagatacattaagaaatcttggagcagaataa

SEQ ID NO: 241900 - DNA, 380 bp, Unknown
  Bacterial polypeptide expressing nucleotide sequence isolated from the Sargasso Sea
tatggaaaataacaatattatttcccaaattggaaatacaccattagttaaattaaaacaagcctcagaattgactggctgtaatatttatggaaaagctgaatatttaaatcctggtgagtcagtaaaagatagagctgcactttttatagtaaaagatgctattgatagaaaattaatttcaaagggtggaacaattgttgaaggtaccgcaggcaacacagggattggacttgctatagtttgtaaagaatatggattaaatttaaaaattgtcattccaaacactcaatctattgaaaaaaaagaaacacttaaaaaattaggagcagaattaattgaagtagaagcagttccttattcaaatccaaataattata

SEQ ID NO: 241901 - DNA, 747 bp, Unknown
  Bacterial polypeptide expressing nucleotide sequence isolated from the Sargasso Sea
aaatactggaatgggacttgccctagcctcaattgttaaaggctataaacttatatgtgtatctaatgataaacagtcaaaagaaaaactagatgtcttaagggcaatgggggctaaagtagttgtatgtcccactgatgttgaggcagatgacccaagatcatactatagtgtatctaaaaagatagctgaagatactccaaactcatggtatgttaatcagtatgataatctctctaactctaaagctcattatgaaaataccggtcctgaaatatggaaccaaactgaaggtaaaataactcattttgttgttggagttggaactggaggtactatttcaggagttggaaggtttctaaaagagaaaaataaattggtcaaaatatggggtattgacacttatggttcggtctttaaaaaatatcatgagacaggtattttcgataagaatgaaatttatccatataaaacagaaggaataggagaagacattttaccaaaaaatgtagactttaaaataattgaccatttcgaaaaagtaacagataaagatgctgcagtttttacaagaagactagcaagagaagaagggatttttggtggatactcttgtggggctgctatatctggtattgcacagttaaagaataaattgtctaaagatgatattgttgttgtattgctccatgattctggaagtcgatatattggaaaagtatataatgatgaatggatgaaagataa

SEQ ID NO: 241902 - DNA, 699 bp, Unknown
  Bacterial polypeptide expressing nucleotide sequence isolated from the Sargasso Sea
aatgattttcagaaattttctagagtcaataggtaatacacctctgataaagcttcgaaaagcatctgaattgacaggttgcaatattttaggcaaggctgaatttctaaaccctggaggttccgtcaaagatcgcgccgcaaaggccattattctggatgcggaggagagaggattgttgaggccgggcgggctagttgttgaggggacagcaggaaacacaggcattggtttggctctggtaggaaattcacttggatatcgtacactgatagtcattccggatacccaaagtcaggagaaaaaagatatgctaaggctttgcggtgcagaattgcgcgaagttccagcagttccatatcggaatgaaaacaactatgtcaaagtttctggacgtattgctgatgaattatccaaaacggaaccaaacggagtaatatgggctaatcaatttgataatattgcaaacagaaaaggtcactacgaaacgactggcccggaaatttttgaacaaactgatggaaaagtagacggcttcatttgtgcggttggaacaggcggaactttagcaggtacaggcttatacctgaaagagcgtaatccagaatttgttattgggctagctgatcctctaggtgctgcacttcactcattttacaaaactggtgaattgtcaagttgtggtgattctattacgga

SEQ ID NO: 241903 - DNA, 172 bp, Unknown
  Bacterial polypeptide expressing nucleotide sequence isolated from the Sargasso Sea
tggctgtaagatagctgaaactgtagaagacggttcagtaattttagcaatgcttcctgatactggagagagatatttaagtactatgctatttgataaaataaatgaagaaatgaacgaagaagaaattaaaattatgaaatccactcccggttttcatttaaataattag

SEQ ID NO: 241904 - DNA, 418 bp, Unknown
  Bacterial polypeptide expressing nucleotide sequence isolated from the Sargasso Sea
atgaaaactttacaaaataattttgtcgaagcaataggaaatactcctttatttaaattaaaagcagcatcagaaattactggttgtaatatttatggaaaagcagagtaccttaatcccggtggctctgtaaaagatagagcagctttagctttgataagagatgctgaagaaaaaaaactaatttcaaaaggtggaacaattgttgaaggaacagctggtaatactggaattggattatgtcttttaggaaattctattggttataaaactattatcgtaatgaacgataatcaaacacaagaaaaaaaagatttattaagaaatattggagctgatttaagattggttccaccaaaaccttataaagatgaaaataattttgttaaatatgcaggaagattggctgatgaatgaa

SEQ ID NO: 241905 - DNA, 590 bp, Unknown
  Bacterial polypeptide expressing nucleotide sequence isolated from the Sargasso Sea
aaaaagactaagcttagaaatagaaaattcttggtatgttaatcaatatgataatttatcaaattccgaggctcattatttgtcaactggtccagaaatatgggaacaaatgagtggtcatatacaccattttgttgtaggtgttggtacaggaggaacaatctctggtgtaggtaagtttttaaaagaaaaaaataataaaataaaaatttggggtattgattcttatggctcagtctttaaaaaatatcatgaaacaggtaagtttgataaaaatgaaatttatccatatttgaccgaaggaattggagaggatattctacctgagaatgttgattttaaaataatagatcactttgaaaaagttacagatgaagatgccgcagtatttgccagaagattggcaaaaaaagaaggtattttagcaggatattcttgtggagcagcaattgcaggtttacatcaattaaaatcaaattttaaaaaaaatgaaaatgttgttgttttacttcatgactcaggaacaagatatataggaaaagtttataatgatgagtggatgaaaaaacagggttttaaactggactaat

SEQ ID NO: 241906 - DNA, 877 bp, Unknown
  Bacterial polypeptide expressing nucleotide sequence isolated from the Sargasso Sea
aatgattttcagcaattttcttgagtcaataggtaatacccctctgataaagcttcgtaaagcatctgaacgtactggttgcaatattttgggtaaggctgaattcctaaaccctggtggttccgtcaaagatagagccgcaaaggccattattcttgatgcggaggagcgaggattgttaaggccaggcgggctagttattgagggaacagcaggaaacacaggcattggtctagcgcttgtaggaaattcattgggataccgtacactgatagtcattccggatactcaaagccaggagaaaaaagatatgctcaggctttgtggtgcagagctgcgtgaagttccagcagtgccatatcgggatgaaaacaactatgtcaaggtttcaggacgtattgctgatgaattatccaaaaccgaaccgaacggagtaatatgggctaatcaatttgataatattgcaaaccgaaaaggtcactacgaaacaactggtccagaaatttttgagcaaaccgatggaaaagtagatggcttcatttgttcggttggaacaggtggaactttggcaggtacaggcttatatcttaaagagtgtaatccaaaagttgttattgggctagctgatcctcttggggctgcgcttcactcattttatacaactggtaaattgtcaagttgcggtgattctattacggagggcattggacagggacgaatcacagcaaaccttgaaggtgctaatgtagattactcctttcaaattccagatgatgaagccttgccaatttgctttgatttattgaaagaggaagggctttgtttaggaggttcttcaaaaataaatgtagcgggagccattcgcctagcagatgag

SEQ ID NO: 241907 - DNA, 205 bp, Unknown
  Bacterial polypeptide expressing nucleotide sequence isolated from the Sargasso Sea
gatggggatcacccgcggttttgtcggagcggtgggccagaccccactgatccgcctggagcatctcagtgagctcagcggctgcgagatccttggcaaagctgaattcatgaacccagggggctcggtgaaagaccgtgcggctctggggatcctgcagagcgccgaagccagtggggacctaaagcctggcggcaccgtggtg

SEQ ID NO: 241908 - DNA, 541 bp, Unknown
  Bacterial polypeptide expressing nucleotide sequence isolated from the Sargasso Sea
atgatttacagcgattttcttgaatcagtaggtaatactccgcttataaagcttcgaaaagcatctgaattgacaggttgcaatattttaggcaaggctgaatttttaaatcctggaggttccgttaaagatcgggccgcaaaggccattattctggatgctgaggagaggggactgttgaggccaggtgggctgattgttgagggaacagcaggaaacacaggcattggcctggcgctggttggaaattcattgggataccgcacattgatagtcattccggatacccaaagtcaggagaaaaaagatatgctgaagctttgcggtgcagagctgcgtgaagttccggcagtgccatatcgggatgaaaacaactatgtcaaagtttccggacgaattgctgatgaattatccaaaaccgaaccgaacggagcaatttgggccaatcaatttgataatgttgtcaaccgtaagggacactacgaaacaaccggtccggaaatatttgggcaaactgacggaaaagtagacggcttcattg

SEQ ID NO: 241909 - DNA, 172 bp, Unknown
  Bacterial polypeptide expressing nucleotide sequence isolated from the Sargasso Sea
atgagtaagatttttgaagacaactccctgactatcggccacacgccgttagtacgactgaaccgaatcggtaacgggcgcatcctggcaaaggttgaatcacgcaacccgagctttagcgtaaaatgccgaattggtgccaatatgatttgggatgccgaaaaacgcggtg

SEQ ID NO: 241910 - DNA, 165 bp, Unknown
  Bacterial polypeptide expressing nucleotide sequence isolated from the Sargasso Sea
cagcaagatttgaaggaataccatgcggtatttcttccggtgccgcattagcagccgctctggaggttagcaaacgagacgaaatgactggtcagtctatagttgtaatcttaccatcatttgcagaacggtatctctctacatctcttttcgaagggatttgaa

SEQ ID NO: 241911 - DNA, 646 bp, Unknown
  Bacterial polypeptide expressing nucleotide sequence isolated from the Sargasso Sea
tatggatactaattctgtaattgcacaaattgggaatacaccattagtaagactaaaacaagcctcagaattaactggttgcaatatttatggaaaagcagaatattttaatccaggggagtcggtaaaagatcgtgctgcattatttattgttgaagatgcaattaaaagaaaattgatttcaaaaggtggtactattgttgagggaacagcaggaaatacaggtataggtttagcagttgtttgtaaagagtacgatctaaagttaaaaatcgttatacctaatactcagtcgatagaaaaaaaagaaactttaaaaaaattaggggcagaattgattgaagtagacgcagttccatattcgagtcctaaaaattatattaaacaatctaaaaaaatagctgaggatttaaataaaaaaagcaaaaacggagtatattgggctaatcaatttgataatataattaatacagaagctcacatcaaaactactgcagaagaaatatggaatcaaactgcaggctctgttgacgggtttacgtgtgcagttggtaccggaggtacattagctggtgtgtctataggattaaaaaataagaataaggatatacagattgctttatccgatccaatgggttcgtcacta

SEQ ID NO: 241912 - DNA, 694 bp, Unknown
  Bacterial polypeptide expressing nucleotide sequence isolated from the Sargasso Sea
tttgtcatctaaaacttcaaataaaatatacgattcaatcgatgaaactatcggaaaaacaccaatggtcagattaaataggataaaaaagcattttaaactttatggtaatataatcgctaagctagagttctttaacccacttggttcagtgaaagatagaataggtttggcaatgatagaaagtgctgaaaaaagtggaaaactaaaacccaatgcaacaatagttgaaccaacatccggcaatacaggaatcgcacttgcatttatttgtgctgctagagggtacaaacttgtattaactatgcccacaagtatgtctgtagaaaggcaaaagatgttaaaattctttaatgctaaattagtcctaactcctaaagaagaaggcatgaaaggggcaatgaaaaaagcactagatttaaaaaaagaaattccaaactcaataattcttaatcagtttgaaaatgagtctaatccaaaaattcactttgaaacaacagcaaaagaaatttgggatgattgtgagggtaatatagattatttaatttcaggtgtaggtactggggggacaatctcgggagttgggagttttctaaaagctaaaaataacaatattcaaattgtagctgttgaacctgaggattcatcagttatagctgggggagaagccggggcccactctattcaaggaatt

SEQ ID NO: 241913 - DNA, 499 bp, Unknown
  Bacterial polypeptide expressing nucleotide sequence isolated from the Sargasso Sea
atgactacgccctcagcttaccctacgattgagcacacggttggtcttacaccgctggtaaggcttcagcgcattccgggagacaccagtaataacgttctggggaagctggagggcaacaatcccgctggctcggtcaaggatcgcccggcaatgagcatgatcaatgaggcagagtctgaaggggtgattgcgcccggcgatacactcattgaggcgactagtggtaacactggtatcgcattggctatggccgccgcggtcaagggctaccggctcaagctgattatgccgagcaatcaaagcgaggagagaaaaggcgccatgcgcgcctatggcgctgaactaattgacgtgtcgcccgatgaggggatggagggcgcgcgcgatttagccctgcagatgcaggcgggcggagagggtctggtgcttaatcagttcgccaatcgtgataaccctgggggtcatttcgccacgactggacctgagattgggagca

SEQ ID NO: 241914 - DNA, 658 bp, Unknown
  Bacterial polypeptide expressing nucleotide sequence isolated from the Sargasso Sea
aatgaaatattttaataatatcttagagaccattggtaatacaccactaatcaaattaaattcaattactcagtcaattaaatcagatgtttttgttaaagttgaaagctttaaccctggcaactcagtaaaagatagaatggcaattaaaatgattgaagatgctgaaaaagaaggaaaattaaaaccaggtggtacaattgttgaaggaacttcaggaaatacaggaatggggcttgctcttgccgcaattgtaaaagggtacaaattaatatgtgtttcaaatgataagcaatcaaaagaaaaatttgatgtgcttaaagcgatgggtgctaaagttgtagtttgtccaactgatgttgaggcgagtgatccaaaatcatactactcagtttctaaaaggatttctgaggagactaaaaactcatggtatgttaatcaatatgataatccctcaaatactattgcacattatgaatcaactggtcctgaaatttgggagcaaacaaatggtagaattgatcattttgttgttggagttggaactgggggaacaatatctggtgttggaaaatttttaaaagaaaaaaaatccagcgtaaaaaattggggaattgatacttatggatctgtttttaagaaatatcatgaaactgga

SEQ ID NO: 241915 - DNA, 378 bp, Unknown
  Bacterial polypeptide expressing nucleotide sequence isolated from the Sargasso Sea
aatgatttttgattcaattcttgatacaattggtgatacaccagtagtaaaagtaaacaaaataggatctgaccttgattgcaacctctttgctaaatgcgagtactttaaccctggcggatctgtaaaagatcgtattggctggaaaatggtagaggacgctgaaaaatcaggcaggataaaaccaggagatactcttatcgaacctacgtcaggaaatacaggacaaggaatggcacttgctgcagcagtaaaaggttaccgatgtataataacaatgccaaaaaaaatgagccaagaaaaacaaataactctagaggctcttggcgcagaattattagaacaccgacggaagctgcctgggatgatcctgagagt

SEQ ID NO: 241916 - DNA, 232 bp, Unknown
  Bacterial polypeptide expressing nucleotide sequence isolated from the Sargasso Sea
aatgaataatacacaaaacgattttatttcaggaataggaaataccccactaatcaaattaagagccgcttctgaaataacaggttgcaatatttatggaaaagcagaatttttaaatccaggaggctctgttaaagatagagctgcacttgccttaattaaagatgctcaagagaaaaaattaattgctaaaggtggaacagttgtgaaggaacagcaggtaacactggaa

SEQ ID NO: 241917 - DNA, 808 bp, Unknown
  Bacterial polypeptide expressing nucleotide sequence isolated from the Sargasso Sea
tatggaaactaattctgtcatagctcaaattgggaatacaccattagtaaaattaaaacaagcctcagagttaacaggttgtcacatttacggaaaagctgagtactttaatccaggtgaatcggtaaaagatagagcagcattatttattgtacaagacgcaataaatagaaaattaatctctaaaggaggtacaattgttgagggtacagctggaaacactggtatcggtttagcggtagtatgtaaagagtacgatttaaaattaaagatagtaatccctaaaacgcaatctattgaaaaaaaaaatacacttaaaaaacttggcgcagagttaattgaagtagatgcagttccgtactcaaatccaaaaaattatattaaacagtctaagcaaattgcagaggatttaaataaaagaagctcaaatggtgttttttgggctaaccaatttgacaatgttattaatactgaggctcatataaaaactactgctgaagaaatatggagtcaaacagctggatcaattgatggatttacttgtgcggtaggaactggtggaactttagccggagtttcaatcggtcttaaaaataaaaataaagatataaaaattgctttatcagaccctatgggatcttctctgtattcctatattaaaaatgataaattagagagttcaggtgagtctatcacagaaggtattggaactgggaggattacaaataattttgaaaaagctttagttgatgaagcgttccaaactaacgatgctgaagcattaaatatagtttatgatttgattgat

SEQ ID NO: 241918 - DNA, 538 bp, Unknown
  Bacterial polypeptide expressing nucleotide sequence isolated from the Sargasso Sea
atgattgaccttattggtaatactccattaataaaattaaaatacccctctgaaataacaggatgtaatatttacggtaaagcggaatttatgaatccaggcggatctgttaaagacagggcagcgatgggtatcattttagacgctgaaaaaaacaaacttattgaaaaaggcggcaccgtagttgaaggcacatttggtaatactggcatatctttgaccatgattaataattcaagaggctataaaacaattattgttatgcctgatggagcatcattagaaaaaagagaaatacttacaaacctaggtgcagagttaagagttgttgaaactaaaccatattctgatcctggaaactatcaacatgtatcccgtaggctcgtagaagagttaaaagacaaaagtaaaggttcagttatttgggctaatcaatttgacaatacttctaattatcttattcatgcaaaaactacagccaaagaaatttataatcaacttgatggaaaaattgatggcttcacttgtgcaataggaa

SEQ ID NO: 241919 - DNA, 432 bp, Unknown
  Bacterial polypeptide expressing nucleotide sequence isolated from the Sargasso Sea
aagtagatattcttgtcgcaggcgtgggcactggtgcaacgctcactggtatgacgcaggttttgaagcagcaaaaaccagatttgcgttcctacgcggtagaacctgcggaaagcgccgtactgtcaggcggtgaagctggcccgcataaaattcaaggcattggcgcgggctttgttccgccattactggaccaaagtctggtagacggcattgtgaaaatcacaaatgaagaagccattcaaatggcgcgcgaagccgcatccatagaaggattagcctgcggcttgtcttctggcgctgcgctggccgccgcgattaaggtcgcgcaaattgcagacaatgcgggcaagcaaatcgttacggttcttgcatccccggccgagcgttatctcagcacagcactcttcgacggtttggaaatcagttaat

SEQ ID NO: 241920 - DNA, 340 bp, Unknown
  Bacterial polypeptide expressing nucleotide sequence isolated from the Sargasso Sea
atgactattgaagcctgtatcgggcaaacgccgctagttcgtctgcaacggttggattgcgggagctctacggtactgttaaagctagagggcaataatcctgctggctcggtaaaggatcgtgccgcactgaatatgattaaccaggcggagcttcgccaagaaatcgcccctggtgatactttgattgaagccaccagtggtaacactgggattgccttagcgatggccgcagcgattaaaggctacaagatgatcctgattatgccgtcgaattcgacccaagagcgtaaggatgccatgcaggcttatggcgccgagctgctgctggtgacaatat

SEQ ID NO: 241921 - DNA, 219 bp, Unknown
  Bacterial polypeptide expressing nucleotide sequence isolated from the Sargasso Sea
gattcaaggaattggcgcgggttttgtacctaaagttcttaatactaaattaattgatgaaattataaaaatagatgacgatgaagcattttattatgggcgtttattatctagattggaaggccttttatctggcatcagcagcggtgcagctttagcagcaactataaaaatcggcaaaagaaaggaactaatgaataaaagattgatagttattct

SEQ ID NO: 241922 - DNA, 595 bp, Unknown
  Bacterial polypeptide expressing nucleotide sequence isolated from the Sargasso Sea
tacagtgtatcaaaaaaaataggagaagaaacaccaaattcatggtatgttaatcaatatgataacccttctaattcagttgcacattatgaacaaacaggtcctgaaatatggaaccaaactatgggtaagataacacattttgttgtaggggttgggacaggaggaacaatctcgggggtttctagatatttaaaagaaaaaaataagaatattaaaatttggggtatcgatacttatggttcagtatttaaaaaataccatgagacaggaatctttgatgaagaagaaatatatccatactccacagagggaataggagaagatattttaccaaagaatgtaaattttgatttgattgatttgtttgaaaaggttaccgataaagatgccgctatttatacaagaaaactagctagagaggagggtatatttgctggaaactcatgtggagcagcaattaaaggtattattcaattaaaaaataagttaaaaaaggatgatgttgtggtggtattactacatgattcaggaagtcgttatattgggaaaatttataatgatgattggatgaaaaaaatgaaatttatttagt

SEQ ID NO: 241923 - DNA, 245 bp, Unknown
  Bacterial polypeptide expressing nucleotide sequence isolated from the Sargasso Sea
tatgtcggttaaaaatggcttcatagactgtataggaaatacgccactaattcgtttaaataaagcatcggacgagacaggttgtactatattaggaaaggcagagtttcttaatccgggtggatcggtaaaagatagagctgcattaggaataattagagatgcggagagaaacggtttcttagagcctggtggaacgattgtagagggtaccgccgggaacacaggtataggactaacgcttt

SEQ ID NO: 241924 - DNA, 430 bp, Unknown
  Bacterial polypeptide expressing nucleotide sequence isolated from the Sargasso Sea
atgaaaaataatcaagaagattttatttctggaattggaaatacccctttaattaaattaagagcagcctcagaaattactggatgtaatatttatggcaaagctgaatttttaaatcctggtggctcagttaaagatagagctgctttagctcttattaaagatgctcaacaaaaaaaattgatctccaaaggtggtattgttattgaaggcacagctggaaacactggtataggcttaggactattaggtaattctcttggttataaaactatcattgtaatgaatgataatcaaacccaagaaaaaaaagatactttaagaaacttaggtgctgaattaagattggtaccagccaaaccttataaagatgataataattttgttaaagttgcagctagattagctgatgaattaagacccacaaata

SEQ ID NO: 241925 - DNA, 292 bp, Unknown
  Bacterial polypeptide expressing nucleotide sequence isolated from the Sargasso Sea
aatgaaaaattatagcaatgattttattgaatctataggaaatactcctcttataaaacttagagcagcttcagaaataacaggatgtgatatttatggaaaagccgaatacttaaatcctggtggatcagtaaaagatagagccgcacttgctttaattaaagatgctcaggaaaaaaagttaatctctaaaggaggaaccgttgtagaaggaacggctggaaatacaggtataggattatgtctcttaggaaattcccttggttataaaactattattgtaatgaatgat

SEQ ID NO: 241926 - DNA, 337 bp, Unknown
  Bacterial polypeptide expressing nucleotide sequence isolated from the Sargasso Sea
atgaaaaatacaaaaaataatttcatcgactcgattggaaatacacctttaattaaattaaaagcagcatctgaaattactggatgtaacatttatggtaaagctgagtatttaaatcccggtggctcagtcaaagatagagctgcgctagctttaattaaagatgctcaagaaaaaaaattgatatctgaaggtgggattgtagtagaaggaactgcaggcaacacaggtataggattgtgtcttttaggaaattctcttggttataaaactataattgtaatgaatgacaatcaaacacaggaaaagaaagatactttaagaaatattggtgctg

SEQ ID NO: 241927 - DNA, 622 bp, Unknown
  Bacterial polypeptide expressing nucleotide sequence isolated from the Sargasso Sea
gatggcggcggcggtgaccatcgtcgccgtcgccgcgtgcggggtcgtgtgcgcgtatcaacgcgcgtggcggcgcctcgaagcgcgggacgaaaacgcgccaggtggacgaaaagagggcgcggggtgggaccgcgcgcccgagaccgcggagagcgtgtcgcgcgggcacgaggacgtgctcggagtgatcggaaacacgcccgtgatgcgcatcgagtcgttatcgacgctgaccgggtgtgagatttacgtcaagtgtgagtttcttaatcccggcggctcggtcaaggatcgggtcgctttgagaatcgtcgcagacgccttggcgagcggtgctctgcggcgaggcggtttgtgcacggagggcaccgctgggagcacgggtgtgtctctcgccatggtgtgtaaagcgttgggggtggagtgtttcgtcgcgatgccggacgacgccgcgaaggaaaaatcagcattagtcgaggcctacggagctcgagtggcgcgagtgcggccggtgtcgatcgcaaatcgtggtcactttgtaaacgtggcgagacgggaagctgaaaacgcgcgaacggagcgcggtgagggaggcgggtactttgccgatcagtttgaa

SEQ ID NO: 241928 - DNA, 285 bp, Unknown
  Bacterial polypeptide expressing nucleotide sequence isolated from the Sargasso Sea
ccaccgcattcaggggattggcgctggctttgttccggacaactaccaaagcctctttagtcgatgaggtgctgcaagtcgatgatgccgaggcgatggccatgggacgccgcttggcgcgagtcgaaggcttgttgtgtggtgtcagtagtggtgctgctatggcggctgcgctgacgttggggcaacgaccagagatggagggcaagttgatcgtggtggtgctggcgagctttggcgagcgttatctcagtacaccgatgttcaccgagatcggctcctgat

SEQ ID NO: 241929 - DNA, 406 bp, Unknown
  Bacterial polypeptide expressing nucleotide sequence isolated from the Sargasso Sea
aatgaaaaactacagtgataactttattcaatctataggcaatacgcctttaataaaacttaaagctgcttcagaaataactggttgcaatatttatggtaaagctgaatatttaaacccaggaggttctgtaaaggatagagccgcattagctttaattaaagatgcacaagaaaaaaaattaatttctaaaggaggcacagttgtagaaggtacagctggtaatactggtattggcctctgtcttttgggtaattctttaggatacaaaacaattattgtaatgaatgacaatcaaacccaagaaaaaaaagatattttaaaaaatattggtgctgatttaagattggttcctccaaaaccatataaagatgatggtaattacgttaaatttgcaggaagattg

SEQ ID NO: 241930 - DNA, 292 bp, Unknown
  Bacterial polypeptide expressing nucleotide sequence isolated from the Sargasso Sea
catgaagaattttcaaaataattttatagaaggaattggtaatactcctttaataaaattaaaagcagcatcggagataagtggatgtaatatttatggtaaagctgaatttctaaaccctggcggctcagtaaaagatagagctgccttagctttaataaaagatgctgaagaaaaaaaacttatttcaaaaggtggtactattgttgagggtacagcaggaaataccggaataggattgtgtttaataggtaattcagttggttacaaaactgttattgttatgaatgat

SEQ ID NO: 241931 - DNA, 517 bp, Unknown
  Bacterial polypeptide expressing nucleotide sequence isolated from the Sargasso Sea
aatgatacatgaaaatattttaagcaccattggcaacacgcctgtggtcaaaataaataaaattgcaaagaatctagattgcaatgtttttgctaagtgcgaattctttaatccaggtgggtcagttaaagatagaataggatggaatatggttaaagaagctgaactttctggaagaattaaacctggagatacacttatcgaaccaacatcaggaaatactggccaagggatagcattagctgctgcagttaaaggatataaatgcatcattacaatgccagaaaaaatgagtcaagaaaaacaaatagctctagaggcattgggcgcagaaataattagaacaccaactgaagctaaatcaagcgatccagaaagtcatatttctgtggcaaaaaaattaaataaagaactagaaaactcccacattctagatcaatattcaaatccatcaaatccagaagctcattattatggtaccgctgaagaaataattaaagattttaataataattta

SEQ ID NO: 241932 - DNA, 351 bp, Unknown
  Bacterial polypeptide expressing nucleotide sequence isolated from the Sargasso Sea
aatgaagaatattttagacacaattggtaatacacctcttgttaaacttcaaaaaatagttccagaaggttctggtgatgtttatgtaaaattagaagcatacaatcccacaggttctaaaaaagataggatggcactttctatgattgaaggggcggaaaaaaaagggcttttaactaaaggaatgtctgttgtcgaatattctggtggaagcactggagctggattagcttttgtttgtggtattaaaggttatcaatttaggttaatcacagcagatgtatttgggaaggaaaaaattggtttaatgaaagcattaggagcagatttagaaattataaaaagtgataa

SEQ ID NO: 241933 - DNA, 482 bp, Unknown
  Bacterial polypeptide expressing nucleotide sequence isolated from the Sargasso Sea
catgcttcacgacaccattctctcggccatcggcaatactccccatgttaagcttcagcgcgtgggagccgagcttgattgcgagctttacgcaaaatgtgaattcatgaatccgggaggctcagtgaaagaccgcataggttaccacatggtcacacaagctgaacaagctggcaccattaccccaggtgacaccctgattgaacccacgtcaggtaacaccggcattggcattgccatggccggtgctgtaaaaggatacaacgtcattatcaccatgccagaaaagatgagccacgaaaaacaagtggttttagaagccctgggcgccaccatctaccgcacccctactgaagccgcctttgatgaccccgacagccacatcagcctagcaatacgtttacagcaagaattaccacgggcgcacatactcgaccaatacgctaatccaaataacccggacgcccactatgcctttaccg

SEQ ID NO: 241934 - DNA, 190 bp, Unknown
  Bacterial polypeptide expressing nucleotide sequence isolated from the Sargasso Sea
ctgcctgctggacggccagcgggcggcggcataggcttggggtttttcctgcccgcaaggacttccatcatgagtcgtatcttcgcagacaacgcccaggccatcggcaatacgccgctggtgatgatcaaccgcctgggcccgaaaggcgtgaccatcctggccaagatcgaagggcgtaacccggcgt

SEQ ID NO: 241935 - DNA, 884 bp, Unknown
  Bacterial polypeptide expressing nucleotide sequence isolated from the Sargasso Sea
agctgaatttctaaacccaggaggttccgtcaaagatcgggctgcaaaggctattattctggatgcggaggagagaggattgttgagtgctggcgggctagttgttgaggggacagcaggaaacacaggcattggcttggcactggtaggaaattcactgggataccgtacattgatagtcattcctgatactcaaagccaggagaaaaaagatatgctaaggctttgtggtgtagaactgcgcgaagttccggcagtgccatatcggaatgaaaacaactatgtcaaagtttctggacgtatagctgatgaattatccaaaacggagccaaacggagtaatttgggccaatcaatttgataatatagcaaaccgaaaaggccactacgaaacgaccggcccagaaatttttgaccagactgatggaaaagtagatggcttcatttgtgctgttggaacaggcggaaccttggcaggtactggcttatacctgaaagagcgtaatccagaatttattattgggctagcggatcctcttggtgctgcgcttcactcattttatacaactggtgaattgtcaagttgtggtgattctattacggaaggcattggacagggtcgtatcacagcaaaccttgaaggtgctaatgtagattactccttccaaattccagatgaagaagccttgccaatttgctttgatttattgaaagaggaagggctttgtttaggaggttcttctggaataaatgtagctggtgccattcgcctagcggaggagattggtcctggaaaaactattgtcactatcctttgtgactctggagtacgttatcaatccagactattcaatcccttatttcttaaggaaaaaggcctgcctt

SEQ ID NO: 241936 - DNA, 370 bp, Unknown
  Bacterial polypeptide expressing nucleotide sequence isolated from the Sargasso Sea
atgaaaattttacaaaataattttgtcgaagcaataggaaacactcctttatttaaattaaaagctgcatcagaaatcactggttgtaatatttatggaaaagcagagtaccttaatccaggtggctctgtaaaagatagagctgctctagctttaataagagacgctgaagaaaaaaaactaatttcaaaaggtggaacaattgttgagggaactgctggtaatactggaattgggttgtgtctgttaggaaattctattggttataaaactataattgtaatgaatgataatcaaacacaagaaaaaaaagatttattaagaaatattggagctgatttaaggttggttccacctaaaaccttataaa

SEQ ID NO: 241937 - DNA, 478 bp, Unknown
  Bacterial polypeptide expressing nucleotide sequence isolated from the Sargasso Sea
aatgagcaatataaaaaacaatttcatagattcaattggaaacacaccattaattaaattaaaagctgcatcagaaattactggttgtaatatttatggcaaagctgaatttttaaaccctgggggatcagtcaaagatagagcagcacttgctttattaaaagatgctcaagaaaaaaaattaatttctaaaggtggtattgttgttgaaggaacagctggtaatactggaattggtttaggtcttttaggtaattcattgggatataaaacaattatcgtaatgaatgataaccaaacacaagaaaagaaagatactttaagaaatttgggtgctgaacttagattggttgcaccaaaaccatataaagatgaaaataattttgtgaaaattgcgggaagacttgctgatgaattaagaccaacaaataacaatggagttgtttgggcaaatcaatttttgataatacagcacttc

SEQ ID NO: 241938 - DNA, 926 bp, Unknown
  Bacterial polypeptide expressing nucleotide sequence isolated from the Sargasso Sea
aatgagccgagtgttaaaatcagtagccgaagcgatcggaaatacgccattggttcgattggatcgcttaacaagattacatggtgtaaagggaaccattttagcaaagctagaatatttaaatcctgggttttcaaaaaaagatagagcagcacaaggtattatagaagaagcagaaagtttaggtattttatcaccagggcaaacagtagttgagctaacttcaggaaatatgggaactggtttagcaattgtttgtggtctgaagggatatccgtttgtagcagtgatgtccaaggggaactccgaagaaagagcccagatgatgcgttctcttggagctgaagtggttcttgttgatcagctacccgcatccagtcccggtcaagtgtcaggaggggacctagatttagtagacaaagcggcaaagaaaatcaccaaacagcgccaagcgttcagggcagatcaattctaccgagatgggaactggcaagctcattacgacaatacagcgccagagatatgggaagcaacaaatggggacttagacggtttcgctgatttcttgggttctggaggcacatataaaggcatcgccaaagcattaaaagaacgagatagcgatattcagtgttttgttgttgaacctgagggcgccgcggtagcagctggacagacagttacaaagccataccacccaattcaaggcgggggatacgttattccagaattaaagtttcttgataaagttccagttgacggatttatccagatatcaggagatgaagctcaaaaaaccacgaaagaacttgcaaagtatgagggtatatttggaggatattcttctggtgcaaacgtagcggcagcactaaaactactttctggaattatgtcaggtaaaaacatcgctgtggtaatttgcgata

SEQ ID NO: 241939 - DNA, 154 bp, Unknown
  Bacterial polypeptide expressing nucleotide sequence isolated from the Sargasso Sea
aatgaaaaatgctcaaaataattttgtagagggcattggaaatacaccattaataaaacttaaagctgcatctgaaataactggatgtaatatttatggaaaagcagaatatctaaatcctggtggatctgtaaaagatagagctgcattagct

SEQ ID NO: 241940 - DNA, 613 bp, Unknown
  Bacterial polypeptide expressing nucleotide sequence isolated from the Sargasso Sea
catgcgggacttagatgttgccgattcagtgcttgacctcgtaggaaacactccattggtgaacctaccgagaataggagaacaatcgccgtgccccatagtcgcaaagcttgagacgacgaaccctggtggcagctctaaagaccgcccagcattaaccatgattgacgaggcggaaaaggctggtctcctcaagccgggaggcaccattatcgaaccgacgtctggcaacactggggtgggtttggccatagtcgccgcccaacgtggttacgactgcatctttgttatgacagacaaagtcagtagcgaaaaggtcactctcttagaggcctacggcgctgaagtagtcgtctgcccagtggcggtagcgccagatgatccacgctcgtattactccaccgcggaacgcttagttaaagaggtccccaacgcgtaccgaccgaaccaatatcacaatcaagcaaacccgaaagcgcactatgagtccacaggccctgaaatatgggaacagaccaaaggtcgggtaacccattttgttgcaggagcaggcactggagggacaattaccggcgttggtaagttcttgaaagaacaaaaccctgaagtgcag

SEQ ID NO: 241941 - DNA, 262 bp, Unknown
  Bacterial polypeptide expressing nucleotide sequence isolated from the Sargasso Sea
aatgacacagattaaaaataattttattgaatccatagggaatacacctctaataaaattaaaagcagcctcagaaattactggatgtaatatctatggtaaagctgagtacttaaacccaggtggatcagtaaaagatagagcagcattagctttgattaaagatgcacaagaaaaaaaattaatatctgaaggtggaatagttgttgaaggaacagccggaaatacaggaataggattatgtcttttaggaaattctctt

SEQ ID NO: 241942 - DNA, 370 bp, Unknown
  Bacterial polypeptide expressing nucleotide sequence isolated from the Sargasso Sea
aatgtctatagacaataaagcttacaataatattttagaacttattggtaatacacctcttgtaagacttaataaaatttgtgatggctttccgggcaaatacttcacaaaatatgagggatacaatccaggtcattcgaataaagatcgtattgctcttcatattctaaatcaagcagagaaaaaaaagatattaaaaaagggaagtactattattgaaactacttctggtaacacaggttttagtctagctatggtatctcttttgaaaggttataaatgcatacttgcggttagttctaaagcatcaaaggataaaattaatatgttgaaatgtcttggagcggaaatttatgtatgcccttcaaat

SEQ ID NO: 241943 - DNA, 334 bp, Unknown
  Bacterial polypeptide expressing nucleotide sequence isolated from the Sargasso Sea
tatgaaaactttacaaaataattttgtcgaagcaataggaaacactccattatttaaattaaaagctgcatcagaaattacaggttgtaatatttatggaaaagcagagtaccttaatccaggtggctctgtaaaagatagagcggctctagctttaataagagatgctgaagaaaaaaaactaatttcaaaaggtggaacaattgttgagggaactgctggtaatactgggattgggttatgtcttttaggaaattctattggttataaaacaattatcgtgatgaacgataatcaaacacaagacaaaaaagatttattaagaaatattgga

SEQ ID NO: 241944 - DNA, 309 bp, Unknown
  Bacterial polypeptide expressing nucleotide sequence isolated from the Sargasso Sea
tatgaaaactttacaaaataattttgtcgaagcaataggaaatactcctttatttaaattaaaagccgcatcagaaattactggttgtaatatttatggaaaagcagagtaccttaatccaggtggctctgtaaaagatagagcagctttagctcttataagagatgctgaagaaaaaaaactaatttcaaaaggtggaacaattgttgaaggaactgctggtaatactggaattggattatgtctattaggaaattctattggttacaaaaccattattgtaatgaacgataatcaaacacaagaaaa

SEQ ID NO: 241945 - DNA, 478 bp, Unknown
  Bacterial polypeptide expressing nucleotide sequence isolated from the Sargasso Sea
aatgaataatacacaaaacgattttatttcaggaataggaaataccccgctaatcaaattaagagccgcttcagaaattactgggtgtaacatttatggtaaggctgagtttttaaatccaggaggatctgttaaagatagagctgcacttgccttaattaaagatgctcaagaaaaaaagttaattgctaaaggtggaacagttgttgaaggaacagcaggtaacactggaattggtttgggtctattaggaaattctttaggttacaaaacaatcattgtaatgaatgataatcaaacccaagagaaaaaagatctacttagaaatcttggagctgaattaagattagtaccacctaaaccttataaggatgataataattttgttaaagtagcagcaagacttgcagatgaattaagaccatcaaataataatggtgttatttgggctaaccagtttgataatacagcaaatgct

SEQ ID NO: 241946 - DNA, 700 bp, Unknown
  Bacterial polypeptide expressing nucleotide sequence isolated from the Sargasso Sea
tatggatactaattcagtaatatctcaaattggaaatacaccattagttaaactaaaacaagcctcagaattaacaggttgtcatatatatggaaaagcggaatattttaaccctggagagtctgtcaaagatagagctgcattatttatagttcaagatgcaattaaacgaaaactaatttcaaaaggcggcattatagtagaaggaacggctgggaacacaggaataggtttagctgttgtttgtaaagaatatggtttaaaacttaagattgttattcctaacactcaatctaaagaaaaaaaagaaactttaaaagaactaggcgctgatcttattgaagttgatgcagtcccatattcaaaccctaaaaattatataaagcaatctaaacaaatagctgaagagttaaacaaaactagttttaacggagtttattgggctaatcagtttgataatgtcattaatacagaggcacacattaagacaacagcagaggaaatttggaaccaaaccgcaggtacaattaacggatttacctgtgccgtaggaacagggggtactttagctggtgtttcaattggtttaaaaaataaaaataaagatataaaaattgctttatctgaccctatgggatcatctctttattcccacattaaaaataataaacttgagagtaaaggtagttcaataactgaa

SEQ ID NO: 241947 - DNA, 889 bp, Unknown
  Bacterial polypeptide expressing nucleotide sequence isolated from the Sargasso Sea
tgtcaaaataaataatatggggccgaagaatcaggatatttttgtcaaatgtgaagcctttaatcctttggcatcggtaaaagatcgattggcattggcgatcatcaatgatgccgagaaatctggaaaacttaagcctggtcaaacagtcattgaagcaacttcaggaaacacaggtatagcattggccatggtctgtgccgctagaggatatccatttgtggcagtgatggtagaaacattttcaattgagcgaagaaaagtaatgaaggctcttggtgcaaaattgatcctcactcctgctgcagaacggggaacgggcatggtgaaaaaagctacagagttagcagaaaaacatggttggtttctggcggatcaatttagaaatcctgccaatcctgaatatcataaaaatacgaccgcagttgaaatcttgagtgatttcagaaatcgtgaattagactattttgtcagcggttggggaacgggtggaaccataacgggagtgggtacggttttgaagaccgccagaccagaaataaagatcattgccgttgagcctgagtcagcgcctttgctatcgaagaatgaatggcagccgcataagattcaaggctggactcctgactttgtcccagaggttttggatcaaaatgtcatagatcaatatctacctgtcaatgacgatgcatcgataaaaacgtctatggaactagccagaaaagagggaatatttactggaatttcaggtggagcaaccatgcttgctgcattaatgattgcaaaagaagcgccaaaaaatagtactttttgtgtgatgttgcctgacactggagagcgatacctttcttcaccactctttgaggatatttcagaagatagtgacgac

SEQ ID NO: 241948 - DNA, 367 bp, Unknown
  Bacterial polypeptide expressing nucleotide sequence isolated from the Sargasso Sea
atggacacagtattaaatcaaattggaaatacaccattagtcaaattaaaacaagcctcagaattaactggatgtcatatttatggtaaagctgaatacttcaatcctggtgaatcagtaaaagatagggctgcattatttattgtccaagacgcaataaaacgtaaattaatatcaaaaggcgggactattgttgagggtacagctggtaatacgggaataggtttggcagttgtttgcaaacaatacgatctgaacttaaaaattgttatccctaaaacccaatctattgaaaaaaaagatacattgaaaaaaatgggagcagaattgattgaagttgatgctgttccttattctgacccctaac

SEQ ID NO: 241949 - DNA, 494 bp, Unknown
  Bacterial polypeptide expressing nucleotide sequence isolated from the Sargasso Sea
aatgaattcttccagcattcgcgaaaacctggttcagtcgatcggcaatacgcctttgatccgtctccagagggcttctgaggaaacaggttgtacgattctggggaaggcagaattcatgaaccccggaggttcggtcaaggaccgtgctgcaaaggcaatcgttctggacgccgagaagcagggagttctccaaccaggagggttgattgtcgagggaaccgctggaaatacaggaatcggcttggcactggtgggaaattcccgtggttaccggaccctgattgttattcccgaaacccaaagtcaggaaaaaaaggacatgcttcgtctcagcggggccgaactcaaggaagtccccgccgttccttatcgggatccacagaactatatcaagatttccggaagactcgctgaggaaatcatcagaacgatcctaatggtgccatttgggcaaaccagttcgacaatgtggccaaacggcaggcacatta

SEQ ID NO: 241950 - DNA, 655 bp, Unknown
  Bacterial polypeptide expressing nucleotide sequence isolated from the Sargasso Sea
taaaattaactcaatcggaaaagatctgagctgtaatatttttgcgaaatgcgaattttttaatccaggtggctctgtgaaggatagaatcggctggaaaatggttgaagatgctgagaaagctggaaaaataaagcctggtgatacactaattgaaccaacttctggaaatacaggccagggcttagcattagcttcagcagtaaagggatacaaatgcattatcactatgccagaaaaaatgagtcaagaaaagcaaattgttttagaggccttaggtgcaaaaatagtaagaactccgactgaagctctttccagtgatcctgaaagtcatatatcagtggcaaaaaaacttcaaaaagagatcaaaaactcacacattttagaccagtactcaaatccatcaaaccctgatgcacattaccacaatacagctgaggaaatcttaaaagattttggagaaaatatagatatggtagtcatatcggttggcacaggcgggactattacaggcgtggcgaaacgattgaaagaagccattcccaaaataaaggttgtgggagctgatcctgtaggttccattcttggtggaggtgatgagattagctcataccttgttgagggtataggctatgattttatccctgaagtttta

SEQ ID NO: 241951 - DNA, 439 bp, Unknown
  Bacterial polypeptide expressing nucleotide sequence isolated from the Sargasso Sea
atgaaaactttacaaaataattttgtcgaagcaataggaaatacacctttatttaaattaaaagctgcatcagaaattactggttgtaatatttatggaaaagcagagtaccttaatccaggtggttcagttaaagatagagcagctctagctttaataagagatgctgaagaaaaaaaactaatttcaaaaggtggaacaattgttgaaggaactgctggtaatactggaattggattatgtctattaggaaattctattggttataaaactattattgtaatgaacgataatcaaacacaagaaaaaaaagatttattaagaaatattggagctgatttaaggttggttccaccaaaaccatataaagatgaaaataactttgttaaatatgcaggaagattggctgatgaattgaagagtagtaacaatcacggtg

SEQ ID NO: 241952 - DNA, 766 bp, Unknown
  Bacterial polypeptide expressing nucleotide sequence isolated from the Sargasso Sea
gagatattaagaaaaggctcaacaattattgagccaactagcgggaatacaggaattgcattagcaatgatttctaaagttaaaggctacaatatgatcgcagtaatgcctgataatgtaagtgatgaaagaaagtcattattatcttcattgggcgctgaaattattttttcaaatggaaaagatggtactaatggtgcaatcagattggcgcaagaaattgataaaaataacgaaaattattttatgccttatcaatatggaaatgaagcaaatccaagagctcattatgaaactacaggaccagaaataattaagcaaatgccagaaataaatgtatttgtagcagggcttggtacaggtggcacattgatgggagtggggaaagcattgaaagaatataatcaggatataaaggtagttgctgctgctccgcaccctgaagaagtagttccagcgttaagaagtattgaacatggatttattccaccaatattagatttagaaaaattagattccaggatacttgttggagaggaagagtctttttattggacaaaagcacttatggataaatgtggagtatttgcaggagtttcttgtggtgctgttacagcggcagctataaaagtggcaaaaaaaattgagacagggaatattgttttaataatagctgactctggcgaaaggtatttatctagcaaattgtgggaaatggaatataaagaaattaaagaaattggcgatcaaaaaatttggtggtaaa

SEQ ID NO: 241953 - DNA, 220 bp, Unknown
  Bacterial polypeptide expressing nucleotide sequence isolated from the Sargasso Sea
aatgattttcagcaattttcttgattcaataggtaatacacctctgataaagcttcggaaagcatctgagcataccggttgcaatattttgggcaaggctgaatttctaaaccctggaggttccgtcaaagatcgggctgcaaaggcgattattctggatgcagaagagagaggattgctgagtccaggtgggctagttgttgagggaacagcaggaaac

SEQ ID NO: 241954 - DNA, 248 bp, Unknown
  Bacterial polypeptide expressing nucleotide sequence isolated from the Sargasso Sea
tatggacttgagtggcctcgatattgccggatcggtacttgaactcatcgggaagactccaatggtgcgacttccacgcgtcgatgcggggctgtcctgcccgatcatcgcgaaactggaggccactaacccgggcggcagtgtcaaggaccggccagcggtcaccatgatcgaggccgctgaggccgagggcctactcaagccgggcgggacgattgttgagccgacttcaggcaacacgggcgttg

SEQ ID NO: 241955 - DNA, 309 bp, Unknown
  Bacterial polypeptide expressing nucleotide sequence isolated from the Sargasso Sea
aatgaaaaataatcaagaagattttatttctggaattggaaatacccctttaattaaattaagagcagcttcagaaattactggatgtaatatttatggcaaagctgaatttttaaatcctggtggctctgttaaagatagagctgctttagctcttattaaagatgctcaacaaaaaaaattgatctccaaaggtggtattgttgttgaaggtacagctggaaacactggtataggcttgggactattaggtaattctcttggttataaaactattattgtaatgaatgataatcaaacccaagaaaa

SEQ ID NO: 241956 - DNA, 331 bp, Unknown
  Bacterial polypeptide expressing nucleotide sequence isolated from the Sargasso Sea
gatggggattactcgcggattcgtcggagcggtgggcaataccccgctgattcgcctagagcatctcagcgagcgcactggttgcgaaatccttggcaaggctgaattcatgaacccaggcggctcggtcaaagaccgcgccgcccttggcatccttttagctgcggaagccagtggtgagttgaaatctggaggcaccgtggttgagggtacggctggcaacacaggcattggcttggctcacctttgcaatgcccggggttaccgctgcgtgattgtgatcccagaaacgcagtcggcagaaaagattgagttgttgcgcagcctggga

SEQ ID NO: 241957 - DNA, 170 bp, Unknown
  Bacterial polypeptide expressing nucleotide sequence isolated from the Sargasso Sea
aatgattaataaaaacattcttgaattaattggaaatacccctctaatcaaacttaaatatccatctgaaataactaattgtaatatttatgggaaagcagaatttttaaatcctggtggttctgtcaaagatagaacagctttaggtataattttagatgctgaaaaaa

SEQ ID NO: 241958 - DNA, 732 bp, Unknown
  Bacterial polypeptide expressing nucleotide sequence isolated from the Sargasso Sea
cgcgcagaagcaagaggagcaatatctcctggagataccttgatgaagctacaagcggtaatactggtattgcgcttgctatggcagctgcgattaaaggataccgtatggtactgataatgcccgcgcatatgagtgatgagcgtaaggcagccatgtctgcctatggagcagaacttattctggtgagtaaggaagcaggaatggaaactgctcgggatatggcgcttcagatgcaagaggaaggaaaaggtttcgttttagatcaatttgcaaacgaagataacccggtttcacactacgaaggtactggcccagagcttttagatcaaacggaaggtgaaattactcacttcatcagttccatgggcactaccgggacgattatgggagtgtctaggttctttagagaagtaaagccagaagtggaaattattggattacaacctttagagggatcagtgataccaggcattcggcgttggccagatgcatatatgccaaaaatctatgatagatcccaagtagacagggtcatagatgtaagtcaaagtctagcagagtccaccatgagggagcttgcagaactcgagggtattctgtgtggagtatcctctgggggcaatgtggccgcggcacttcagatcagtagagaaattgaaaatgcaacgattgtggctattatttgtgatagaggggatcgatatctttcgacaggagtattctcttaag

SEQ ID NO: 241959 - DNA, 427 bp, Unknown
  Bacterial polypeptide expressing nucleotide sequence isolated from the Sargasso Sea
aatgaaaaatataaaaaataattttatcgaatcaattggtaatactcctctaataaaacttaaagcagcttctgaaatgactggatgtaatatttatggtaaagcagaatttttaaatccaggtggatcagtaaaagatagagcagcgcttgctttaataaaagatgctcaagaaaaaaaattaatttcaaaaggtggtatagttgttgaaggtactgcaggaaataccggaattggtttaggtcttctaggaaattctttaggatataaaacaatcatagtaatgaacgacaatcaaactcaagagaaaaaagatttattaagaaatttaggtgcagaattaagattagttccagcaaaaccttataaagatgataataattatattaaagttgcatcaagactagcagatgaacttaagtcctca

SEQ ID NO: 241960 - DNA, 345 bp, Unknown
  Bacterial polypeptide expressing nucleotide sequence isolated from the Sargasso Sea
aatgacagatattagaaataattttactgaatcaattggaaatactcctttaataaaattaaaagcagcttctgaaatcaccggatgtaatatttttggtaaagcagaatatcttaatccgggtggatcagttaaagatagagctgcacttgccttaattaaggatgcacaggaaaaaaaattgatttcagagggtggcataattgttgaagggactgctggtaatacaggtataggattatgtcttttaggaaattctcttggttacaaaactataatcgttatgaatgataaccaaactcaagaaaagaaagatactttaagaaacattggtgcagattttag

SEQ ID NO: 241961 - DNA, 475 bp, Unknown
  Bacterial polypeptide expressing nucleotide sequence isolated from the Sargasso Sea
aatgaataatacccaaaacgattttatttctggaataggaaatactccattaattaaactcagagcagcctctgaaattactgggtgtaacatttatggaaaagcagaatttttaaatcctggaggatcagtaaaagatagagctgcacttgctttaattaaagatgctcaagaaaaaaaattaatttctaaaggcggaactgttgttgagggaacagctggtaatacaggaataggtttgggtcttttaggaaactctcttggctataaaacaattattgtaatgaatgacaatcaaacacaagagaaaaaagatttacttagaaaccttggagctgaattaaaattggttccacctaagccttataaagatgacaacaactttgttaaagtagctgcaagacttgcagatgaactaagacctacaaataataatggtgttatttgggctaaccagtttgataatactgcaaat

SEQ ID NO: 241962 - DNA, 190 bp, Unknown
  Bacterial polypeptide expressing nucleotide sequence isolated from the Sargasso Sea
tatgaaaactttacaaaataattttgtcgaagcaataggaaacactccattattcaaattaaaagccgcatcagaaattactggttgtaatatttatggaaaagcagagtaccttaatccgggaggctctgttaaagatagagcagctctagcattaataagagatgctgaagaaaaaaaactaatttca

SEQ ID NO: 241963 - DNA, 391 bp, Unknown
  Bacterial polypeptide expressing nucleotide sequence isolated from the Sargasso Sea
atgatttataaagacttattaagttctattggaaacacaccaattataaaaattaaaaacatagcacctaaaaatattaatatttttgtcaaagctgagtacttcaatccaggaggttcagtaaaggatagattggctttaagtattattgaaaaagctgaaaaagagggattattgaagcctagacaaactgttgttgaagcgacaagtggcaatactggaattggattggcaatggtatgcgcaagcaaaggttatccatgtgtaatgacaatgcctgacagtacatccatagaaagaagaaaattaatgcgatttcttggagctaaagttctattaacaccagcatctgaaggaacaactgctgcatataatcttgccaaaaaaattt

SEQ ID NO: 241964 - DNA, 418 bp, Unknown
  Bacterial polypeptide expressing nucleotide sequence isolated from the Sargasso Sea
gatggggatcactcgcggattcgtcggagcggtgggcaataccccgctgattcgcctggagcatctcagcgagcgaactggttgcgaaatccttggcaaggctgaattcatgaacccaggcggctcggtcaaagaccgcgccgcccttggcatcctgttggcggcggaagccagtggtgagttgaaacctggaggcaccgtggttgagggcacggctggcaatacaggcattggcttggctcacctttgcaatgcccggggttaccgctgcgtgattgtgatcccagaaactcagtcggcagaaaagattgagttgttgcgaagcctgggagcagaggttcgaactgtccctgccgttccgtaccgggatcccagcaactacgtgaaactctccggccgcatcgctgaggagatctcg

SEQ ID NO: 241965 - DNA, 256 bp, Unknown
  Bacterial polypeptide expressing nucleotide sequence isolated from the Sargasso Sea
agaaatatggtcccaatccaataacaatttagatggactagttacaggagtaggcacaggaggaacaattactggttgtgcacgttttttgaaaaaagttaatccaaattgcaaaatttatgccgtagagcccaaaaaaagtgctgtgatttccggagaaaaagcacgatctcattcgattcaaggaattggagcgggtttcgtaccaaaagttcttaatactaaattaattgatgaaattataaaaatagatgac

SEQ ID NO: 241966 - DNA, 832 bp, Unknown
  Bacterial polypeptide expressing nucleotide sequence isolated from the Sargasso Sea
tatggatagtaattcgattatatcgcaaattggaaatacaccattagttaaattaaaacaagcctcagaattgacaggttgtaatatctatggaaaggctgaatattttaaccctggtgagtcagttaaagatagggcagctttatttattgtcgaagatgcattgaatagaaaacttatttcaaaaggtggaacaatagttgaaggtacagcaggaaatactggtattggattagcagtggtttgtaaagaatatggtcttaaacttaaaatagtcattccgaatactcagtcaattgaaaaaaaagagactttgaaaaaactgggagcagaattaattgaagttgaagctgtaccttactcaaatcctaaaaattatattaaacaatcaaaaaaaattgctgaagatttaaataaaaaaagtaaaaatggggtttattgggcaaatcaatttgacaacttaattaatgccgaggcacatattaagactaccgcagaagaaatctggtatcaaacagcaggtttaatagatggttttacttgtgcggttggaactggaggcactttggctggtgtttcaataggtttaaaaaataaaaataaaaatataaaaatcgcattatcagatcctatgggatcatctttattttcttatattaaaaataacaaattagagagttcaggaaactcaattacagaaggtattggcaccgctagaattactaaaaattttgataaagctttaattgatgatgcctttcaaacggatgatacagaagcattaaatcttgtttatgatttaattgaaaaacaaaaaataatcttaggagga

SEQ ID NO: 241967 - DNA, 460 bp, Unknown
  Bacterial polypeptide expressing nucleotide sequence isolated from the Sargasso Sea
atgaatgatattcaaaatgattttatttcagggattggaaatactcctttaataaaattaagagctgcatcagaaataactggttgtaatatttttggaaaagctgagtttttaaatcctggaggttctgtcaaagatagagcggcccttgctttaattaaagatgcccaagagaaaaaattaattgctaaaggtggaacagttgttgagggtaccgcaggaaatactggaattggtttaggtctattaggaaattcattgggttataaaacaattattgtaatgaatgataatcaaactcaagaaaaaaaagatcttttaagaaatttaggtgcagaattaaaattagttccagctaaaccttacaaagatgataacaactttgttaaagtcgcagcaaggctagctgatgaacttagaccgacaaataataatggagtaatttgggctaaccaatttg

SEQ ID NO: 241968 - DNA, 277 bp, Unknown
  Bacterial polypeptide expressing nucleotide sequence isolated from the Sargasso Sea
aatgatatacgatactatacttgaaaccattggaaatacgcctgttgttagaattaactcaatcggaaaagatctgagctgtaatatttttgcaaaatgcgaattttttaatccaggtggctctgtgaaggatagaatcggctggaaaatggttgaagatgctgagaaagctggaaaaataaagcctggtgatacactaattgaaccaacttctggaaatacaggtcagggcttggcattagctgcagcagtaaagggctacaagtgcattatcact

SEQ ID NO: 241969 - DNA, 377 bp, Unknown
  Bacterial polypeptide expressing nucleotide sequence isolated from the Sargasso Sea
catgatatataatgacattcttgaaacaatcggatcaacccctgttgtaaaattaaattctattggtaaagatcttgaatgtaatctttatgcaaaaatagaaatggttaatcctggaggatctgtaaaagatagaactgcttttagaatgattgatcatgctgaaaaagaaggtcgtattaagccgggagatacattaattgaggcaacgtctggtaatactggaattggacttgctttagctgcagctgtaagaggatacaagctaattatttgcatgcctgaaaagatgagtatggaaaaagaacttactatcaatgctttaggtgcgaaaatagtacgtactcccactgaagcagctcatgatgatccagaaa

SEQ ID NO: 241970 - DNA, 418 bp, Unknown
  Bacterial polypeptide expressing nucleotide sequence isolated from the Sargasso Sea
aatgtcacaaataaaaaataactttattgagtcggttggcaatacacctttaataaaattaaaagcagcctcagagatcactgggtgtaatatttatgggaaagcggagtacctaaatccaggtggatctgttaaagatagagctgctctagcactcataaaagatgcacaagaaaaaaaactaatttcagaaggtggaattgttgttgaaggcactgcgggtaatactgggattggtttatgtcttttaggaaattccttaggatataagacaattattgtaatgaatgataaccaaacccaagaaaaaaaagatacgttaaaaaatattggtgcagatcttagactggtaccacccaagccttataaggataatggtaactatgtaaaagttgcaggtcgtcttgctgaagaataa

SEQ ID NO: 241971 - DNA, 886 bp, Unknown
  Bacterial polypeptide expressing nucleotide sequence isolated from the Sargasso Sea
atgatactgaataatattctagaaaatattggcaatacaccaatcgtaaaactcgataaagttggttctgcgcttaagtgtaacctatttgcaaaatgtgaatatttaaatccaggaggatctgtaaaagatcgcataggtctccgtatgatcaatgaagcagaaaaatcaggccaaattaaacctggagacaccttaatcgaaccgagttctggaaacacgggaataggtttagctctagctgcagcagttaaaggatataaactaattattactatgccagaaaaaatgagtatggaaaaagaagtggttttaaaagctttaggtgcaacgatagttcgaacacctactgaagtttcacatgatgatccaaaaagtctctttggtgtagcaaaaaaactgcaaagtgaaatacctaattctcatattcttgatcaatatagtaataataataacccagatgcccattacaatagtacggcccaagaaattctagatgagtttggaactgatcttaatatggttgtcatatcaactggaacaggtggaactattactggtattgcaaaaaaactaaaagagtcaattccagatatacatattgtagggattgatccaattggctcaattcttggtggtggtacagatatatcttcttatcaagttgaaggaataggatatgacttttttcctaatgtgttagataattcattagttgacaaatatattaaaacaaatgatgaagattcattttcaatggcaagaaggctaattaaagaagaaggattattaattggtggatcatgtggcgcaactgtgtggggagctattgaagcgacaaaagatcttgataaaaataaaaatgtactggttatactacctgatg

SEQ ID NO: 241972 - DNA, 619 bp, Unknown
  Bacterial polypeptide expressing nucleotide sequence isolated from the Sargasso Sea
tctcaggagctatggagcggagcttgtcttgacgcaaggcgtgctggacatgcaaggcgcggtcgatcgtgcgaaagagatctgcgacgccacacctcatgccacattcacgccccaacagttcgacaatcccgcaaacccacaggtgcacagggaaaccacggggcctgaaattctggacgcctgcgaggggcgtgtcgatgcgtttgtcagtggtgtcgggaccggtggaacggttacgggcgcgggggaggcgattcgggatgcgtgtccggacgcgttgatcgtggcggtcgaaccggcgcgatcaaacgtcctgtccggcgggtctcaagggcttcacgacatccaagggatcggtgcagggttcgttccgcccgtcctggacaggggaatctatgatgaagtcgtgtgcgtcgaggacgaggaggcgattgcggccgccagacgcctgtcgagagaggagggcattttggccggcatttcggcgggtgctaatgtgcacgtctccatccaggtcgccagtcggctgggggaaggcaagcgcgttgtgaccgtgatatgtgactccggagagcgctacttcagcctacccgggttcatcgactctgattcctag

SEQ ID NO: 241973 - DNA, 955 bp, Unknown
  Bacterial polypeptide expressing nucleotide sequence isolated from the Sargasso Sea
atgatttacaacaacataattgaaacaattggcaatactcctattgtcaaaataaataagatggggccaaagaatcaggatatttttgtcaaatgtgaagcctttaatcctctggcatctgtaaaagatcgattggcattggcaatcatcaatgatgccgagaaatctggaaaacttaagcctggtaaaacagtcattgaagcaacttcaggaaacacaggcatagcattggccatggtctgtgccgctagaggatatccatttgtggcagtgatggtggaaacattttcaattgagcgaagaaaagtaatgaaggctcttggagcaaaagtgattctcactcctgctgcagaacggggaactggcatggtgaaaagagctacagagttagcagaaaaacatggttggtttctggcggatcaatttagaaatcctgccaatcctgaataccataaaaatacgaccgctgttgaaattttgagtgatttcagaaatcgtgatttggattattttgtcagcggttggggaacaggtggcaccataacgggtgtgggtatggttttgaagaccgccagaccagagataaagataattgccgttgagcctgagatggcgcctttgctatcgaagaatgaatggcaaccgcataagattcaaggctggactcctgactttgtcccagaggtattggatcaaaatgtcatagatcagtatctacctgtcaatgacgatgcatcgatagaaacttctatggaactagccagaaaagagggaatatttactggaatatcaggtggagcaaccatgcttgctgcattaatgattgcaaaagaagcaccaaaaaatagtactttttgcgtgatgttgcctgacactggagagcgatatctttcttcaccgctctttgaggatatttcagaagatagtgatgacgagtggttggctgaacaatagt

SEQ ID NO: 241974 - DNA, 955 bp, Unknown
  Bacterial polypeptide expressing nucleotide sequence isolated from the Sargasso Sea
catgaaatacgaaaacatccttcaaactatcggtgagactccggttatcaagattaatcgcctagcccctgagcatgtcgatctgtatgtcaaaatggaatcgtttaatcccatggcgtccgttaaggatcggctcgccttcgcgataattaatgacgctcgaaaatccggaaaactcaaagaaggccaaaccgtaatagaggccacctcgggtaacactggcatcgccctggctatggtttgtgcagtgcttggccatccttttgtagcaacgatggtcgaaactttctcgattgaaagaagaaaaattatgcgagcacttggtgcaaaagtcatattaacgccggctgccgaaagaggctcaggcatggtcaaaagagcagaacaactagcagaccaacacggatggttccttgctaggcaatttcaaaaccccgccaatcctgaataccatgcgaacactaccgggccggaaattctaagagacttcgcaggcgaaagattagacttctgggtcacgggctggggcaccggcggcacgttaacaggggctggaaaaactttaaaatcagcaagaccggacctcaagataattgcaaccgaaccagaacaggcggcgttactatcaggtggtgactggtcgcctcacaaaattcagggctggactcctgattttataccggaggtcctcgaaaaagacatcgcggaccaagttatccctgtgaatgacgatgagtctataaaaacatctttagctctcgctaaagccgagggaatatttgtcggaatttctgcaggtgccacagtaaacgctgcgttgaaagtggccgaaacagcagggccagggagcgtattgctggcaatgctacccgacaccgccgagcgatatctttctactcctctttttgctgagataaacgagggttcagacgacgaatggctagaaagcctctga

SEQ ID NO: 241975 - DNA, 907 bp, Unknown
  Bacterial polypeptide expressing nucleotide sequence isolated from the Sargasso Sea
tttgattgattcaaatgtatttgtcaaagttgaaagttttaatcctggtaattcagtcaaagacagaatggctgtaaaaatgattgaggatgcagaaaaagatggaagattaaagccaggtggaacaatagttgaaggtacttctggtaatactggtatgggattagcgcttgcagctatagttaaaggttataaattaatatgtgtatcaaatgataaacaatctaaagaaaagtttgatgtccttagagctatgggcgctgaagtagttgtttgtccaacagatgttgaggctgatgatccaaggtcttattattcagtctccaaaagaatttcagaagagacgaagaactcatggtatgtaaatcagtatgacaatccatcaaatactaaagctcattacgaatcaactggtccagaaatatggaaacagactaatggaaagattgatcactttgttgtaggtgtaggtacaggtggaacaatttctggtgttggaaaatatttaaaagaaatgaaacctagtgttaaaatatggggtattgatacttatggatctgtatttaagaaatatcatgaaacaggaatttttgatgagaaagaaatttacccatattctacagagggtattggagaagatattttacctaaaaatgttgattttgaggtaatagatcattttgaaaaagtaactgataaagatgctgctttatatacaagaaagttagctaaagaagaaggtatttttgcaggtaattcttgtggtgcagctatagctggaatgattcaactaagttctaattttaaaaaaggacaagtcgttgtcgtgctccttcatgattctggtagcagatatataggaaagatttacaatgatgaatggatgaaagacaaaggatttatttaa

SEQ ID NO: 241976 - DNA, 961 bp, Unknown
  Bacterial polypeptide expressing nucleotide sequence isolated from the Sargasso Sea
atgaattatttcgataatatcctcggaacaataggaaatacacctttaatcaagcttaataaagttacaagtgaaattgaggctactgttttagctaaagttgaatactttaatcctggaaattctgtaaaagatcgaatggcgatcaagatggtagaagatgctgaaaaagatggaagattaaaacctggcggaaccatagttgaaggaacttcagggaacacaggaatgggattagctttagcagctattgtaaaaggatataagctcatttgcgttactaatgacaaacaatcaaaaggaaaaattgatgtattaaaagcagttggcgcaaaagttattatatgtccaactaatgttgatcctgatgatccaagttcatattattccacggctaaaaggatttcagatgagacagaaaactcttggtatgttaatcaatacaataatttatctaatagagaagcacattatttatcaaccggacctgaaatatggaatcaaactaaaggaaaaattacccattttgttgttggtgtggggactggtggtacaatttctggtgttgctaaatatttaaaagaaaaaaatagtgatattaaaatatggggaatagacacatttggatcagtttttaaaaagtaccatgaaacaggtgtttttgataaaagtgaaatatacccatatttaaccgaaggtattggagaggatatcatcccagataatgttgatttttcattaatcgatcattttgaaaaagtaaatgatgaagatgcagctatatacggcaggagacttgcaaaagaggaaggtatttttgctggctattcatgtggtgcagcaataaaaggggtattacaattaaaaaaatacttctcaaaaaatgatgttgtagtggtccttcttcatgattctggaagtagatatattgagaaaatatataatgatgagtggatgaaag

SEQ ID NO: 241977 - DNA, 979 bp, Unknown
  Bacterial polypeptide expressing nucleotide sequence isolated from the Sargasso Sea
atgaagtattacaaaaatattcttgaaacaattggtaatacacccctaatcaagctaaataaaatttctaaatctattgactcaaatgtatttgtcaaagttgaaagttttaatcctggtaattcagtcaaagatagaatggctgtaaaaatgattgaggatgcagaaaaagacggaagactaaagccaggaggaacaatagttgaaggtacctctggtaatactggaatgggattagctcttgcagctatagttaaaggttataaattaatttgtgtatcaaatgataaacaatctaaagaaaagtttgatgttctaagagctatgggtgctgaggtaattgtttgtccaacagatgttgaggctgatgatccaagttcttattattcagtctccaaaagaatttcagacgaaacaaagaattcatggtatgtaaatcagtatgataatccatcaaatactattgctcattacgaatcaactggtcctgaaatatggaaacagactaatggaaaaattgatcattttgttgtaggtgtaggtacaggtggcacaatttctggtgttggaaaatatttaaaagaaatgaaacctagtgttaaaatatggggtattgatacttatggatctgtatttaagaaatatcatgaaacaggaatttttgatgagaaagaaatttacccatattctacagaaggtattggggaagatattttacctaaaaatgttgattttgaggtaatagatcattttgaaaaagtaactgataaagatgctgctttatatacaagaaagttagctaaagaagaaggtatctttgcaggtaattcctgtggtgcagctatagctggaatgattcaactaaaatctaattttaaaaaaggacaagtcgttgttgtgctccttcatgattctggcagcagatatataggaaagatttataatgatggatggatgaaagacaaaggatttatttaat

SEQ ID NO: 241978 - DNA, 967 bp, Unknown
  Bacterial polypeptide expressing nucleotide sequence isolated from the Sargasso Sea
atgagccaagtgttaaaatcagcagccgaagcgattggaaatacgccattggttcgattagatcgcttgacaagtttacatggtgtaaagggaacaattctggcaaagctggaatattttaaccctgggttttcaaaaaaagatagagcagcactaggtattatagacgaagcagaaaatttaggtattctctcaccagggcaaaccgtagttgagctaacctcaggaaatatgggaactggtttagcaatagtttgtggtctgaagagatatccgtttgtagcagtgatgtccaaagggaactccgaagaaagagcccggatgatgcgttctcttggagctgaagtggttcttgttgatcagctacccacatccagtcccggtcaagtatcaggaggggacttagatttagtagacaaagcggcaaagaaaatcaccaaacagcgccaagcattcagggcagatcaattttaccgagacggaaactggcaagctcattactacaatacagcgcccgagatatgggaagcaacaaatggagacttagacggttttgctgatttcttgggctcgggtggcacatataaaggcattgctaaagcactaaaagagcgaaatagcgatattaagtgttttgttgttgaacctgagggcgcagcagtagcagctggacagagagttacgaaccccaatcacccaattcaaggcgggggatatattattccagaactaaagtttcttgataaagttccagttgacgggtttatccagatatcaggagatgaagctcaaaaaactaccaaagaacttgcaaagtatgagggtatatttggaggatattcttctggtgcaaacgtagcggcagcactaaaattactttctggaaatatgtcaggtaaaactattgctgtggtaatttgcgatagcgggttaaaatatctttccactaaactctgggatgattaat

SEQ ID NO: 241979 - DNA, 919 bp, Unknown
  Bacterial polypeptide expressing nucleotide sequence isolated from the Sargasso Sea
aatgatatacgatactatactagaaaccattggaaatacgcctgttgttagaattaactcaatcggaaaaaatttgagctgtaatatttttgcaaaatgcgaattttttaatccaggtggctctgtgaaggatagaatcggctggaaaatggttgaagatgctgagaaagctggaaaaataaagcctggtgatacactaattgaaccaacttctggaaatacaggccagggcttggcattagctgcagcagtaaagggctacaagtgcattatcactatgccagaaaaaatgagtcaagaaaaacaaattgttttagaggccttgggtgcaaaaatagtaagaactccgactgaagctctttccagtgatcctgaaagtcatatatcagtggcaaaaaaacttcaaaaagagataaaaaactcacacattttagaccagtactcaaatccatcaaaccctgatgcgcattaccataatacagctgaagaaatcttaaaagattttggagaaaatttagatatggtagtcatatcggttggtacaggcggaactattacaggtgttgcaaaacgattgaaagaagccattcccaacataaaaattgtgggagctgatcctgtaggttccattcttggtggaggtgatgagatcagctcataccttgttgagggtatcggctatgattttatccctgaagttttagataacagcatcgttgaccaatacataaaaacccatgatgaagaatcattcatcatggccagaagactaattaaagaagaggggctactttgtggaggttcgtgtggagctacaatggtcgctgcattgcaggcagcttctattttggaaagtggtcaaaattgtcttgtaatcttagcagacagtatacgtaattatatgacaaaatttcccagc

SEQ ID NO: 241980 - DNA, 394 bp, Unknown
  Bacterial polypeptide expressing nucleotide sequence isolated from the Sargasso Sea
tatgaaaactttacaaaataattttgtcgaagcaataggaaacactccattatttaaattaaaagctgcatcagaaattactggttgtaatatttatggaaaagcagagtatcttaatccaggaggctcagtaaaagatagagcggctttagcattaataagagatgctgaagaaaaaaaattaatttcaaaaggtggaacaattgttgagggaacagctggtaatactggaattgggttatgtctattaggaaattctattggttataaaactattatcgtaatgaatgataatcaaacacaagaaaaaaaagacctattaaaaaatattggagctgatttaaggttggttccaccaaaaccatataaagatgaaaataactttgttaaatat

SEQ ID NO: 241981 - DNA, 124 bp, Unknown
  Bacterial polypeptide expressing nucleotide sequence isolated from the Sargasso Sea
atggcaaaaatttatgaggacaacagttttgctattggaaacactccattagtaaaattaagatcagtgactaaaaacgcgaaagctacagtacttgcaaaaattgaaggtagaaaccctgctt

SEQ ID NO: 241982 - DNA, 187 bp, Unknown
  Bacterial polypeptide expressing nucleotide sequence isolated from the Sargasso Sea
atgaaaaattctcaaaataatttcattgagggaataggaaacactccattaatcaaactcaaagctgcatcagaaataacgggttgtaatatttatggtaaagcagaatatttaaaccctggaggatcagttaaagatagagcggctttagcactaataaaagacgctcaagagaaaaaattaattt

SEQ ID NO: 241983 - DNA, 178 bp, Unknown
  Bacterial polypeptide expressing nucleotide sequence isolated from the Sargasso Sea
aatgaaaaattcccaaaatagtttcattgaagggataggaaatactccattaattaaacttaaagctgcatcagagataacaggttgcaatatttatggtaaagcagaatatttaaatcctggaggatcagttaaagatagagcggcattagcactaataaaggatgctcaagataaa

SEQ ID NO: 241984 - DNA, 222 bp, Unknown
  Bacterial polypeptide expressing nucleotide sequence isolated from the Sargasso Sea
aagcgatggatgtgggccgtcgtctgcgcgggcaggagggtctgctctgcggcgtcagcagcggtgccgctgtggctgcagctctgcggtttggccaacgctccgagttgcaggggcggcgtgtgctggtgatgctggccagttacggcgagcggtatctgtccacgccgatgttcagtggagtcgcgtcatcgccggcagctcaggacccgatgctgtgac

SEQ ID NO: 241985 - DNA, 955 bp, Unknown
  Bacterial polypeptide expressing nucleotide sequence isolated from the Sargasso Sea
gatgatttataacaacataattgaaacaattggcaatacgcctgttgtcaaagtgaataacatgggtccaaaggatcagaatatatttgtcaaatgcgaagcctttaatcctttggcttcggtaaaagatcgactggcattggcaatcgttaacgatgctgaaaaatctggaaaacttaagcccggtcaaaccgttatagaagcaacctcaggaaatacaggcattgcattggccatggtttgtgccgccagaggatatccatttgtcgcagtcatggttgaaacattttccattgagcgaagaaaagtaatgaaggcgcttggtgcaaaagtaattctgacgcctgccgcagagcgtggaaccggcatggtaaacaaagcaactgagttggcagataaacacggttggtttctagcggaccaatttagaaatccggccaaccctgagtatcataaaaacaccaccgcagtcgaaatcttgagtgatttcagaaatcaagaactggactactttgtcagtgggtggggcactggtggaacaataactggcgttggcacagttttaaagacggcaagaccagaaataaaaataatcgcagtagaaccggagttggccccattgctgtcaaagaacaaatgggagcctcataaaatacaaggctggacccctgattttgtgccggaggtgttggatcaagaagtcattgatcagtatatccctgtcaacgacgaagcctcgatcgaaacttccaaggaattggccagaaaagaaggtatattcacaggaatttcaggcggtgcaacgatgcttgccgcattattgattgcagaagaggctcctaaaaatagtactttttgtgtgatgctgcccgatactggagaaaggtatctttcctctccgctttttgcagacattacagaggacagcgacgacgaatggttggctgaacagtaa

SEQ ID NO: 241986 - DNA, 361 bp, Unknown
  Bacterial polypeptide expressing nucleotide sequence isolated from the Sargasso Sea
tatggatactaattcgattatatcgcaaattggaaatacaccattagttaaattaaaacaagcctcagaattaacaggttgtaatatctatggtaaggccgaatattttaaccctggagaatcggtcaaagatagggctgctttatttattgtacaagatgcatttaatagaaagcttatttctaaaggtggaacaattgtcgaaggtactgcaggaaatacaggaatcggtttagcggttgtttgtaaagaatatggtcttaaactcaaaatagtcattccgaatactcagtcgattgaaaaaaaagagactttgaaaaaacttggagcagaggtaattgaagttgatgctgtactttac

SEQ ID NO: 241987 - DNA, 190 bp, Unknown
  Bacterial polypeptide expressing nucleotide sequence isolated from the Sargasso Sea
atggctcatattagaaatacatttattgactcaataggtaatactccattaatcaaacttaaagctgcctctgagttaacaggatgcaacatttatggtaaagcagaatttatgaatcctggtgggtcagtcaaagatagagctgcactctcattacttaaagacgcacaagaaaaaaaattaatttcta

SEQ ID NO: 241988 - DNA, 197 bp, Unknown
  Bacterial polypeptide expressing nucleotide sequence isolated from the Sargasso Sea
catgagcgacatcgaaaattatattggtaatacacctctagtgctcattgatgaggtgggaacgaaccagatatacgggaagcttgagggcaataatcctgctggatcaatcaaagatcgtcccgcaataaggatgataaaggatgctgagagctcaggacttattaaaaaaggtgataccttaattgaagccacaa

SEQ ID NO: 241989 - DNA, 638 bp, Unknown
  Bacterial polypeptide expressing nucleotide sequence isolated from the Sargasso Sea
gttgtttgtccacaatgttgaggctgatgatccaaggtcttattattcagtctccaaaagaatttcagaagaaacaaagaactcatggtatgtaaatcagtatgataatccatcaaatactatagctcattacgaatcaactggtccagaaatatggaaacagactaatggaaagattgatcactttgttgtaggtgtaggtacaggtgggacaatttctggtgtcggaaaatatttaaaaaaaatgaaacctagtgttaaaatatggggtattgatacttatggatctgtatttaagaaataccatgaaacaggaatttttgatgaaaaagaaatctatccatattctacagagggaattggtgaggacattctacctaacaatgttgattttgaggtaatagatcattttgaaaaagtgactgataaagatgctgctttatatacaagaaaattagctagagaagaaggtatctttgctggtaattcatgtggtgcagctatagctggaatgatccagctaaaatctaattttaaaaaaggccagtttgtagttgcattgcttcatgactcaggaagtagatacataggaaaaatatacaatgatgattggatgaaagaaaaaggttttatttaat

SEQ ID NO: 241990 - DNA, 85 bp, Unknown
  Bacterial polypeptide expressing nucleotide sequence isolated from the Sargasso Sea
atgtctcgcatttacgacgacaacagcctcgccatcggcaacaccccgctggtgaagctgaacagcgtcaccaagaactgcaaag

SEQ ID NO: 241991 - DNA, 936 bp, Unknown
  Bacterial polypeptide expressing nucleotide sequence isolated from the Sargasso Sea
tagaaaccattggaaatacgcctgttgttagaattaactcaatcggaaaagatctgagctgtaatatttttgcgaaatgcgaattttttaatccaggtggctctgtgaaggatagaatcggctggaaaatggttgaagatgccgagaaagctggaaaaataaagcctggtgatacactaattgaaccaacttctggaaatacaggccagggcttggcattagccgcagcagtaaagggctacaagtgcattatcactatgccagaaaaaatgagtcaagaaaaacaaattgttttagaggccttgggtgcaaagatagtaagaactccaactgaagctctttctagtgatcctgagagccatatatcagtggcaaaaaaacttcagcaaaaaatcaaaaactcacacattttagaccagtactcaaatccatcaaaccctgatgcacattaccacaatacagctgaagaaatcttaaaagattttggagaaaatttagatatggtagtcatatcggttggtacaggtggaactattacaggtgttgcaaaacgattgaaagaagccattcccaacgtaaaggttgtgggagctgatcctgtaggctccattcttggtggaggtgatgagatcagctcataccttgttgaaggtatcggctatgattttatccctgaagttttagataacagcatcgttgaccaatacataaagacccacgatgaagaatcattcatcatggccagaagactaattaaagaagaggggctactttgtggaggttcgtgtggagcgacaatggtcgctgcattgcaggcagcttctattttggaaagtggtcaaaattgtcttgtaatcttagcagacagtatacgtaattatatgacaaaatttcccagcgataactggatgaatgaaaatgggtttaaagtctgac

SEQ ID NO: 241992 - DNA, 280 bp, Unknown
  Bacterial polypeptide expressing nucleotide sequence isolated from the Sargasso Sea
aatgaaaaattacagtaataactttattgatgctattggaaatactcctcttataaaactaaaagcagcatcagaaataactggctgcaatatttatggaaaagctgaatatttgaacccaggaggttcagtaaaagatagagctgcattagctttaataaaagatgctcaaaaaaaaaatttaatttctaaaggtggaacagttgttgaaggaactgcaggaaatactggtattggtttatgtcttattggaaattcattaggatataaaactataatt

SEQ ID NO: 241993 - DNA, 452 bp, Unknown
  Bacterial polypeptide expressing nucleotide sequence isolated from the Sargasso Sea
aatgaataatacacaaaacgattttatttcaggaataggaaacaccccattaattaaattaagagcagcatcagaaattactggatgcaatatttatggaaaagcagaatttttaaacccaggtggatcagttaaagatagagctgcacttgctttaattaaagacgctcaagaaaaaaaattaattgctaaaggtggaacagttgttgaaggtacagcaggtaacactggaattggtttaggtcttttaggaaattctttaggttataaaacaatcattgtaatgaatgataatcaaacccaagagaaaaaagatctacttagaaatcttggagctgaattaagattagtaccagctaaaccttacaaagatgataacaattttgttaaagtggcagctagacttgcagatgaattaagaccaacaaacaataacggtgtgatttgggcta

SEQ ID NO: 241994 - DNA, 956 bp, Unknown
  Bacterial polypeptide expressing nucleotide sequence isolated from the Sargasso Sea
catgatttataaagacttattaagttctattggaaacacaccaattataaaaattaaaaacatagcacctaaaaatattaatatttttgtcaaagctgagtacttcaatccaggaggttcagtaaaggatagattggctttaagtattattgaaaaagctgaaaaagagggattattgaagcctagacaaactgttgttgaagcgacaagtggcaatactggaatcggattggcgatggtatgtgcatgcaaaggttatccatgtgtaatgacaatgcctgacagtacatccatagaaagaagaaaattaatgcgatttcttggagctaaagttctattaacgccagcatctgagggaacaactgctgcatataatcttgccaaaaaattatgcaaaaaaaataaatggttttatgccaagcagtttgaaaatgatgcgaatgcagatattcatgaaaaaacaactgctatagaaattttgaatgactttaaagaattaggattagattattgggtatcaggttatggaacgggtgggacttttagtggggtctctcgtgttctaagagatcaatcacctaaaacaaaactggttataactgaacctgaaaatgctcaattggttaatagtttaatagcacaaaaaagaaatcaggacggatcacctgcaagtgcgcatgattcatggaaccctcatccaatccaaggttggacacctgactttatccctttagtgctacaagaatcaattgataataattattttgatattaatatacctgtcacaggtgaagatggaatttactggtctcatcaattagctaccaatgaaggaataattactggaatatctgggggatcaacatttgcagttgcaatgaaaatagcagatgaagcccctaacgggtcaaatattttatgcatgctagcagatactgcggaaaaggtatttaaca

SEQ ID NO: 241995 - DNA, 388 bp, Unknown
  Bacterial polypeptide expressing nucleotide sequence isolated from the Sargasso Sea
atgaataatactcaaaacgactttatttcaggaataggaaacactccattaattaaattaagagctgcctctgaaattactggatgtaatatttatggaaaagcagaatttttaaatccaggcggatcagtaaaagatagagctgctcttgcattaattaaagatgcacaagacaaaaaactaattactaaaggtggaacagttgttgaaggtactgctggcaatactggaattggtttaggtctattggggaattctttgggttataaaacaattattgtaatgaatgacaatcaaactcaggagaaaaaagatttacttagaaatcttggagctgaactaagactagttccacctaagccttataaagatgacaacaaaatgtaaa

SEQ ID NO: 241996 - DNA, 152 bp, Unknown
  Bacterial polypeptide expressing nucleotide sequence isolated from the Sargasso Sea
gatggggatcacccgcggttttgtcggagcggtgggccataccccactgatccgtctggagcacctcagtgagctcagcggctgcgagattctcggcaaagcggaattcatgaacccgggcggttcggtcaaagaccgcgccgcccttggga

SEQ ID NO: 241997 - DNA, 241 bp, Unknown
  Bacterial polypeptide expressing nucleotide sequence isolated from the Sargasso Sea
catgatttataaagatctattaagctcaattggcgatacaccaattataaaaattaaaaatattggtcctaaaaatataaacctttttgttaaagctgaatactttaatcctggtggctcagtaaaggatagattggctttgaatataattgaaaaagctgaaaaggaaggactattggagccaaatcaaactgtagttgaagccacaagtggaaataccggaataggattggcaatggta

SEQ ID NO: 241998 - DNA, 196 bp, Unknown
  Bacterial polypeptide expressing nucleotide sequence isolated from the Sargasso Sea
atgatatataatgacattcttgaaacaatcggatcaacccctgttgtaaaattaaattctattggtaaagatcttgaatgtaatctttatgcaaaaatagaaatggttaatcctggaggatctgtaaaagatagaactgcttttagaatgattgatcatgctgaaaaagaaggtcgtattaagccgggagatacat

SEQ ID NO: 241999 - DNA, 870 bp, Unknown
  Bacterial polypeptide expressing nucleotide sequence isolated from the Sargasso Sea
gtcctaatgaagtaaaaatttttgcaaaacttgaaaactttaatcctgctggcagtatcaaagacagggtagcaaaatacctgattgaaagtgcagaagaacaaggtttgttaagtaaaggggctacgattattgaaccgacaagtggaaatacgggtatagctttagctatgctatcgaaagcaaagggttataagttaaaagccgttatgcctgacaatgtcagtgacgaaagaaaatcaatgctgttatctcttggtgcagaaattattttttcagatggagagcaaggaacgaatggtgcaataagacttgctgaaaaaattgctgaagagaaccctagttactttatgccatatcaatatgggaatgaagctaatccgcgagcccattatgaaacaacagggccagaaataataaagcagctccctgatattgatgtattcgtagctggcttgggcacaggaggaactttaatgggtgctggaaaagctttaaaagagcataatgaaaacataaagatagttgctgctgctcctcaccctgaagaagttgttccggggttaagaagtattgagcatggatttattcctccaattcttgatcttgagaaattagattcaagaattttagttggagaggaggagtctttttattggacaaaaatgttaatggaaaagtgtggagtttttgcaggagtttcatgtggggctgttactgcagcagcaattaaagttgcaaaaaaaattaaagaaggaaatattgtgataataatagccgactcaggtgaaagatacttatctagtagactatgggagttgagctacgaagaaatcaaagaaacagtagaacaaaaaatttggtggtagt

SEQ ID NO: 242000 - DNA, 925 bp, Unknown
  Bacterial polypeptide expressing nucleotide sequence isolated from the Sargasso Sea
atgaatgaaattcaaaatgattttatttctggaattggaaatactcctttaataaaattaagagcagcatcagaaataactggttgtaatatttttggaaaagcagaatttttaaatcctggtggttctgttaaagatcgagctgcacttgctttaattaaagatgcacaagagaaaaaattaatcactaaaggtggaacagttgtagagggcaccgcaggcaatactggaattggactgggtctattaggaaattcattggggtataaaacaattatcgtgatgaatgataatcaaacccaagaaaaaaaagatcttttaagaaatttaggtgcagaattaaaattagttccagctaaaccttataaagatgataacaactttgtaaaagttgcagcaaggctagctgatgaacttagaccgacaaataataatggagtaatttgggctaaccaatttgataacactgcaaacgcaaaaggccattatgaaggaacgggcaaagaaatttgggatcaaaccgaaggtaaagttgatggatttgtgtgttcttcaggaactggtggaacaatttcaggggtcagtaatgctcttaaagaaaaaaataaagatataaaaattcatttatctgatccaaaaggctctgctctttataattatataaaaaatggagaattaaaatctgaaggtggctcaataactgagggaattggatctagtaggataacagcaaattttaaagatgccaaaatagatgatgcgtattcaattgacgacaaagaggcattaccaattctctatgatttaattcaaaatgagggattaagcttaggaaccagctgtgggattaatattgcaggagctattagaatgggtaaagaattgggcccaggaaaaacgatcgttacaattctttgtgatagaa

SEQ ID NO: 242001 - DNA, 583 bp, Unknown
  Bacterial polypeptide expressing nucleotide sequence isolated from the Sargasso Sea
aatgaaaaattacaaggatgattttatccaatcaattggaaatactcctttaataaaactaaaagctgcatctgaaataactggttgtaacatttatggtaaagccgaatatttaaatccaggaggatctgtaaaagacagagcagcacttgctttaataagagatgctgaacaaaaaaaattaatatctaaaggtggaataattgtagaaggaactgcaggaaacactggtattggtttatgccttattggaaattcacttggctacaagacaattattgtaatgaatgataatcaaactcaagaaaaaaaagatacattaagaaatattggtgcagatttaaaattagttccgccaaaaccttataaagacgaaaataattttgttaaagttgccgctagaatggctgaagagctaaaaagttcaaataatcacggagttgtttgggcaaatcaatttgataatacagcaaactcaaaaggtcattacgatacaacgggtcctgagatatgggagcaaacagagggtaaagttgatggatttgtatgttcttctggaactggaggaacaattggtggagta

SEQ ID NO: 242002 - DNA, 962 bp, Unknown
  Bacterial polypeptide expressing nucleotide sequence isolated from the Sargasso Sea
gatgagcaatattaaaaatgattttatatctagcatcggtaatactcctttaataaaattaagagcagcatctgaaattaccggttgcaacatttatggaaaagcagaatatttaaacccaggtggatcagttaaagatagggctgcacttgcattgattaaggatgcacaagaaaaaaaattgatttctaatggtggaactgttgttgagggaactgctggaaacacaggtataggactttgtttattgggaaattcgttgggttacaaaactataatagtaatgaacgaaaaccaaactcaagaaaaaaaagatactttagtcaatattggtgcagacttaagattagttccagcaaaaccttataaagatgatggaaattatgtaaaagttgcaggaaaactggctgaagaattaaaaagttctaacaatcatggtgtagtttgggctaatcagtttgataatactgctaatgctaaaggtcactatgaaacaacaggacctgaaatttggaatcaaactgaaggtaaaattgatggatttgtttgttcttcaggtaccggaggaacaattggtggtataagtagttatctaaaagaaaaaaataaggacattaagatttttttatcagaccctgcgggatctgctttatataattatattaaaaatggagagttaaaatcagaggggggttctataactgaaggaattggatctagcagaattactgctaattttgctgaagctaaaatagatggtgccttttcaataagtgatcatgaatctcttccaattttatatgatttgattcaaaatgaaggattaagtttaggaacaagttgtggagttaatattgctggagccataagattaggaaaagaacttggtcctggaaaaactatagtcactatactttgtgataaatcagacaaatacaactctaagatgtttaataaaactt

SEQ ID NO: 242003 - DNA, 892 bp, Unknown
  Bacterial polypeptide expressing nucleotide sequence isolated from the Sargasso Sea
tttaaatcctggaggttctgttaaagatagagcggcccttgctttaattaaagatgcccaagagaaaaaattaattgctaaaggtggaactgttgtagaaggcactgcaggaaatactggaattggactgggtctattaggaaattcattaggatataaaacaatcattgtaatgaatgataatcaaacccaagaaaaaaaagatattcttaaaaaccttggtgcggaattaaaattagttccagctaaaccttacaaagatgataacaactttgttaaagtcgcagcaaggctagctgatgaacttagaccgacaaataataatggagtaatttgggctaaccaatttgataacactgcaaacgcaaaaggccattatgaaggaacgggcaaagaaatttgggatcaaaccgaaggtaaagttgatggatttgtgtgttcttcaggaaccggtggaactatttcaggggttagtaatgctcttaaagaaaaaaataaagatataaaaattcatttatctgatccaaaaggctctgctctttacaattatataaaaaatggagaattaaaatctgaaggtggctctataactgagggaattggatctagtaggataacagcaaattttaaagatgctaaaattgacgatgcttattcaattgatgacaaagaagcattaccaattctctatgatttaattcaaaatgaaggattgagcttaggaactagctgtgggattaatattgcaggggctattagaatgggtaaagaattaggaccaggaaaaacaattgttactattctttgtgatagaagcgataaatacgctactaaaatgttcaataaaaagttcttagaagaaaaaggactgccaatacctaattggttttaa

SEQ ID NO: 242004 - DNA, 820 bp, Unknown
  Bacterial polypeptide expressing nucleotide sequence isolated from the Sargasso Sea
atgggcaaaatttacaataacatcgtggaaaccgtgggcggcactccgctcgtgcgactcaacaaagtcaccgagggcgtcgatgccaccgtactgctgaaatgcgagttttttaatccgctctcgagcgtaaaagatcgcattggcatgtccatgatcgagacggcagaatccgacggcactttgacgcaggataccgtgatcatcgagcccaccagcggcaacaccggtattgcgctggccttcatagccgccgccaaggggtacaggctcatcctcaccatgcccgagagcatgtcgcttgaacgccgcactctccttgccatgctgggcgccgaactcgtgctcacacctgccccgaaggggatgaagggcgcgatcgccatggccgaaaaattggccgcggaaaccgaaaacgcctgggtgccgcaacaatttgaaaaccccgccaacccggccatccaccgcaagacaaccgccgtggagatttgggaggacaccgaaggtgccgtcgatatcgtggtcgccggcgttggtaccggtggaacgttgaccggttgcgtcgaagtcataaaacctcagaaagagagcttccaggccgtggccgtggaaccggccgattcaccggttatttcgcaaaccttggccggcgaagaacttacgcccggcccccataagattcaaggcactggtgccggcttcgtgcccggcaacctccaccttaagggggaagacggctctgatcaggtcggcgaatgcatcaaggtgagtaacgatgacgcctttgccatggctcgcgagctcgccctgaaagagggga

SEQ ID NO: 242005 - DNA, 639 bp, Unknown
  Bacterial polypeptide expressing nucleotide sequence isolated from the Sargasso Sea
tatgccaaagcaaggtctgcccggatttgttgaagcgatcgggaaaaccccgttaatccgtctgaggggcgtctctaatatgacgggatgtaatatattcggtaaagcggagttcatgaaccctggcggttcagtgaaggaccgggctgcaaaagccattatcgaagatgccgaagcacgcggcaatcttgccccgggcgggcttatcgtggaaggcactgcaggcaataccggtatagggcttacgatggttggcaactccaagggctatagatctgtgatagtaatgccagaaacccaaagcgaggaaaaaaaagaagttcttaggatttgcggtgcggatcttcggcttgtaccagcagtcccatacaaaaacccaaataactacattcgatattcccaagtattggctaaagaacttgccaaaacgcatgatggtggtgtgttgtgggccaatcaatttgacaatacagcaaatttgcaaggccattaccagtcaacgggcccggaaatatgggaacagacagaccataaaattgacggctttatttgtgctgttggttctggcggcacgattgctggtgttggtaaatttttgaaagaacaaaaccaattgattaaaattggtctcgccgaccc

SEQ ID NO: 242006 - DNA, 493 bp, Unknown
  Bacterial polypeptide expressing nucleotide sequence isolated from the Sargasso Sea
gaaattttggaatgacacagacggcatgattgatatctttgtcgctggggtcggcacaggcggtaccatcacaggggtcagccgttatattaaacaggagaaaaagcatccgctcattagcgtggcagtggaacctgtggactctccggtcattactcaggctcgggctggtcaggaaattaaacctggcccacataaaattcagggcataggtgcgggttttattccgggcaacctggatttatccatcattgatgcagttgagactgtcagtaatgatgaggcgatagctatggcgcaccgtctgatgaaagaagaaggtatcctggcaggaatatcttcaggcgcagctgtggttgcagccaaacgtctggcagaaaaaccagaaaatgctggtaaaaacattgtggtgatcattccaagctccacagaacgttatttatcaagcgcactctttgccgacttcttcactgaaagcgaattacaagcctaa

SEQ ID NO: 242007 - DNA, 805 bp, Unknown
  Bacterial polypeptide expressing nucleotide sequence isolated from the Sargasso Sea
atgagaaataatcaagaagattttatttctggaattggaaatacccctttaattaaattaagagcagcctcagaaattactggatgtaatatttatggcaaagctgaatttttaaatcctggtggctcagttaaagatagagctgctttagctcttattaaagatgctcaacaaaaaaaattgatctccaaaggtggtattgttattgaaggcacagctggaaacactggtataggcttaggactattaggtaattctcttggttataaaactatcattgtaatgaatgataatcaaacccaagaaaaaaaagatactttaagaaacttaggtgctgaattaagattggtaccagccaaaccttataaagatgataataattttgttaaagttgcagctagattagctgatgaattaagacccacaaataataatggggtagtctgggctaaccaatttgataacactgctaatgccaaaggtcattatgaaggaactggaaaagaaatttgggatcaaactgaaggaaaagtagatggtttcgtttgttcttctggaactggtggaacaatttcaggtgtaagtaattttctaaaagaaaaaaataaagatgtaaaaatttatttgtcagatccaaaaggatcctctctttataattatattaaaaatggagaattaaagtctgatggaaattctataactgagggaattggatctagtagaattactaaaaattttgaaaatgcaaagatcgatgacgcatattcaatagatgataaagaagctttacctatcctttatgatt

SEQ ID NO: 242008 - DNA, 496 bp, Unknown
  Bacterial polypeptide expressing nucleotide sequence isolated from the Sargasso Sea
tatgaaaaatgctcaaaataattttattgaagggattggtaatacgccattagtaaaattaagagctgcatccgaaattactgggtgcaatatttatggtaaagcagaatacttaaatccaggtggatctgtaaaagatagagccgctttagcattaattaaagatgctcaagaaaaaaaattaatttcaaaaggcgggacgattgttgaaggtactgcaggtaatactggtattggtctttgtcttattggtaattcaattgggtataaaacaatcattgtgatgaatgataatcaaactcaagagaaaaaagatatgttaaagaacatgggagctgacttaaggttagttccacctaaaccatataaagacgaaggtaattatgtaaaggttgctggtagacttgctgatgaattaaagagcagtaacaatcatggtgtggtttgggctaatcaatttgataacactgccaattctaaaggacattatgagacc

SEQ ID NO: 242009 - DNA, 633 bp, Unknown
  Bacterial polypeptide expressing nucleotide sequence isolated from the Sargasso Sea
aatgacacaaattaaaaatagctttcttgaatcgattggaaatactcctttaattaaattaaaagcagcctctgaaatcacgggatgtcatattttcggtaaagcggaatatcttaatccaggtggatcagttaaagatagagctgctcttgctttaattaaagatgcacaggaaaaaaaattaatttcagagggtggaattatagttgaaggcactgctggtaatactggaattggtttatgtcttttaggaaattctttaggttataaaacaattattgtaatgaatgataatcaaacacaagaaaaaaaagatactttaaaaaacattggtgcagatcttaggttggtaccacccaaaccatataaagatgatggtaattatgtaaaagttgcaggtcgtcttgctgaagaattaaaaagtacaaataacaatggtgtagtttgggcaaatcaatttgataacactgccaatgcaaaaggtcactatgaaaccacaggaccagaaatctgggaacaaactgacggaaaagtagatggttttgtttgtgcttctggaacaggtggaactataggtggtgtaagtaaatttttaaaagaaaaaaataaagatatcaaaatttatttatctga

SEQ ID NO: 242010 - DNA, 867 bp, Unknown
  Bacterial polypeptide expressing nucleotide sequence isolated from the Sargasso Sea
aagagctgcatcagaaataactggttgtaatatttttggaaaagctgagtttttaaatcctggaggttctgtcaaagatagagcggcccttgctttaattaaagatgcccaagagaaaaaattaattgctaaaggtggaacagttgttgagggtaccgcaggcaatactggaattggactgggtctattaggaaattcattaggatataaaacaatcattgtaatgaatgataatcaaacccaagaaaaaaaagatattcttaaaaaccttggtgcagaattaaaattagttccagctaaaccttataaagatgataacaactttgtaaaagttgcagcaaggctagctgatgaacttagaccgacaaataataatggagtaatttgggctaaccaatttgataacactgcaaacgcaaaaggccattatgaaggaacgggcaaagaaatttgggatcaaaccgaaggtaaagttgatggatttgtgtgttcttcaggaactggtggaacaatttcaggggttagtaatgctcttaaagaaaaaaataaagatataaaaattcatttatctgatccaaaaggctctgctctttataattatataaaaaatggagaattaaaatctgagggtggttctataacagaaggtataggatcaagtaggataacagcaaattttaaagatgctaaaatagatgatgcgtattcaattgacgacaaagaggcattaccaattctctatgatttaattcaaaatgaaggattgagcttaggaactagctgtgggattaatattgcaggagctattagaatgggtaaagaattaggaccaggaaaaacaattgttactattctttgtgatagaag

SEQ ID NO: 242011 - DNA, 382 bp, Unknown
  Bacterial polypeptide expressing nucleotide sequence isolated from the Sargasso Sea
atggcaaaaatttatgaggacaacagttttgctattggaaacactccattagtaaaattaaaatcagttactaaaaacgcaaaagctactgtattagcaaaaatcgaaggaagaaatcctgcatatagtgttaaatgcaggattggtgcaaacatgatatgggatgcagagaaaagcggaaaacttacaaaagacaaaaccattgttgaacctacatctggaaatactggaattgccttagcttttactgcttcagcaagaggttacaaactaatccttacaatgccggaatctatgtctattgaaaggagaagagtgatggcagtattaggagccgaaaattgttttaacaggaggcttctaaaggtatgccaggagcaat

SEQ ID NO: 242012 - DNA, 583 bp, Unknown
  Bacterial polypeptide expressing nucleotide sequence isolated from the Sargasso Sea
atgaaaattttacaaaataattttgtcgaagcaataggaaatactcctttatttaaattaaaagccgcatcagaaattactggttgtaatatttatggaaaagcagagtaccttaatccaggtggctctgtaaaagatagagcagctttagctttgataagagatgctgaagaaaaaaaactaatttcaaaaggtggaacaattgttgaaggaacagctggtaatactggaattggattatgtctattaggaaattctattggttataaaactattatcgtgatgaacgataatcaaacacaagaaaaaaaagatttattaagaaatattggagctgatttaagattggttccaccaaaaccttataaagatgaaaataactttgttaaatatgcaggaagattggctgatgaattgaaaagtagtaacaatcatggtgtagtttgggctaatcaatttgacaatactgctaattctaaaggtcattatgaaacaactgggccagaaatatgggaacaaacaaacggcaaaattgatggatttgtatgttcgtctggtactggtggtacaattgcaggtgtaa

SEQ ID NO: 242013 - DNA, 931 bp, Unknown
  Bacterial polypeptide expressing nucleotide sequence isolated from the Sargasso Sea
aatgaagaattctcaaaataattttattgatggtattggaaatacaccattggttaaacttaaagctgcttccgagataacagggtgtaacatatatggtaaagcagaatatttaaatcctggaggttcagtaaaagatagagctgcacttgcattaataagagatgcagaggaaaaaaaattaatttctaagggtggaacaattgttgaaggaactgcagggaacactggtatcggactttgtttgattggaaactcaatcggttacaaaactgtaatagtaatgaatgacaaccaaacacaagaaaaaaaagatatgctgaaaaatattggtgccgatttaagattagttcctcctaaaccatataaagatgacggcaattatgttaaagttgctggaagattagctgatgagctaagaagttcaaataatcatggtgttgtttgggcaaatcaattcgataacactgcaaatttaaaaggacattacgaaactacaggtcccgaaatttatgatcaaacagatggtaaggtagatgcattcatatgtgcgtccggaactggaggaaccattgctggtgttagtagttacttaaaagaaaaaaataaagatattaaaatttatctttctgatccagcaggttcatcactttgtaattacataaataatggtgagttaaaaagtgagggcaattctattactgagggtattggctcaagtagagtgactgctaattttgcagaagcaaagatcgatggtgcattttctatcagtgataatgaatctttaccagttttgtttgatcttattcaaaatgaaggattaagtttggggactagttgtggtgtaaatattgcaggtgctataagattaggaaaagaattaggaaccaggaaaaacaatcgtaactatactctgcgacaagagtga

SEQ ID NO: 242014 - DNA, 669 bp, Unknown
  Bacterial polypeptide expressing nucleotide sequence isolated from the Sargasso Sea
aatgaatgatattcaaaatgattttatttcagggattggaaatactcctttaataaaattaagagctgcatcagaaataactggttgtaatatttttggaaaagctgagtttttaaatcctggaggttctgtcaaagatagagcggcccttgctttaattaaagatgcccaagagaaaaaattaattgctaaaggtggaacagttgtagaaggcactgcaggaaatactggaattggactgggtctattaggaaattcattaggatataaaacaatcattgtaatgaatgataatcaaacccaagaaaaaaaagatattcttaaaaaccttggtgcagaattaaaattagttccagctaaaccttacaaagatgataacaactttgttaaagtcgcagcaaggctagctgatgaacttagaccgacaaataataatggagtaatttgggctaaccaatttgataacactgcaaacgcaaaaggccattatgaaggaacgggcaaagaaatttgggatcaaactgagggtaaagttgatggatttgtgtgttcttcaggaactggtggaactatttcaggggttagtaatgctcttaaagaaaaaaataaagatataaaaattcatttatctgatccaaaaggctctgctctttataattatataaaaaa

SEQ ID NO: 242015 - DNA, 361 bp, Unknown
  Bacterial polypeptide expressing nucleotide sequence isolated from the Sargasso Sea
atggattattttgaagataactctttgtcgatcggtgttacccccctagtaaaactaaatagagtagttaggagcgacagaacactggtgcttgcgaaaattgaggggagaaatcctgcttactcggttaagtgtcgtataggggcttccatgatctgggctgctgaaaaaagtggagacttaaaaccggggatcgaggtggtagaaccgaccagcggcaataccggtatagcgttagcgtttgtttgtgcggcgaaaggttataagcttaccctcacgatgccagacagtatgagtcttgaaagaagaaaagtactaaaggctttcggggccaacttagtacttacgcctaggtgctaag

SEQ ID NO: 242016 - DNA, 776 bp, Unknown
  Bacterial polypeptide expressing nucleotide sequence isolated from the Sargasso Sea
gtcacaaataaaaaataattttatcgagtcggttggcaatacgcctttaataaaattaaaagcagcctcagagatcactggatgtaatatttatggaaaagcggagtacctgaatccaggtggatccgttaaagatagagctgctcttgcactaataaaagatgcacaagaaaaaaaactaatttcagaaggtggaattgttgttgaaggtactgcgggtaatactgggattggtttatgtcttttaggaaattccttaggttataaaacaattattgtaatgaatgacaaccaaacccaagaaaaaaaagatactttaaaaaatattggtgcagatcttagactagttccacctaagccatacaaagatgatggtaactatgtaaaagttgcgggtcgtcttgctgaagaattaaaaagtacaaataacaagggtgtagtttgggcaaaccaatttgataacactgctaatgcaaaaggtcattacgaaacgactggaccagagatttgggaacaaactgatggtaaagtagatggctttgtctgcgcatcaggaactggaggcactatcggtggtgtaagtaaatttctaaaagaaaaaaataagaatataaaaatttatttatcagatccaacaggctctgcactctataatcatattatgaatggtgaacttaaagctgagggtggatcaataactgaaggtattggttcaagcagaataactaaaaactttgctgaagctaaaattgatggcgctttttcaatcgagtgat

SEQ ID NO: 242017 - DNA, 677 bp, Unknown
  Bacterial polypeptide expressing nucleotide sequence isolated from the Sargasso Sea
aatgaaaaattatagcgatagttttattcagtcgattggaaataccccacttataaaactaaaagcagcttcagaaattacaggatgtaatatttttggaaaagcagaatatttaaatcctggcggatcagtaaaagatagagcggcccttgctttaataaaagatgctgaagaaaaaaaattaatttctaaaggtggaacaatagtagaaggaacggctggaaatacaggtataggattatgtctcttaggaaattcccttggttataaaactattattgtgatgaatgataaccaaacccaagaaaaaaaagatactttaagaaatattggagccgatctaagattggtaccacccaaaccttataaagatgatggaaattacgtaaaagttgccggaagattggctgaagaacttaaaagttctaataatcatggagtggtttgggctaatcaatttgacaacactgctaatgccaaaggtcattacgaaacaacaggacctgaaatttgggaacaaactgaaggaaaaatagatggttttgtttgttcttcagggactggtggaacaattggaggggtaagtagttatcttaaagaaaaaaataaagatgttaatatttttttatctgatccaaccggttctgctctttataattacattcaaaatggagagt

SEQ ID NO: 242018 - DNA, 910 bp, Unknown
  Bacterial polypeptide expressing nucleotide sequence isolated from the Sargasso Sea
aatgaagaatattcagagtaattttatttcaggaattggaaatacgcctctttttaaattaagagcagcctcagaagtaactggttgtaatatttatggaaaagcagaatatcttaatcctggtggatcagttaaagatagagctgccttagctttaataaaagatgccgaggaaaaaaaactaatctccaaaggtggaacaattgtagagggaacagcgggaaatacaggaataggtttgtgtttaataggaaattctattggttataaaacaataattgtaatgaatgacaatcaaactcaagaaaaaaaagatatgttaaaaaatatgggtgcagatttaaaattagtcccaccaaaaccctataaagatgatggcaactacgttaaagttgcgggcagacttgcggcagaacttaagagttcaaataatcacggtgttgtttgggctaatcaatttgataatacggcaaatatgaagggtcattatgaaacaacaggtccagaaatttgggaacaaacggacgggaaagtagatggttttgtatgttcatcaggaacaggtggaactattgcaggtgtgagttcatttcttaaagaaaaaaataaagatataaaaatttatctttctgatcctgctggttcttctttatataattatattgaaaatggagaattaaaaagtgaaggtggatctataactgagggtattggttctagtagaataactgcaaactttgctgaagctaaaattgatggcgctttttcaatcagtgaccaagaatctttaccaataatttatgatttaattcaaaatgaaggtttaagtttaggtacaagttgtggcgtaaatattgctggtgcaattagattgggtaaattactaggaccagggaaaactattgtaact

SEQ ID NO: 242019 - DNA, 887 bp, Unknown
  Bacterial polypeptide expressing nucleotide sequence isolated from the Sargasso Sea
attactgggatgtaacatttatggaaaagcagagtatttaaatcctggtggttcagttaaagatagagcagcacttgcattaataaaagatgctgaagaaaaaaaattaatttctagaggtggaaccattgttgaaggtacagcaggaaacacagggataggattgtgtttaataggaaattcaattggttataaaacaataatagtaatgaatgatagtcaaacacaagaaaaaaaagatatgcttaaaaatattggtgctgatttaagattagttcctcctaaaccatataaggatgatggcaattacgttaaagttgctggacgtttagctgaaaaattaaaaagtacaaataaccatggggtagtgtgggcaaatcaatttgataataccgctaattctaaaggtcattatgaaacaacaggtcctgaaatttgggatcaaactgacggaaaagtagatgggtttgtttgttcatctgggactggaggaacaattgcaggagtgagcaagtatttaaaagaaaaaaataaaaatataaaaatttatttatctgatccagcaggttcttcactttataattatattcaaaatggcgaattaaaaagtgaaggtggttcaataactgaaggtattggttcaagtagaataacagctaattttgcagaggcaaaaatagatggagctttctcagtaagtgatcaggagtcattacctattttatataatttaattcaaaatgaaggtttaagtctaggaactagttgtggagtaaatatagcaggagcaattagattaggtaaagagcttggtccaggaaaaactatagttacaattctctgcgataaatcagacaaatacaatagcaagttgtttaataaaagtt

SEQ ID NO: 242020 - DNA, 310 bp, Unknown
  Bacterial polypeptide expressing nucleotide sequence isolated from the Sargasso Sea
atggcaaaaatttatgaggacaacagttttgctattggaaacactccattagtaaaattaaagtcagttactaaaaacgcgaaagctacagtacttgcaaaaattgagggtaggaaccctgcttatagtgtcaaatgcaggattggcgccaacatgatctgggatgccgagaaaagtgggaagcttacaaaagacaaaactattgttgagccaacttctggaaatacaggaattgctctagcttttactgcttcagcaagaggttataaactcatccttacaatgccagaatccatgtcaatgaaagaag

SEQ ID NO: 242021 - DNA, 783 bp, Unknown
  Bacterial polypeptide expressing nucleotide sequence isolated from the Sargasso Sea
aatgaaaagattatcagataacgtaggaaatacaccacttatagctatgaatacaccgtttggtaaaatatggggtaaagctgaattcatgaatcctggtggtagtgtaaaagacagaatggcaacatttattcttaataatgctgaaagagaagggcttattaagccaggagatactctttgtgaagcaacttctggtaatacaggaatatcttttgcaatgttggcagcagaaagaggatatactatctatattgttatgccttctaatatgtcagaagaacgtaaaaagatttttaatttttatggtgcaagattgattgaggtagatgaaggagattttgatggagcaatagcactaagagatgaaatgtgtgataagaagggatggtttaactgtaatcaatttcataatccactaaatatacaggctcattatcaatctactggtccagaaatatggaatcaatataagaatgaaaatggagaacgtaatagtcctgatgttttaatacttggtacaggaactggtggtactataatgggaacaggaaaatttttgaaggagcactggccaaatattaagatagtagcagttgaaccagcagaaagtccagtaatgagtggtggagaaccgggtcttcatggaatccagggaataggtgatggtagtaaatttttagttgaccttgattttgtagacgaagtagtgacaattcccaacatgggaagcaaaagaacaagcaaaacacctcgcaaaaagatacgggttatttgtcggaa

SEQ ID NO: 242022 - DNA, 813 bp, Unknown
  Bacterial polypeptide expressing nucleotide sequence isolated from the Sargasso Sea
aatgaataatacacaaaacgattttatttcaggaataggaaatactccattaattaaactaagagctgcttctgaaatcactggatgtaatatttatggaaaagcagaatttttaaatccaggaggatcagttaaagatagagctgcacttgctttaattaaagatgctcaagaaaaaaaattaattgctaaaggtggaacggttgttgaaggaacagctggtaacactgggattggtttaggtctattaggaaattccttaggttataaaacaatcatcgtaatgaatgataaccaaactcaagaaaaaaaagatttacttagaaatcttggagctgaattaagattagtgccacctaaaccttataaagatgataacaattttgttaaagtggcagcgagacttgcagatgaattaagaccaacaaacaataacggtgtgatttgggctaaccagtttgataacacagcaaatgcaaaaggtcattacgaaggaacaggacaagaaatatgggaacaaactgaaggtaaagttgatggctttgtatgttcttctggaactggaggaactatttctggtgtcagtaatgctcttaaagaaaaaaataaagatataaaaatttacttatctgatccaaaggggtcagctctttataattatattaaaaatggcgaactaaagtcagaaggaggatcaatcactgaaggtattggttcaagcagagtaacagctaactttggtgaggctaagattgatgatgcctattcaatagatgatcatgaggcactacctatactttatgatttaattca

SEQ ID NO: 242023 - DNA, 606 bp, Unknown
  Bacterial polypeptide expressing nucleotide sequence isolated from the Sargasso Sea
aatgaacgatttacaaaatgattttgtttcagggattggaaatacccctttaataaaattaagagctgcatcagaaataactggttgtaatatttttggaaaagctgagtttttaaatcctggaggttctgtaaaagatagagcggcccttgctttaattaaagatgcccaagagaaaaaattaattgctaaaggtggaacagttgttgagggtaccgcaggaaatactggaattggtttaggtctattaggaaattcattgggttataaaacaattattgtaatgaatgataatcaaactcaagaaaaaaaagatcttttaagaaatttaggtgcagaattaaaattagttccagctaaaccttataaagatgataacaactttgtaaaagttgcagcaaggctagctgatgaacttagaccgacaaataataatggagtaatttgggctaaccaatttgataacactgcaaacgcaaaaggccattatgaaggaacgggcaaagaaatttgggatcaaaccgaaggtaaagttgatggatttgtatgttcttcaggaactggtggaacaatttcaggggttagtaatgctcttaaagaaaaaaa

SEQ ID NO: 242024 - DNA, 739 bp, Unknown
  Bacterial polypeptide expressing nucleotide sequence isolated from the Sargasso Sea
atgaatgatatacaaaatgattttatttcagggattggaaatactcctttaataaaattaagagcagcatcagaaattactggttgtaatatttttggaaaagcagaatttttaaatcctggaggttctgttaaagatcgagcagctcttgctttaattaaagatgcccaagaaaaaaaattaattaccaaaggtggaacagttgttgaaggaactgctggtaacactggaattggattaggtcttttaggaaattcattgggatataaaacaatcatagtaatgaatgataatcaaactcaagaaaaaaaagatcttttaagaaatctgggtgcagaattaaaattagttccagctaaaccatataaagatgataacaactttgttaaagttgcagctagattagctgacgaacttagaccttcaaataataacggagtaatttgggctaaccaatttgataatacagcaaatgctagaggccactatgaaggaacaggtaaagaaatatgggatcaaaccaatggtaaagttgatggatttgtatgttcttcaggaactggaggaactatttcgggagtaagtaatgctcttaaagaaaaaaataaggatataaagattttcctttcagatccaaaaggctctgctctttataactacataaagaatggagaattaaaatctgaaggtggatctataacagaaggtataggatcaagtaggataacagcaaacttaa

SEQ ID NO: 242025 - DNA, 559 bp, Unknown
  Bacterial polypeptide expressing nucleotide sequence isolated from the Sargasso Sea
ggagatcccggaggcttacctgcttcagcagttcgacaacccggccaatcctgcggtgcatgaatgcaccaccgcggaggagctctggaacgactgcgacggccatttggatgccctggtggctggcgtcggcaccggcggcaccatcaccggctgtgcccgtttgctgaagcagcgcaatcctcaactgcaggtggtggcggtggagccggcgggtagtgctgtgctgtcgggtaggccgccgggtgcgcatcgcattcagggcattggtgcggggtttgttcctgctgtgctggagcgcgatctgatcgatgaagtgatgaccgtgtcggatgaggaggcgatggatgtgggccgtcgtctggcgcggcaggagggtctgctctgcggcgtcagcagcggtgccgccgttgctgcggctctgcggcttggtcaacgcgccgagtggcaggggcggcgtgtgctggtgatgctggccagttacggcgagcggtatctgtccacgcccatgttcagtggagccgcgtcctcgccggcacgtcaggacccgatgctgtga

SEQ ID NO: 242026 - DNA, 916 bp, Unknown
  Bacterial polypeptide expressing nucleotide sequence isolated from the Sargasso Sea
aatgaataatacccaaaacgattttatttctggaataggaaatactccattaattaaactcagagcagcctcagaaattactgggtgtaacatttatggaaaagcagaatttttaaacccaggtggatcagttaaagatagagctgctcttgcattaattaaagatgctcaagaaaaaaaattgattactaaaggtggaacagttgttgaaggaactgctggtaacactgggattggtttaggccttttaggaaattctttaggttataaaacaatcatcgtcatgaatgataatcaaacccaagagaaaaaagatctacttagaaatcttggagctgaattaagattagtgccacctaaaccttacaaagatgataacaattttgttaaagtggcagctagacttgcagatgaattaagaccaacaaataataacggtgtgatttgggctaaccagtttgataataccgcaaatgccaaaggtcattatgaaggtacaggacaagaaatttgggaacaaactgaaggtaaagttgatggctttgtgtgttcctcagggacggggggaactatttctggtgtaagtaatgctcttaaagaaaagaataaagatataaaaatttatttatctgatccaaaaggttctgctctttataattatataaaaaatggcgaactaaagtcagaaggtggatcaattactgaaggaattggttcaagtagagtaaccgctaattttggtgaagctaagattgatgatgcctattcaattgatgatcatgaagcattacctatactttatgatttaattcaaaatgagggtcttagcctaggtactagttgtggtatcaatattgctgggagcataaaaatgggtaaagaattaggtcctggtaaaactatcgtaacaattctt

SEQ ID NO: 242027 - DNA, 562 bp, Unknown
  Bacterial polypeptide expressing nucleotide sequence isolated from the Sargasso Sea
cttaataaaattaaaagcagcatctgaaattactggatgcaatatctatggaaaagctgaatatttaaatcctggtggctcagttaaagatagagctgcacttgcattgattaaggatgcacaagaaaagaaattaatatctgaaggtgggattgtggtagaaggaactgctggcaacacaggtataggattgtgtcttttaggaaattctcttggttataaaactataattgtaatgaacgataatcaaactcaagaaaagaaagatacattaaaaaatattggtgctgatctaagattagtaccacctaaaccttataaagatgatggaaattacgtaaaagttgctggaagacttgcagaggaattaaaaagtacaaataacaatggtgttgtttgggctaatcaatttgataacactgcaaatgcaaaaggacattacgaaacaactggtccagagatttggggacaaacagatggtaaggtagatggatttgtctgtgcgtcaggaacaggcggaacaattggtggtgttagtaaattatttaaaagagaaaaataa

SEQ ID NO: 242028 - DNA, 892 bp, Unknown
  Bacterial polypeptide expressing nucleotide sequence isolated from the Sargasso Sea
acacctttaataaaattaaaagcagcatcagaaattactggatgtaatatttatggcaaagctgagtacttaaatcctggtggatcagttaaagatagagcggcgctagcattaataaaagatgctcaagaaaaaaagttaatatctgaaggcggaatagttgttgagggaactgcaggaaatacaggtataggattatgtcttctaggaaactctttaggttataaaactataattgtaatgaacgataatcaaactcaagaaaaaaaagatactttaaaaaatattggtgcggatttaagattggtgccacccaaaccttataaagatgatggtaactatgttaaagttgcaggtcgactcgcagaggaattaaaaagtacaaataataatggtgtagtttgggctaatcaatttgataatactgctaatgcaaaaggtcattacgaaacaactggtccagagatttgggaacaaactgatggtaaaatagatggatttgtctgtgcttcaggaacaggtggaacaattggtggtgttagtaaatatttaaaagaaaaaaataaaaatattaaaatttatttatcagatccaactggttcagctctatataatcatatagttaatggagaattaaaagcagaaggtggatcgatcacagagggtattggttcaagcagaataactaaaaattttgcagaagcaaaaattgatggagctttctcaatcagtgatcaggagtctttaccaatactctatgatttaattcaaaatgaaggattaagcttgggaacaagttgtggggtaaatattgcgggtgcgattagattaggaaaagaactgggtccaggtaaaacaattgtaacaattctttgtgatagatcagataaat

SEQ ID NO: 242029 - DNA, 637 bp, Unknown
  Bacterial polypeptide expressing nucleotide sequence isolated from the Sargasso Sea
atgatcaatattaaaaatgattttatatctagcatcggtaatactcctttaataaaattaagagcagcatctgaaattaccggttgcaacatttatggaaaagctgaatatttaaacccaggtggatcagttaaagatagagctgcacttgcattgattagggatgcacaagaaaaaaaattgatttctaatggtggaactgttgttgagggaactgctggaaacacaggtataggactttgtttattgggaaattcgttgggctacaaaactataatagtaatgaacgaaaaccaaactcaagaaaaaaaagatactttagtcaatattggtgcagacttaagattagttccagcaaaaccttataaagatgatggaaattatgtaaaagttgcaggaaaactggctgaagaattaaaaagttctaacaatcatggtgtagtttgggctaatcagtttgataatactgctaatgctaaaggtcactatgaaacaacaggacctgaaatttggaatcaaactgaaggtaaaattgatggatttatttgttcttcaggtaccggaggaacaattggtggtataagtagttatctaaaagaaaaaaataaggacattaagattttttatcagaccctgc

SEQ ID NO: 242030 - DNA, 550 bp, Unknown
  Bacterial polypeptide expressing nucleotide sequence isolated from the Sargasso Sea
aatgaatgaaattcaaaatgattttatttctgggattggaaatactcctttaataaaattaagagcagcatcagaaattactggttgtaatatttttggtaaagcagaatttttaaatccaggaggctctgttaaagatcgagcagctcttgcattaattaaagatgctcaagagaaaaaattaattgctaaaggtggaacagttgttgaaggaactgctggtaacactggaattggtttaggtcttctaggaaattcattagggtataaaacaattattgtaatgaatgataatcaaacccaagaaaaaaaggatcttttaagaaatttaggtgctgaattaaaattagttccagctaaaccttacaaagatgataacaactttgttaaagttgcagcacgattagctgatgagcttagacccacaaataataatggagtaatttgggctaaccaatttgataatgtagcaaatgctaaaggccattatgaaggaactggtaaagaaatttgggatcaaactgagggtaaagttgatggctttgtatgt

SEQ ID NO: 242031 - DNA, 796 bp, Unknown
  Bacterial polypeptide expressing nucleotide sequence isolated from the Sargasso Sea
catggacattcgtgaccttgatatcgccgagtcagtgctggatctcatcggtaacaccccgctggtgaagctgggacgtgtgggatctggtgttccttgcacagtggtggcgaagctcgagatcaccaaccccggtggcagttcaaaagaccgtccagcggtcacaatgattgatgaagcagaggcggctggcctcctcaaaccaggcggaacgattatcgaaccgacctcgggaaacactggcgtgggcctagctatcgttgcagcccagcgaggctataagtgcgtctttgttatgacagacaaggtaagtagtgaaaaagtaagccttctcgaggcgtacggagccgaagtagttgtttgtccggtggccgtggcgccagatgatccccgctcctactattcgacggcggagcgccttgtccaagagcggccgaacgcgtatcgaccaaatcagtaccacaatcagtcgaacccaaaatcgcactatgaatctactggtcctgaaatatggcaacagactcaaggttgcgtgacgcactttgtagcaggagcaggaaccggcggaaccatatccggggtgggtaaataccttaaggaaaggaatgacgcagtccagataatcgctgctgatccagccaattctgtttactcgggaggaagcggccgaccatatttggtggagggcgtgggcgaagacttttggccggacacctatgatcccaaggtggtagacgtgacggtgccgatcagcgacgcggaatcatttgagatggcccaccggggtaacggttga

SEQ ID NO: 242032 - DNA, 508 bp, Unknown
  Bacterial polypeptide expressing nucleotide sequence isolated from the Sargasso Sea
aatgaataacacacaaaacgattttatttcaggaataggaaacaccccattaattaaattaagagcagcatcagaaattactggatgcaatatttatggaaaagcagaatttttaaatccaggaggatcagttaaagatagagctgcgcttgctttaattaaagacgctcaagaaaaaaaattaattgctaaaggtggaacagtagttgaaggaacagcaggtaacactggaattggtttaggccttttaggaaattctttaggttataaaacaatcatagtaatgaatgataatcaaacccaagagaaaaaagatctacttagaaatcttggagctgaattaagattagtgccacctaaaccttacaaagacgataacaattttgttaaagtggcagctagacttgcagatgaattaagaccaacaaataataacggtgtgatttgggctaaccagtttgacaatactgcaaatgccaaaggccattatgaaggaacaggacaagaa

SEQ ID NO: 242033 - DNA, 784 bp, Unknown
  Bacterial polypeptide expressing nucleotide sequence isolated from the Sargasso Sea
atgaaaaataatcaagaaagttttatttctggaattggcaatactcctttaataaaattaaaagcagcatcagagataactggttgtaacatctatgggaaggctgaatttttaaacccaggtggttctgtcaaagatagagctgcattagcattaataaaagatgcacaagataaaaaattaatttctaaaggtggaactattgttgaaggaactgcaggaaatactggtataggtttaggtcttattggtaattctttaggttataaaacaatcattgtaatgaatgataatcaaactcaagaaaagaaggatgcattgagaaaccttggagctgaattaagattggttccagctaaaccttataaagatgaaaataattttgtaaaagttgcatcaagattagccgatgagttaagacctacaaataataatggagttgtctgggctaaccaatttgataatacagcgaatgccaaaggtcattatgaaggcacaggaagagaaatttgggaacaaactgagggaaagattgatggatttgtatgttcatctggaacaggtggaacaatttcaggtgtgagtaatgctcttaaagaaaaaaataaaaatataaaaatttatttatctgatcctaaaggttctgctctttttaattatattaagaatggtgaattaaaaactgaaggaagttcaattactgaaggaattggttcaagtagaattacaaaaaattttgaaaacgctaaaattgatgatgcattttctatagaggataatgaag

SEQ ID NO: 242034 - DNA, 831 bp, Unknown
  Bacterial polypeptide expressing nucleotide sequence isolated from the Sargasso Sea
ttaaatccaggtggatcagtaaaagatagagcagcattagcacttataaaggatgctgaaagtaaaaaattaatatcaaagggtggaactatagttgaaggtacagcaggtaatacaggtataggcttgtgcttactaggtaattcacttggttataaaacaattattgtaatgaatgacaatcaaacacaagaaaaaaaagatactctaaaaaatattggagcagatttaagattggtgccagcaaagccatataaagatgatggtaattatgtaaaagttgcaggaagattggctgaagaattatcaagttctaataaccacggtgtcgtttgggcaaatcaatttgataatacagctaatgctaaaggccattatgaaactactggtcctgaaatatgggaacaaacagatggtaaaattgatgggttcgtatgtgcatcaggaacaggaggaacaatcggaggaataagttcttacctgaaagaaaaaaataataaaattaaaatatatttatctgatccaaccggttctgcactttataattacattcaaaacggtgaattaaaatctgagggtggttcaattactgaaggaataggatcaagcagaataacaaaaaattttgcagaggctaaaatagatggcgctttttcaataagtgatcatgagtcattaccaatactatataatctaattcaaaatgaaggtttaagtcttggcacaagttgtggtgtaaatattgctggtgcaattagactaggaaaagaacttggtccaggaaaaactatagtaacaattttgtgcgacaaatccgacaaatacaactca

SEQ ID NO: 242035 - DNA, 189 bp, Unknown
  Bacterial polypeptide expressing nucleotide sequence isolated from the Sargasso Sea
tggaaggtcttttatctggtatcagcagcggtgcagctttagcagcaactataaaaatcagcaaaaggaaagaactaatgaataaaagattaatagttattcttccaagttttggagaaagatatttatcaacagcaatgtttgaatctaatacatcaattcaagccagaaaagatggttatctttaat

SEQ ID NO: 242036 - DNA, 852 bp, Unknown
  Bacterial polypeptide expressing nucleotide sequence isolated from the Sargasso Sea
gatggggatcacgcgcggattcgttggagcggtaggcaacaccccgctgattcgcctggagcatctcagcgagcgcaccggctgcgaaatcctcggcaaggctgagttcatgaaccccggcggttcggtcaaagaccgcgccgcactgggcatcctcttggccgccgaagccagcggtgaccttaaagctggcggcaccgtggttgagggcacagccggcaacaccggcatcggattagcgcacctttgcaatgcccgtggttaccgctgcgtgatcgtgatcccagaaacgcagtcggctgaaaagatcgacctgctgcgcagccttggagctgaagtgcgcacggttcctgccgttccttatcgggatcccaacaactacgtgaaactctccggccggatcgctgaggagattccgggtgcggtttgggccaatcaatttgataaccgcgccaatcgtcaggcccatgccgacaccaccggtccggaaatctggcagcaatgcgaaggccggctggatggctgggttgcggccacaggcactggaggcacctatgccggcgtggccctctatctcaagcagcagtcagaggctgtgcgctgcgtcctggcggatccccatggcagtgccctgcacagctgggccagcaccggtgaattggccagcgaaggctcctcagtcaccgaaggcatcggcaatagccgcatcaccgcgaatttggatggggcgcccgtcgatgaggcgattcgcatcgatgatcaaaccgccattgatgtgctctacgacctcctttggcatgaaggtctgttcttgggtggatcggttgggatcaatgtggccgcagccgttga

SEQ ID NO: 242037 - DNA, 346 bp, Unknown
  Bacterial polypeptide expressing nucleotide sequence isolated from the Sargasso Sea
tttgactgcggacagatcaactactcaaccaaagcttatctcaaatgtctccgaactaattgggaatactccgctgatccaactgaacaaaatgtccccaattgacggagcatcaatcttagctaagttagaatttttaaatccaggaggcagtgtcaaagatcgaattgccctagcaatgcttgtctctgcagaacaagaaggagcactccaagatggggtaactgtagtcgaagcaactagtggtaatactgggatcgccttggcgatgctgtgtgctgagcgtgattacaaactaattctgaccatgcccgaaacaatgagttttgagcgacgttctctcgtc

SEQ ID NO: 242038 - DNA, 480 bp, Unknown
  Bacterial polypeptide expressing nucleotide sequence isolated from the Sargasso Sea
tatggaaatcgcaagtgatattacttctttagttggtaatacacctttagttaaattagatcgtataaaaaatcactgtaagtgtcatcctgaaataatagcaaaacttgaaagtttcaatccatcagcatctgttaaagatcgtatagcgtattcgatgataaattcagccgaaaaagagggtttaatatcgcctaatgaaacaacactaattgaagcaacaagtggaaatactgggatagcattagcaatggttgctgcagctaagggctatagattgatattaactatgccagatactatgagtattgagagaagagcaatgcttcgagcatatggtgcagaattacaactcactccaggcaaagaaggaatgcaaggagcattacatttagctaatgaattgtcctcaagtatttcacatagctttcaatttaaccaatttgaaaatctcgctaatcctgatattcatgaaagaac

SEQ ID NO: 242039 - DNA, 280 bp, Unknown
  Bacterial polypeptide expressing nucleotide sequence isolated from the Sargasso Sea
atgaataaaatacaaaacaattttattgaaggtattggtaacacgccattagttaaattaagagcagcatcagaaattactggatgcaatatatatggtaaagcagaatacttaaatccgggtggatctgtaaaggatagagccgctttagcattaattaaagatgctcaagaaaaaaaattaatttcaaaaggtgggacgattgttgaaggtacagctgggaatactggtattggcctttgccttatcggaaattctattgggtataaaaccaattatt

SEQ ID NO: 242040 - DNA, 398 bp, Unknown
  Bacterial polypeptide expressing nucleotide sequence isolated from the Sargasso Sea
catgacgcagcattatcccaccatcgccgattgcatcggcaacaccccgctagtcaggctgcagcgcctgccgggccagaccagcaacaccattctggtcaagctggaaggcaataacccggccggatcggtgaaggaccgcccggcgctgtcgatgatcgagcgggccgaggcccgtggcgatatccagcccggcgatacactgatcgaggcgacctccggcaataccggtatcgcgctggccatggcggcggctatcaaaggctaccgcatggtgctgatcatgccggacaacatgagcgccgagcgcaaggcggcgatgaccgcctatggcgcgcagctgattgaagtgacccaggcccagggtatggaaggcgcgcgagacctggctttgcgca

SEQ ID NO: 242041 - DNA, 787 bp, Unknown
  Bacterial polypeptide expressing nucleotide sequence isolated from the Sargasso Sea
atgaaacaaataaaaaataattttattgaatcgattggtaatacaccactaataaaattaaaaaaagcatcagaaattacaggatgtaatatttatgggaaagcagaatatcttaatccaggtggatcagtgaaagatagagctgcactggctctaattaaagatgcacaagaaaaaaaattaatttcagaaggtgggattgttgtagaaggaaccgcaggtaacacgggtattggtctatgtttattaggaaattctttaggatataaaacaataattgtaatgaatgacaatcaaactcaagaaaaaaaagatactttaaaaaatattggtgctgatctgaggttagttccaccgaaaccttataaagatgcaggaaattatgttaaagtcgcaggtcgtctggcagaagaattaaaaaatacaaataacaaaggtgtagtttgggcaaaccaatttgataatacagctaatgcaaaaggtcattatgaaacaacaggtccagaaatttgggatcaaactgatggaaaagtcgatgcgttcatatgtgcatctggaaccggaggaactattggtggtgtaagtaaatttttgaaagaaaaaaatgaaaatataaaaatttatttatctgatccaacaggttctgcactttataattatatttcgaatggtgaattaaaagctgaaggtggatcaattactgaaggaattggttcaagtagaataacaaaaaattttgcagaagcgaaaattgatggtgcatactcaataagtgacgaagaatcat

SEQ ID NO: 242042 - DNA, 747 bp, Unknown
  Bacterial polypeptide expressing nucleotide sequence isolated from the Sargasso Sea
tgagataactggatgtaatatttatggcaaagcagaatacttaaatcctggtggctcagttaaagatagagcagcactagctttaattaaagatgcagaagaaaaaaaactaatatcaaaaggtggaacgatagttgagggaactgccggaaatacaggaattggtttatgcttaatcggaaattctattggttataaaacaatcattgttatgaacgaagatcaaactcaagaaaaaaaagatatgctaagaaatatgggtgctgacttaaggttggtaccacctaaaccttataaagatgatggtaattttgtaaaagtagccgcaaaattagcagatgacctaaagagttctaataaccatggagtagtttgggcaaaccaatttgataatactgcaaattcaaaaggtcattatgaaacaactggtccagagatctggatgcaaacagatggaaaagttgatggatttgtttgttcatctggaactggaggaactattggtggagtaagtagttttctaaaagaaaaaaataaagatataaaaatatttttagctgatcctgacggctcttctctttttgatcatattgaaaatggtgaactaaaatcttcaggaagttcaattactgaaggaataggatcaagtagagtaactgcaaattttgcaaaagctaaaattgatggtgcttttaaagtaactgataaagaagctttgccagttctgtatgacttaattcaaaacga

SEQ ID NO: 242043 - DNA, 604 bp, Unknown
  Bacterial polypeptide expressing nucleotide sequence isolated from the Sargasso Sea
tatgcccatcgctccggacatcaccgccttaatcggcggcacaccattggtgcggctgaatcgcctgccccaagcctgcggctgccgtgccgagatcctggccaaattggaaagtttcaatccatcggcgtcggtgaaggaccgtatcgccagcgccatggtgctggaggcggagctggccggcacgatcagccctggccgcaccgttctggtggaacccaccagcggcaacacggggattgccttggcgatggtggcggcagctcggggctaccggctgattctcaccatgccggattcgatgagcaccgagcggcgagcaatgttgcgggcctatggcgccgagctgcagctcaccgacggtgccctggggatgaatggcgccattgcactggctagagagctggtggctgcgatccccgaggcgtatctgctgcagcagttcgacaatccagccaatccagccgtgcatgaacgcaccacggccgaggagatctggcgcgatacggcaggtcagatcgatgcttttgtcgcgggagttgggaccggcggaacgatcaccggttgtgcccgtttgctcaagcagcgtcagccgcagcttcag

SEQ ID NO: 242044 - DNA, 667 bp, Unknown
  Bacterial polypeptide expressing nucleotide sequence isolated from the Sargasso Sea
atgaaaaattataatgataatttcattgatgctattggaaatactcctctaattaaattaaaagctgcttctgaaataactggatgtaatatttatggtaaggcagaatttttaaacccaggtggatctgtaaaagatagagcggcattagcactaattaaagacgctcaagaaaaaaaattaatatctaaaggtggaacggtagttgaaggaaccgcaggaaatacaggtataggattatgtcttttgggaaattctttaggttacaaaactataattgttatgaatgaaaatcaaactcaagaaaaaaaagatactttggtaaatattggtgcagatttaagattggttccagtaaaaccttataaagatgaaggcaattatgtaaaagttgcaggaagattagccgaagaacttaaaagttctaataaccatggtgtagtttgggctaatcaatttgataatacagctaatgctaaaggacactacgaaacaacaggaccagaaatttgggatcaaacagaaggtaaagtagatggttttgtttgttcttcaggaactggcggaacaattaccggggtcagtagctttcttaaagaaaaaaacaaagataaaaagatttttttatcagatccaacaggttctgcgctttataattatatcgaaa

SEQ ID NO: 242045 - DNA, 658 bp, Unknown
  Bacterial polypeptide expressing nucleotide sequence isolated from the Sargasso Sea
atgcaaaattctcaaaataattttattgaaggtattggaaatacacctttaattaaattaaaagctgcctcggaaataacaggatgtaatatttttggaaaagcagaatatttaaatccaggtgggtcagtaaaagacagagctgctttagctttaattaaggatgctcaagaaaaaaaattaatatctaaaggtggaattgttgttgaaggaactgctggaaatactggtatagggctttgtcttataggaaattcacttgggtataaaactataattgtaatgaacgaaaatcaaacacaagaaaaaaaggatattttaataaatattggagcagacttaagattagttcctccaaaaccttataaagatgatggaaattatgtaaaagtagccagtagattggttgaagaacttaaaagttctaataataatggagtaatttgggcaaatcaatttgacaatactgcaaatgcaaaaggacattatgaaaccacaggtcccgagatctgggaacaaactgaaggaaaagtagatggatttgtttgttcttctggcacaggtggaactattggtggagtaagtaaatatttaaaagaaaaaaatgaaaatgtaaaaatttatctatctgatccaaccaggatctgctctttataat

SEQ ID NO: 242046 - DNA, 595 bp, Unknown
  Bacterial polypeptide expressing nucleotide sequence isolated from the Sargasso Sea
atgaaaactttacaaaataattttgtcgaagcaataggaaatactcctttatttaaattaaaagccgcttcagaaattactggttgtaatatttatggaaaagcagagtaccttaatccaggtggctctgtaaaagatagagcagctttagctctgataagagatgctgaagaaaaaaaactaatttcaaaaggtggaacaattgttgagggaactgctggtaatactgggattgggttatgtcttttaggaaattctattggttataaaactattatcgtaatgaacgataatcaaacacaagaaaaaaaagatctattaagaaatattggagctgatttaaggttggttccaccaaaaccttataaagatgaaaataactttgttaaatacgcaggaagattggctgatgaattgaaaagtagtaacaatcacggtgtagtttgggctaatcaatttgacaatacagccaattctaaaggtcattatgaaacaactgggccagaaatatgggaacagactgacggcaaaatagatggttttgtatgttcatctggtactggtggtacaattgcaggagtaagtagtttttaaa

SEQ ID NO: 242047 - DNA, 313 bp, Unknown
  Bacterial polypeptide expressing nucleotide sequence isolated from the Sargasso Sea
tatgaaaaatattcaagaaaattttattgcgggaataggaaatacgcctctagtaaaattacgtaaagcatccgaattaaccggatgtcatatctatggcaaagctgaatatttgaatccgggaggctcagttaaagatagggcagctttagcattaattagagatgctgaagaaaaaaaacttataacaaaaggtggtattatagttgagggtacagcaggtaatacaggtattggactttgtcatatcggaaattctttgggatataaaaccataatagtaatgaataataatcaaacccaagaaaaaaaa

SEQ ID NO: 242048 - DNA, 697 bp, Unknown
  Bacterial polypeptide expressing nucleotide sequence isolated from the Sargasso Sea
attattgaagccaccagtggcaataccggtattgctttagccatggctgcggcgattaaagggtatcgcatggtgttgattatgccggacaatgccaccagcgaacgcaaagcctcgatgcaggcttatggcgcagagctgattctggtcagtaaaaaagacggtatggaaggcgcccgcgatttagcactgaagatgcaggctgagggcaaaggcaaggtgctggatcagtttaataatccggacaatccggcggcacatgtggcaagcacagggcctgagatctggttacaaagccggggtcttatcacacatttcgtctgcagcatgggcacaaccggcactattatgggggtgtctacttatctgaaacagcaaaaccccaatattcagatcattggtttacaaccgtccgaaggcagcgctattcccggcatccggcgctggcctgaagcttatctgcctggattttatgataaatccagagtggatttagtactggatgtgtcagaagccgatgccgttgccaccacccggcgtttagcacgcgaagaaggcatttgtgccggtgtcagttcagggggtgctgtatttgccgcaataaaactggctgaacaacagccgggtgccgtgatagtggccatcgtatgcgaccgcggcgaccgttatttatcttctggtttatttaatgattagg

SEQ ID NO: 242049 - DNA, 469 bp, Unknown
  Bacterial polypeptide expressing nucleotide sequence isolated from the Sargasso Sea
caaggtggacattttcgtggctggtgtaggcacaggcggtactattactggtgttagccgttatataaaacacgagaaaaaacacccgctgattagcgtggcggtagaacctgtagactcgccagtgatcactcaagcgctggctggtcaggaaattaaacctggtccacataaaattcagggcataggcgctggttttattccgggcaatctggatttatccatcattgatgcggtagaaagagtcagtaatgacgatgccattgcaatggcgcaccgtctgatgaaagaggaaggtattctggctggtatttcttctggtgcagccgtagttgccgctaaacgtttagcagagctgccagaaaatgccggtaaaaacattgtggtgattattccaagttcaacagaacgttatttatccagcgcattgtttgcagacttcttcaccgaaagtgaattacaagcttaa

SEQ ID NO: 242050 - DNA, 622 bp, Unknown
  Bacterial polypeptide expressing nucleotide sequence isolated from the Sargasso Sea
gatgagcaatattaaaaatgattttatatctagcatcggtaatactcctttaataaaattaagagcagcatctgaaattaccggttgcaacatttatggaaaagcagaatatttaaatccaggtggatcagttaaagatagggctgcacttgcattaattaaggatgctcaagaaaaaaaattgatttctaatggtggaactgttgttgagggtactgctggaaacacaggtataggactttgtttattgggaaattcgttgggttacaaaactataatagtaatgaacgaaaaccaaactcaagaaaaaaaagatactttagtcaatattggtgcagacttaagattagttccagcaaaaccttataaagatgatggaaattatgtaaaagttgctggaagattagctgaagaattaaaaagttctaacaatcacggtgtagtttgggctaatcagtttgataatactgctaatgctaaaggtcactatgaaacaacaggacctgaaatttggaatcaaactgaaggtaaaattgatggatttgtttgttcttcaggtaccggaggaacaattggtggtataagtagttatctaaaagaaaaaaataaggacgttaagatt

SEQ ID NO: 242051 - DNA, 565 bp, Unknown
  Bacterial polypeptide expressing nucleotide sequence isolated from the Sargasso Sea
catgggcggtgcgattgcccgcgcaaaagaacttagcgaggaaatcgacggggcggttatgctgcaacagtttgataacccgtctaacccttcggtgcatgaacgtacaacagccttagaaatctgggaagataccgatggtcaggccgatattttgatttctggcgtcggcactggtggaacgctcacaggcattagccgcgttttaaaagaaaagaaagcaggctttcaaacagttgcggttgaaccagaagatagtcccgttttatctggcggtgatccagggccacataaaattcaaggcattggcgcggggtttgtgccgtcaattttagatacagaccttattgatgagatcgttaaaatcaccaatgataccgcctttgcaaccgcgcggatgcttgccaagaccgaaggtatccccgttggtatttcttcgggcgcggccgtcgccgccgcaattgaggtcgcgaaaaagccagagaatgaaggaaaaacgcttgttgtaattatcccgtcttttgccgagcgatatttatcaacggcgctcttcgaagatttataa

SEQ ID NO: 242052 - DNA, 768 bp, Unknown
  Bacterial polypeptide expressing nucleotide sequence isolated from the Sargasso Sea
gcttcagaaataactggttgtaatatttatggaaaagcagaatatcttaatcctggtggatcagttaaagatagagcagccttagctttgataaaggatgctgaagaaaaaaaattaatctccaaaggcggaacaattgtcgagggaacagcaggaaatacaggaataggtttgtgtttaataggaaattctattggttataaaacaataattgtgatgaatgataatcaaactcaagaaaaaaaagatatgttaaaaaatatgggtgcagatttaaaattagtcccaccaaaaccctataaagatgatggcaactacgttaaagttgcgggaagacttgcggatgaacttaagagttcaaataatcacggtgttgtttgggctaatcaatttgataatacggcaaatatgaagggtcattacgaaacaacaggtccagaaatttggggacagacggacgggaaagtagatggttttgtatgttcatcaggaacaggtggaacaattgcaggtgtaagttcatttcttaaagaaaaaaataaagatataaaaatttatctttctgaccctgctggctcttctttatataattatattgaaaatggagaattaaaaagtgaaggtggatctataactgagggtattggttctagtagagtaactgcaaactttgctgaagctaaaattgatggtgctttttcaatcagtgaccaagaatctttaccaataatttatgatttaattcaaaatgaaggtttaagtttaggc

SEQ ID NO: 242053 - DNA, 544 bp, Unknown
  Bacterial polypeptide expressing nucleotide sequence isolated from the Sargasso Sea
atgaaaaattacagcgatagttttattcagtcgataggaaatactcctcttataaaacttaaagctgcttcagagattactggttgcaaaatttatggaaaagctgaatatttaaatcctggcggatcagtaaaagatagggcggctcttgctctaataaaagatgctgaagaaaaaaaattaatttctaaaggaggaacaatagttgaaggaacagcaggtaatactggaattggtttgtgcttaataggaaattctcttggttataaaactgtaatagtaatgaatgataaccaaacccaagaaaaaaaagatactttaagaaatattggtgcagatttaaggttggtaccgccaaagccttataaagatgatggtaattacgttaagtttgctggaagattagctgaagaacttaaaagttcaaataatcacggagtagtttgggctaatcaatttgataacactgctaatgccaagggccactacgaaacaacaggacctgaaatttgggatcaaacagatggaaaaatagatggttttg

SEQ ID NO: 242054 - DNA, 664 bp, Unknown
  Bacterial polypeptide expressing nucleotide sequence isolated from the Sargasso Sea
tatgaaaactttacaaaataattttgtcgaagcaataggaaatactcctttatttaaattaaaagtcgcatcagaaattactggttgtaatatttatggaaaagcagagtaccttaatccaggtggctctgtaaaagatagagcagctttagctttgataagagatgctgaagaaaaaaaactaatttcaaaaggtggaacaattgttgaaggaactgctggtaatactggaattggattatgtctattaggaaattctattggttataaaactattatcgtaatgaacgataatcaaacacaagaaaaaaaagatttattaagaaatattggagctgatttaaggttggttccacctaaaccttataaagatgaaaataactttgttaaatatgcaggaagattggctgatgaattaaaaagtagcaacaatcacggtgtagtgtgggctaatcaatttgataatactgctaattctaaaggtcattatgaaacaactggaccagaaatatgggaacaaactgacggtaaaattgacggttttgtatgttcatctggtactggtggtacaattgcaggagtaagtagttttttaaaagaaaagaataaagatattaaaatatatttatcggatccaactggctcatctctttataattacatg

SEQ ID NO: 242055 - DNA, 535 bp, Unknown
  Bacterial polypeptide expressing nucleotide sequence isolated from the Sargasso Sea
tatggacatagcaaatgatataacttctctggtaggaaatacacctttagttaaattaaatcgaatcagaaagtactttaattgttacccagaaataatagccaagcttgaaagtttcaatccatcagcctctgtgaaagatcgaattgcttattcaatgttacgtaaagctgaagagcaaggattaattaaaccagataaaacaacattaattgaagctactagtggaaatactggaatcgcattagcaatggttgctgcagctaaaggttataaattgatattaacaatgccagatacgatgagtattgaaagaagggcaatgttgagagcttatggagcagagttacagctaacaccaggaaaagaagggatgaaaggagctttagagttagctaatgagttgtctaaaagcattgcaaacagctatcaatttaatcaatttgaaaacttcgctaatccagatattcatgaaagaacaacggcacaagaaatatgggctcaatctaataataatttagatggactagtacag

SEQ ID NO: 242056 - DNA, 778 bp, Unknown
  Bacterial polypeptide expressing nucleotide sequence isolated from the Sargasso Sea
aataccccattagttaaattaaatcgaatcaaaaagtattttgattgttatccagaaataatagccaaactagaaagtttcaatccatcagcgtccgttaaggatcggatcgcttattcaatgttacgtaaagctgaagaagagggattgataacgccagataaaacaacattaattgaagcaactagtgggaatactggcatcgcattagcaatggttgcagcagcaaaaggctataatttgatattaactatgcctgatacgatgagtatcgagagaagggcaatgttgagagcatatggagctgaattacagctaacaccaggaaaagacggaatgaaaggagctttagatttagctaatgagttgtcttcaactattgaaaatagctatcaatttaatcagtttgaaaactttgctaatccagatattcatgaaagaacgacggctcaagaaatatggtcccaatccaataacaatttagatgggctagttacaggagtaggcacaggaggaacaattactggttgtgcacgttttttgaaaaaagttaatccaaactgcaaaatttatgccgtagagcccaaaaaaagtgctgtgatttccggagaaaaagcaggatctcattcgattcaaggaattggcgcgggtttcgtaccaaaagttcttaatactaaattaattgatgaaattataaaaatagatgacgatgaagcattttattatgggcgtttactaaatagattggaaggccttttatctggcatcagcagcggtg

SEQ ID NO: 242057 - DNA, 748 bp, Unknown
  Bacterial polypeptide expressing nucleotide sequence isolated from the Sargasso Sea
atgaaaaattacaaggatgattttatccaatcaattggaaatactcctttaataaaactaaaagctgcatccgaaataactggctgtaatatttatggtaaagctgaatatttgaatccaggaggatctgtaaaagacagagcagcacttgctttaataagggatgctgaacaaaaaaaattaatatctaaaggtggaataattgtagaaggaactgcaggaaacactggtattggtttatgccttattggaaattcacttggttacaaaacgattattgtaatgaatgataatcaaactcaagaaaaaaaagatactttaagaaatattggtgcagatttaaaattagttccaccaaaaccttataaagatgaaaataactttgttaaggttgctgctagaatgactgaagagctaaaaagttcaaataatcacggagttgtttgggcaaatcaatttgataatacagcaaactcaaaaggtcactacgatacaactggtcctgagatatgggagcaaacagaaggtaaagttgatggatttgtatgttcttctggcactggaggaacaattggtggagtaagtagttttttaaaagaaaaaaataaagatatacaaatttatctatcagatccaaagggatcctctctttacaatcacattgaaaacggcgagttaaaagctgaaggtggatcaataaccgaaggaattggatccagcagagtaactgctaatttgcagaagcaaa

SEQ ID NO: 242058 - DNA, 700 bp, Unknown
  Bacterial polypeptide expressing nucleotide sequence isolated from the Sargasso Sea
ccccgggtgatacccctgattgaagctaccagtggcaatacgggtatcgccttagccatggctgcggcgattaaaggctacaagatgatcctgatcatgccgtcgaattcgacccaggagcgtaaggatgccatgcaggcctatggcgccgagttgctgctggtggacaatatggaagccgcgcgcgatttggccttagatcttcaggcacaaggcaagggtaaggtgctggatcagttcaataatcaagataatgccaacgcccattttcagacgactggccccgaaatttggcaacagagccaaggtaagctcactcactttgtctccagcatgggtaccacaggcactattatgggggtgtctaaatacttaaagagtcgtaatcccgatatcactattgtcgggctacaacccgccgatggcagttcgattccggggatccgccgctggccgcaggaatatctaccgggtattttcgatgctgcccgtgtcgatgccgtgatggacattgaggagcaagatgccaaatctatggcgagaaccttggcccgtgaagaaggtatttgtgctggcgtgagttccggcggcgctgtgtttgcggcgctcgagattgcgaggctgaatccgggttccgttgtagttgcaattgtgtgcgataggggcgaccgttatctatcatctgggttattttcttaat

SEQ ID NO: 242059 - DNA, 556 bp, Unknown
  Bacterial polypeptide expressing nucleotide sequence isolated from the Sargasso Sea
atgaatgaaattcaaaatgattttatttctgggatcggaaatactcctttaataaaattaagagcagcatcagaaattactggttgtaatatttttggtaaagcagaatttttaaatccaggtggctctgttaaagatcgagctgctcttgcattaattaaagatgctcaagagaaaaagttaattgctaaaggtggaacagttgttgaaggaactgctggtaacactggtattggattaggtcttttaggaaattcattagggtataaaacaattattgtaatgaatgataatcaaacccaagaaaaaaaagatcttttaagaaatttaggtgctgaattaaaattagttccagctaagccttataaagatgataacaactttgttaaagttgcttcacgattagctgacgaacttagaccttctaataataatggagtaatttgggctaaccaatttgataatgtggcaaatgcaaaaggtcattatgaaggaactggtaaagaaatatgggatcaaactaatggtaaagttgatggctttgtatgttcttcag

SEQ ID NO: 242060 - DNA, 754 bp, Unknown
  Bacterial polypeptide expressing nucleotide sequence isolated from the Sargasso Sea
aatgaaaaattatagcgatagttttattcagtcgattggaaataccccacttataaaactaaaagcagcttcagaaattacaggatgtaatatttttggaaaagcagaatatttaaatcctggcggatcagtaaaagatagagcggcccttgctttaataaaagatgctgaagaaaaaaaattaatttctaaaggtggaacaatagtagaaggaacggctggaaatacaggtataggattatgtctcttaggaaattcccttggttataaaactattattgtgatgaatgataaccaaacccaagaaaaaaaagatactttaagaaatattggagccgatctaagattggtaccacccaaaccttataaagatgatggaaattacgtaaaagttgccggaagattggctgaagaacttaaaagttctaataatcatggagtggtttgggctaatcaatttgacaacactgctaatgccaaaggtcattacgaaacaacaggacctgaaatttgggaacaaactgaaggaaaaatagatggttttgtttgttcttcagggactggtggaacaattggaggggtaagtagttatcttaaagaaaaaaataaagatgttaatatttttttatctgatccaaccggttctgctctttataattacattcaaaatggagagttaaaatcagaaggtggatctattactgaaggtatagggtcaagcagagtaacagctaattttgctgaagctaaatag

SEQ ID NO: 242061 - DNA, 658 bp, Unknown
  Bacterial polypeptide expressing nucleotide sequence isolated from the Sargasso Sea
atgaatagtactcaaaacgactttatttcaggaataggaaacactccactaatcaagcttagagctgcctctgaaattacaggatgtaatatttatgggaaagcagagtttttaaatccaggtggatcagttaaagatagagcggcacttgcattaataaaagatgctcaagaaaaaaaattaattgctaaaggtgggactgttgttgaaggaactgcaggtaatactggaattggtttgggtctattaggaaattctttgggctacaaaacaatcattgtaatgaatgataatcaaacacaagagaaaaaagatttactaagaaatcttggagctgaactaagattagttccagctaaaccttataaggatgataataattttgttaaagtagcagcaagacttgcggatgaattaagaccatcaaataataatggtgttatttgggctaaccagtttgataatacagcaaatgctaaaggccattatgagggtactggccaagaaatttgggaacaaactgaaggtaaaatagatggctttgtttgttcatcaggaacaggaggaactatttcaggtgtaagtaatgcacttaaagaaaagaataaagatataaaaatttatttatctgacccaaaaaggttctgcgctttataat

SEQ ID NO: 242062 - DNA, 559 bp, Unknown
  Bacterial polypeptide expressing nucleotide sequence isolated from the Sargasso Sea
atgaaaaatactaaaaataattttatagaatcaattggaaacactcccctcataaaattaaaagctgcttcagaaattactggatgtaatatttatggaaaggctgaatacctaaatcccgggggctcagttaaagatagagcagctttagctttgataaaagatgcacaagaaaaaaaattaatttctgaaggtggaatagttattgaaggtacagcaggtaacaccggtataggtttatgtcttttagggaattcattaggttataaaacaataatcgtaatgaatgacaatcaaactcaagagaaaaaagataccttaaaaaatattggtgctgatttaagattagtgccacccaagccatataaagatgatggaaattacgttaaagttgcaggtagattagctgaagaattaagaagcactaataacaatggtgtagtttgggctaatcaatttgataacactgcaaacgctaaaggacattatgaaacaactggtcctgagatttgggaacaaacagacggtaaagttgatggatttgtttgtgcatctggaa

SEQ ID NO: 242063 - DNA, 534 bp, Unknown
  Bacterial polypeptide expressing nucleotide sequence isolated from the Sargasso Sea
aatgtccagaatctatgaagacaatagtttcgctattggtcataccccattagtcaagcttaattcaattacaaaaaacgcaaaagcaacagtactggcaaagatagaaggccgtaaccccgcctacagcgttaagtgcagaataggagcgaacatgatctgggatgctgagaagaaaggtttactcaataaagataaagtcattattgaaccaacttctggaaatactggaatagcccttgcttacacagctgctgctcgaggttacaagttaatcctcacgatgcctgagtccatgtcaattgaacgtcggaggatgatggctgttcttggtgctgaattaatattaactgaagcagcaaaaggaatgcctggtgccattgcaaaagcaaaggagatagctgatggcgaccctcaaaaatacttcatgccaggacaatttgataatccagctaatccagaaatacatttcaaaacaacaggtcctgaaatttgggatgataccgatggccaaattgatgttttagtctctgg

SEQ ID NO: 242064 - DNA, 492 bp, Unknown
  Bacterial polypeptide expressing nucleotide sequence isolated from the Sargasso Sea
gttgtataaatctatagaggaatgcattggaaatacacccttagtaaaagctaatagaatcaataattctcctgttgaattgtatttaaagcttgaaggggataatcctgcgggctcaattaaagacagagcggcaatgaatatgcttaacgctgctgaaaagagtaatttattatcaaaaaataaaaagatagtagagccaacaagtggaaatacaggcatagcattagcaatggcctgtgcaattaaaggttatgaattaattttagttatgccagaaaatatgagcattgagagaagagctgcaatgtatgcatatggtgcagaaattattttagtatcgactgatgaaggtatggaaggagcaagggataaagctcttgaaattgcaaaagagcaagatgcaatttttcttgatcaatttgcaaattctgcaaatccagaagttcactatcatactactgggccagaaatatggaatgacactgaagg

SEQ ID NO: 242065 - DNA, 728 bp, Unknown
  Bacterial polypeptide expressing nucleotide sequence isolated from the Sargasso Sea
aatgaaaaatacaaaaaataatttcatagactcaattgggaatacacctttaataaaattaaaagcagcatctgaaattactggatgtaacatctatggcaaagctgagtacttgaacccaggtggatcagtaaaggatagagctgcattagctttaattaaagatgcacaagataagaaactaatatctgaaggtggaattgtagtagaaggaactgctggtaacactggaattggattgtgtcttctaggaaattcccttggttataaaactataattgtaatgaacgacaatcaaacccaagagaagaaggatactttaagaaatattggtgcagatcttagattagttccgccaaagccttataaagatgatggaaactacgtaaaagttgctggaagacttgctgaggaattaaaaagtacaaacaacaatggtgtagtttgggctaatcaatttgataatactgctaatgcaaaaggacattacgaaacaactggtccagagatttgggaacaaacagatggaaaagttgatggatttgtttgtgcatcaggaactggaggaactattggtggtgttagtaaatacttaaaagaaaaaaataaagatattaaaatttatctttcagaccctactggttcagctctctataattatatcatgaacggagaacttaaagctgaaggtggatcagtaactgaaagtattggttcaagtagaataa

SEQ ID NO: 242066 - DNA, 808 bp, Unknown
  Bacterial polypeptide expressing nucleotide sequence isolated from the Sargasso Sea
agcgaggcccacttcaaagtgcacacaataaacggtttatcggaatcaataggcaacactcctctaattagaatcgagagcctatctaaggaaactggttgtaatattctgggcaaagctgagtttatgaatcccggaggctccgtaaaagatcgtgctgcactatggatggtcaaagatgctgaggctaaaggtctactaaagccaaaaggcatcgtagttgagggcaccgcaggaaacactggaattggactggccctcgtatgcaatagcagaggataccagacaatcatctacatgcccgacaaccagtcagaagaaaaggtaaacatgttgagaacattgggcgcggaagttcgagttgttgaaaccgtcccttacgcaaatgatatgaattatcagaaacaagctggcagattcgcagaaacactcgataacgccgtgtgggttaatcagtttgataataccgccaatcgacaagctcactttgaatcaacggggcctgaaatctggcaacaaactaatggcgacatcgacgcgttcacttgcgctgttggtacgggaggcaccctcgctggtgtatcccgatttttgaaggcaaagaataaagacatcaaaatagtcctggctgatcctttcggaagcgcactttacaattacgtcacaaccggagaagccagcatgacaccaggcccttcgatcaccgagggcatcggtaactcacgcgttacggacaacctcgccgacacgcaaatcgacgacgccgttcaaattgccgaccagaacatggttgatttagtctatcgac

SEQ ID NO: 242067 - DNA, 624 bp, Unknown
  Bacterial polypeptide expressing nucleotide sequence isolated from the Sargasso Sea
aatgaagaattctcaaaataattttattgatggtattggaaatacaccattggttaaacttaaagctgcttccgagataacagggtgtaacatatatggtaaagcagaatatttaaatcctggaggttcagtaaaagatagagctgcacttgcattaataagagatgcagaggaaaaaaaattaatttctaagggtggaacaattgttgaaggaactgcagggaacactggtatcggactttgtttgattggaaactcaatcggttacaaaactgtaatagtaatgaatgacaaccaaacacaagaaaaaaaagatatgctgaaaaatattggtgccgatttaagattagttcctcctaaaccatataaagatgacggcaattatgttaaagttgctggaagattagctgatgagctaagaagttcaaataatcatggtgttgtttgggcaaatcaattcgataacactgcaaatttaaaaggacattacgaaactacaggtcccgaaatttatgatcaaacagatggtaaagtagatgcattcatatgtgcgtccggaactggaggaaccattgctggtgttagtagttacttaaaagaaaaaaataaagatattaaaattta

SEQ ID NO: 242068 - DNA, 880 bp, Unknown
  Bacterial polypeptide expressing nucleotide sequence isolated from the Sargasso Sea
atgaaaaattacagtaacagttttatagaatctattggaaacactcctctaataaaactcaaagcagcatcagaaataactggctgtaatatttatggaaaagctgaatatttaaaccctggaggttctgtaaaagatagagctgcattagctttaataaaagatgctcaagaaaaaaatttaatttccaaaggtggaactgttgtagaaggaacggcaggaaatacaggtattggtttatgtcttattggaaattctttaggttataaaactataattgtaatgaatgaaaaccaaactcaagaaaagaaagacactctaattaatattggtgcagatttaagattagttcctgtaaaaccatataaagacgatggtaattatgtaaaagttgctggaagattggctgaagaattaaaaagttctaacaatcatggtgtagtttgggctaatcaatttgacaatacagcaaatgctaaagggcattatgaaacaaccggacctgagatttgggatcaaacagaaggaaaagtcgatggatttatatgctcttcaggaaccggaggaacaattggtggggttagcagttatcttaaagaaaaaaacaaagatattaagatttttttatctgatccaacaggatctgctctttacaattatataaagaatggagagttgaaatctgaaggtggttcaattacagaaggtatagggtcaagtagagtgactgctaattttaaagaagcaaaaatagatggagctttttcaataagtgatcatgaatctttaccaattttatatgatttaattcaaaatgaaggattaagtttaggaacaagttgtggtgtaaatattgctggagcaataagattaggtaaag

SEQ ID NO: 242069 - DNA, 184 bp, Unknown
  Bacterial polypeptide expressing nucleotide sequence isolated from the Sargasso Sea
tatgggccataaaaagatagcaaacaatgccttggagttaataggaaatacccccttagtaagactcaataaagtcgtccctaatggcgttgagattctagggaaatgtgaatttatgaccccaggcggatctgtaaaagatcgtgcaggttccgcgatgctagctgcagctgagttgtctggt

SEQ ID NO: 242070 - DNA, 670 bp, Unknown
  Bacterial polypeptide expressing nucleotide sequence isolated from the Sargasso Sea
atgagtaatacacaaagcgattttatttcaggaataggaaacactccattaatcaaactaagagctgcttcagaaataactggatgcaacatttatggaaaagcagaatttttaaacccaggtggatcagtcaaagatagagctgctctcgcattaattaaagatgctcaagaaaaaaaattaattgctaaaggtggtacagttgttgaaggaacagctggtaacactgggattggcttaggtctattaggaaattccttaggttataaaacaatcattgtaatgaatgataaccaaactcaagaaaaaaaagatttacttagaaatcttggagctgaactaagattagtgccacctaaaccttataaagatgataaaaattttgttaaagtggcagcgagacttgcagatgaattaagaccaacaaataataatggtgtaatttgggctaatcaattcgataatactgcaaatgccaaaggtcattacgaagggacaggacaagaaatttgggaacaaactgaaggtaatgttgatggcttcgtatgttcctctggaactggaggaactatttctggtgtaagtaatgctcttaaagaaaaaaacaaagatataaaaatttacttgtctgatccaaaagggatccgctctttacaattatataaagaat

SEQ ID NO: 242071 - DNA, 658 bp, Unknown
  Bacterial polypeptide expressing nucleotide sequence isolated from the Sargasso Sea
aatgacaaattttcaaaataattttattgaaggaataggcaacacaccacttataaaattaaaagctgcttcagaaattactggctgtaatatatatggaaaagcagaatatttaaatcctggcggatcagttaaagatagagctgcattagctctcataaaagatgctgaagaaaaaaaattaatttctaagggtggaataatagttgaaggtacagcaggaaatactggaataggcctatgtctgattggaaattcagttggatataaaacaataatagttatgaatgataatcagactcaagaaaagaaagatatgcttagaaatattggtgctgatttaagattagtacctcctaagccttataaagatgatggtaactacgttaaagttgctggaagattagctgaagaattaaaaagtaccaataaccacggagtagtttgggcaaatcaatttgataatactgctaattctaaaggacattatgaatcaactggtccagagatatggaatcaaactgacggaaaagtagatggatttgtatgttcttctggaacaggaggtacaattgctggagtaagtagttttttaaaagaaaaaaataaaaatattaaaatttatttatcagatccagctggttctctctttataatt

SEQ ID NO: 242072 - DNA, 780 bp, Unknown
  Bacterial polypeptide expressing nucleotide sequence isolated from the Sargasso Sea
atagtgaaaaattataaaaataattttattgaaagtataggaaacacacctttaataaaacttaaagcagcatctgaaataacaggatgtaatatttatggtaaagcagaatatttaaatccaggaggttctgttaaagatcgtgccgcccatgctttaattaaagatgcacaagaaaaaaaattaatttctaagggcggaattatagtagaaggcaccgcaggaaatactggaataggtttatgtttattaggaaattcattgggttacaaaactattattgtaatgaatgataatcaaactcaggaaaaaaaggatactttaaaaaatattggtgctgatttaagactagttccaccaaagccttacaaggatgatggcaattatgtaaaagttgctggtagactagctgaagaattaaaaagcacaaataactatggtgtagtttgggcaaatcaatttgataacactgcaaatgcaaaaggtcattatgaaactacaggtccagaaatttgggaacaaacggatggtaaaatagatggttttatttgtgcatctggcacaggtggaactattggaggcgttagtagttatttaaaaaataaaaataaagatgttaaaatttatttatctgatccctctggatcttcactttataattacattacaaatggagaattaaaatctgagggtggttcaattacagaaggaataggttccagtagagtaactgctaattttgctcaagcaaaaattgatggagcattttctatagatgat

SEQ ID NO: 242073 - DNA, 316 bp, Unknown
  Bacterial polypeptide expressing nucleotide sequence isolated from the Sargasso Sea
atggaaatagcaaatgatataacttctctagttggaaataccccattagttaaattaaatcgaatcaggaagcattttaattgttatccagaaataatagccaaactagaaagtttcaatccatcagcgtccgtcaaagatcgcattgcttattctatgttatgtaaagctgaagaagaaggattgataacaccagataaaacaactttgattgaagcaacaagtgggaatactggcatcgcattagcaatggttgctgcagcaaaaggctacaaattgatattaactatgcctgatacgatgagtatgagagaag

SEQ ID NO: 242074 - DNA, 340 bp, Unknown
  Bacterial polypeptide expressing nucleotide sequence isolated from the Sargasso Sea
cctgttctgtcaggagggaatcctggatctcatgcaatacaaggtattggagctggtttcattcctaatgtgttagatatgaatcaaattgatgaagtcataagaatcaatgataatgaagcaatggacataggcagaagacttgccaaagaagagggattgctaagtggtgtcagcagtggtgctgcagtagccgctgctttaaaagtaggaaatcaacctgagtttgcaaataaacgcttggttgttattttgcctagttttggtgaaagatatctatcaacaactatgtttacttccatccccgcaaagccagtaaaaggaaatgagtatctctaaa

SEQ ID NO: 242075 - DNA, 529 bp, Unknown
  Bacterial polypeptide expressing nucleotide sequence isolated from the Sargasso Sea
tattaagaagaagtacaaagatgtttttattccttcgcaattttctaatccaaacaatcctgatactcataaacggacaacagctgaagaaatttggcgtgatacagatggtaacgtcgatatttttattgccggtgttggtactggaggtacaatatctggagtttctgaagttttaaaggaacgtaagccttcaactcagattattgcagttgaacctgccttatcaccagtgatttctggaggtagtcctggtttacataatattcagggtataggtgccggttttgtaccagataatttaaataaaaaatttattgatgaaattttaacaattaccgatcaagaagctctagatatggctaagcgtttggttcgagaggaagggctgtttgttggaatatctgctggggctaatgttgctgctgctttaaaagttggagctaggcctgagaataaaggcaaacttatagtaactattttatgtgattatggagaacggtatttaagtacagaaatgtttgtttga

SEQ ID NO: 242076 - DNA, 241 bp, Unknown
  Bacterial polypeptide expressing nucleotide sequence isolated from the Sargasso Sea
atggcaaaaatttatgaggacaacagttttgctattggaaacactccattagtaaaattaaaatcagttactaaaaacgcaaaagctactgtactagcaaaaatcgaaggaagaaatcctgcctacagtgttaaatgcaggattggtgcaaacatgatatgggatgcggagaaaagcggaaaacttacaaaagacaaaaccattgttgaacctacatctggaaatactggaatgccctagc

SEQ ID NO: 242077 - DNA, 868 bp, Unknown
  Bacterial polypeptide expressing nucleotide sequence isolated from the Sargasso Sea
tatgactattgaagcctgtatcgggcaaacgccgctagttcgtctgcaacggttggattgcgggagctctacggtactgttaaagctagagggcaataatcctgctggctcggtaaaggatcgtgccgcactgaatatgattaaccaggcggagcttcgccaagaaatcgcccctggtgatactttgattgaagccaccagtggtaacactgggattgccttagcgatggccgcagcgattaaaggctacaagatgatcctgattatgccgtcgaattcgacccaagagcgtaaggatgccatgcaggcttatggcgccgagctgctgctggtggacaatatggaagctgcgcgggatttggccttagatcttcaggctcaaggcaaaggtaaggtactggatcagttcaataatcaagataacgcaaatgcgcattttctcacaactggcccagagatttggcagcagagccaaggcaagatcactcactttgtttccagcatgggtaccacaggtaccattatgggcgtgtcgaaatacctaaaaagccgcaaccccgatatcaccattgtcgggctacaacccgctgatggtagttctattccggggattcgccgctggccgcaggaatatttaccgggtatttttgatgccgcccgtgtcgatgccgtgatggatatagaagagcaagatgccaaagccatggcaagaactttagcgcgtgaagaaggtatttgtgctggcgtgagttctggaggcgcggtatttgcagcgcttgagatagcgaggcagaatccgggggccgttgtggttgcgattgtgtgcgataggggcgaccgttatctatcatctgggctattttcttaa

SEQ ID NO: 242078 - DNA, 1012 bp, Unknown
  Bacterial polypeptide expressing nucleotide sequence isolated from the Sargasso Sea
atgaattcttccagcattcgtgaaaacttgattcagtcgatcggcaatacgcctttgatccgtctccatagggcttcggaggagacaggttgtacgattctggggaaggcagaattcatgaaccctgggggttcggttaaggaccgtgctgcaaaggcaatcgttctggacgcggagaagcagggagttctccaaccaggagggttgattgtcgaaggaaccgctggaaatacaggaatcggattggcactggtgggaaattcccgtggttaccggaccctgatcgtcattcccgaaacccaaagccaggaaaaaaagaacatgctccgtctcagcggggccgaactcaaggaagtccccgccgtgccttatcgggatccgcagaactacatcaagatttccggaagactcgctgaggaactcaatcagaacaatcctaatggtgctatttgggcaaaccagttcgacaatgtggccaaccgtcaggcacattacgaaaccacagggcctgaaatctgggagcagaccgagggaaaggtcgatgccttcatctgtgcggtaggtaccggtggaaccctggccggcaccggggcttttctcaaggaaaagaatcctgagattcagattggactggcagatccgatgggtgccgcactgtattcctattataccgagggtgagctcagttcctggggagattcgattactgaaggcatcggccagggacggatcaccgccaacctggaagacgccgtcgtggatcaccccttccagattcccgatgatgaggcattgccggtttgctttcaattgcttcaggaagaaggactttgcctcgggagttcctcagggatcaacgtcgctggtgcaattcgcctggccaaagaattgggccccggaataacgattgtcaccatcctctgcgacagcggaacgcgttatcagtccaaactctttaatccacagttcctgaaaaagaaaggacttcccattcctgaatggctgagttgat

SEQ ID NO: 242079 - DNA, 1039 bp, Unknown
  Bacterial polypeptide expressing nucleotide sequence isolated from the Sargasso Sea
atgaaaaataaaatcaatgctcacgaaaatatcctttcattaattggcaacactccgctagttaagttaaataaagtaacaaaaaactttgaaggtgattactatgctaagtatgaggctatgaatcctggacaatctaataaagataggattgccctacatataatcgagtcagctgagaaaaaaggtctaatagataagaatacaactattattgaaacaacctcaggaaatactggatttagtctatcaatggtatctatggtaaaaggttataaatgtattgtagctgtttcgtctaagtcttcacctgataaaatagatatgttgaaagctatgggagccaaggtttatgtttgtccagcaaatgttccagcagatgataaaagatcatattatcaggttgctaaaagactaaatgaagaaattaaagattcattttatgttaatcaatattttaatgaattaaatatcgatgcccactacaagactacaggtccggaaatatggaaacaaacaaatggttcaatcacacatttagtagccagtagtggtactggcggtactatatctggcattggaagatttttaaaggaaaaaaacccaaatattcaaattattggggttgatgcatacggatcggttctcaaaaaatttcatgaaaccggcgagtttgattcaaatgaaatatatccctacagaattgaaggtttaggaaaaaatctaataccaacttcaactgattttgatgttatagatttctatgagaaggttaatgatgaagatagtgcgcattcatcaagagagattgcaaaaaaagagggtgtatttgttggatatacctctggtgcatgtttacaagcaattaaacaactaaacaaaagaaaagtatttacaaaaaacagtattgttgttacaattttctgtgaccatggatcaagatatatgagtaaaatatttagtgataagtggatgaacgaacaaggttttgatcaaaaaagtattgaacaagaatcatcaatagaacatattcgataaa

SEQ ID NO: 242080 - DNA, 991 bp, Unknown
  Bacterial polypeptide expressing nucleotide sequence isolated from the Sargasso Sea
aatgtctagagaaaataaagcttacaataatattttagaacttattggtaatacacctcttgtaagactcaataaaatttgtgatggctttcctggcaaatacttcacaaaatatgagggatacaatccaggtcattcgaataaagatcgtattgctcttcatattctaaatcaagcagagaaaaaaaagatattaaaaaagggaagtactattattgaaactacttctggtaacacaggttttagtctagctatggtatctcttttgaaaggttataaatgcatacttgcggttagttctaaagcatcaaaggataaaattaatatgttgaaatgtcttggagcggaaatttatgtatgcccttcaaatgttccatcagacgatcctagatcatattacgaggttgctaaaagattaaataatgaaataaaagattcagtatatattaaccaatattttaatgacttaaatgttcaagctcattatgaaactacaggtcctgaaatatggaatcaaacagatggagatataactcacttaattgcctgtagtggtactggtggtacaatttctggaattggtaggtacctaaaagaacaaaataaaaacataaaaattataggtgtcgacgcttatggctctatattaaaaaaatatcatgagactggtgaaatcgataaaaatgagatttattcatacagaattgaaggtcttggtaaaaacatagttccctcagctactgatttcaaaattattgataagtttgttaaagttacagattcagacagtgcacatatgtcaagagaaattactttaaaagaaggcttattcgttggatatacatctggagctgcatttcaagcagtaaatatacttaatggtgaaaacgaatttaatgatgaaagttgtgtagtcattgtttttcctgatcacgggtctaggtacctctctaaaatctattcagacgagtggatgaataatcaaggattt

SEQ ID NO: 242081 - DNA, 681 bp, Unknown
  Bacterial polypeptide expressing nucleotide sequence isolated from the Sargasso Sea
aatgaagaatattcagaataattttatttcagggattggaaatacgcctctttttaaattaagagcggcttcagagataactggttgcaacatttatggaaaagcagaatatctaaatccaggcgggtcagtgaaagatagagccgcattagcattaattaaagacgcagaagaaaaaaaattaattactagaggtggtacaattgttgaaggaacagcgggtaatactggaataggtttatgtctaattggcaattctgtaggatataaaacaataattgtaatgaacgataatcaaactcaagaaaaaaaggatatgttaaaaaatatgggagcagatttaaaattggtaccacctaaaccctacaaagacgatggtaattatgtaaaagttgcaggaagaattgcagatgaactcaaaaattcaaacaatcacggagtggtttgggctaatcaatttgataatacagcaaatatgaaaggtcactacaaaacaactggacctgaaatatgggatcaaacagatggtaaaatagatggatttgtttgctcatctggaacaggtggtacaattgctggcgtaagttcttttttaaaagaaaaaaataaaaatataaaaatttacttatcagacccgactgggtcatctttgtttgagtatgttgaaacatggagaaatta

SEQ ID NO: 242082 - DNA, 1363 bp, Unknown
  Bacterial polypeptide expressing nucleotide sequence isolated from the Sargasso Sea
tatgaaagtatttaataacatcctcgaaacaattggaaatacaccattggttaaattaaataaggtaaccaaagatgttgatgctaccgttttggcaaaagttgagtatttcaacccaggcagctccgtaaaagatagaatggcagttaaaatggtagaagatgcagaagctgatggaagacttcaaccaggaggcaccatcgttgaaggaacttctggtaatactgggatgggattggctctagcagcaattgttaaaggatataaattaatttgtgtttctacagataaacaatcaaaagaaaaatttgatattcttagagcagttggtgctgaagttattgtttgtccaacagacgtagctcctgaagacccaagatcatattattcaacgtcaaaaagaatagctgaagaaactccaaactcttggtatgtcaatcaatatgacaatccttcaaatgcaattgctcactatgagcaaactggacctgaaatctgggatcaaacagatgggaaaatcacacactttgttgttggtgttggaacaggaggaacgatatctggtgttggtaaatatttaaaagaaaaaaatccaaatattaaaatatggggaatcgacacctatggatccgtttttaaaaaataccatgaaacaggaatttttgatgagaatgaaatatactcttatataacagaaggaattggagaagatattttgcctgaaaatgtcaattttgatgtaattgatggttttgaaaaagtaacagataaggacgctgctgtatatacaagaagaatggcattagaagagggtatttttgctggcaactcctgcggggcagctgttaaaggattgattcagcttaaacatcattttaaaagcgatgatgttgttgtggttcttcttcatgactctggaagtagatatgttggaaaaatgtacaatgatgactggatgagagaaagggggttcttagatgaaaaaattatttgtgcaggtgatttaatcaaaaatcacaaagacaagccattggttactttatttgctgaagaacttgtttctcatgcaatatctaaaatgaggaagtttggtatttctcaaatacctgtaatgaaagaaggagagaatgttggttctgttgatgaccgtcacatgtatgaactgcttgttgaaaagcccgaattaaaagacacacctatttcttcaattatgcaagctccttttcctatggttgatgaaaaaacaagcatagatgaactttgtaaattaatcgacaaagatacatctgcagcacttgttgaattgtcaaatggaaataaacacatcattacacgatatgacattattcaagcaatgtcataa

SEQ ID NO: 242083 - DNA, 1003 bp, Unknown
  Bacterial polypeptide expressing nucleotide sequence isolated from the Sargasso Sea
aatgaataattttcaaaataattttgttgaaggcataggaaacaccccgctaattaaacttaaaggagcttcagaaataactggttgtaatatttatggcaaagctgaatacttaaatcctggaggatcagttaaagatcgtgctgccttagctttaataaaagatgcagaagaaaaaaaattaatttcaaaaggtggaataatagttgaaggaacagcaggaaatactggaataggtctttgtcttattggaaatgcaattggatacaaaacaataattgtaatgaacgataatcaaacacaagaaaaaaaagatatgcttagaaatattggtgcagatttaagattagtatcacccaaaccatataaagatgatggtaattatgtaaaagttgctggaagattagctgaagaattaaaaagtaaaaataatcatggagtagtttgggcaaatcaattcgataatacagctaatacaaaaggtcattatgaaacaactggtccagaaatatggaaacaaacagaaggaaaagtagatggttttgtttgttcatctggaactggtggaactatcggtggtgtaagtagttatttaaaagaaaaaaacaaaaatataaaaatttatttgtccgatccaacaggttcggctctttataattatataaaaaacggagaattaaagtctgatggtggatcaatcacagaaggtattggatcaagtagaataacagctaattttgctgaagcaaagattgatggagctttttcaataagtgatcatgagtcactgccaattctttataatttaatccaaaatgagggtttgagtttaggaacaagttgtggagttaatattgcaggagcaataagattagcaaaagaacttggccctggtaaaactattgttactattctttgtgacaaatcagataaatacaactctaagatgtttaataaaaagtttttgcaagaaaaaggtcttccatttccaagctggatttag

SEQ ID NO: 242084 - DNA, 1003 bp, Unknown
  Bacterial polypeptide expressing nucleotide sequence isolated from the Sargasso Sea
atgaaaactttacaaaataattttgtcgaagcaataggaaacactccattatttaaactaaaagccgcatcagaaattactggctgtaatatttatggaaaagcagagtaccttaatccaggaggctctgtaaaagatagagcagctttagctttgataagagatgctgaagaaaaaaaactaatttcaaaaggtggaacaattgttgaaggaactgctggtaatactggaattggattatgtctattaggaaattctattggttataaaactattatcgtaatgaacgataatcaaacacaagaaaaaaaagatttattaagaaatattggagctgatttaaggttggttccaccaaaaccttataaagatgaaaataactttgttaaatatgcaggaagattggctgatgaattgaaaagtagtaacaatcatggtgtagtttgggctaatcaatttgacaatacagccaattctaaaggtcattatgaaacgactgggccagaaatatgggaacagactgacggtaaaatagatggttttgtatgttcatctggcactggtggtacaattgcaggagtaagtagttttttaaaagaaaagaataaagatattaaaatatatttatcggatccaacaggttcctctctttatagttacattgaaaatggtgaattaaagagtgaaggtggttcaataactgaaggtattggatctagtagagttactgcaaattttgcaaaagcaaaaattgatggagcgttttcaataagtgatcatgagtctttgcctgttttatttgatttaattgaaaaggaaggtttaagtttaggtacaagttgtggagtaaacattgctggagcaataagattgggtaaacttttaggtccaggtaaaacaattgtgacaatactctgtgataaatctgataaatacaactcaaagatgtttaatagatcttttttacaagaaaaaggtcttccctatcctcactggatataat

SEQ ID NO: 242085 - DNA, 1003 bp, Unknown
  Bacterial polypeptide expressing nucleotide sequence isolated from the Sargasso Sea
atgtcacaaataaaaaataattttatcgagtcggttggcaatacacctttaataaaattaaaagcagcctcagagatcactggatgtaatatatatggaaaagcggagtacctaaatccaggtggatcagtaaaagatagagctgcacttgcattagtcaaagatgcacaagaaaaaaaattaatttcagaaggtggaatagttgtcgagggtactgcaggtaacactgggataggtttatgtcttttgggaaattccttaggttataagacaattattgtaatgaatgacaaccaaacccaagaaaaaaaagatacgttaaaaaatattggtgcagatcttagactagtaccgcccaagccttataaggatgatggtaactatgtaaaagttgcgggtcgtcttgctgaagaattaaaaagtacaaataacaagggtgtagtttgggcaaaccaatttgataacactgctaatgcaaaaggtcattacgaaacgactggaccagaaatttgggaacaaactaatggtaaagtagatggctttgtctgtgcatcaggaactggaggcaccatcggtggtgtaagtaaatttctcaaagaaaaaaataaagatataaaaatttatttatcagatccaacaggctctgcactctacaatcacgttatgaatggtgaacttaaagctgagggtggatcaataactgaaggtattggttcaagcagaataactaaaaactttgctgaagctaaaattgatggtgctttttccatcagtgatcaagagtctttaccagtactttatgatttaatacagcatgaggggttaagtttaggaactagttgcggagtaaatattgcaggtgcaattagattaggaaaagagcttggcccaggaaaaacaattgtaacaattctctgtgatagatcagataaatacaactcaaagatgtttaataaatcttttttaaaggaaaaaaacctccctattcctagctggttataat

SEQ ID NO: 242086 - DNA, 693 bp, Unknown
  Bacterial polypeptide expressing nucleotide sequence isolated from the Sargasso Sea
aatgaaaaattctcaaactagttttgttgaaggaataggaaatactccattaattaaactcaaagctgcatcagaagtaacgggctgtaatatttatggtaaagcagaatatttaaatcctggaggatcagttaaagatagagcagctttagcattaataagggatgcacaggagaaaaaattaatctcaaaaggtggaataatagtagaaggtactgcaggaaatactggaattggactttgtcttattggaaattcaattggttataaaacaataattgtaatgaacgataatcaaacacaagaaaaaaaagatatgttaagaaacataggtgctgatttaaaacttgtaccgccaaaaccttacaaggatgacggcaactacgtgaaagttgcaaaaagagtggctgaagaattaaagagtacaaataatcacggtgtagtttgggctaatcaatttgataatactgctaatgctaaagggcactatgaaacaactggaccagaaatttgggaacaaacagatggaaaagtagatgggtttatatgttcatctggaactggtggaacaattggcggtgtgagtagttatttaaaagaaaaaaataaagacataaaaatttatttatctgatccaacaggttcggctctctacaattatataaagaatggagagttaaaaagtgaaggagg

SEQ ID NO: 242087 - DNA, 919 bp, Unknown
  Bacterial polypeptide expressing nucleotide sequence isolated from the Sargasso Sea
catgaagtacgacaatatccttcaaacgatcggacacacccccacgatccgtctgcacagctttgacagcggccacgcacactccctttgggtcaaacttgaaagcttcaaccccggcggatcggtaaaagaccgcccggcactcaacatgattgaggatgctgaagcccgtggggtactgaaacccggtgacacgttgatagagcctacctcggggaataccggaatcgggctcgcgatggtggcggccgtcaagggctacccggcgatcttcgtcatgtctgccgacatgagtgaagagcgtaaagcgatcctgcgtgctttcggcgccgaactgatcctgacgcctgctgacaagggaacggtgggagccatcaaggaagcccgacgtctggaaaaggaggaaggctacttttttgttgggcagcactataaccccgcaaatccgcaatcccatcgccagacggctaaggaaatcatcggcgatttcgatggtgacctcggagccgtcatctgcactaccggcactggcggcaccatcagcggtttgtcggctgtcctgcgtgaggaaattcccggaatcagaattgttgctaccgagcctgacaattccccgatactctcgaaaggcatcgcctgtaaacatcggattatgggtaccgcgccagggtttattccggatacactcgaccaaggtgcttacgacgacatcattgcggtgaatgccgatcatgccatggcggttgcccgtcaactcgcgcagcaggaaggtattttttgcggcatttcatgcggcgccgcagtggtgggcatgctggaatacgccaagcgggaggaagccagggagcgtcaactgcttgcgattctggcagacaccggggagcgttatctcagtaccgagctttgggcctcgacatga

SEQ ID NO: 242088 - DNA, 1003 bp, Unknown
  Bacterial polypeptide expressing nucleotide sequence isolated from the Sargasso Sea
aatgaataacacacaaaacgattttatttcaggaataggaaataccccattaattaaattaagagcagcatcagaaattactagatgcaatatttatggaaaagcagaatttttaaatccaggtggatcagttaaagatagagctgcacttgctttaattaaagatgctcaggaaaaaaaattaattgctaaaggtggaacagttgttgaaggaacagctggtaacactgggattggtttaggtttattaggaaattctttaggttataaaacgatcattgtaatgaatgataatcaaacccaagagaaaaaagatctacttagaaatcttggagctgaattaagattagtgccacctaaaccttataaggatgataataattttgttaaagtagcagcgagacttgcagatgaattaagaccaacaaataataacggtgtcatatgggctaaccagtttgataatactgcaaatgctaaaggtcattacgaaggaacaggacaagaaatttgggaacaaactgaaggtaaggttgatggctttgtatgttcttctggaactggaggaactatttcaggtgtaagtaatgctcttaaagaaaagaacaaagatattaaaatttacctgtcagatccaaagggatcggctctttataattacataaaaaatggtgaactaaaatctgaaggtggatcaattactgagggaattggctcaagtagagtaacagctaactttggtgaagctaggattgacgatgcctattcaattgatgatcatgaagcattacctatactttatgatttaattcaaaatgaaggtctaagcttaggtactagttgcggtatcaatatcgctggagcaatcagaatgggtaaagaattagggcctggtaaaactattgtaacaattctttgtgatagaagtgataaatacgcaactaaaatgttcaataaaaaatttctagaagaaaagggtctaccagtacctaattggttttag

SEQ ID NO: 242089 - DNA, 1003 bp, Unknown
  Bacterial polypeptide expressing nucleotide sequence isolated from the Sargasso Sea
aatgaaaaattacaaggatgattttatccaatcaattggaaatactcctttaataaaactaaaagctgcatctgaaataactggttgtaatatttatggtaaagccgaatatttaaatccaggtggatctgtaaaagacagagcagcacttgctttaataagagatgctgagcaaaaaaaattaatatctaaaggtggaataattgtagaaggaactgcaggaaacactggtattggtttatgccttattggaaattcactaggttacaaaacgattattgtaatgaacgataatcaaactcaagaaaaaaaagatacattaagaaatattggtgcagatttaaaattagttccaccaaaaccttataaagatgaaaataactttgttaaagttgctgctagaatggctgaagagctaaaaagttcaaataatcacggagttgtttgggcaaatcaatttgataatacagcaaactcaaaaggtcattacaatacaacgggtcctgagatatgggagcaaacagaaggtaaagttgatggatttgtatgttcttctggaactggaggaacaattggtggagtaagtagttttttaaaagaaaaaaataaagatatacaaatttatctatcagatccaaaaggatcctctctttacaatcacattgaaaacggagagttaaaagctgaaggtggatcaataactgaaggcattggatccagcagagtaactgctaattttgcagaagcaaaaatagatggagccttttcaattgaagataaagagtctttgccaatactatatgatttaatcaaaaatgaaggtttaagtcttggaacaagttgtggagtaaatattgcaggtgcaataagattagggaaaaaactaggaccaggaaaaactattgtcactattctttgcgacaaatcagacagatacaactcaaagatgtttaataaaccttttttaattgaaaaaggtttgccttatcccgactggatataa

SEQ ID NO: 242090 - DNA, 847 bp, Unknown
  Bacterial polypeptide expressing nucleotide sequence isolated from the Sargasso Sea
cttgataggtagaacacctcttgtaaaagtattttcgaatcaaggtagtgttgttctagcaaaacttgaaggtaataatccaggtggttcagttaaggatagggctgcactcaaaatgattacggatgcagaaaattcaaagataatcaagcccggagacactattatagaggcaactagtggaaatacagggatagcactggccatggttgctgcaatgaaaaactataaaattaaacttattatgcctgagacagcatcagaagaaagagtaaaaaccatgaaggcttatggagctgatgtaattttagtaacaaaagaagaggatatggaaggagcacgagatcttgctatgaagcttaaaaattctggagaaggaattgtattagatcagttttctaatgattctaattatatgtctcattttgagggaacaggccctgagatattcgatcagacaaatggaaaagttacacacttcgtatcagctatggggacaacaggtacaattaccggtgtgtcaatgtatttaaagtcaaaaaatccaaatatacgtatcattggagttcagcctgaggaaggatctagaataccaggtatcagaagatggaagactggatatgagccagcgataaaaaaacatgcacttatagatagtactatagatattaatcaatccactgctgaggattcgtgcgaagagttagctaagaaaaatggcatattttgcggaatttctgcagctgcaaatatctttatatctaaaaaaattgctcgtgaaaatcgcaactcggtagtagtcacaataatatgtgaccgaggcgataggtatctatctaaaatttaa

SEQ ID NO: 242091 - DNA, 937 bp, Unknown
  Bacterial polypeptide expressing nucleotide sequence isolated from the Sargasso Sea
atgaaaaattatagtaataattttattgagtctataggtaatactccgctgattaaacttaaagcagcctctgacatcacgggatgtaatatatatggcaaagcagaatatttaaatcctggtggatcagtaaaagatagagcggcattagctttaattaaagatgctcaagaaaataaattaatttctaaaggtggaactgttgtggaaggaacggctggaaatacaggtataggattatgcttactaggaaactctctaggttataaaactattattgtaatgaatgaaaaccagacacaagaaaaaaaggatacattaaaaaatataggtgccgatttaagattggttccagtaaagccatataaagatgacggcaattatgtaaaagttgccggaagattggctgaagaattaaaaagctctaataaccatggagtagtttgggctaatcagtttgataatactgctaatgctaaaggtcattacgacactactggtcctgaaatttggcaacaaactgaaggaaaaattgatgggtttgtttgttcttctggaacaggaggaactattggtggtgtaagtagttatcttaaagaaaaaaataaaaatattaaaatttacttatctgatccaacgggttctgctctttataattatattaaaaatggagagttaaaatcagagggcggatctattaccgaaggtataggatcaagcagaataactgctaattttgcagaagctaaaatagatggtgccttttcaataagtgatcatgaatctttacctattatttatgatttaattcaaaatgaaggattaagtttaggaacaagttgtggtgtaaatatagctggagcaataagattagctaaagagcttggtcctggaaaaactattgtaacaattctctgtgataaatcagataaataca

SEQ ID NO: 242092 - DNA, 1003 bp, Unknown
  Bacterial polypeptide expressing nucleotide sequence isolated from the Sargasso Sea
aatgaaaaactatcaaacaaattttattgaaggaataggaaatactcctcttattagactaaaaactgcttcagaaattactggatgtaatatttatggcaaagctgaatatttgaatcctggtggatcggttaaagatagagctgcgttggctcttattaaagatgctgaagataaaaaattaatttcaaaaggtggaacaatcgtagaaggtactgctggtaatacggggattggattatgtttaattggaaattcgataggatataaaacaataatcgtaatgaacgataatcaaacacaagaaaaaaaagatatgctcaaaaatataggagctgatctaagattagttccacctaaaccatataaagatgatggtaactatgtaaaagttgcaggaagattagctgacgaattaaaaagcacaaataatcatggtgtggtttgggcaaatcaatttgataatactgctaatgctaaagggcactatgaaacaactggaccagaaatttgggaacaaacagatggcaaggtagatgggtttgtatgttcatctggaactggtggaactatcggaggtgtgagcagttatttaaaagaaaaaaataaagatataaaaatttatttatccgatccaacaggttcagcgctttacaactatataaagaatggagagttaaaaagtgaaggaggatcaatcacagaaggtattggttcaagtagagtaacagctaattttgctgaagctaaaatagatggagcattttcaataagtgaccatgagtctttacctattctgtatgacttaattcaaaatgaaggtttaagtcttggtacaagttgtggagttaatattgcaggagcaataagattaggaaaagaactcggaccaggaaaaactatagttactattctttgcgataaatcagataaatacaactctaagatgtttaataaaaaatttttagaagaaaaaggcctaccatttcctagttggatataa

SEQ ID NO: 242093 - DNA, 850 bp, Unknown
  Bacterial polypeptide expressing nucleotide sequence isolated from the Sargasso Sea
aatgaataatacccaaaacgattttatttctggaataggaaatactccattaattaaactcagagcagcctctgaaattactgggtgtaacatttatggaaaagcagaatttttaaatcctggaggatctgtaaaagatagagctgcacttgcattaattaaagacgctcaagaaaaaaaactaattgctaaaggtgggacagttgttgagggaacagctggtaacacaggaattggtttaggacttttaggaaactctcttggttataaaacaattattgtaatgaatgataatcaaactcaagaaaagaaagatttgcttagaaatcttggagctgagttaagactggttccacctaagccttataaagatgataataatttcgtaaaagtagctgctagacttgcagatgaactaagacctacaaataataacggtgtaatttgggctaaccagtttgacaatactgcgaatgccaaaggtcattatgaagggacaggacaagaaatttgggaacaaactgaaggtaatgttgatggctttgtttgttcttcaggaactgggggaactatttcaggtgtaagtaatgctcttaaagaaaagaacaaagatataaaaatttatctatctgatccaaaaggttcagctctttataattatataaaaaatggcgaacttaagtcagaaggtggatcaattactgaaggtattggctcaagtagagtgactgctaactttggtgaggcaaaaattgatgacgcatattcaattgatgaccatgaagctttacctatactttatgatataattcaaaatgaaggtctaagcttaggtactagttgtgaataa

SEQ ID NO: 242094 - DNA, 979 bp, Unknown
  Bacterial polypeptide expressing nucleotide sequence isolated from the Sargasso Sea
atggacgtgcgacaaggcttcgtcgactgcgtggggcgcacgccgctgattcgcttgacgaagctcagcgccgagacgggctgcgagatcctcggcaaggcggaattcatgaatccgggcgggtcggtgaaggaccgcgcggcactctacatcatccgcgacgccgagcggcgcggcgtgctgaagccaggcggcaccgtggtcgagggcacggcgggcaacaccggcattggtttcgcgcatatctgcgcggcgcgcggctatcgctgcgtgatcgtgattcccgacacgcaatcgccggacaagctggcgatcctgcgcacgctcggcgccgacgtgcgcccggtgccggcggcgccctaccgtgacccgaacaactatcagaagattgccgggcggctcgcggacgaactcgacggcgcggtgtgggccaaccagttcgacaacgtcgtcaatcgccaggcgcactacgagacgaccgggcccgagatctggcgcgatacggcgggcacgatcgatgcgttcgtttgcgcgaccgggacgggcggcacgctggcgggcgtgagccgttttctgaaagagcagaatccggacgtccggatcgtgctggccgacccgcacggcagcgggctctacggttacgtgaaaacgggcgacctcggcgcggagggcagctcgatcaccgaaggaatcggatcgacgcgcgtcacgatgaacctggcgggcacgccgatcgacgacgccgtgcggatcgacgatcagcagtgcgtgacgatggtctaccggctgctgcgcgaggaggggctgtacgtcggcggatcgagcggcatcaacgtcgcggcggcggcctggctggcccgccggatgggcccggggcacacgatcgtgaccttgctgtgcgaccgtggcgacatctatcgcacgcggctgttcaatcgggaatggctgcgcgaaaagggactggatccgggggactgaa

SEQ ID NO: 242095 - DNA, 904 bp, Unknown
  Bacterial polypeptide expressing nucleotide sequence isolated from the Sargasso Sea
catggcttacaaaactatcgaagatacgatcggcaatacgccgctcgtccaactggtccgcttgccggacgatgaaattcgcgcgcgcaacaacgtgctgctcgcgaagctcgaaggcaacaatccggctggttccgtgaaggatcgtccggcactgtcgatgatcagcaaggccgaggcgcgcgggcgcatcaagccgggcgatacgctgatcgaggcgacgagcggaaacacgggtatcgcactcgcgatggccgcggcgatccgcggctacaagatggtgctgatcatgccggaggacctgtcggtcgagcgccgccagagcatggccgcctacggggccgaaatcatcctgaccccggtgaagggcgggatggagctggcgcgtgatctcgcggaccagatgcagcgcgaaggcaagggtgtgatcctcgaccagttcgcgaaccccgacaatccgattgcgcattacgaagcgacgggcccggaaatctggcgcgataccgaggggcgcatcacgcatttcgtgtcggccatgggcacgacgggcacgatcatgggcacgtcgcactatctgaaggaacagaatccggcgatcgagatcgtcggtgcgcagccggaagacggttcgcgcattccgggcatccgcaagtggccggaagcgtacatgccgaccatcttcgatcgtagccgcgtcgaccgcgtcgagagcgtgagccaggccgcggcggaaacgatggcgcgccggctcgcgtcggtcgaaggcatcttcgcgggcatttcgtcgggcggcgcgtgtgacgtcgcaatgcgcatcgcgcgtcaggtcgagaatgcgacgatcgtgttcatcatctgcgatcgcggcgaccgctacctgtccacgggcgtgtttcccgcctga

SEQ ID NO: 242096 - DNA, 898 bp, Unknown
  Bacterial polypeptide expressing nucleotide sequence isolated from the Sargasso Sea
atgaaaactttacaaaataattttgtcgaagcaataggaaatactcctttatttaaattaaaagccgcatcagaaattactggttgtaatatttatggaaaagcagagtaccttaatccaggtggctctgtaaaagatagagcagctttagcattaataagggatgctgaggaaaaaaaattaatttcaaaaggtggaacaattgttgaaggaactgctggtaatactggaattggattatgtcttttaggaaattctattggttataaaactataatcgtaatgaacgataatcaaacacaagaaaaaaaagatttattaagaaatattggggctgatttaaggttagttccaccaaaaccttataaagatgaaaataactttgttaaatatgcaggaagattggctgataaattgaaaagtagtaacaatcacggtgtagtttgggctaatcaatttgacaatacagccaattctaaaggtcattatgaaacaacagggccagaaatatgggaacagactgatggcaaaatagatggttttgtatgttcatctggtactggtggtacaattgcaggtgtaagtagttttttaaaagaaaagaataaagatattaaaatatatttatcagatccaacaggttcctctctatatagttacgttgaaaatggtgaattaaagagtgaaggtggttcaataactgaaggtattggatctagtagagttactgcgaattttgcaaaagcacgtattgatggagcattttcaataagtgatcatgagtctttacctgttttattcgatttaattgaaaaagaaggtttaagtttaggtacaagttgtggagtgaacattgctggagcaataagattgggtaaacttttaggaccaaggtaaa

SEQ ID NO: 242097 - DNA, 910 bp, Unknown
  Bacterial polypeptide expressing nucleotide sequence isolated from the Sargasso Sea
aatgaaaaaatatcataacgattttttacaatcgataggtaatacaccgttaataaaacttaaagcagcctctgagataacaggttgtaatatttttggtaaagcagaatatttaaatcctggtggatcagtgaaagatagagcagcacttgcgcttataaaggatgctgaaaataaaaaattaatatctaagggtggaactattgttgaagggacagctggtaatacaggtataggtttatgcttacttggtaattcacttggttataaaacaattattgtaatgaatgataatcaaacacaagaaaaaaaagatactctaaaaaatattggagcagatttaagattagtgcctgcaaagccttataaagatgatggtaattatgtaaaagttgcaggaagactagctgaagaattaaaaagttctaataaccatggtgtcgtttgggcaaatcaatttgacaatactgctaatgctaaaggtcactatgaaacaactgggcctgaaatatgggatcaaactgatggtaaaattgatggttttgtatgtgcatcaggaacaggaggaacaattggaggaataagttcttacctaaaagaaaaaaataaaaacattaaaatatatttatctgatccaactggttctgcactttataattacattcaaaacggtgaattaaaatctgaaggagcttctattactgaaggaataggatcaagcagaataacaaaaaattttgctgaagcaaaaatagatggcgctttttcaataagtgatcatgaatcattaccaatattatatgatctaattcaaaatgaaggtttaagtcttggtacaagttgtggtgttaatattgcaggtgctattaaattgggtaaagagctaggtcctggaaaaactattgtaaca

SEQ ID NO: 242098 - DNA, 801 bp, Unknown
  Bacterial polypeptide expressing nucleotide sequence isolated from the Sargasso Sea
catgtctattagagagggattcgttgatctggttggaaatacgcctttagtaagattacataaagcttctgaggctacgggttgtgaaattttaggtaaagctgagtttttaaacccagggagttctgttaaagatcgtgctgctttatttatgattaaagatgctgttgagaaaaatttactggcccccggtggattgattgtcgaagcaacagcaggaaatacgggcatagggctagcgctgtgtgccaatgctttgggttttgaaactttaatagttatccccgacacacaaagtcaggaaaaaaaagacatgctgcggctcgccggcgcaaaacttgttgaaaatccagcctaccctttttcaaatccaaaaaattatcaacatgtggcccgcaagatggctgaagatctcaaaaaaacctcgaaaaatggagttgtttttgctgatcaatggaacaacctagcaaatcgacgggcgcactatgagacgacaggtccagagatttgggatcaaactagggggaggattgatgcctttatttgttcaatcggaactggcggaaccatctctggtgcttctacctttttaaaagagaaaaaatccaatattttcataggtgtagcggatccctatggtgcggccatgtacagttattttacttgtggtgagatcaaatcagagggtaattcggtgacagagggtattggtcttgggagggttacaccgattatagaagatatctccatagataaggcttaccgtattccagactctgaagcactagaaataacttttga

SEQ ID NO: 242099 - DNA, 388 bp, Unknown
  Bacterial polypeptide expressing nucleotide sequence isolated from the Sargasso Sea
aaagcaattacttcaattgctgttgagccaacagactctccagtaattacccaagcgcttgcgggcgaagaattaacccctggcccacacaaaattcaaggtattggcgcaggtttcattccaggtaacctagacctagacctaattgacgaagttgagcaagttaccaacgaagaatgtatggacatggcgcgcaagctaatgaccgacgagggtattcttgcaggtatttcttctggtgcagccgttgttgccgctaagcgttttgctgaacgcccagaaaacaaagacaaagtggttgtagtgcttctagcaagcggcacagaacgttacctaagtagccctttgtttgctggtgcgttcgacgaacaagaagaagttcaataac

SEQ ID NO: 242100 - DNA, 904 bp, Unknown
  Bacterial polypeptide expressing nucleotide sequence isolated from the Sargasso Sea
atgaaatatccgacgattgaagacgcggtaggcaacacgccgctggtggcgctgcagcgcattggggcccaggacaacgcagcgcgtggcaatgtggtgctgggcaagctcgaaggcaacaaccccgcagggtctgtcaaggaccggcctgcactgtcgatgatccgccgcgccgaggagcggggcgacatccgccccggcgacacgctgatcgaggccacgtcgggcaataccggcatcgcgctggcgatggccgcagccatcaagggctaccgcatggtgctggtgatgccggaggacttgtccatcgaacgtgcgcagaccatgaaggcctttggcgccgagctggtgctgacccccaagagcggcggcatggagcacgcccgcgacctggccgaggccatgcaaaagcggggcgaaggcaaggtgctggaccagtttggcaaccccgacaacccgcgcatccactacgaaaccacaggccccgagatctgggagcagaccggcgggcgcatcacccactttgtgagcgccatgggcaccacgggcaccatcacgggcgtatcgcggttcctcaaggagaagaacccgtccatccagatcatcggcgcgcagcctgaagagggctctcgcatcccgggtatccgcaagtggccccaggagtacctgcccaagatttacgacgccagcaccgtggatgagctggtgtacgtgagccaggacaacgccgaagacatgtgccgccgcctggcgcgcgaagagggcatctttgcgggcatctctgccgccggcgcgtgctgggtggcgcagcagatcgccgcccgcgacagcaatgccaccatcgtcttcatcgtgtgcgaccggggcgaccggtatttgtcgaccggggtgtttcctgcatgac

SEQ ID NO: 242101 - DNA, 1003 bp, Unknown
  Bacterial polypeptide expressing nucleotide sequence isolated from the Sargasso Sea
atgaagaattttcagaataattttatttcaggaattggaaatacacctttaattaaattaagggctgcatctgaagtaacgggatgtaatatttatggtaaagctgaatatcttaatccagggggatcagtaaaagatagggcagcgttagctttgataaaagatgccgaggagaaaaaattaatttctaagggtggtactattgttgagggcacagctggcaatactggaattggactttgtcttattggaaattcagtaggttataaaacagtaattgttatgaatgataatcaaacacaagaaaaaaaggatatgctaaaaaacatgggcgctgagttaaaattagttcctcctaaaccatacaaagatgatggtaattatgtaaaggttgcaggtagacttgctgatgaacttaaatcatcaaacaatcatggagtagtttgggctaatcaatttgataatactgctaatctaaaaggacactatgaaagtacaggtcctgaaatctgggaccaaacagacggaaaagttgatgggtttgtttgtgcatctggaactggtggaacaatagctggagtgagctcatatttaaaagaaaaaaataaagatgttaaaatttatttatctgatccaacaggttcttctctctataactatatagaaaatggcgaacttaaaagcgagggaggatcaataacagaggggattggatcaagtagagttacagcaaattttgcggaagctaaaatcgacggtgctttttccataagcgataatgagtctttgcctgttttatttgatttaattgaaaatgaaggtttaagtcttggaacaagttgtggagtaaatattgctggtgcaattagattaggtaaaatattaggaccaggtaaaacaattgtaacaatcctttgcgataaatcagacaaatacaactctaagatgtttaataagaaatttttattggaaaaagggcttcccgtacctagttggatataaa

SEQ ID NO: 242102 - DNA, 1003 bp, Unknown
  Bacterial polypeptide expressing nucleotide sequence isolated from the Sargasso Sea
atggggatcacgcgcggattcgttggagcggtgggcaacaccccgctgattcgcctagagcacctcagcgagcgcaccggctgcgaaatcctcggcaaggctgagttcatgaaccccggcggttcggtcaaagaccgcgctgcattgggaatgcttttggctgccgaagccagtggtgacctccagcccggcggcaccgttgtcgagggaacagccgggaacaccggcatcgggctggcgcacctctgcaacgctcgtggctaccgctgcgtgatcgtgatcccggaaacgcagtcggctgaaaagatcgacctgctgcgcagccttggggctgaagtgcgcacagttcccgctgttccttacagggaccccaacaactacgtaaaactctcaggccggatcgctgaggagattccgggtgcggtttgggccaatcaatttgataaccgcgccaaccgtcaggcccatgccgacaccaccggtccggagatctggaagcaatgcgaaggccggctcgatggctgggttgcggccacaggaactgggggcacctatgccggcgtggcgctctatctcaagcagcaatccgaggctgtgcgctgcgtgttggccgatccccatggcagtgccctgcatagctgggccagcaccggagaattagccagcgaaggctcgtcggtaaccgaaggcattggcaacagccgcatcaccgccaatttggagggggctcctgtcgatgaggcaattcgcattgatgatcagaccgccattgatgtgctctatgacctcctttggcatgaaggtctcttcatgggtggatcagttgggatcaatgtggctgcagccgttgaactggccaagcggttaggccctggtcaccggatcgtcacggtcttgtgtgatggcggtgatcgctatcgctcccggatttggaataaggagtggttgcaaagccgggggttacgccagccagagcggcagggtgccggtagcgtcgcttaga

SEQ ID NO: 242103 - DNA, 1003 bp, Unknown
  Bacterial polypeptide expressing nucleotide sequence isolated from the Sargasso Sea
aatgaatagtactcaaaacgactttatttcaggaataggaaacactccactattcaagcttagagctgcctctgaaattacaggatgtaatatttatgggaaagcagagtttttaaatccaggtggatcagttaaagatagagcggcacttgcattaataaaagatgctcaagaaaaaaaattaattgctaaaggtggaacagttgttgaaggaacagcaggcaacacaggaattggtctaggtcttttaggaaattctttaggttataaaacaatcattgtaatgaatgataatcaaacacaagagaaaaaagatctgcttagaaatcttggagctgaattaagattagtaccacctaaaccttacaaagatgataacaattttgttaaagtggctgctagacttgcagatgaattaaggccaactaataacaacggtgtaatttgggctaaccagtttgacaatactgcaaatgccaaaggtcattacgaaggtacgggacaagaaatttgggaacaaactgaaggtaaagtagatggctttgtatgttcctcaggaacaggaggaacaatttcaggtgtaagcaatgctcttaaagaaaagaacaaagatattaaaatttacctgtcagatccaaagggatcagctctttataattatataaaacatggtgaactaaaatctgaaggtgggtcaattactgagggaattggctcaagtagagtaacagctaactttggcgaagctaaaatagatgatgcctattcaatagatgatcatgaggcattgcctatactttatgatttaattcaaaatgagggtcttagcctaggcactagttgtggcatcaacattgctggagcaataagaatgggtaaagaattaggtcctggtaaaactatcgttacaattctttgtgatagaagtgataaatacgcaactaaaatgttcaataaaaaatttttagaagaaaaaggtctaccaatacctaattggttttaa

SEQ ID NO: 242104 - DNA, 499 bp, Unknown
  Bacterial polypeptide expressing nucleotide sequence isolated from the Sargasso Sea
atggaaatagcaaatgatataacttctctagttggaaataccccattagtaaaattaaatcgaatcagaaagtattttgattgttatccagaaataatagccaaactcgaaagtttcaatccatcagcttccgttaaggatcggatcgcttattcaatgttatgtaaagctgaagaagaaggattaataacaccggacaaaacaactttaatagaagcaactagtgggaatactggcatcgcactagcaatggttgccgcagcaaaaggctataaattgatattaactatgccggatacgatgagtattgagagaagggcaatgttaagagcatatggcgctgaattacagctaacaccagggaaagacggaatgaaaggagctttagatttagctaatgagttgtcttcaacaattgcaaatagctatcaatttaatcagtttgaaaactttgctaatccagatattcatgaaagaacgacggctcaagaaatatggt

SEQ ID NO: 242105 - DNA, 1012 bp, Unknown
  Bacterial polypeptide expressing nucleotide sequence isolated from the Sargasso Sea
atgaattcttccagcatttgtgaaaacctgattcagtcgatcggcaagacgcctttgatccgtctccggagagcttcagaggagacaggttgtacgattctggggaaggcagaattcatgaaccctggtggttcggtcaaggaccgcgctgcaaaggcaatcgttctggacgcggagaagcaggaagttctcaaaccaggaggtttgatcgtcgagggaacggctggaaatacaggaatcggattggcattggtgggaaattcccgtggttaccggaccctgatcgtcattcccgaaacccaaagtcaggaaaaaaaagacatgctccgtctcagcggggccgaactcaaggaagtccccgccgtgccttatcgggatccgctgaactatattaagatttctggaagactcgctgaggaactcaatcagaacgatcctaatggtgccatctgggcaaaccagttcgacaatgtggccaaccggcaggcacattacgaaaccacaggccctgaaatctgggagcagaccgagggaaaagtcgatgccttcatctgtgcggtggggaccggtggaacactggccggcaccggagcttttctcaaggaaaagaatcctgagattcagattggactggcagatccaatgggtgccgcactgtatgcctattacaccgagggtgagctcagttcctggggagattccattaccgaaggcatcggtcagggacggatcaccgccaacctggaagacgcggtcgttgatcaccccttccagattcccgatgaagaagcattgccggtttgctttcaattgctacaggaggaagggctttgcctcgggagttcctccgggatcaacgtcgctggtgcaattctcctggccaaagaattgggccctgggaaaacgattgttaccatcctctgcgacagcggaacgcgttatcagtccaaactcttcaatccacagttcctgaaaaagaaaggacttcccattcctgaatggctgagttgat

SEQ ID NO: 242106 - DNA, 994 bp, Unknown
  Bacterial polypeptide expressing nucleotide sequence isolated from the Sargasso Sea
atgtcacaaataaaaaataactttattgagtcggttggaaatacacctttaataaaattaaaagcagcctcagagattactggatgtaatatttatggaaaagcggagtacctaaatccaggtggatccgttaaagatagagctgctcttgcgctaataaaagatgcacaagaaaagaaattaatttcagaaggtggaatcgttgttgaaggtactgcgggtaacactgggataggtttatgtcttttaggaaattccttaggttataagactattattgtaatgaatgacaaccaaacccaagaaaaaaaagatactttaaaaaatattggtgcagatcttagactggtaccgcccaagccatataaagatgatggtaactatgtaaaagttgcgggtcgtcttgctgaagaattaaaaagtacaaataacaaaggtgtagtttgggcaaaccaatttgataacactgctaatgcaaaaggtcattacgaaacgactggaccagagatttgggaacaaactgatggtaaagtagatggctttgtctgcgcatcaggaactgggggcaccatcggtggtgtaagtaaatttttaaaagaaaaaaataaaaatataaaaatttatttatcagatccaacaggctctgcactctataatcatattatgaatggtgaacttaaagctgagggtggatcgataactgaaggtattggttcaagcagaataactaaaaactttgctgaagctaaaattgatggtgctttttcaatcagtgatcaagagtctttacccgtgctttatgatttaatacagcatgaggggttaagtttaggaactagttgtggagtaaatattgcaggtgcaattagattaggaaaagagctaggtccaggaaaaacaattgtaacaattctctgtgatagatcagataaatacaactcaaagatgtttaataaatcttttttaagaggaaaaaaacctccccattcctagc

SEQ ID NO: 242107 - DNA, 940 bp, Unknown
  Bacterial polypeptide expressing nucleotide sequence isolated from the Sargasso Sea
atgaatgattttcaaaatgattttatttcagggatcggaaatactcctttaataaaattaagagctgcatcagaaattactggttgtaatatttttggaaaagcagaatttttaaatcctggtggttctgttaaagatcgagctgcacttgctctaattaaagacgcccaagaaaaaaaattaattgctaaaggtggaacagttgtagaaggcactgcaggcaatactggaattggactgggtctattgggaaattcattagggtataaaacaatcattgtaatgaatgataatcaaacccaagaaaaaaaagatattcttaaaaaccttggtgcagaattaaaattagttccagctaaaccttataaagatgataacaactttgtaaaagttgcagcaaggctagctgatgaacttagaccgacaaataataatggagtaatttgggctaaccaatttgacaacactgcaaacgcaaaaggccattatgaaggaacgggcaaagaaatttgggatcaaaccgaaggtaaagttgatggatttgtatgttcttcaggaactggtggaactatttcaggggttagtaatgctcttaaagaaaaaaataaagatataaaaattcatttatctgatccaaaaggttctgctctttataattatataaaaaatggagaactaaaatctgaaggtggttctataactgagggaattggatcaagtaggataacagcaaattttaaagatgctaaaattgacgatgcgtattcaattgacgacaaagaggcattaccaattctctatgatttaattcagaatgaaggattgagcttaggaactagctgtgggattaatattgcaggagctattagaatgggtaaagaattaggaccaggaaaaacaattgttactattctttgtgacagaagtgataaatacgcta

SEQ ID NO: 242108 - DNA, 664 bp, Unknown
  Bacterial polypeptide expressing nucleotide sequence isolated from the Sargasso Sea
atgataaatactaaaaataattttatcgactcaattggtaatactcctttaattaagttaagagctgcatcagagattactggatgtaatatttatggaaaagctgaatatcttaatccaggcggatctgtaaaagatagagctgctttagctcttgtaaaagatgcacaagaaaaaaaattgatttctgaaggagggataattgttgaaggaacagcaggtaacacaggaattggattatgtcttttaggaaactcacttggatacaaaactattattgtaatgaatgacaatcaaactcaagaaaaaaaagacgctttaagaaatatcggagcagaattaagattagtcgcccctaaaccttataaagatgaaggtaattatgtaaaagttgctcaaagactcgctgaagaattgaaaaacacaaataataaaggtgtcgtctgggctaatcaatttgataatattgctaatgctaaaggtcactatcaaacaacaggtcctgaaatttgggaacaaactgaaggtaaagtcgatggttttgtttgttcttctggaacaggaggaactatttcaggagttagtaatgctcttaaagagaaaaataaagatattaaaatttatttatctgatccaaaaggttcggctctttatattatataaa

SEQ ID NO: 242109 - DNA, 913 bp, Unknown
  Bacterial polypeptide expressing nucleotide sequence isolated from the Sargasso Sea
actgagtcgcttttatcaaataaaggataaccgagtgtctgactttccgactattgaagcctgtattgggcaaactccgctggtgcgtttgcagcggcttgattgtggtagctcaacggtattgttaaagctggaggggaataaccccgcgggctcggtaaaggatcgcgcggcgctgaatatgattattcaggcggagcttcgccaagagattgcccccggtgataccctgattgaagctaccagtggcaatacgggtatcgccttagccatggctgcggcgattaaaggctacaagatgatcctgatcatgccgtcgaattcgacccaggagcgtaaggatgccatgcaggcctatggcgccgagttgctgctggtggacaatatggaagccgcgcgcgatttggccttagatcttcaggcacaaggcaagggtaaggtgctggatcagttcaataatcaagataatgccaacgcccattttcagacgactggccccgaaatttggcaacagagccaaggtaagctcactcactttgtctccagcatgggtaccacaggcactattatgggggtgtctaaatacttaaagagtcgtaatcccgatatcactattgtcgggctacaacccgccgatggcagttcgattccggggatccgccgctggccgcaggaatatctaccgggtattttcgatgctgcccgtgtcgatgccgtgatggacattgaggagcaagatgccaaatctatggcgagaaccttggcccgtgaagaaggtatttgtgctggcgtgagttccggcggcgctgtgtttgcggcgctcgagattgcgaggctgaatccgggttccgttgtagttgcaattgtgtgcgataggggcgaccgttatctatcatctgggttattttcttaa

SEQ ID NO: 242110 - DNA, 1003 bp, Unknown
  Bacterial polypeptide expressing nucleotide sequence isolated from the Sargasso Sea
aatgaaaaattatagtgatagttttattcagtcgattggaaataccccacttataaaacttaaatctgcttcagagattactggatgcaacatttatggaaaagctgaatacttaaaccctggtggatcagtaaaagatagagcagctcttgctttaataaaagatgcagaagaaaaaaaattaatttcaaaaggaggaacaatagttgaaggaacagcaggtaatactggaattggtttgtgcttaataggaaattctcttggttataaaactgtaatagtaatgaatgataaccaaacccaagaaaaaaaagatactttaagaaatattggtgcagatttaaggttggtgccaccaaagccttataaagatgatggtaattacgttaagtttgctggaagattagctgaagaacttaaaagttcaaataatcacggggtagtttgggctaatcaatttgataacactgctaatgccaagggccactacgaaacaactggacctgaaatttggaatcaaacagatggaaaaatagatggttttgtttgttcttcaggaactgggggtactattagcggaactagtagttatctaaaagaaaaaaataaagatattaaaatttatttatcagaccctacgggatctgctctttataattatataaaaaatggagaactaaagtctgagggtggttcaataacagagggtattggttcaagtagagttactgctaactttgcagaagctaaaatagatggtgcattttcaataagtgatcatgagtctttacctataatttatagcttaattcaaaatgaaggattaagtttaggaacaagttgtggagtaaatattgctggagctataagattgggaaaagaacttgggccaggaaaaacaattgttacaattctttgtgataaatctgataaatacaactcaaaactgtttaataaagattttttaaaagaaaaaggtctcccctttcccgattggatttaa

SEQ ID NO: 242111 - DNA, 1003 bp, Unknown
  Bacterial polypeptide expressing nucleotide sequence isolated from the Sargasso Sea
aatggttaatatcaaagataattttttacagtcaattggtaatacccctttaataaaattaaaagcagcctcagagataactggatgtaatatttatggaaaagcagaatatttaaacccagggggatctgtaaaagacagagcggctttggcacttataaaagatgctgaagaaaaaaaattaatttcaaaaggtggaatgattgttgaaggaacagcaggtaatactggtataggtttatgtcttctaggaaattctttaggttataaaacaacaattgtaatgaacgataatcaaacacaagaaaaaaaagatactttaataaacatcggtgcagatttaaggttagtaccaccaaaaccttacagtgatgatggaaattatgtaaaagttgcaggtagacttgcagaagaattaaaaaattcaaataattacggagtagtctgggcaaaccaatttgacaatactgcaaatgctaagggtcattatgaaacaactggacctgaaatatgggatcaaacagaaggaaaggtagacggatttgtttgtgcatcaggtacgggtggaacaattggagggataagtagttttttgaaagaaaaaaacaaagatattaaaatttacttgtcagatccagcaggttctgccttatacaatttcattgaaaatggtgaattaaaatccgaaggtggttcaataactgaaggtattggctccagtagagtaacagcaaattttgctgaagcaaaaatagatggagcattttcaattgatgaccacgagtctttacctttgctttataacttaataaaagaagagggactaagcttaggcactagttgtggtgtaaatattgctggagcaattagacttggtaaattaattggtccaggaaaaactattgtaacaattctctgcgacaaatcagataaatacaactcaaagatgtttaataaaaaatttttactagaaaaaggtctccctactcccagttggatctaa

SEQ ID NO: 242112 - DNA, 532 bp, Unknown
  Bacterial polypeptide expressing nucleotide sequence isolated from the Sargasso Sea
aatgaatgatttacaaaatgattttatttcaggaattggaaatactcctttaataaaattaagagctgcatcagaaattactggttgcaatatttatggtaaagcagaatttttaaatcctggtggttctgttaaagacagggcagcacttgcattgattaaagatgcacaagataaaaaattaatcacaaaaggtggaacaatcgttgaaggtacagctggtaatacaggaattggtttgggttttataggaaattccttgggatataaaacaatcatagttatgaatgataatcaaactcaagaaaaaaaagatattttaagaaatcttggagctgaattaaaactagttccagctaaaccttattcggatgaaaataactttgttaaagttgctgcaagattagctgatgagcttagaccttcaaataacaatggagtaatttgggctaaccaatttgataatacagcaaatgcaaagggtcactatgaaggaaccggtaaagaaatatgggatcaaactaacggaaaa

SEQ ID NO: 242113 - DNA, 1003 bp, Unknown
  Bacterial polypeptide expressing nucleotide sequence isolated from the Sargasso Sea
atgaaaactttacaaaataattttgtcgaagcaataggaaacactccattattcaaattaaaagccgcatcagaaattactggttgtaatatttatggaaaagcagagtaccttaatccgggaggctctgttaaagatagagcagctctagcattaataagagatgctgaagaaaaaaaactaatttcaaaaggtggaacaattgttgaaggaactgctggtaataccggaattgggttatgtctattaggaaattctattggttataaaactattatcgtaatgaatgataatcaaacacaagaaaaaaaagatttattaagaaatattggagctgatttgaggttggttccaccaaaaccttataaagatgaaaataactttgttaaatatgcaggaagattggctgatgaattgaagagtagcaacaattacggtgtagtttgggctaatcaatttgataatactgctaattctaaaggtcattatgaaacaacagggccagaaatatgggaacaaactgacggcaaaattgatggttttgtatgttcatcaggtactggtggcacaattgcaggagtaagtagttttttaaaagaaaagaataaagatattaaaatatatttatcggatccaactggctcatctctatatagttatattgaaaatggtgaattaaagagtgagggtggctcaataactgaaggtattggatctagtagagttactgcaaattttgcaaaagcaaatattgatggagcattttcaataagtgaccatgagtcattacccgttctattcgatttaattgaaaaagaaggtttaagtttaggaactagttgtggagttaacattgctggagcaataaggttgggtaaacttttaggtccaggtaaaacaattgttacgattctttgtgataaatctgataaatacaactctaagatgtttaataaatcttttttaaaagaaaaaggtcttccctatcctcattggatataat

SEQ ID NO: 242114 - DNA, 925 bp, Unknown
  Bacterial polypeptide expressing nucleotide sequence isolated from the Sargasso Sea
ctgggttgtaatatttatggtaaagctgaatttttaaatccaggaggatctgtaaaagacagagcagcacttgctcttataaaagacgctgaagaaaaaaaattaatatctaaaggcggaataattgtggaaggtactgcaggaaatactgggattggattatgtttattaggaaattcactaggttacaaaactattattgtaatgaacgataatcaaactcaagaaaaaaaagatacattaagaaatattggtgcagatttgaaattggttccaccaaaaccttataaagatgaaaataactttgttaaaattgctgctagaatggctgaggagctaaaaagttcaaataatcatggagttgtctgggcaaaccaatttgataataccgcaaactctaaaggtcactactatacaacgggtcctgagatatgggagcaaacggaaggaaaagttgatggatttgtatgttcttctggaactggaggaacaattggtggagtaagtagttttttaaaagaaaaaaataaagatataaaaatttatctatcagatccaaagggatcctctctttacaatcacattgaaaacggcgagttaaaagctgaaggtggatcaataactgagggtattggatccagcagagtaactgctaattttgcagaagcaaaaatagatggagccttttcaattgaagataaagaatctttgccaatactatatgatttaatcaaaaatgaaggtttaagtcttggaacaagttgtggagtaaatattgcaggtgcaattagattgggtaaaaaactaggcccaggaaaaactattgtcactattctttgcgacaaatcagacagatacaactcaaagatgtttaataaaccttttttaattgaaaaaggtttaccttatcccgactggatataat

SEQ ID NO: 242115 - DNA, 415 bp, Unknown
  Bacterial polypeptide expressing nucleotide sequence isolated from the Sargasso Sea
tatggcttacaaaacgattgaagacacgatcggcaatacgccgctcgtgcaactcgtccggctgactgacgacgagattcgcagccgcaacaacgtgatccttgcaaagctcgagggcaacaaccccgcggggtcggtgaaggaccgtccggcgctgtcaatgatcaagaaggcggaagcgcgtgggcgcatcaaaccgggcgacacgctgatcgaatcgaccagcggcaacaccggcatcgcattggccatggcggcggcaatccgcggctacaagatggtgctgatcatgccggaagatctgtcggtggagcgccgtcagagcatggctgcttatggcgcgcagatcgtcctgacgccggtcacgggcggcatggagtacgcacgcgatctggccgaacagatgcagcgcgaa

SEQ ID NO: 242116 - DNA, 440 bp, Unknown
  Bacterial polypeptide expressing nucleotide sequence isolated from the Sargasso Sea
catgagcaaaatttttgaggacaacagccagaccataggtcacaccccgctggttcgtctcaaccgtgttaccaagggtcgcgtgctggccaagattgagagccgtaacccgagcttcagcgtcaagtgccgtatcggcgccaacctgatctgggatgccgagaaacgcggcgtcctgaccaagggcaaggagatcatcgaacccaccagcggcaacacgggtattgctctggccttcgtggccgccgcccgtggctatcccatcaccctgaccatgccggccaccatgagcctggagcgccgcaagctgctcaaagcactcggcgccaacctggtgctgaccgaagggccgctcggcatgaagggcgccattgccaaggccaacgagatcctcgagtccgagccgggcaaatacgtgctgctgcaacagtttgaaaacc

SEQ ID NO: 242117 - DNA, 576 bp, Unknown
  Bacterial polypeptide expressing nucleotide sequence isolated from the Sargasso Sea
aatgaataatacacaaaccgatttcatttcaggaataggaaacactcctctaatcaaattaagagctgcttctgaaattactggatgtaatatttatggaaaagcagaatttttaaatccaggtggatcagtcaaagatagagccgctcttgctttaatcaaagatgcacaagataaaaaattaattgctaaaggtggtactgttgttgaaggaactgcaggcaacactgggattggtttaggtcttttaggaaattctttaggttataaaacaatcattgtaatgaatgacaatcaaactcaggaaaaaaaagatttattaagaaatcttggagctgaattaaaattagttccacccaaaccttataaagacgacaataactttgttaaagtagcagctagacttgctgatgaattaagaccaacaaataataatggagttatttgggcaaatcagtttgataatacagctaatgccaaaggtcattatgaaggtacaggccaagaaatttgggagcaaactggtggtaaagttgatggctttgtatgctcttcaggtactggaggaatcatttc

SEQ ID NO: 242118 - DNA, 1003 bp, Unknown
  Bacterial polypeptide expressing nucleotide sequence isolated from the Sargasso Sea
aatgaaaaatgctcaaaacaattttatcgagggcattggaaatactccactaattaaacttaaagctgcatcagaaataacaggatgtaatatttatggaaaagctgaatatttaaaccctggtggttctgtaaaagatagagcggctctagcattaattaaagatgcagaagaaaaaaaactgatttcaaaaggtggaacaattgttgaaggtacagcgggtaatactggaattggattatgtcttataggtaattcaatcggttataaaacaatcattgttatgaatgataaccaaacccaagaaaaaaaagatatgctaagaaatattggagcagatttaaggttagtgccaccaaaaccttataaagatgatggtaattatgtaaaagttgcaggaaaacttgctgaggaattaaaaagtacaaataaccatggtgtagtttgggctaaccaatttgataatactgctaacgctaagggtcattatgaatctactggacctgaaatttgggaacaaactgatagaaaagttgatgctttcgtttgttcgtcgggaacaggcggaacaatagcgggtgttagtagttatttaaaagaaaagaataaaaatattaaaatttatttatctgatccagctggttcttctctttataactatatacaaaatggtgaactgaaaagcgaaggtggttcaattaccgaaggaattgggtcaagtagaataacagcaaattttgccgaagctaaaatagatggagcattctcaataagtgatcatgaatctttacctgtaatttttgatttaatacaaaatgaaggattgagtttaggaactagttgtggagtaaatattgctggtgcaataaaacttggaaaagaattaggtccaggaaaaactatagttacaattctttgtgataaatctgataaatacaactcaaagctgtttaataaaaaatttttaaaagaaaaaggtctaccttatcctaattggatataa

SEQ ID NO: 242119 - DNA, 982 bp, Unknown
  Bacterial polypeptide expressing nucleotide sequence isolated from the Sargasso Sea
ttttatttcaggtataggaaatactccattaattaaactaagagctgcttcagaaattactggatgcaatatttatggaaaagctgagtttttaaatccaggtggatcagttaaggatagagcagcacttgcattaatcaaagatgctcaagaaaaaaaattaattgctagaggtggaacagttgttgaaggaacagctggtaacactggaattggtttaggtcttttaggaaattctttaggttataaaacgatcattgtaatgaatgataatcaaacccaagagaaaaaagatctacttagaaatcttggagctgaattaagattagtgccacctaaaccttacaaagatgataacaattttgttaaagtggcagctagacttgcagatgaattaagacctacaaataataacggtgtaatttgggctaatcagtttgataataccgcaaatgccaaaggtcactatgaaggtactggccaagaaatttgggatcaaactgaaggtaaagtagatggttttatttgttcttcaggaacaggaggaactatttcaggtgttagtaatgctcttaaagaaaagaacaaagatattaaaatttatttatctgacccaaaaggttctgctctttataattatataaagaatggtgaactaaaatctgaaggtgggtcaattactgaaggaattgggtcaagtagagtaacggctaactttggtgaagctaaaattgatgatgcttattcaatagatgatcatgaagcattacctatactgtatgatttaattcaaaatgaaggcttaagcttgggtactagttgtggaataaatatagcaggagcaataagaatgggtaaagaattggggcccggtaaaactatcgtaaccattctttgtgatagaagcgataaatacgcaactaaaatgttcaataaaaaattcttagaagaaaaaggtctaccagtacctaattggttttag

SEQ ID NO: 242120 - DNA, 820 bp, Unknown
  Bacterial polypeptide expressing nucleotide sequence isolated from the Sargasso Sea
atgaataacacacaaaacgattttatttcaggaataggaaatactcccctaatcaaactaagagctgcttcagaaattactggatgcaatatttatggaaaagcagaatttttaaatcctggtggatcagttaaggatagagcggcacttgctttaattaaagacgctcaagaaaaaaaattaatagcaaaaggtggaactgttgttgaaggaacagctggtaacactggaattggtttaggacttttgggaaattctttaggttataaaacaatcattgtaatgaatgataaccaaactcaagaaaaaaaagatttacttagaaatcttggagccgaattaagattagtgccacctaaaccttataaagatgataacaattttgttaaagtagcagcgagacttgcagatgaattaagaccaacaaacaataacggtgtgatttgggccaaccagtttgataacacggcaaatgccaaaggtcattacgaaggaacgggacaagaaatttgggaacaaactgaaggtaaggttgatggctttatatgttcttctggaactggaggaactatttcaggtgtaagtaatgctcttaaagaaaagagcaaagatataaaaatttacctatctgatccaaaaggttcagctctttataattacattaaaaatggtgaacttaagtcagaaggtggatcaattactgaaggaattggttcaagtagagtaacagctaactttggtgaggctaagattgatgatgcctattcaattgatgatcatgaagcattgcctatactttatgatttaattcaaaaatgag

SEQ ID NO: 242121 - DNA, 854 bp, Unknown
  Bacterial polypeptide expressing nucleotide sequence isolated from the Sargasso Sea
aatgacacaaattaaaaataactttcttgagtcgattggaaatactcctttaattaaattaaaagcagcttctgaaatcacaggatgtcatatttttggtaaagcggaatatcttaatccaggtggatcagttaaagatagagctgctcttgctttaattaaagatgcacaggaaaaaaaattaatttcagaggggggaattgtagttgaaggcactgctggtaatactggaattggtttatgtcttttaggaaattctttaggttataaaacaattattgtaatgaatgataatcaaacacaagaaaaaaaagatactttaaaaaatattggtgcagatcttaggttggtaccacccaaaccatatagagatgatggcaattatgtaaaagttgcaggtcgtcttgctgaagaattaaaaagtacaaataacaatggtgtagtttgggcaaatcaatttgataacactgctaatgcaaaaggtcactacgaaaccacaggaccagaaatctgggaacaaactgatggtaaggttgatggttttgtttgtgcttctggaacaggtggaactataggtggtgttagtaaatttttaaaagaaaaaaataaagatgttaaaatttatttatctgatccaacaggttctgctctttataattatattacgaatggtgaattaaaagctgaaggaggatcaattactgagggaattggttcaagtcgagtaactaaaaattttgctgaggcaaaaattgatggagcttattcaattagtgatgaggagtccttaccaatactttatgatttaattcaaaatgagggtttaagtttaggaaccagttgtggtgtaaata

SEQ ID NO: 242122 - DNA, 1003 bp, Unknown
  Bacterial polypeptide expressing nucleotide sequence isolated from the Sargasso Sea
aatgaaaaattatagtgacaattttattcaatctataggcaacactccacttataaaacttagagcagcttcagaaataacaggatgcaatatttacggtaaagctgaatatttaaatcctggaggttctgtaaaagatagagctgctctagctttaataaaagatgctcagaaaaaaaaattaatttctaaaggtggtacagtggtagaaggaaccgcaggaaatactggaataggattgtgtttattgggcaattctctaggttataaaactataattgtaatgaatgaaaaccaaacccaagaaaaaaaagatacattaataaatataggtgcagatttaagattggttccagtcaaaccatataaagatgacggaaattacgtaaaagttgctggaagattggctgacgaattaaaaagttctaacaattacggagtagtttgggctaatcaatttgataataccgctaatgcaaaaggccactatgaaacaactggtccagaaatttgggatcaaacagatggaaaagtggatggttttatttgttcttccggaactggaggaactattggcggtgtgagcagttatttaaaagaaaaaaataaaaatataaaaatttatttatctgatccagcgggttcggctctttataattatataaagaatggagagttaaaatctgaaggtggatcaatcaccgagggtattggctcaagcagagtaacagctaattttgcagaagcaaaaattgatggagctttttcaattagcgatcaagagtctttgcctatactttatgatttaattcaaaatgaaggtttaagtcttggcactagttgtggagttaatattgcaggagcaataagattaggaaaagaactcggcccaggaaaaactattgttactattctttgtgataaatcagacaaatacaactcaaagatgtttaataaaaaatttttacaagataaaggtctcccttatccaaattggatataa

SEQ ID NO: 242123 - DNA, 958 bp, Unknown
  Bacterial polypeptide expressing nucleotide sequence isolated from the Sargasso Sea
catgatatataatgacattcttgaaacaatcggatctactcccgtcgtaaaattaaattctattggcaaagaccttgaatgcaatctttacgcaaaaatagaaatggttaatcctggaggatctgtaaaagacagaactgcctttagaatgattgatcatgctgaaaaagaaggtcgtattaagccaggagatacactaattgaagcaacatctggtaatactggaattggacttgctttagcagcagcagttagaggatataaattgattatttgtatgcctgaaaaaatgagtatggaaaaagaactgactatcaatgccttaggtgcaaaaatagtgcgcacccctactgaagcagctcatgatgatccaaaaagtaattttggagttgcaaaaaaattaaatgaagagatttcaaacagtcacatattagatcagtggaataattgttgtaatcctgatgcacattactttgatactgctcaagaaattttaaatgatttcggaacagatttacatatggtagttatgggtgttggtactggtggaactgctactggggttggaaaaagattaaaagaagaaattgaagatataaaaattattggagctgatccttatggctcaattcttggcggcgaagatgaatataaaggacagccgtataaagttgaaggaattggttatgattttatacctaaaacttgtgaccataattatatagatgattttgtcaaagtaaatgacaaagaagcattcaatactgcaagagctcttatacgcgaagaaggactattaattggaggttcatgtggctctgctatgtttgcagccttaaaagcagcaaaatcgctcaaaaatggtcaaaattgcctagtaatactacctgatagtatcagaaattatatgagaaagtttctttcagacgattggatgaaagaaaatgaccttatttaa

SEQ ID NO: 242124 - DNA, 1003 bp, Unknown
  Bacterial polypeptide expressing nucleotide sequence isolated from the Sargasso Sea
aatgtcacaaattaaaaataactttattgagtcagttggtaatacacctttaataaaattaaaagcagcctctgaaataactggatgtaatatttatggtaaagcagagtacttaaatccaggtggatcagtcaaagacagggctgctctagcactaataaaagatgcacaagaaaagaaactaatttcaaaaggtggaattgttgttgaaggtactgcgggtaatactgggattggtttatgtcttttaggaaattctttaggttataagacaattattgtaatgaatgataaccaaacccaagaaaaaaaagatactttaaaaaatattggtgcagatcttagactagtaccacccaaaccatataaagatgatggtaattatgtaaaagttgcaggtcgtcttgctgaagaattaaaaagtacaaataataatggtgtagtttgggcaaatcaatttgataacactgctaatgcaaaaggtcattatgaaacaacaggaccagaaatttgggatcaaacagatggaaaggtagatggctttgtctgtgcatcaggaactggaggcaccattggtggtgttagtaaatttttaaaagaaaaaaataaagatataaaaatttatttatcagatccatcaggctctgcactctataatcacattatgaatggagaacttaaagctgagggtggatcaataactgagggcattggttcaagcagaataactaaaaactttgctgaagctaaaattgatggtgctttttcaatcagtgatcaagaatctttacctgtactttatgatttaatacaaaatgagggattgagtttaggaactagttgtggagtaaacattgcaggtgcaattagattaggaaaagagctgggtccaggaaaaacaattgtaacaattctctgtgatagatcagataaatacaactcaaagatgtttaataaatcttttttaaaggaaaaaaaccttcccattcctagctggttataa

SEQ ID NO: 242125 - DNA, 895 bp, Unknown
  Bacterial polypeptide expressing nucleotide sequence isolated from the Sargasso Sea
atggcttttgccacgctggaagagttgatcggcaatacccccctgctggcgctgcgtcgcatcaatccccaccccggtgtcaccctgctggtcaagctggagggcaacaacccggccggctcggtcaaggacaggccggcgctgaacctcatcaagtgtgcggaggcgagcggtcacttagcgccaggggcgcggctcatcgaggccacctccggcaacaccggcatcgcgctggccatggtggcggcggcgcgaggctaccggatgcggctcatcatgccaaataccatgagccaggagcggcgcgatgccatgcaggcctacggtgccgagctggtgctggtggagggcggcatggaggccgcgcgagatctcgccctggcgatgcaggcacggggcgaggggctggtgctcgaccagttcaacaatccggccaacccggatgcccattacctctccaccggccccgagatctggcgtcagagcgagggggcggtcactcacttcgtctcggccatgggcaccacgggcaccatcatgggggtctcccgctacctcaaggagcagaacccggcggtgcaggtgatcggcctgcaaccggccgaggggagccagatcccggggatccgccgctggcctgcggcctatctgccggccattttcgagccagcccgggtggatcgggtgctggacgtgacccagcaggaggcactcgccatgatgcgccggctggcgcgggaggaggggatctgctgcggggtcagctcggggggcgccgtggccggcgccttgcgggtggcggcagagatcaagcagggggtggtggtggccattatctgcgatcggggggatcgctacctctccaccggggtgttcagcgacgagcaggcgtaag

SEQ ID NO: 242126 - DNA, 553 bp, Unknown
  Bacterial polypeptide expressing nucleotide sequence isolated from the Sargasso Sea
tatgacaattaagagcgggtttgtagattgcataggaaacacacctttaatccgtttaaataaagcatcagaggaaacaggttgcaatattttaggaaaggcggaatttctgaatccaggaggatcggtaaaagatcgagcagctttaggtataattacggaggctgaaaaaaagggcgtcttgaagccaggaggcacaattgtagaaggtacagcaggaaacaccggaattggtcttagtttattagcgcaagttcttggctacaaatcagttattgtaatgccggaaacgcagagccaagagaaaaaggatatgcttcgtttgtgtggtgctgatttaaagttggtgccggccgttccctataaagatccgaataattatgttaaatattctgaacgtttggcaaaagaactctcaaattccaatgagaaaagtgttatatgggcagatcagttcgataatgtggcaaacgccatggcgcattatcagacaaccggccccgagatttgggagcagactgagaagagcatcgacggggtcatttgcgcagtc

SEQ ID NO: 242127 - DNA, 988 bp, Unknown
  Bacterial polypeptide expressing nucleotide sequence isolated from the Sargasso Sea
atgaaaactttacaaaataattttgtcgaagcaataggaaatacacctttatttaaattaaaagctgcatcagaaattactggttgtaatatttatggaaaagcagagtaccttaatccaggtggttcagttaaagatagagcagctctagctttaataagagatgctgaagaaaaaaaactaatttcaaaaggtggaacaattgttgaaggaactgctggtaatactggaattggattatgtctattaggaaattctattggttataaaactattattgtaatgaacgataatcaaacacaagaaaaaaaagatttattaagaaatattggagctgatttaaggttggttccaccaaaaccatataaagatgaaaataactttgttaaatatgcaggaagattggctgatgaattgaagagtagtaacaatcacggtgtagtttgggctaatcaatttgacaatactgctaattctaaaggtcattacgaaacaaccggaccagaaatatgggaacagactgacggcaaaattgatggttttgtatgttcatctggtactggtggtacaattgcaggggttagtagctttttaaaagaaaagaataaagatattaaaatatatttatcggatccaacaggttcctctctttatagttacattgaaaatggtgaattaaagagtgaaggtggttcaataactgaaggtattggatctagtagggttactgcaaattttgcaaaagcaaaaattgatggagcattttcaataagtgatcatgagtctttgcctgttttatttgatttaattgaaaaagaaggcttaagtttaggtacaagttgtggagtaaacatagctggagcaataagattgggtaaacttttaggaccaggtaaaacgattgtaacaatactttgtgataaatctgataaatacaactctaagatgtttaataaatcttttttaaaagaaaaaggttcttccctac

SEQ ID NO: 242128 - DNA, 901 bp, Unknown
  Bacterial polypeptide expressing nucleotide sequence isolated from the Sargasso Sea
agcagagtaccttaatccaggtggctctgtaaaagatagagcagctttagctctgataagagatgctgaagaaaaaaaactaatttcaaaaggtggaacaattgttgagggaactgctggtaatactgggattgggttatgtcttttaggaaattctattggttataaaactattatcgtaatgaacgataatcaaacacaagaaaaaaaagatctattaagaaatattggagctgatttaaggttggttccaccaaaaccttataaagatgaaaataactttgttaaatacgcaggaagattggctgatgaattgaaaagtagtaacaatcacggtgtagtttgggctaatcaatttgacaatacagccaattctaaaggtcattatgaaacaactgggccagaaatatgggaacagactgacggcaaaatagatggttttgtatgttcatctggtactggtggtacaattgcaggagtaagtagttttttaaaagaaaagaataaagatattaaaatatatttatcagatccaacaggttcctctctttataattacattgaaaatggtgaattaaaaagtgaaggtggctcaattacagagggtattggatctagtagagttactgcgaactttgcaaaagcaaacatagatggcgcattttcaataagtgaccatgagtcattgcccgttttatttgatttaattgaaaaagaaggtttaagtttagggactagttgtggtgtaaatattgctggagcaataagattgggtaaacttttaggtccaggtaaaacgattgtaacaatactttgtgataaatctgacaaatacaactctaagatgtttaataaatcttttttaaaagaaaaaggtcttccctttcctcactggatataa

SEQ ID NO: 242129 - DNA, 832 bp, Unknown
  Bacterial polypeptide expressing nucleotide sequence isolated from the Sargasso Sea
gccaacctcatctgggatgccgagaaacgcggcgtgctgaccaagggcaaggagatcattgagcccaccagcggcaacacgggcattgccctggcattcgtggctgcggcccgcggctatcccatcaccctgaccatgccggccaccatgagcctggagcgccgcaaactgctcaaggccctgggtgccaacctggtgctgaccgaaggccccctcggcatgaagggcgccatcgccaaggccaacgagatcctcgaatccgaaccgggcaagtacgtgctgctgcaacagtttgaaaacccggccaacccggaaatccacgagcagaccactggccccgagatctgggacgccaccgatggcgaggtggatgtgttcgtggcgggcgtcggtaccggcggcaccatcaccggggtctcccgctacatcaagaagaccaagggcaaggccatcgtctccgtggcggtcgagcccagcgaatcccccgtcatcagccagaaactggcgggtgaagagataaagcccggtccccacaagatccagggcatcggcgccggcttcatcccgggcaacctggatttgagcctgctggaccgcgtcgagcaggtgagcagtgacgaagccatcgagatggcccgccgcctgatggaagaggaagggatcctggccggtatcagctccggcgctgccgtggtcgctgccaaccgtctggccgagcagccggagttcgaagggaaaacgattgtcgtcatcctgccgagcgccgccgagcgttacctctccagcgccctcttcgccggtgtgttcagcgagcaggaattgcagcagtagt

SEQ ID NO: 242130 - DNA, 634 bp, Unknown
  Bacterial polypeptide expressing nucleotide sequence isolated from the Sargasso Sea
atggcaaaaatttatgaggacaacagttttgctattggaaacactccattagtaaaattaaaatcagttactaaaaacgcgaaagctacagtacttgcaaaaattgaaggtagaaaccccgcttatagtgtcaaatgtaggattggcgcgaacatgatctgggatgcagagaaaagtgggaagcttacaaaagacaaaactattgttgagccaacttctggaaatacaggaattgctctagcttttactgcttcagcaagaggttataaactgatccttacaatgccagaatccatgtcaattgaaagaagaagggttatggcagtgttgggtgctgaaattgttttaacagaggcatctaaaggtatgcctggagcaatagctaaggctaaagaaattgcagaaagtaatccttctcaatatttcatgccaggtcaatttgataatccagcaaaccctgaaattcatttcaaaactactggaccagaaatctgggatgattgcgatggtgaaattgatgttttagttgcaggggttggaactggcggcacaattacaggagtttcaagatacattaagcaagagaagggcaaaaatattacttctgtagctgtagaaccctcacatagtcctg

SEQ ID NO: 242131 - DNA, 706 bp, Unknown
  Bacterial polypeptide expressing nucleotide sequence isolated from the Sargasso Sea
catgccagaatccatgtcaattgaaagaagaagggttatggcagtgttgggtgctgaaattgtcttaaccgaagcatctaaaggtatgcctggagcaatagctaaggctaaagaaattgcagaaagtaatccttctcaatatttcatgccaggtcaatttgataatccagcaaaccctgaaattcatttcaaaactactggaccagaaatctgggatgattgcgatggtgaaattgatgtcctagttgcaggggttggaactggcggcacaattacaggagtttcaagatacattaagcaagaaaagggcaaaaatattacttctgtagctgtagaaccctcacatagtcctgttattacacagacaatgaatggagaagaggttaaatccggaccacataaaattcaaggaattggtgcaggatttattcctaagaaccttgacttgtcaattgttgataaggttgaacaggtaacaaatgacgagtcgatcgagatggctcttagattagcaaaagaagaaggtctattagtcggtatatcttgtggagctgctgctgctgctgctgttagattagctgaacaagatgaatatgcggggaaaactattgtagttgttctacctgatttagcagagagatatttatcatcaattatgtttactgaagttccaagcggaatcattcaagaaccagtcaaagcctaa

SEQ ID NO: 242132 - DNA, 666 bp, Unknown
  Bacterial polypeptide expressing nucleotide sequence isolated from the Sargasso Sea
tatgaaaaatgctcaaaacaattttattgaagggatcggtaacacaccattagtaaaattaagagctgcatcagaaattactggatgcaatatatatggtaaagcagaatacttaaatccaggtggatctgtaaaagatagagccgctttagcattaattaaagatgctcaagaaaaaaaattaatttcaaaaggtggaacgattgttgagggtactgcaggcaacactggtatcggtctttgcttaataggaaattctattgggtataaaacaattattgtgatgaatgataatcaaactcaggaaaaaaaagatatgttaaagaacatgggagctgatttaaggttagtcccacctaaaccatataaagatgatggcaattatgtaaaagtagcgggtagacttgcagatgaattaaagagtagcaacaatcacggggtggtttgggctaatcaatttgataataccgctaattctaaaggacattatgagacgacaggaccagaaatatggatgcaaactgatggaaaagttgatggttttgtttgttcatcaggcacaggtggaactattgctggtgtaagtagttttttgaaagaaaaaaacaaaaatattgagatttatttatcagatcctgctggatcatccctttataattacattga

SEQ ID NO: 242133 - DNA, 874 bp, Unknown
  Bacterial polypeptide expressing nucleotide sequence isolated from the Sargasso Sea
gagaaaagcgatctaaaaattgatccgcccggtcgcgggcgcatttataataatgttctagagactttcggtaatacaccgctcgtccggctcggacgcctcgctgaacagcatgaagcaaaggctgacgtattggtgaagctggagttcttcaatccactagctagtgtgaaagaccgtatcggcgtctcgatgatcgaagcgctcgagcgggatggcaagattggccctggctccacaattgtcgagccaacatcgggcaatacaggaatcgcgcttgccttcgcctgtgccgcaaaaggctatcgatgcatccttacaatgccggacagcttttcaatcgagcggcgaaagatgctcgtctatcttggagccgagctgcacctcacaccccgtgagaagggtatcaatgcagccatcgagaaagctgaagaattagtcgccgatatcgacggagccatcatgccgatgcaattcagcaacgagtcaaacccatctgtgcactattacaccaccggacccgagatttggcgcgatacgaatggaaccgtagatatgttcatctccggcgttggtacaggcggaacagcaaccggcacaggaacctatctgaaggagcaaaagccgtctgttcaattggttgtggtcgagcccgaactcagccaggtgatctcgggcggcgaacattctccacatatgatacaaggcattggcgcaggtttcattccagagaacctgtacacggacctaatcgatgaagttatcgctattggcaacgacacagccattgaaacagcacgtcacctttcactgcttgaaggtattcccggtggtatttcggccggtgccatgacggccgccgccctgcagatcg

SEQ ID NO: 242134 - DNA, 504 bp, Unknown
  Bacterial polypeptide expressing nucleotide sequence isolated from the Sargasso Sea
tcctgccaaacccagatgttcatcgaaaaacaaccgctgaagaaatttgggccgacacagatggtcaagttgacatcatcgtgtgtggggttggtaccggtggaaccattactggctgtggcgaagcgctcaaggcaaagaaccctgcaatacgtgttgttgctgtcgaacctctcaatagtcccgtcatctcacaggaattggccggtgaggtgattaagccaggaaaacatatgatccagggcattggtgctgggttcataccagacattctcaacctcgacattattgacgaggtcgttaaagtcgacgacgaagatgccatggaaactgctcgacaacttgcaaaacgcgagggtttgatgtgtggcatcagttgtggtgccgctgcatggggcgcccttgaggttgcaaaacgacctgagaatgctgggaaaatggttgtggttgtcctgcctgaccttggcgaacgatatctctcgacacggctctttccggagtaaa

SEQ ID NO: 242135 - DNA, 763 bp, Unknown
  Bacterial polypeptide expressing nucleotide sequence isolated from the Sargasso Sea
aatggcaaaaatttatgaggacaacagttttgctattggaaacactccattagtaaaattaaagtcagttactaaaaacgcgaaagctacagtacttgcaaaaattgagggtagaaaccctgcttatagtgtcaaatgcaggattggcgccaacatgatctgggatgccgagaaaagtgggaagcttacaaaagacaaaactattgttgagcctacttctggaaatacaggaattgctctagcttttactgcttcagcaagaggttataaactcatccttacaatgccagaatccatgtcaattgaaagaagaagggttatggcagtgttgggtgctgaaattgtcttaaccgaagcatctaaaggtatgcctggagcaatagctaaggctaaagaaattgcagaaagtaatccttctcaatatttcatgccaggtcaatttgataatccagcaaaccctgaaattcatttcaaaactactggaccagaaatctgggatgattgcgatggtgaaattgatgtcctagttgcaggggttggaactggcggcacaattacaggagtttcaagatacattaagcaagaaaagggcaaaaatattacttctgtagctgtagaaccctcacatagtcctgttattacacagacaatgaatggagaagaggttaaatccggaccacataaaattcaaggaattggtgcaggatttattcctaagaaccttgacttgtcaattgttgataaggttgaacaggtaacaaag

SEQ ID NO: 242136 - DNA, 843 bp, Unknown
  Bacterial polypeptide expressing nucleotide sequence isolated from the Sargasso Sea
catggaaatagcaaataatataacttctctagttggaaataccccattagttaaattaaatcgaatcaagaagtattttgattgttatccagaaataatagccaaactagaaagtttcaatccatcagcttctgttaaggatcggatcgcctattcaatgttatgtaaagctgaagaagaaggattgataacaccagataaaacaacgttaattgaagcaactagtggcaatactggaatagcattagctatggttgctgcagcaaaaggctataaattgatattaactatgccggatacgatgagtattgaaagaagggcaatgttgagagcatatggagctgaattacaactaacaccaggggaagagggaatgaaaggagctttagatttagctaatgagttgtcttcaaccattgcaaatagctatcaatttaatcagtttgaaaactttgctaatccagatattcatgaaagaacaacagccaaagaaatatggtctcaatctaataacaatttagatggactagttacaggagttggcacaggaggaacaattactggttgtgcgcgttttttgaaaaaagttaatccaaattgcaaaatttatgccgtagagcccaaaaaaagtgctgtgatttcaggagaaaaagcaggatctcattcgattcaaggaattggtgcgggtttcataccaaaagttcttaatactaaattaattgatgaaattataaaaatagatgacgatgaagcattttattatgggcgttcattagctagattggaaagccttttatctggcatcagcagcggtgcagctttagcagcagctataaaaatcgg

SEQ ID NO: 242137 - DNA, 615 bp, Unknown
  Bacterial polypeptide expressing nucleotide sequence isolated from the Sargasso Sea
catgaaaatatataacgacttaactgatcttattggcaatacgcctttagttcgtattaataaacttaacaaaacaaaagtagatataattgcaaaacttgaatattataaccctgccaattccgtaaaggatcgcattggtgtaaatatgatagagtcagctgaaaaacaaggtaaaattgaccctagaaagacaacattaattgaacctacttcaggaaatactggcattgcgcttgcttttgctggggcaattaaaggttatcgattaattcttactatgccagagtcaatgtctattgagcgtcgaaaattacttaaggcatatggtgccgaattagttttaacagaggctaagaaaggaatgaaaggggctgtagaaaaggctgaagagatacaaagggcaactccaaattctattatattacagcaattttccaataaggccaatgttgagattcatcaaagaactacagccgaggaaatctggagagatactgatggtaaagttgatattttagtttctggtgttggcactggcggtacaattactggcgttgcatctgtattacaagaacgaaatccgaattttaaagcgatagctgttgaaccaga

SEQ ID NO: 242138 - DNA, 775 bp, Unknown
  Bacterial polypeptide expressing nucleotide sequence isolated from the Sargasso Sea
atggaaatagcaaatgatataacttctctagttggaaataccccattagttaaattaaatcgaatcagaaagtattttgattgttatccagaaataatagccaaactagaaagtttcaatccatcagcgtctgttaaagatcggatcgcttattcaatgttatgtaaagctgaagaagaaggattgataacaccagataaaacaacgttaattgaagcaactagtggaaatactggcatcgcattagcaatggttgccgcagcaaaaggctataaattgatattaactatgccggatacgatgagtattgagagaagggcaatgttgagagcatatggagctgaattacagctaacacctgggaaagacggtatgaaaggagctttagatttagctaatgagttgtcttcaaccattgcaaatagctatcaatttaatcagtttgaaaactttgctaatccagatattcatgaaagaacgacggctcaagaaatatggtcccaatccaataacaatttagatggactagttacaggagtaggcacaggaggaacaattactggttgtgcacgttttttgaaaaaagttaatccaaattgcaaaatttatgccgtagagcccaaaaaaagtgctgtgatttccggagaaaaagcaggatctcattcgattcaaggaattggcgcgggttttgtaccaaaagttcttaatactaaattaattgatgaaattataaaaatagatgacgatgaagcattttattatgggcgtttattag

SEQ ID NO: 242139 - DNA, 829 bp, Unknown
  Bacterial polypeptide expressing nucleotide sequence isolated from the Sargasso Sea
acgaaaaaaatgaagaattttcagaataattttatttcaggaattggaaatactcctttagttaaattaaaagcagcgtcagaaataactggttgtaatatttacggcaaagcagaatatttgaaccctggtggatcagtaaaagatagagcagccttagctttaattaaggatgcagaagaaaaaaaacttatatctaaaggtggaacaatagttgaagggacagctggaaatactggaataggattatgtctaattggaaattcagtaggatataaaacggtcatagttatgaatgacaaccaaacacaagaaaaaaaagatatgcttaaaaatattggtgcagatttaagattagtacaacctaaaccatataaagacgatggtaattacgtaaaagttgcgggaagacttgctgatgaattaaaaagttcaaacaatcatggggtggtttgggctaaccagtttgataatactgcaaattcaaagggtcactatgagtctactggacctgaaatttgggatcaaactgaaggtaaggttgatgcttttgtttgtgcatcaggtactggtggaacaatagccggagtaagtagttatttaaaagaaaaaagtaaagatgtaaaaatttatttatcagaccctgctggatcatctttatataattatatagaaaatggagaacttaaaggcgatggtaattcaattacagaaggaattggttcaagcagagtaacagcaaattttgcagaagctaaaattgatggagcattttctataagtgatcaagagtcattaccaattttgtacgatctaatccaaaatgaag

SEQ ID NO: 242140 - DNA, 532 bp, Unknown
  Bacterial polypeptide expressing nucleotide sequence isolated from the Sargasso Sea
gatgaagaattttcaggataactttattactggaattggaaatactccattagttaaattacgtgcagcctcagaattaacaggttgtaacatttatggtaaagcagaatatttaaatccaggtggatctgttaaagacagagctgcgttagcactaataagagatgctgaagataaaaaattaattgaaaaaggtggaacaattgttgagggaactgctggaaacacaggaattggtttgtgtcttataggtaattctgttggttataaaacggttatagttatgaacgataatcaaactcaagaaaaaaaagatatgcttaaaaatatgggcgcggaacttaaactagttcctccaaaaccttataaagatgacggtaactatgtaaaagttgctgggagacttgctgaggaattaaaaagtacaaataatcaaggagtggtgtgggcaaatcagtttgataacacagctaatcttaagggtcactatccatcaactggccctgaaatctgggatcaaacagacgggtaa

SEQ ID NO: 242141 - DNA, 904 bp, Unknown
  Bacterial polypeptide expressing nucleotide sequence isolated from the Sargasso Sea
atggaaatagcaaatgatataacttctctagttggaaataccccattagttaaattaaatcgcatcagaaagtattttgattgttatccagaaataatagccaaactagaaagtttcaatccatcagcgtccgttaaggatcgaatagcttattcaatgttatgtaaagctgaagaagaaggattgataacaccagatgaaacaacgttaattgaagcaactagtggaaatactggcatcgcattagcaatggttgccgcggcaaaaggctataaattgatattaactatgccggatacgatgagtattgagagaagggcaatgttgagagcatatggagctgaattacagctaacacctgggaaagacggaatgaaaggagctttagatttagctaatgagttgtcttcaaccattgcaaatagctatcaatttaatcagtttgaaaattttgctaatccagatattcatgaaagaacgacggctcaagaaatatggtcccaatccaataacaatttagatggactagttacaggagttggcacaggaggaacaattactggttgtgcacgttttttgaaaaaagttaatccaaattgcaaaatttatgccgtagagcccaaaaaaagtgctgtgatttccggagaaaaagcaggatctcattcgattcaaggaattggcgcgggttttgtacctaaagttcttaatactaaattaattgatgaaattataaaaatagatgacgatgaagcattttattatgggcgtttattagctagattggaaggccttttatctggcatcagcagcggtgcagctttagcagcaactataaaaatcggcaaaagaaaagaactaatgaataaaagattgatagttattcttcccaagttttggcgaaaga

SEQ ID NO: 242142 - DNA, 715 bp, Unknown
  Bacterial polypeptide expressing nucleotide sequence isolated from the Sargasso Sea
gctgcagcaaaaggctataaattgatattaactatgtcggatacgatgagtatcgagagaagggctatgttgagagcatatggagctgaattacaactaacaccgggaaaagacggaatgaaaggagctttagatttagctaatgagttgtcttcaaccattacaaatagctatcaatttaatcagtttgaaaactttgctaatccagatattcatgaaaggacgacggctcaagaaatatggtcccaatccaataacaatttagatggactagttacaggagtaggcacaggaggaacaattactggttgtgcacgttttttgaaaaaagttaatccaaattgcaaaatttatgccgtagagcccaaaaaaagcgctgtaatttcaggagaaaaagcaggatctcattcgattcaaggaattggcgcgggtttcgtaccaaaagttcttaatactaaattaattgatgaaattataaaaatagatgacgatgaagcattttattatgggcgtttattagctaaattggaaggccttttatctggcatcagcagcggtgcagctttagcagcaactataaaaatcggcaaaagaaaagaactaatgaacaaaagattgatagttattcttccaagttttggagaaagatatttatcaacagcaatgtttgaatctaatacttcaattcaagccagaaaagatggttatctttaat

SEQ ID NO: 242143 - DNA, 724 bp, Unknown
  Bacterial polypeptide expressing nucleotide sequence isolated from the Sargasso Sea
ctcgcctttgtttgcgcatcaagaaattataagttgactttgaccatgccggactcaatgagcctggagcggaggaaggttctaaaagcttttggggcaactttggttttgacagaaggacctaaaggtatgaagggagctatccaaaaagctgaagagatagtcgcgactaatcccaataagtattttatgccccaacagtttgaaaacccatctaatccagccatacatgagtcaactacgggtccagaaatatggaaagctacagaaggtaaaatagatgcgttggtagctggtgtgggaactggcggcaccataaccggggtaagtcgctatattaaaaatgtcgaggggaagaatatctgttcggtcgcggtcgagcctgcttctagtccagtaatcagtcagaccctgagcggacagcaaccgacaccagcaccccacaagattcagggcatcggagccggttttatacccggggctttagatctatctgtcgtcgacagagttgagcccgtaaccaatgaacaagctgtcaacatggcacgacgtttggcgacagaggaaggcattctgtgtgggatatcttgcggagcggcggttgttgctgctgcaagactcgtcgaagaagatgattttaaagggaaaacgatcgttgttgttcttccggatgggggagagcgatatttatctagcgttctatttgaagacatcgaggtatagc

SEQ ID NO: 242144 - DNA, 808 bp, Unknown
  Bacterial polypeptide expressing nucleotide sequence isolated from the Sargasso Sea
atgtaaagctgaagaagaaggattgatatcaccaaataaaacaaccttgattgaagcaacaagtggaaatactggcatcgcattggcaatggttgctgcagcaaaaggctataaattgatattaactatgccggatactatgagtattgaaagaagggcaatgttgagagcatatggagctgaattacagctaacacctggtaaagaaggaatgaaaggagctttagatttagcaaaagagttatcaacaagcattgctgatagctatcaatttaatcaatttgaaaacttcgctaaccctgatattcatgaaagaacaacagctcaagaaatatgggctcaatctaataataatttagatgggctcgttacaggagtaggaacaggaggaacaattactggttgcgcacgttttttaaaaaaagttaatccaagttgcaaaatttatgcagtagagcccaaaaaaagtgctgtcatttctggcgaaacggctggttcccattcaattcaaggaataggagcaggctttgtaccaaaagtactaaatactaaattaattgatgaaattatcaaaatagatgacgatgaagcattttattatggacgtttattagctcgattagaaggtcttttatctggcatcagcagtggtgcagctttagcagcaactataaaaatcggcgaaaggaaggaactaattaataaaagactgatagttattcttcctagttttggtgaaagatatttatcaacagcaatgtttgaatcgaatacctcaattcaagctagaaaagatggttatctttaa

SEQ ID NO: 242145 - DNA, 757 bp, Unknown
  Bacterial polypeptide expressing nucleotide sequence isolated from the Sargasso Sea
atggaaatagcaaatgatataacttctctagttggaaatacaccattagttaaattaaatcgaatcagaaagtattttgattgttatccagaaatcatagccaaactagaaagtttcaatccatcagcgtccgttaaggatcggatcgcttattcaatgttatgtaaagctgaagaagaaggattgataacaccagataacacaaccttaattgaagcaactagtggaaatactggcatcgcattagcaatggttgccgcagcaaaaggctataaattgatattaaccatgccggatacgatgagtattgaaagaagggcaatgttgagagcatatggagcagaattacagctaacgcctgggaaagaaggaatgaaaggagctttagatttagctaatgagttgtcttcaaccattacaaatagctatcaatttaatcagtttgaaaactttgctaatccagatattcatgaaagaacaacggcccaagaaatatggtcacaatccaataacaatttagatgggctagtaacaggagtaggcacaggaggaacaattactggttgtgcaagttttttgaaaaaagttaatccaaattgcaaaatttatgccgtagaacccaaaaaaagtgctgtgatttccggagaaaaagcaggatctcattcgattcaagggattggagcgggtttcgtaccgaaagtacttaatactaaattaattgatgaaattataaaaatagatgacgatgaagcatttt

SEQ ID NO: 242146 - DNA, 769 bp, Unknown
  Bacterial polypeptide expressing nucleotide sequence isolated from the Sargasso Sea
ggaaatacaggaattgctctagcttttactgcttcagcaagaggttataaactcatccttacaatgccagaatccatgtcaattgaaagaagaagggttatggcagtgttgggggctgaaattgtgttaacagaagcatctaaaggtatgcctggagcaatagctaaggctaaagaaattgcagaaagtaatccatctcaatatttcatgccaggtcaatttgataatccagcaaatcctgaaattcatttcaaaactactggaccagaaatctgggacgattgtgatggtgaaattgatgtcctagttgcaggggttggaactggtggcacaattacaggagtttcaagatacattaagcaagaaaagggtaagaatatcacttctgtagctgtagaaccatcacatagtcctgttattacacagacaattaatggagaagaggttaaatccggaccacataaaattcaaggaattggagcaggatttattcctaagaacctagacttatcaattgttgataaagttgaacaagtaacaaatgacgaatcaatcgagatggctcttagattagctaaagaggaaggtctattagtaggaatatcttgtggagctgctgctgctgctgctgttagattagctgaacaagatgaatatgctgggaagacaattgtagttgttctgcctgatttagcagagaggtatttatcatcaattatgtttactgaagttccaagcggaatcattcaagaaccagtcaaagcctaaa

SEQ ID NO: 242147 - DNA, 268 bp, Unknown
  Bacterial polypeptide expressing nucleotide sequence isolated from the Sargasso Sea
catgcaagtatttgaagataattcactggccattggtaatacgccactcgtgaagctaaagcgcgtgactggcggtaacgtatacgcaaaaattgaatcccgtaacccaagtttctcggttaagtgccgtattggcgctaacatgatttgggatgccgaaaaacgcggtgttctcaccgaaggcaaagaaattgttgagccaaccagtggtaacaccggtattgcgctggcattcgtcgccgcggcccgtggttataaatcaccctga

SEQ ID NO: 242148 - DNA, 760 bp, Unknown
  Bacterial polypeptide expressing nucleotide sequence isolated from the Sargasso Sea
catgatctgggatgcagagaaaagtgggaagcttacaaaagacaaaactattgttgagccaacttctggaaatacaggtattgctctcgcttttactgcttcagcaagaggttataaactcatccttacaatgccagaatccatgtcgattgaaagaagaagagttatggcagtattgggtgctgaaattgttttaacagaggcatctaaaggtatgcctggggcaatagctaaggctaaagaaattgcagaaagtaatccttctcaatattttatgccaggtcaatttgataatccagcaaaccctgaaattcatttcaaaactactggaccagaaatttgggatgattgcgatggtgaaattgatgttttagttgcaggggtcggaactggcggaacgattacaggagtttcaagatacatcaagcaagaaaagggcaagaatattacctctgtagctgtagaaccatcacatagtcctgttattacacaaacaatgaatggagaagaggttaaatcaggaccacataaaattcaaggaattggagcaggatttattcctaaaaaccttgacttatccattgttgacaaggttgaacaggtaacaaatgatgagtcaattgagatggctcttagattagctaaagaggaaggtttattagtaggtatatcttgtggagctgctgctgctgctgctgttagattagctgaacaagatgaatatgcgggtaaaacaattgtagtcgttttacctgattta

SEQ ID NO: 242149 - DNA, 768 bp, Unknown
  Bacterial polypeptide expressing nucleotide sequence isolated from the Sargasso Sea
catgaaagttgacaacattctgcaaaccatcggcaaaacgccccacgtgcgcatcaaccgcctgtttggccctggcgccaacgtgtgggtgaagtcggagcgcagcaaccctggcggctccatcaaggaccgcattgcgctggcgatggtggaagacgcggaaaagtccggcgcgctgaagccgggtggcaccatcatcgagcccaccagcggcaacaccggcatcggcctggcgctggtagcggccgtcaagggctataggctgatcctcgtgatgcccgacagcatgagtattgagcgccgccgcctgatgctggcctatggcgcgcagtttgacctgaccccgcgcgagaagggcatgaagggcgcgattgcccgcgcgcaggagctgcaggcgcagacacccggctcgtggattccgcagcagttcgaaaaccccgccaacatcgacatccatgtacgcaccacggcacaagaaatcctggccgacttccctgacgggctggacgccgtcattaccggcgtgggcacaggcggccacctgacaggcacggcccgcgtgctcaaggcgaaatttccgcagctcaaggtgtttgcggtggagcccacggcctcgcccgtcatctcgggcggcgcgccctcgccccaccccatccagggcattggcgcgggcttcatccccaagaatctggacaccagtgtgctcgacggcgtgatccaggtcgatgccgagcccgcccgcgaatacgcccgccgctctgcgcgcga

SEQ ID NO: 242150 - DNA, 712 bp, Unknown
  Bacterial polypeptide expressing nucleotide sequence isolated from the Sargasso Sea
atggaaatagcaaatgatataacttctctagttggaaataccccattagttaaattaaatcgaatcagaaagtattttgattgttatccggaaataatagccaaactagaaagtttcaatccatcagcttccgttaaggatcggatcgcttattcaatgttatgtaaagctgaagaagaaggattgattacaccagataaaacaaccttaattgaagcaactagtgggaatactggcatcgcattagcaatggttgccgcagcaaaaggctataaattgatattaactatgccggatacgatgagtattgagagaagggcaatgttgagagcatatggagctgaattacagctaacaccggggaaagagggaatgaaaggagctttagatttagctaatgagttgtcttcaaccattgcaaatagctatcaatttaatcagtttgaaaactttgctaatccagatattcatgagagaacaacggcccaagaaatatggtcccaatccaataacaatttagatggactagtcacaggagtaggcacaggaggaacaattactggttgtgcacgttttttgaaaaaagttaatccaaattgcaaaatatatgctgtagagcccaaaaaaagtgctgtgatttctggagaaaaagcaggatctcattctattcaaggaattggagcgggcttcgtaccgaaagtacttaatacta

SEQ ID NO: 242151 - DNA, 723 bp, Unknown
  Bacterial polypeptide expressing nucleotide sequence isolated from the Sargasso Sea
aatgaagaattttcagaataattttatttcagggattggaaatacgcctttagttaaactaagagctgcatcagaagtaacgggttgtaacatttatggtaaagcagaatatttaaatccaggtggctcagtaaaagacagggcagccctagcattaataagaaatgctgaagaaaataaattaatttctaaaggtggtacaatagttgaaggaactgctggtaacacaggaattggtctttgtctgataggaaattctattggatataaaactgttattgtaatgaacgacaatcaaacacaagaaaaaaaggatatgttaaaaaatatgggtgcagaattaagattagtaccaccaaaaccttataaagatgatggcaattatgtgaaagtagcaggaagacttgcaaatgaattaaaaagttcaaataatcatggagtagtttgggctaatcaatttgataatacagctaaccttaaaggacattatgaaagtactggacctgaaatttgggaacagactgacggaaagattgatggatttgtgtgtgcatcaggaactggtggtactattgcaggtgttagctcatatttaaaagaaaaaaataaaagtgttaaaatttatttatcagatccagcggggtcttcacttttacattatattgagaacggtgaattaaagggtgaaggaggatcaataactgaaggtatagggtctagcag

SEQ ID NO: 242152 - DNA, 866 bp, Unknown
  Bacterial polypeptide expressing nucleotide sequence isolated from the Sargasso Sea
tttattgatggtattggaaataccccattagttaaacttaaagctgcttcagaaatcactaaatgcaatatttatggtaaagctgaatatttaaatccaggaggttctgtcaaagatcgagcggctttagcattaataaaagatgctgaagaaaaaaatctaataaataaaggtggtatagttgttgaaggaacagcaggaaatactggtattggattatgtttaataggaaattctaaaggatataaaacagtaattgtaatgaatgacaatcaaactcaggaaaaaaaagatacattaaaaaatataggagcagatttaagactggtgcctccaaaaccctataaagatgaaggtaattatgtaaaaattgcaggaagactagctgaagaattaaaaaaaacaaataataacggagtagtttgggctaaccaatttgataatacggcgaatgcaaaaggtcattatgaaactacaggtcctgaaatttggaaccaaactgaaggaaagattgatggatttgtttgttcttctggaactgggggtacaattagtggagttagtagatatttaaaagaaaaaaataaaaatattaaaatttatttatctgacccaacaggttctgctctttataattatattcaaaacggtgaattaaaaagtgaaggtggatcaattacagaaggtataggctctagcagaatcactgctaactttggtgaagcaaaaattgatggagctttttcaataagtgatcaagagtctttgcctatcctttatgatttaattttaaatgaaggtttaagtttaggaacaagttgtggcgttaatattgcgggagccattagattgggtaaagaaattgg

SEQ ID NO: 242153 - DNA, 613 bp, Unknown
  Bacterial polypeptide expressing nucleotide sequence isolated from the Sargasso Sea
ccctatggcgctgagctggagctcactccaggcagtgagggaatgaagggcgccatcagccgggcgcgggagctggcagaggatctccccaatgcgtttttgctgcagcagttctccaatgctgcaaatccagcgatccacgccgccaccaccgcagaagagctctgggacgacaccgatggccgcattgatgccctggtggcaggcgtgggcaccggaggcacgatttcaggctgcgccgagctgatcaagcagcgcaagcccgagtttcaagcctttgcggtcgaacccagcagcagtcctgtgctcagcggtggcgtggcggggccccaccggatccaaggcatcggcgcggggttcatccccgagaactatcacgcctcgctcgtggatgaggtgcttttggtggatgacgccgaggccatggccatggggcgccgtctcgcccgcgaggaaggcctgctcagcggggtcagcagtggtgctgccgtggcggcggcgctgcgtcttggacagcggccggaatggagcggcaaattgattgtggtggtgctggccagcttcggggagcgctatttgagcacgccgatgttcaccgatctgcagtcctgat

SEQ ID NO: 242154 - DNA, 878 bp, Unknown
  Bacterial polypeptide expressing nucleotide sequence isolated from the Sargasso Sea
aataatagccaaactagaaagtttcaatccatcggcgtccgttaaagataggatcgcttattcaatgttatgtaaagccgaaaaagaaggattgataacaccagataaaacaacgttaattgaagcaactagtgggaatactggcatcgcattagcaatggttgctgcagcaaaaggctataaattgatattaaccatgccagatacgatgagtattgagagaagggcaatgttaagagcctatggagcagaattacagctaacaccggggaaagacggaatgaaaggagctttagacttagctaatgagttgtcttcaaccattgcaaatagctatcaatttaatcagtttgaaaactttgctaatccagatattcatgaaagaacaacagcccaagaaatatggtcccaatccaataataatttagatggactagttacaggagtaggcacaggaggaacaattactggttgtgcacgttttttgaaaaaagttaatccaaattgcaaaatttatgccgtagagccaaaaaagagtgctgtgatttccggagaaaaagcaggatctcattcaattcaaggcattggagcgggtttcgtaccgaaagtacttaatactaaattaattgatgaaattataaaaatagatgacgatgaagcattttattatggacgtttattagctcgattggaaggtcttttatctggcatcagcagcggtgcagctttagcagcaactataaaaatcggcaaaagaaaagaactaataaataaaagattgattgttattcttccaagttttggagaaagatatttatcaactgcaatgtttgaatctaatacctcaattgaagccagaaaagatggttatctttaat

SEQ ID NO: 242155 - DNA, 721 bp, Unknown
  Bacterial polypeptide expressing nucleotide sequence isolated from the Sargasso Sea
catggttgccgcggcaaaaggctataaattgatactaactatgcctgataccatgagtattgaaagaagggcaatgttaagagcatatggagcagagttacaactaacaccaggaaaagaaggaatgaaaggagctttagatttagctaatgagttgtcctcaagcatttccaatagctatcaatttaatcagtttgaaaacttcgctaaccccgatatacatgaaagaacaacagctcaagaaatatggacccaatccaataacaatttagatggactagttacaggagtaggcacaggaggaacaattactggttgcgcacgttttttgaaaaaagttaatccaaattgcaaaatatatgctgtggagcccaaaaaaagtgcagtcatttccggagaaaaagcaggatctcattctattcaaggaataggagcaggttttgtcccgaaagtcctgaatactaaattaattgatgaaattatcaaaatagatgacgatgaagcgttttattatgggcgtttattagctcgattagagggccttttatcgggtattagtagcggtgcggctttagcagcaactataaaactcggtgcaagagaagaactaatgaataaaaggttgatagtaatccttccaagttttggtgaaagatatttatcaacagcaatgtttgaatcgaatacctctattaaagccagaaaagatggttatctttaa

SEQ ID NO: 242156 - DNA, 537 bp, Unknown
  Bacterial polypeptide expressing nucleotide sequence isolated from the Sargasso Sea
catgtcccgcatttacgacgacaacagccaggccatcggcaacaccccgctggtcaagctgaacaacgtcaccaaaaactgcaaggccactgtgctggccaaggttgaggggcgcaaccccgcctacagcgtcaagtgccggatcggcgccaacatgatctgggacgcagaaaagagcggcaagctcaccaagggcaaggtgattgttgagcccacctccggcaacaccggcatcgctttggccttcaccgccgcagcccggggttacaagctgatcctgacgatgcccgagtcgatgtcgatcgagcggcgtcgggtcatggccgtgctcggagctgagctgatcctcaccgaggccgccaaaggcatgcccggtgcgatcgccaaggccaaggaaatcgctgagagcgatccggccaagtacttcatgcctggccagttcgacaatcccgccaaccccgaaatccactttcagaacaccggtcctgaaatctggaacgactgcgatggcgccattgacgtgctcgtggcgggcgt

SEQ ID NO: 242157 - DNA, 631 bp, Unknown
  Bacterial polypeptide expressing nucleotide sequence isolated from the Sargasso Sea
atgtcaagaatctatgaagacaatagttttgctattggtcatacaccattggtcaaacttaattcgatcacaaaaaacgcaaaagcaacagtacttgcaaagatagaaggccgtaaccctgcctacagtgttaaatgtagaataggagcaaatatgatctgggatgctgaaaagaaaggtttactcaataaagataaagtaattattgaaccaacatctgggaatactggaatagcacttgcttatacagccgctgctagaggttacaaattaatcctcacgatgcctgaatccatgtcagttgaacgtaggaggatgatggctgttcttggtgctgaattaatacttactgaagcagcaaaaggaatgcctggtgccattgcaaaagcgaaggaaatagcagatagcgaccctaaaaaatacttcatgccaggacaatttgataacccagccaatccagaaatacatttcaaaactacaggtcctgaaatttgggatgatacggacggtcaaattgatgttttagtctctggtgtcggaacaggtggaacaattacaggtgtttctcgtttcataaagcaagaaaaaaatcattcattactatctgttgccgtagagcccactcatagcc

SEQ ID NO: 242158 - DNA, 552 bp, Unknown
  Bacterial polypeptide expressing nucleotide sequence isolated from the Sargasso Sea
tatggaaatagcaaatgatatcacttctctagttggcaatacaccattagtgaaattaaatcgaatcagaaagtactttaatagttatccagaaattatagccaagcttgaaagttttaatccatcagcgtcagttaaagatcgaattgcttattcaatgttacgtaaagctgaagaagaaggattgattacaccagataaaacaacattaattgaagcgactagtggaaatactggaatagcattagcaatggttgctgcagcgaaaggttacaaattgatattaactatgccagatacgatgagtattgagagaagggcaatgttgagagcttatggtgcacaattacagctaactccagggaaagaagggatgaaaggagctttagatttagctaatgagttgtcttcaagtattactaatagctatcaatttaatcaatttgaaaacttcgctaatccagatattcatgaaagaacaacaggaccagaaatatgggctcaatctaacaataatttagatggactagttacaggagtagggacaggagg

SEQ ID NO: 242159 - DNA, 515 bp, Unknown
  Bacterial polypeptide expressing nucleotide sequence isolated from the Sargasso Sea
catgtcccgcatttacgacgacaacagcctcgccatcggcaacaccccgctggtgaagctcaacagcgtcaccaagaactgcaaagccaccgtgctggccaaggtggaaggacgcaatcccgcctacagcgtcaagtgccggatcggcgccaacatgatctgggatgccgagaaaagcggcaagctcaccaaggacaaggtgatcgttgagcccacctccggcaacaccggcatcgccctggctttcacggctgcagcccgtggctacaagctgatcctcacgatgcccgaatcgatgtcgatcgagcgtcgccggatgatggccgttctcggcgctgaactgatcctcaccgaggccgccaagggcatgcccggcgccatcgccaaggccaaggagatcgccgacagcgatccggccaagtatttcatgcctggccagttcgacaatcccgccaaccccgagatccacttcaagaccacgggcccggagatctggaacgactgcgacggcgcca

SEQ ID NO: 242160 - DNA, 651 bp, Unknown
  Bacterial polypeptide expressing nucleotide sequence isolated from the Sargasso Sea
catgtcccgcatttacgacgacaacagcctcgccatcggcaacaccccgctggtgaagctcaacagcgtcaccaagaactgcaaagccaccgtgctggcaaaggtcgaaggtcgcaatcccgcttacagcgtgaagtgccggatcggcgccagcatgatctgggatgccgagaagagcggcaagctcaccaaagacaaggtgattgtcgagcccacctccggcaacaccggcatcgccctcgccttcacagcagcagcccgcggctacaagctgatcctgacgatgcccgagtcgatgtcgatcgagcgtcgccggatgatggccgttctcggcgccgagctgatcctcaccgaggccgccaagggcatgcccggtgccatcgccaaggccaaggagatcgccgacagcgatcccggcaaatacttcatgccaggacagttcgacaatcccgccaaccccgaaatccacttcaagaccaccggtcccgagatctggaacgactgtgacggtgccatcgatgtgctggtcgctggtgtcggcaccggcggcaccatcaccggtgtgtcccgctacatcaagaacgaagccggcaaggcgatcgaatccgtcgccgtaaaacccagccacagcccggtgatcacccagaccat

SEQ ID NO: 242161 - DNA, 830 bp, Unknown
  Bacterial polypeptide expressing nucleotide sequence isolated from the Sargasso Sea
tcgaattgccagcgccatggtgctggcagcggaacaggagggcacgattcagccgggacgaaccgtgctggtggagcccaccagcggtaacaccggtattgccctggcgatggtcgccgccgctcggggctatcggctcatcctcaccatgccggacacgatgagcacggaacggcgttcgatgctgcgcgcctacggcgctgagctgcagctcaccgatggtgcccagggcatggctggagccattgccctggcgaaggagttggtagaggagatccctgaggcctatctgttgcagcaattcgacaacccggcgaaccctgcggtgcacgagcgcaccaccgctgaagagatctggcacgactgtgacggccagctggatgccctggtggccggcgtcggcaccggcggcaccatcaccggttgtgcgcggttgctgaagcagcgccaaccggatttgcaggtggtggcggtggagccggctggtagtgctgtgttgtcaggccaggcgccaggcgcccatcgcattcagggcatcggtgccgggttcgtccctgcggtgctcgatcttgatctgatcgatgcggtcatgaccgtgtccgacgaggaggccatggacgtgggccgtcggctggcccgagaggagggcctgctctgtgggatcagcagtggtgctgccgtggctgcggctctgcggttgggacagcggcccgagctgcagggacggcgcgtggtggtgatgctcgccagctacggcgagcgttatctctccacaccgatgttcagtggcgccgccccgatgcccgcacgtcaggacccgatgctgtgac

SEQ ID NO: 242162 - DNA, 1003 bp, Unknown
  Bacterial polypeptide expressing nucleotide sequence isolated from the Sargasso Sea
atgaagaattttcagaataattttatttcaggaattggaaatactcctttagttaaattaaaagcagcgtcagaaataactggttgtaacatttacggcaaagcagaatatttaaaccccggtggatcagtaaaagatagagcagccttagctttaattaaggatgcagaagaaaaaaaacttatatctaaaggcggaacaatagttgagggaacagctggaaatactggaataggattatgtctaattggaaattcagtaggatataaaactgtcatagttatgaatgacaaccaaacacaagaaaaaaaagatatgcttaagaatattggtgcggatttaagactagtaccacctaaaccatataaagacgatggcaattacgtaaaagttgcgggaagacttgctgatgaattaaaaagttcaaacaatcatggggtggtttgggctaaccagtttgataatactgcaaattcaaaaggacattacgaatctactggacctgaaatttgggatcaaactgaaggtaaggttgatgcttttgtttgtgcatcaggtactggtggaacaatcgccggagtaagtagttatttaaaagaaaaaagtaaagatgtaaaaatttatttatcagaccctgctggatcttctttatacaattatatagaaaatggagaacttaaaggcgatggtaattcaatcacagaaggaattggttcaagtagagtaacagcaaattttgctgaagctaaaattgatggtgcattttcaataagtgatcaagagtcattaccaattttgtacgatctaatccaaaatgaaggtttaagtttaggtacaagctgcggagtaaatatagctggagctataagattgggtaaaaagttaggacctggaaaaactattgtaacaattctttgcgatcgatcagataaatacaactccaagctgtttaataagaaatttcttcaagaaaaaggcttaccatttcctagctggatataag

SEQ ID NO: 242163 - DNA, 970 bp, Unknown
  Bacterial polypeptide expressing nucleotide sequence isolated from the Sargasso Sea
catgagcaaaattttcgaagacaattcatatactattggcaataccccgttagtgcgtttaaaccgcgtaagccaaggtaaagtgctggcaaaggtcgaagcacgtaatccaagtttcagtgtcaaatgccgtatcggtgccaatatgatttgggatgccgagaaaaaaggcctgctcaccaaagatcacgaactgattgagcctacctcaggtaataccgggattgccttagcctatgtggcggctgcccgtggttacaagctgacgttaactatgccaaacactatgagcttagagcgtcgtaaactgcttaaagccttaggtgcaaacctagtgctgaccgaaggcgcaaaaggcatgaaaggtgctatcgataaagcggaagaaatccgtcaatcggcgcctgaaaaatacattatgctgcaacagtttaataacccagcaaaccctgaaatccatgaaaaaaccacaggtccagagatttggaacgataccgatggtgctgtggatgtttttgttgcgggtgtaggtactggcggtaccatcacaggtgtaagccgttacctgaagaaagtcgctggcaaagccattacttctgtcgcggtagaacctgctgattcaccggttattacccaaaccttagcgggattaccagtgcaacctggtccacacaaaattcaaggtattggcgcaggttttatccctggtaacttagatcttgagttaatcgatcgcgttgaaaccgtcaccaacgatgaagccatcgacatggcgcgccgcttaatgcaagaagaaggcattttagtcggtatttcttctggtgctgctgtggttgcggcgaaccgcatcgcggctctgcctgaatttgcggataaaaacattgtggttatcctgccttcggctgccgagcgttacttatcttctgtactgttccaaggtcagtttggcgacgaagagaacattcagtaa

SEQ ID NO: 242164 - DNA, 645 bp, Unknown
  Bacterial polypeptide expressing nucleotide sequence isolated from the Sargasso Sea
gatgcgcgcgcgcgcggtgacgccgcgaacgcggggtggtgtgccgcgacgggaggtggtgagaacgtcgacgcccgcgcgcgcggtgacgaccaaggcgagcgtgaacatcgccgataacgtgacgcaactggtggggaacacgccgatggtgtacctgaataagacgagcgaggggtgcggcgcggagatcgcggcgaaactcgagattatggaaccgtgttgcagtgtgaaggatcgaatcggttggagcatgatccaagcggcggaagaggaggggaagattacgccggggaagacgatgttggtggaaccgacgagcgggaacacgggcatcggcttggcgttcatcgcggcggcgaaggggtacaagctcacgctcacgatgccggcgtcgatgtctttggagagacgcattttgctcaaggcattcggggcgaacttggtgctcacggatccggcgaaggggatgaagggtgcggtgcaaaaggctgaggaaatcgccgccgcgacgaatgattccttcgttttgcaacaatttgagaacccggccaacccgaaggtgcacttcgagacgaccggtccggagatctgggaagacaccgccggtcagattgacatcttcatcgccggcgtcggtaccgg

SEQ ID NO: 242165 - DNA, 970 bp, Unknown
  Bacterial polypeptide expressing nucleotide sequence isolated from the Sargasso Sea
atggccattgcctccgatataaccggcttgatcggaggcacacccctggttcgtctcaaccgcctgccgttgcagtccggctgtggggcagaagtgatcgccaagttggaaagcttcaacccttcggcgtcggtgaaggatcgaatcgccagcgccatggtgctggcggcggagcaggagggcacgattcagccggggcgaacggtgctggtagagcccaccagcggcaacaccggcattgcgctggccatggtcgcggctgcccggggctaccggctcatcctcaccatgccggacacgatgagcacggaacgccgttcgatgctgcgtgcctacggagctgagctgcagctcaccgacggtgctcagggcatggccggagcgattgccctcgccactgagttggtggaggaaatcccggaggcttatctgcttcagcagttcgacaatccggccaatccgtcggtgcatgaatgcaccaccgcggaggagctctggaacgactgcgatggccagctggacgccctggtggctggcgtcggcaccggcggcaccatcacaggctgtgcccgtttgctgaagcagcgcaatcctcagctgcaggtggtggcggtggagccggcgggtagtgctgtgttgtcgggcagtccgccgggtgcgcatcgcattcagggcatcggtgcggggtttgtccctgctgtgctggagcgcgatctgatcgatgaggtgatgaccgtgtcggatgaggaagcgatggatgtgggccgtcgtctggcgcggcaggagggtctgctctgcggcgtcagcagcggtgccgctgttgctgcggcgctgcggcttggtcaacgctccgagtggcaggggcggcgtgtgctggtgatgctggccagttatggcgagcggtatctgtccacgccgatgttcagtggagtcgcgtcctcgccggcacgtcaagacccgatgctgtgac

SEQ ID NO: 242166 - DNA, 970 bp, Unknown
  Bacterial polypeptide expressing nucleotide sequence isolated from the Sargasso Sea
catggaaatagcaaatgatataacttcactggttggcaataccccattagttaaattaaatcgaatcaaaaagtattttgattgttatccagaaataatagccaaactagaaagtttcaatccatcagcgtccgttaaagatcggatcgcttattcaatgttatgtaaagctgaagaagaaggattgataacaccagataaaacaacgttaattgaagcaactagtgggaatactggcatcgcattagcaatggttgctgcagcaaaaggctataaattgatattaactatgccggatacgatgagtatcgagagaagggcaatgttgagagcatatggagctgaattacagctaacaccaggaaaagacggaatgaaaggagctttagatttagctaatgagttgtcttcaaccattacaaatagctatcaatttaatcagtttgaaaactttgctaatccagatattcatgaaagaacgacggctcaagaaatatggtcccaatccaataacaatttagatggactagttacaggagtaggcacaggaggaacaattactggttgtgcacgttttttgaaaaaagttaatccaaattgcaaaatttatgccgtagagcccaaaaaaagtgctgtgatttccggagaaaaagcaggatctcattcgattcaaggaattggagcgggtttcgtaccaaaagttcttaatactaaattaattgatgaaattataaaaatagatgacgatgaagcattttattatgggcgtttattagctagattagaaggccttttatctggcatcagcagcggtgcagctttagcagcaactataaaaatcggcaaaagaaaagaactaatgaataaaagattgatagttattcttccaagttttggcgaaagatatttatcaacagcaatgtttgagtctaatacttcaattcaagccagaaaagatggttatctttaa

SEQ ID NO: 242167 - DNA, 988 bp, Unknown
  Bacterial polypeptide expressing nucleotide sequence isolated from the Sargasso Sea
aatggcaaaaatttatgaggacaacagttttgctattggaaacactccattagtaaaattaaaatcagttactaaaaatgcgaaagctacagtacttgcaaaaattgaaggtagaaaccccgcttatagtgtcaaatgtaggatcggcgcaaacatgatctgggatgccgagaaaagtgggaaacttacaaaagacaaaactattgttgagccaacttctggaaatacaggaattgctctagcttttactgcttcagcaagaggttataaacttatccttacaatgccagaatccatgtcaattgaaagaagaagggttatggcagtgttgggtgctgaaattgttttaacagaggcatctaaaggtatgcctggagcaatagctaaggctaaagaaattgcagaaagtaatccttctcaatatttcatgccaggtcaatttgataatccagcaaatcctgaaattcatttcaaaactactggaccagaaatctgggatgattgcgatggtgaaattgatgtcctagttgcaggggttggaactggcggcacaattacaggagtttcaagatacattaagcaagagaagggcaagaatattacttctgtagctgtagaaccatcacacagtcctgttattacacagacaatgaatggagaagaggttaaatccggaccacataaaatccaaggaattggagcaggatttattcctaagaaccttgacttatcaattgttgataaggtcgaacaagtaacaaatgacgaatcaattgagatggctcttaggttagctaaagaggaaggtctattagtaggaatatcttgtggggctgccgctgctgctgctgttagattagctgaacaagatgaatatgctgggaagacaattgtagttgttctacctgatttagcagagaggtatttatcatcaattatgtttactgaagttccaagcggaatcattcaagaaccagtcaaagcctaa

SEQ ID NO: 242168 - DNA, 523 bp, Unknown
  Bacterial polypeptide expressing nucleotide sequence isolated from the Sargasso Sea
catgcctcaacaattcaaaaatccagctaatccagatgttcatcgaaaaacaactgcggaagaaatttgggctgacacagatggccaggttgacatcatcgtatgcggagtcggtaccggtggcaccattactggctgtggcgaagcgctcaaagcaaaaaaacctgaaatccgtgttgttgctgttgaaccgcttaatagtccagtcatctctcagcaattggctggggaagtgattaagccaggtaaacatatgattcagggcattggtgctggctttatacccgacattctcaatctcgacatcattgacgaagttgtgaaagtcgatgacgaagatgccatggaaactgctcgtcaacttgcaaaacgtgaaggtttgatgtgtggtatcagctgtggtgccgccgcatggggtgctctagaggtagctaaacggcctgagaatgctggaaagatggttgtggttgtcctgcctgacctcggcgaacgatatctctcgacacgccttttcccggagtaa

SEQ ID NO: 242169 - DNA, 973 bp, Unknown
  Bacterial polypeptide expressing nucleotide sequence isolated from the Sargasso Sea
atgtcaaagatctatgaagataactcactctctattggtaacacgcctctggtgcgcttaaagcgtgtcacttcaggtgccaatgtatttgccaaaatcgaatcccgtaacccgagtttttctgtgaaatgtcgtttaggtgcagccttgatttgggatgcagagaaaaaaggtttgttaggccctggtaaagaaattatcgaaccaacttctggtaatactggtattgctttagcttttgttgccgccagccgcggttatgcgttaactctgaccatgccagccactatgagcttagagcgccgtaagctgctgaaagctttgggcgccaatttagtgctgactgaaggcgcaaaaggcatgaaaggtgctatcgaaaaagccaaagaaattctggcgtcagatcctgacaaatacgtgtttttacaacagtttgaaaacccggcaaacccacaaattcactttgacaccacaggccctgagatctggaatgacacagatggcaaggtggacattttcgtggctggtgtaggcacaggaggtactattactggtgttagccgttatataaaacacgagaaaaaacacccgctgattagcgtggcggtagaacctgtagactcgccagtgatcactcaagcgctggctggtcaggaaattaaacctggtccacataaaattcagggcataggcgctggttttattccgggcaatctggatttatccatcattgatgcggtagaaagagtcagtaatgacgatgccattgcaatggcgcaccgtctgatgaaagaggaaggtattctggctggtatttcttctggtgcagccgtagttgccgctaaacgtttagcagagctgccagaaaatgccggtaaaaacattgtggtgattattccaagttcaacagaacgttatttatccagcgcattgtttgcagacttcttcaccgaaagtgaattacaagcttaac

SEQ ID NO: 242170 - DNA, 594 bp, Unknown
  Bacterial polypeptide expressing nucleotide sequence isolated from the Sargasso Sea
aaggggcattagatttagctaatgaattatcttcaagtatttcaaatagttttcagtttaatcagtttgaaaatcttgctaatccagatattcatgaaaggacaacagctagagaaatttgggaacaatcaaatcaaaatgttgatggattagtaactggagttggtaccggaggaaccatcactggatgtgctcgatttttaaaaaaagttaatccaaattgcaaaatatatgcagttgagccagcaaaaagtgctgttatttcaggcgaaaaagcaggctcccactcaatacaagggattggcgcaggcttcattcctaaagtacttaataccgaattaatagatgaaattataaagatagatgatgatgatgcgttttactatgggagattactagctcgtttagagggtcttttatcagggattagtagtggcgctgctctagcagcaacaataaaaattagccaaagggaagaacttattaacaaaagattaattgtgatccttccaagttttggtgagagatatttatccacagcaatgtttgaatcaaattctttaattaaagcaagacaagacggttatttgtaaa

SEQ ID NO: 242171 - DNA, 970 bp, Unknown
  Bacterial polypeptide expressing nucleotide sequence isolated from the Sargasso Sea
atgagcaaaattttcgaagacaattcatatactattggcaacaccccgttagtgcgtttaaaccgcgtaagccaaggtaaagtgctcgcaaaagtcgaagcacgtaatccaagtttcagtgtcaaatgccgtatcggtgccaatatgatttgggatgccgagaaaaaaggcctgctcaccaaagatcatgaactgattgagcctacctcaggtaacaccgggattgccttagcttatgtagccgccgcccgtggttacaagctgacgttaacgatgccaaacactatgagcctagagcgtcgtaagctgcttaaagctttaggcgcaaatcttgtgctgactgaaggcgcaaaaggcatgaaaggtgcgattgataaagcggaagaaatccgtcaatcagcgcctgaaaaatacattatgctgcagcagtttaataaccctgctaacccagaaatccatgaaaaaaccacaggtccagagatttggaacgataccgatggtgctgtggatgtgtttgttgcgggtgttggtactggtggaactatcactggcgtgagccgttacctgaagaaagttgcaggcaaagccattacttctgtcgcggtagaacccgcagattcaccagttatcacccaaaccttagcgggattacccgtacaacctggtccacacaaaattcaaggtattggcgctggttttattccaggtaacttagatcttgagttaatcgatcgcgttgaaaccgtcactaacgatgaagctatcgacatggcccgtcgcttgatgcaagaagaaggcattttagtcggtatttcttcaggcgcagcagtggttgctgctaaccgtatcgctgccctgccagagtttgcggataaaaacattgtggttatcctgccttcggctgccgagcgttacttatcatcagtattgttccaaggccaatttggcgacgaagaaaatattcagtaat

SEQ ID NO: 242172 - DNA, 1003 bp, Unknown
  Bacterial polypeptide expressing nucleotide sequence isolated from the Sargasso Sea
atgaataaacctcaaaataattttatagaaggtattggaaatactcctcttgtaaaactgagagctgcatctgagataactggatgtaatatttatggcaaagcagaatacttaaatcctggtggctcagttaaagatagagcagcacttgctttaattaaggatgctgaggaaaaaaaactaatatcaaaaggtggaacaatagttgaaggaactgctggcaatacaggaattggtttatgcttaatcggaaattctattgggtataaaacaattattgttatgaatgaagatcaaactcaagagaaaaaagatatgctcagaaatatgggtgctgatttaagattagtaccaccgaaaccctataaagatgatggtaatttcgtaaaagtagcagctaaattagcagatgacttaaagagttctaataactatggcgtagtttgggctaaccaatttgataatactgcaaattcaaaaggtcattatgaaacaactggtccagagatctggatgcaaacagatggaaaagttgatggatttgtatgttcatctggaactggaggaactattggtggagtaagtagttttctaaaagaaaaaaataaagacataaaaatatttttagctgatcctgatggctcttctctttttgatcatattgaaaatggtgaattaaaatcttcaggaagctctattacagaaggaataggatcaagtagagtaactgctaattttgcaaaagctaaaattgatggtgcttttaaagtaactgacaaagaggctttaccagttctatatgatttaattcaaaatgaaggattaagtttgggaactagttgtgcaataaatgttacaggagcgattaaattaggtaaaaaattaggaccgggtaaaactattgtcacaatactttgtgatcgatctgataaatacaactctaagctgtttaataaaaagtttttacaagaaaaaggtcttcctgttcctagttggatctaaa

SEQ ID NO: 242173 - DNA, 845 bp, Unknown
  Bacterial polypeptide expressing nucleotide sequence isolated from the Sargasso Sea
agcgtccgttaaggatcgcatcgcttattcaatgttatgtaaagcagaagaagacggattgataaaaccagataaaacaaccttgattgaagctacaagtggaaatacgggtatcgcattagcaatggttgctgcagcaaaaggctataaattgatattgactatgccggatacgatgagtattgagagaagggcaatgttgagagcatatggagctgaattacagttaacacctgggaaagaaggaatgaaaggagctttagatttagctaatgagttgtcttcaaccattgcaaatagctatcaatttaatcaatttgaaaactttgctaatccagatattcatgaaagaacaacggcacaagaaatatggtctcaatccaataagaatttagatggactagttacaggagtaggaacaggaggaacaatcactggttgcgcacgcttcttgaaaaaagttaatcctaattgcaaaatttatgctgtagagcccaaaaaaagtgctgtgatttctggagaaaaagcaggatctcattcgattcaaggaataggagcaggtttcctgccgaaagtactgaatactaaattaattgatgaaattataaaaatagatgacgatgaagcattttattatgggcgtttattagctcgattggaaggccttttatctggcatcagtagcggtgcagctctagcagcaactattaaaatcggtgaaaggaaagaactaattaacaaaagattgatagttattcttccaagttttggtgaaagatatttatcaacagcaatgtttgaatctaatacttcaattcaagccagaaaagatggttatctttaat

SEQ ID NO: 242174 - DNA, 949 bp, Unknown
  Bacterial polypeptide expressing nucleotide sequence isolated from the Sargasso Sea
ttgttatttaaaaataaaaaagtttttgaatctattgaccaaaccataggaaatacaccaatggtaaggctaaaaaacttaaaaaaaaaatttaatttaaacggacaaataattgccaaattagaattcttcaacccgcttgggtcagtgaaagatagaattggtttggcgatgattgatcaagctgagaaggaaaaaaaaataaattctgaaacaacaataattgaacctacctctggcaataccggaatcgcactagcttttgtatgtgccacaagaggctataaactaattctaacaatgccttcaagtatgtctttagaaagaagaaaaatgcttaatttttttggagctaaaattattcttactccaaaagaaatgggaatgtttggtgcaatcaacaaagcaaaagaaattaacaagaatataccaaatagtataattttggatcaattttcaaataaagcaaacccgtctattcattataatacaacagccaaagaaatatgggatggtgttgatggaaaaattaacaatttaatatcaggtgtaggtacaggaggaactatttctggagttggtacttttttaaaggaaaagaataaaaatataaaaattattgctgtagaaccagaggactcagccgttataagtggaagagaggctggttcacattcaattcaaggaataggggctggtttcatcccgaaaaatttagatgtgagtataattgatgaaaccctttcaataagtaacaattctgctttttttttttcacgggaattagctaagtgcgaagggataccaggcggtatatccactggtgcagctattgctgcagcaattgaaattcatgaaagaaaagaaatgcaaaatctttgtagtgtaataattattccttcttttgctgaaagatatttatcaactgaactttttaatgaatcttgat

SEQ ID NO: 242175 - DNA, 988 bp, Unknown
  Bacterial polypeptide expressing nucleotide sequence isolated from the Sargasso Sea
aatggcaaaaatttatgaggacaacagttttgctattggaaacactccattagtaaaattaaaatcagttactaaaaacgcgaaagctacagtacttgcaaaaattgaaggtagaaaccctgcttatagtgtcaaatgtaggatcggcgcaaacatgatctgggatgccgagaaaagtgggaaacttacaaaagacaaaactattgttgagccaacttctggaaatacaggaattgctctagcttttactgcttcagcaagaggttataaactgatccttacaatgccagaatccatgtcaattgaaagaagaagggttatggcagtgttgggtgctgaaattgttttaacagaggcatctaaaggtatgcctggagcaatagctaaggctaaagaaattgcagaaagtaatccttctcaatatttcatgccaggtcaatttgataatccagcaaaccctgaaattcatttcaaaactactggaccagaaatctgggatgattgcgatggtgaaattgatgtcttagttgcaggggttggaactggcggcacaattacaggagtttcaagatacattaagcaagagaagggcaaaaatattacttctgtagctgtagaaccatcacatagtcctgttattacacagacaatgaatggagaagaggttaaatctggaccacataaaattcaaggaattggagcaggatttattcctaagaaccttgacttgtcaattgttgataaggttgaacaagtaacaaatgacgaatcaatcgaaatggctcttagattagcaaaagaagaaggtctattagtcggaatatcttgtggagctgctgctgctgctgctgttaggttagctgaacaagatgaatatgccgggaagactattgtagttgttctacctgatttagcagagagatatttatcttcaattatgttcactgaagttccaagcgggatcattcaagaaccagtcaaagcctaa

SEQ ID NO: 242176 - DNA, 1177 bp, Unknown
  Bacterial polypeptide expressing nucleotide sequence isolated from the Sargasso Sea
tatggctgataagaagaataaacaaggatttgatacaagagctattcacgctgggcaagaacctgatcccactactggtgcaatcatgacaccaatttacacaagttcaacttatgttcaagaaagtcctggggttcacaaggggtatgattattctagaagtattaatcctacccgtaaggcattagaggcttgtgttgcagatctcgaaggtagctcgtatggatatgctttttcatctggaatggcagcttgttcaactgttctagaggttcttaattctggggatcatgttatcgccatggatgatttatatggaggtacttatagattatttgaagatgtaagaaagagatctgctggactcgagtttactttttccgatttaagtgacttttctactgttgagtcatcaattagaaataatacaaaaatgatatgggtggagactcctacaaacccattacttaaaatagttgatttaaagaagatcgctaaatttgcaaaagagaataatttaatctctgtttgcgataataccttttgttctccttacatacaaaacccacttgagcttgggtttgatattgttgttcactcggcgacaaaatatttaaatggtcattctgatttaattggtggaatagttgtttgttctaatcacaaaactgaattggcagatcaaattctttatttgcaaaatgctataggatctatcatgaatccctttgacagttttctgcttctcagaagtctaaaaactctagctgtaagaatggaaagacattgtgaaaatgcaatgcaaatagcatcttttttagattcccatgaagcaattgaaaaggttatatatccaggcttacaaagccatccgcagcatgatttagcgaagaaacaaatgaaacattatggaggcatgctaactttaatactgaaaggcggtcttgattcagcaagattatttcttgaaagaactgaaatattttctttagcagaaagtttaggaggtgttgaaagtctaattgaacatccagcaataatgacacatgcttcaatccctcctgatgttagagaagaaattggaataactgatggtctagttagactatctgtaggaattgagtcactagatgatttgattcaagatcttaaagttgctcttaaaggtctcgtttaa

SEQ ID NO: 242177 - DNA, 1168 bp, Unknown
  Bacterial polypeptide expressing nucleotide sequence isolated from the Sargasso Sea
tatgagtaaaaacgaccaatttcagactagagctatacatgtgggtaatgaaccagataatgagacaggcgcaattgttgctccaatccatcttacatctacttatgaacaggaggaagtaggtaaagataaaggttatgactattctcgcggtggcaaccccacacgaaaacggctagaagagaatcttgcatctctggaaaatggagatcattgtcttgcattttcaagcggtatggcagcaacaacaactcttttccagaccttaagtgcaggtgatcatattattattggacgcaatgtttatggaggaacttatagaatgtcggttgaggtattatctagacatggtctagaatttgaatttgttgataccaggtctcaagaaaatgtagaagctgtgataaaaccgaatacaaaattgatttttatagagacaccaacgaaccctttactagaattgactgatataaagcaaacggcggcgctatgccagcagcataatattaagttagcagtcgacaatacatttatgagtccatatgggcagaggcctttggacctaggtgcagacgtggtgatgcatagtgctacaaaatttataggtggacatagtgatctgatcgcaggtgcattagtaaccaatgatgctaacctagctgaagagcttcattttatacaaaggtctggtggtgcaataccaagtccttttgattgttggatcttactgcggagtacgaagacgatggctttaagggtccaaaaacaatcagacaatgcattggagttggcacaaaggctagatgcttctagctttgtcaatgaggtcatctatcctggtctagagaatcatgttcaacatgaacttgcaaaaaaacaacagagtacacctgatggaaattgcatatttggatcaatgatatctttaaggtgtggttcaattgaaaaaagagacagcttcctatctaatttgagactattttctcttgcagagagcttaggcggtgtggagagcttggtatgcgttccgtatggaatgacacacgcttctgttccgccagatatgaaaatatcaatgggacttaccgaggatcttgttcgcttatcagtgggtattgaacatatagaagatctatatgcagatatagagagagcttttaaagaataa

SEQ ID NO: 242178 - DNA, 1285 bp, Unknown
  Bacterial polypeptide expressing nucleotide sequence isolated from the Sargasso Sea
catggcctatcgcaactaccacaagcgcaagattgcagaccgggaactccatcccgaaacccagatgatgtcgtacggctacgatccgttcctgtcggaaggatcggtgaagccgccggtgttcctcacatcgacgttcgcgttccgcacggccgaggacggcgccgaattcttcgacgtcgtggccggacgcaagccttcacccgaaggcgaaggcgcgggcctcgtctacagccggttcaatcacccgaacctggagatcgtcgaggatcgcctcgcgctgctcgacgattccgaagcggccgtcgtgacgtcgagcggcatgtcggccatcgccgcgatcctgctgaccttcctgcggccgggcgactgcgtcgtccagtcggtgccgctttacggtggcaccgaaacgctgatctcgaagttcctgcccgagtggggcattcgctccgaagtgatcgccgacgggctgtccacccatgcgatccgcgccgcgctcgaagcggccgcgcaaaagggcaacgtgcggatgtgctacatcgagacgccggccaacccgaccaacgcgctgttcgacctcgaagggctgcgcagcgagatcgacgcgttcgaggcacgccacggctatcgcccgctgtcggtctgcgacaacacgctgctcgggccgctgtaccagaagccgtcgcggcagggcatcgacctgagcgtgtactcgctgacgaaatacatcggcgggcatagcgacctcgtcgccggcggcgtcaccggcgatcgcgcgctgatcacgaagatccgctcggtccgcagcacgctcggctcgcagctcgacccgcattcgtcgtggatgatcacgcgctcgatggaaacgctcgtgctgcgcatgcagcaggccgcgcgcagcggcagcgccgtcgctcgctggctcgccgacaatccgcaccggccggtgcgcgtgctgcatcccgagctcatcgacgatccggcttaccaggccgtctatcagcgccaatgcaccgggcccggctcgacgttcgcgttcattctcgacggcggccgcgagcaggcgttcaggttcatcaaccacctgacgctcttcaagtcggcggtcagtctaggcggcacggagtcgctgatctgccatccggcgtcgaccacgcattcgggcgtgccggccgatgcgcgtgcggcggcgggggtatcggaagggttgattcgcgtgtcggtcgggctcgagcatccggacgacctgatcgccgacctgtcgtacgcgctggagcattgctga

SEQ ID NO: 242179 - DNA, 1167 bp, Unknown
  Bacterial polypeptide expressing nucleotide sequence isolated from the Sargasso Sea
gactacaaatagctggagaaaatatcctgttaaacacatcccaaaatatgaggatgataaggaattaaatttagttttaaataaactaaagtcttttccacctttagtatttgcaggagaaacaacacacttgaagaatcagcttgcggaagttgtcgatggtaaagcttttttacttcaaggcggggattgcgcagaaagttttgctgagtttaatccagataacataagagactattttaaagtttttttacaaatgtctcttgttttaacatactcagcatctttaccagttgtaaaattaggaagaattgctggtcaattctcaaaaccaagaagtgcgccaacagaaaaacaaggtgataaagaattaccaagctatcttggagacaatataaacgctatagaatttactgaaaaagcaagaagacctgatccaaaaagattattcaaagcatattcacagtcagcatcaacactaaacttaattagagctttctgtcatggtggttttgctgatttaaaaaaggttcatttatggaatcttggttatattaaaaaaagtcctcaagctaaaaaatttaaagagctagaggataaaatagccgatgccttagcattcatggatgcttgtggtattaatgcagaatttaatagaagattaaaaactgtaaacttttggacttcacatgaagctttattgctcccatttgaagaggccatgactagaatagattcaacttcaggacagtaccatgatacatctgctcactttgtgtggattggagatagaactagacaaattgatggtggccatgttgaattttgtagaggtattgaaaatccaataggaattaaatgtggtccaacttcaaaagcagatgagatagcaaaaatttgtgagcttattaatccagataacgaaaaaggtaaaattaccttaatatctagatttggacatgacaaagttgaaaagtttttaccaaaacttattagaggaattaaaaaagaaggtttaaatgtaatttggtcttgcgaccctatgcatggcaatacattagtgtcttcaacaggttttaaaacaagaccatttaataatgttttaaatgaagttaaaaatgtatttcaagttcatcaaagtgagggatcatatgcaggaggtcttca

SEQ ID NO: 242180 - DNA, 615 bp, Unknown
  Bacterial polypeptide expressing nucleotide sequence isolated from the Sargasso Sea
tatgaaaaaatggaaagcaaatagttggagaaattaccccgtcaaacacatccctgaatatcaagatgaggatgagttaaatattgttttaggaaaattaaaaaattttcctcctttagtatttgcaggtgaaacaagacatcttaaagatcaacttgcaaatgttgttgatggaaaagcatttttgttgcaaggtggagactgtgctgagagctttgcagaatttcatccggataatataagagactattttaaattaatgttacagatgtctttggtacttacttattcagcatctttacctgttgttaaacttggaagaattgctggtcaattttctaaaccaagaagtgcaccaacagaaaaaattggagatgtagaactaccaagttatttaggagataatattaattctattgaatttactaaaaaaggaagagcttatgacccaaagagattatttagagcttattcacaatctgcttcaactttaaatttattaagagcattttctaatggtggttttgctgacttaaaaaatgttcatatgtggaatttaggttacattaaatctgcagctcaggctaaaaaatttaaagaattagaagataaaat

SEQ ID NO: 242181 - DNA, 709 bp, Unknown
  Bacterial polypeptide expressing nucleotide sequence isolated from the Sargasso Sea
catgagtacatggtcgccaaaaagttggagaagtaaagatgctcttcatatgccaaactataataatgaagatcatctaaataaaactctaaatgaaatttccaaatatccacctttagtttttgctggagaagcgagactattaaaaaagaaacttggagaagtttcaaacggaaatgcttttttattacaaggtggagattgtgcagaaagttttgcagattttcatccagataatattagagatacatttaaagttattttacaaatggctgttgtattaacttttggtgcttcttgtccaattgttaaagtaggaagaattgctggacaatttgcaaagccaagatcatctgccacagaagttattaataatttagaacttgagtcttataaaggcgatataattaatgggatagactttaatcaaaaagacagagatcctaatccagatagattaattcaggcttacaatcagtctgcatctactcttaatcttttaagagctttttctcagggtggttttgccaatttaaataaaatacatcaatggaacctaaattttgttaaaggtgagaatgctgctaaatttagagagatatcttctagaattgacgaatgcttatcttttatggaggcatgtggaataaatggaaacagtgtaagacaattaaatgaaacagacttctttacaagtcatgaagcttta

SEQ ID NO: 242182 - DNA, 907 bp, Unknown
  Bacterial polypeptide expressing nucleotide sequence isolated from the Sargasso Sea
ctgcatcagcatcagttccccgttgtcaaagttggaagaattgctgggcaattttcaaaaccaagaagtgctccaactgaaaagaaagatggagttgaactaccaagttatcttggtgacaatataaacggaatggagtttactgaaaaagctcgtatgccagatgcaaaaagattattcagagcttattctcagtctgcttctacacttaatttattaagagccttttctcaaggaggctttgcagatttaagacaagttcatctatggaatttaggatttattaaggataaaactaaaggaaaatataaagagatagaagataaaataagtgatgctttatctttcatgaatgcttgcggaataaactctgataacaatagacggctaaggactgttaatttttacacttctcacgaggctcttttattgccatttgaagagtcaatgacaagaatagattcaacgactggagaatatcatgatacttcagctcatttagtttggattggagacagaaccagacaacctgatggcgcgcatgtggaattttgcagagggattaaaaatccattaggtttaaagtgtggaccaaatttaaaatcagaagaattgataaaactttgtaacattttgaacccagataatgaaccaggaagaatgactttaatttcaagatttggagcgaataatgtagaaaaacatcttccaaaactcatcaagactgtaaagaaagagggtctcaacgtggtttggtcttgtgatcctatgcatggcaatactataaaggctgctactggttttaagacaaggacttttgacagtgttgttgcagaagttaaaaattttttcgcggtgcatcaatccgaaggatcctatgctggagggcttcatatagagatgaccg

SEQ ID NO: 242183 - DNA, 943 bp, Unknown
  Bacterial polypeptide expressing nucleotide sequence isolated from the Sargasso Sea
tatgaataaaaattggaaacctagctcttggagagaaaaaaaggcaaaacacttgcctaattattctgatgaaaaagaattaaaactagttactaataaacttactgcatacccgcctttagtattcgcaggtgaatcaagaaatttactaaagcaattaggagatgtcgctaacggaaaagcatttttacttcaaggtggtgattgtgctgaaagttttgcagattttaatcctaataatatcagggactcttttaaagttatgttacaaatggctgtagttttaacttatggcgcttcttgcccagttgtaaaagttggtcgtattgctggtcagtttgcaaaaccgagatcccaagatacagaaaagttagataatttagaattagaatcatataaaggcgatattataaatggcattgattttaatgaaaaatctagaactgctgatccaaaaagattgatacaagcttataatcagtcagcagctactcttaatttattgagagcatttgctcaaggaggttttgcaaatttaaaacaaattcatcaatggaatttgagttttgcagatgacaatcagtataaaaaaagatttgaagatatggcaaatagaatagatgaatgtttaacttttatggaagcttgtgggataaatgatgaaaatgttcgtcaaatgaatgaaacagatttttatactagtcatgaagctttattgcttccttatgaagaagcgttgactagagtagatagtactactggtctttggtatgacgtatctgctcatatgttgtgggtaggagacagaacaagacaacttgatggcgctcatattgaatttattaaaggtatagaaaatccaataggtataaaagtaggaccttctacagaagttagtgagcttttgaaaattattgaagttgttaatccaaacaatattcct

SEQ ID NO: 242184 - DNA, 904 bp, Unknown
  Bacterial polypeptide expressing nucleotide sequence isolated from the Sargasso Sea
aaatatccacctttagtttttgctggagaagcgagactattaaaaaagaaacttggagaagtttcaagcgggaatgcttttttattacagggtggagattgtgcagaaagttttgcagattttcatccagataatattagagatacatttaaagttattttacaaatggctgttgtattaacgtttggcgcttcttgtccaattgttaaagtaggaagaattgctggacagtttgcaaagccaagatcatctgccacagaagttattaatgatttagaacttgagtcttataaaggcgatataattaatgggatagacttcaatcaaaaagacagagatcctaatccagatagattaattcaagcctacaatcagtctgcatctacacttaatcttttaagagctttttctcagggcggttttgccaatttaaataaaatacatcaatggaacctaaattttgttaaaggtgagaatgctgctaaatttagagagatatcttctagaattgacgaatgcttatcttttatggaggcatgtggaataaatggaaacagtgtaagacaattaaatgaaacagacttctttacaagtcatgaagctttacttcttcaatatgaggaagcattaacaagaatagatagtacttcaggtaagtggtacgatgtttcagctcacatgttgtgggtaggtgacagaactcgacaacttgatggagcacatattgaatttttaagaggtattgagaaccctataggtattaaagtgggtccaagcacaaagacagaagaactattaaaaatattagatgtgttgaatccaaataatgaagctggaaaaataacgctgatatgtagaatgggtcatgaaaaagttattggaatacttccaaaaaataattaga

SEQ ID NO: 242185 - DNA, 525 bp, Unknown
  Bacterial polypeptide expressing nucleotide sequence isolated from the Sargasso Sea
tatgaaaaaatggaaagcaaatagttggagaaattatcctgtaaaacacattcctgaatacaaggatgaaaaagaactaaatattgttttaaacaaattaaaaaattttcctcctttagtttttgctggagaaacaagacatcttaaagatcaattagcaaatgtagttgatggaaaagctttcttgttacaagggggagattgtgctgaaagttttgcggaatttcatccagataatatcagagattactttaaacttatgcttcaaatgtcattagtattaacttactcagcttctttacctgtagttaagttaggaagaattgctggtcaattttcaaaaccaagaagtgcaccaacagaaaaaattggagatgttgagctaccgagttatttaggagataatattaattctatagagtttactgaaaaaggaagagcctatgatccaaagagattgtttagagcctattcacaatctgcctcaaccttaaatttattgagagcattttccaacggtggttt

SEQ ID NO: 242186 - DNA, 819 bp, Unknown
  Bacterial polypeptide expressing nucleotide sequence isolated from the Sargasso Sea
aggctttcttttacaaggcggcgactgtgctgagtcgtttgacgaatttaatgcgcctaaaattcgcgatacctttaaagttattcttcaaatggccattgtgcttacctttgctggtcgttgtccggtaactaaggttgcccgtatggcaggccagtacgccaagccgcgctcatcagatttcgaaacccgcgatggcgtgaccttgccaagctatcgtggtgatatcatcaacaacttcgaatttaccgaagcggcccgtcgaccagatcctgaccgtttgttggaagcctaccatcgcagtgcgtcaaccctgaatttacttcgcgcgttcgcacaaggtggtttggccgaccttcatgaagttaaccgctggaacatggcgttcgttgaaaacaatccgcttaaagagcgttattctgatatggccaaccgtattcaagacacccttgagtttatggatgttattggtattaacgcacaaaccagttctacgctgcacgagacttcactgttcacgtcgcatgaagcattgctgttgaactatgagcaggcgctaacacgcatcgatacccttaccggtaagccttacgattgttcggctcacatggtgtggattggcgagcgtacccgtcaacttgaccatgcgcacgttgagtttttccgtggcattcacaacccaattggtgtgaaagtggggccaagcatgcaagaagacgagcttattcgtttgattgatgcgcttaacccgctaaacgatccaggtcgtttaacgctaattacgcgtatgggcgccgataatttagccgacaatttgcc

SEQ ID NO: 242187 - DNA, 919 bp, Unknown
  Bacterial polypeptide expressing nucleotide sequence isolated from the Sargasso Sea
caaggtggtgattgtgctgaaagttttgcagaatttcatcctgacaatataagagatacctttaaagttattcttcaaatggctttagtgatgacttactcagcttctttacctattgtaaaacttggaagaattgctggacaattttcaaaaccaagaagtgctccaactgaaaaacaaggtgataaagaattaccaagttatttgggagataatataaatgcgatagattttaatgaaaaagctagaagacctgatccaaaaagaatgtttaaggcttattctcaatctgcatcaactttaaaccttttaagagcattttcaaaaggtggttttgctgacctaaataaggttcacttatggaatttagattatattaagaaaagtcctcaagctaagaaatttaaagaattagaagataaaatagccgatgcattagcttttatggatgcttgtggaattacatctgattttaataatagattatacacagttaacttttggacttctcatgaagctttacacttaccttttgaagaaagcatgacaagagtagactcaaccacgggtgaatatcacgatacctcagctcactttgtctggataggagatagaacaagacaattagatggaggacatgttgaattttgtaaaggaatagaaaatccaattggcatcaaatgtggtccaacttcaaaacctgatgaaattgcaaaaatatgtgaagttataaatcctaaaaatgaaaaaggaaaaataactttaatctcaagatttggtcatcaaaacgttgaaaaattcttaccaaaattaattagagggattaaaaaagaaggattaaatgttgtttggtcatgtgatccaatgcatgggaatacaattaaatcaactactggttttaaaactagaccgtttaatg

SEQ ID NO: 242188 - DNA, 757 bp, Unknown
  Bacterial polypeptide expressing nucleotide sequence isolated from the Sargasso Sea
tatgagcgataaatggtcacccaaaagttggataaataaagatgctcttcatatgccaaactatcagaatgaagatcatctaaataaaactctgaatgaaatttccaaatatccacctttagtttttgctggagaggcgagactattaaaagagaaacttggagaagttgcaaacggaaatgcttttttattacaaggtggagattgtgcagaaagttttgcagattttcatccagataatattagagacacatttaaagttattttacaaatggctgttgttctaacgtttggagcttcttgtccaattattaaagtaggaagaattgctggacaattcgcaaagccaagatcatcagctacagaagtaattaatgatttagaacttgagtcatacaagggtgatattattaatgggattgactttaatcaaaaagatagagatcctgatccaaatagattgattcaagcttataatcaatctgcatcaacattaaatttattaagagctttttctcaaggtgggtttgccaatttaaataaaattcatcaatggaacctaaattttgttaaaggagagaatgctgctaaatttagagagatatcttcaagaattgatgaatgcctatcatttatggaagcatgtggaattaatggaaacagtgtaagacaattaaatgaaacagatttctttacaagccatgaagcattactacttcaatatgaagaagctttgacaagaatagatagtacatca

SEQ ID NO: 242189 - DNA, 827 bp, Unknown
  Bacterial polypeptide expressing nucleotide sequence isolated from the Sargasso Sea
attaccaataataaaagttggtagaatggcaggacaatttgctaagccaagatcgagcccatccgaaattaataatggtcaagagctacctagttatgctggtgatatcattaatgggatagaatttgatataaataaacgaaagccagagcccagtagaatgctgaccgcttattctcaagcggcatctacattaaacttattgagggcatttgctgatggtggctatgctgaccttcgacatgtacaatcatggaacatgggtttcgttaaaagcggaccacaaggtgaaagatacagatatttggcagaggagatacaaaaaagtttacacttcatggatgctttgggtatatcctcagaaaatactcctcaattaagaacagtacaatattatacaagtcatgaggcacttttattaccatttgaggaagcacttacaagggttgattccacttcaggaatgatatacaacacatcagctcattttctatggatcggagatagaacaagatttattgatagtgcccatgttgaattttgcagaggaattcaaaaccctttaggaataaaatgtggccctagctcagatccagatgagttagttaagataatagatatcctgaacccgatgaatgaatccgggaaaatcactcttattacccgatttggtaatggaagtgtagaaaaatttcttcccaaattaattagaaaaataaccgaagaaggaaaaaatgtaatctggtcatgtgatccaatgcatggtaatacaatgaaaagtaattctggtaaaaaaactagaaaatttgaaaatatactcggagagg

SEQ ID NO: 242190 - DNA, 817 bp, Unknown
  Bacterial polypeptide expressing nucleotide sequence isolated from the Sargasso Sea
gaggaggctcgtaaacccgatgcgaagagattatttagagcttactcacaatctgcctcaactttaaatttattaagggcattttcacaagggggttttgcagatttacgtcaagttcatttatggaatcttagttttgtaaaaggaagtcctcaaggaaaaaaatataaagaagtagaagataaaattagtgatgcaatatcatttatggaagcttgcggtataaacgctgacaataatagaagattaagaacagtaaacttttatacttctcacgaagctcttcttttaccattcgagcaagcgatgacaagagttgactcaacaactggagagtatcacgatacatcagcacactttgtctggattggagacagaacaagacaattagatggaggccatgttgaattttgtagaggaataaaaaatccaataggcttgaaatgtgggcccacacttaagcccgaggaattactaaaattatgtaataaactgaatccacaaaatgaacctggaagattaactttaatttctagattcggagctgataatgttgataaatttttacctaaattaataagatcagtaaagaaagagggtttaaatgttatttggtcctgtgatccaatgcatggaaatactttagtatctaccacaggttttaaaacaagaccttttaacaatatagtaaaggaaatcaaaaaagtttttgccgttcatcaatcagaaggttcttatgcaggcggcttacatatagaaatgacaggacaagatggacagaatgcactggtggagctcaaaaaatatctgaaaaaga

SEQ ID NO: 242191 - DNA, 712 bp, Unknown
  Bacterial polypeptide expressing nucleotide sequence isolated from the Sargasso Sea
tttaaaatagacaaaggtctttctatcgcgagacagctgttaagggatataaatgatttaggattgccagctggaactgaattcttggatgtaattacaccgcaatatattgctgatctaatctcttggggcgctattggagctaggactaccgaaagtcaagtccacagggagttagcttcaggttcgtcatgccctattggctttaagaatactactaatggcggaatacaagttgctgcagatgcgattggttcggcgcaaaaccctcataaattcttgtctgttacgaaagaaggtagagctgctattttttattcttctggtaataaagactgtcatgtaatcctaagaggaggaaatgaacctaattacagtaaagaagatatcgaaagaactgcgaatattctcaaaaacaataatctagctgagtctattatggtagacatgagtcatggaaatagtagtaagcagcacgaaaagcaattgatagtttgtgaagatattgccaagcaaatttctttgggagaagatcgtattacaggtgttatgatcgaaagcaacatcgaagaaggcaatcaaagtgctaaagacctagaaaatcttgtttatggtcaaagcattacggatgcttgcattaattgggaagacacaaaaagctgcctaaatcaattagctgaagctgtatcaactcgagaaaataaaacttaaa

SEQ ID NO: 242192 - DNA, 382 bp, Unknown
  Bacterial polypeptide expressing nucleotide sequence isolated from the Sargasso Sea
gatggccgccacctccgatctgcatgtggtggagacgcgtccgctggtggcaccggctcttcttcacgcagaactgtcgatcgacgccagcgcaaccgagaccgttgcatccgctcgacaacgcattcaggcgattctgcggggggaggatcagcggcttctggtcatcgtcgggccctgttcggtccatgacgtggaagcggcccgcgagtacgcccgccgtctggcgcctctgcgtcagacccatgctgcagagctggaagtggtcatgcgggtctacttcgagaagccgagaacaacggtgggctggaagggcttgatccacgacccccacctcgacggctcctatgacatccacagcgggatgcgtcgggcccgcggg

SEQ ID NO: 242193 - DNA, 784 bp, Unknown
  Bacterial polypeptide expressing nucleotide sequence isolated from the Sargasso Sea
atgattgattggaaaatagatagctggagaaaacttcctattaagcaagtgcccgaatataatgatcttactaaagttaatagtgtggaaaaggaattatctattagaccacctttagtttttgctgaagaagctagaagattaagaaaaaggatggctaatgtagcagagggtaatgcttttttattacaaggtggtgattgtgctgagtcttttgctgaacacaacgctaataatataagagatagttttagagtattattacaaatggctgttgttcttacttttggatcagcattacccgtagttaaaataggaagattagctggccaatattctaagcctagatcatctccttttgaagaaatagacaatgtctctttacctagttatagaggcgatatggtcaatgatatggcatttgataaaaaagcaagagagcctgatccagaacgtcttctgcaagtttatgataaatctgcttcaactttaaatttattaagagcgtttgcaagtggaggtatggcggatttaacaaagctgcacgaatggaacctagagtttgttagaggtactaaagaggcagaaaaatataaagagttggcagctcagataacttcctctcttgagtttatgaatgcgtgtggtatgacacctgaaaatacggctcaacttcgtgaaactgaattttatacatctcatgaaggattgttacttaattatgaagaagcgcttactagaaaagatactatcacagaagaaaaaggttggtttgctacatctg

SEQ ID NO: 242194 - DNA, 886 bp, Unknown
  Bacterial polypeptide expressing nucleotide sequence isolated from the Sargasso Sea
ttgggatcagccttgcctgttgttaaaataggaagattagctggccaatattctaagcctaggtcatctccttttgaagaaataaacaatgtttctttacctagttatcgtggtgacatggtaaacgatatggcattcgacaaaaaagcaagagatcctgacccagatcgtctgattcaagtttatgataaatctgcttcaacgttgaatctattaagagcgttcgcaagtggtggtatggcagatttaacaaagttgcacgaatggaaccttgagtttgttagaggtactaaagaggcagaaaaatacaaagagttagcgtctcagataactgcttcactcgagtttatgaaagcgtgtggtatgacacctggaaacactgtccaacttcgtgaaactgaattttatacatctcatgagggattgttacttaattatgaagaagctctaaccagaaaagatactataactgaggagaaaggttggtttgctacatctgctcatatgttatggattggagataggacaagaagtattgatgaggctcatgttgaatatatgagaggaatagctaatccaataggcttaaaatgtggaccatctacagaacccgacgatttgctaagattaattgaaaagctcaacccacttaatcaagcaggtagattgactttgattgctagaatgggctcttcagaaatacataaaaaattaagaccattaatttcagcagttaagaggtctggattggttgtaggttggtgcagtgatccaatgcatggaaacacagtaaaagcatcatcgggatttaaaactaggaaaatggatgatattatgatggaggttaaaggtttttttgaggttcataatgaaatgaatacgatac

SEQ ID NO: 242195 - DNA, 913 bp, Unknown
  Bacterial polypeptide expressing nucleotide sequence isolated from the Sargasso Sea
ttagagcttactccatcagcctcaacattaaatttactaagagcattttctcaaggtggatttgcggatttgagacaagtgcatttatggaacttaggatttattaaagatagaactaaaggcaaatacagagagatagaagataaaattagtgatgctttagcttttatggaggcttgtggcattaactcagataacaatagaagattaagaactgtaaatttttatacttcacacgaagcattacacttaccttttgaacaagctatgaccagagttgactcaaccactggagaatatcatgatacttctgctcactttgtctggattggagatagaacaagacaactagatggtgcacatgttgaattttgtaaaggaatcaagaatccaattggtttaaaatgtggaccaactttaaaagctgatgaattaattaagctttgtaatattttaaatcctaataatgagccaggtagaatgacattaatttcgcgtttcggtgctgacaatgttgaaaaatatttacccaaattaattaaatcagttaaaaaggaaggattaaacgtagtttggtcttgtgatccaatgcatggaaatactataaaagctgcaactggttttaaaaccagaacttttgacagcgttgtaaaagaagttaaaaatttctttgcaataagccagtctgaaggtagctacgcaggtggtttacatatagaaatgacaggtcaagatgtgacagaatgtactggtggagcacaaaaaatatctgaaaaagatttatctaatagatacagaactcattgtgatccaagattaaatgctaaccaagctttagagttagctttcttgatttcagaagaaataaagaaaaactcaaaaatttcaaacaaaattattcaagccgcgtctt

SEQ ID NO: 242196 - DNA, 905 bp, Unknown
  Bacterial polypeptide expressing nucleotide sequence isolated from the Sargasso Sea
tgaggcaagagacttaaaaaggaatcttgctaaagtttcagagggtaaagcatttttattgcaaggtggtgattgtgctgaaagttttgatgatttcaatgcagattatataagagatacatttaaagtattattgcaaatgtctgtcacattaactgctgcaggcaattgccctgttgtaaaggttggcagaatggcaggccagtttgcaaaaccgcgtagtgcacctaaagaagaaatagatggtgttgagttagatagctataagggcgacataataaatgatatggactttactgaaaatgcgagagttccagaccctgatcgtatgattaaagcatacactcaatcagctgccacacttaatctattgagagcttttgctaaaggtggattttcagatttaaataaagtacatcaatggaatatgggatttgtggatgaaagtcctcaaggaaagaaatttagagagctagcaaataaaatctcggacacgctatcttttatggaagctattggaatttcttcaagaaacacaaaacgtttaagaagtgttgacttctttacaagtcatgaggctcttttacttccttatgaagaatgtctgacgcgacttgatagcacatcaggtgaagtttatgacacatcagctcacatggtttggattggtgatcgaacaagacagcctgacggagcacatgtagaattttgtagagggattaaaaatcctattggaataaaatgtggaccatctttagatcctgaggaattgaaaaagctacttgatatcctgaaccctgagaatgaggctggaaagataacattaatttgtcgatttggttctgatactataaatgaaaagttaccaaaacttatacaaccgtttttaaattcagatcataatt

SEQ ID NO: 242197 - DNA, 831 bp, Unknown
  Bacterial polypeptide expressing nucleotide sequence isolated from the Sargasso Sea
aatgtctttggttttgacatattcagcttcattgcctgtagttaaaattggaagaattgcaggtcaattttctaaaccaagaagttctcctacggaaaatcaaaatggtaaagaattaccaagttatttaggagataacattaatgggattgaattcactgcgaaagcaagaaaacccgatccaaaaagattgtttaaagcatactcacaagcagcatccacattaaatttgttgagagctttttcacatggtggatttgcagatttaaaaaatgttcatttgtggaatttgggctatataaaaaaaagtctacaacataaaaaatttaaagaattagaagataaaattgctgatgcattagcttttatggaagcatgtggaattaattctgattttaacagaagattaaaaacagtaaatttttggacttcacatgaagcattgttattacctttcgaagaaagtatgacaagagtagattctactaccggagaatgtcatgatacttcagcacactttgtatggattggtgacagaacaagacaattagatggtggacatgttgagttttgtagaggtattgaaaatccaattggaattaaatgtggacctacatcaaaaccagatgaaatttcaaaaattataaatgtaataaatccaaaaaatcaaaaaggtaaaattactttaatttcgagatttggtcatgataaagtagaaaaattcctaccaaaattaataagaggcataaaaaaagaaggtttaaatgttatttggtcatgtgatcctatgcatggtaatacaattaaatctgccacaggttttaaaacaag

SEQ ID NO: 242198 - DNA, 518 bp, Unknown
  Bacterial polypeptide expressing nucleotide sequence isolated from the Sargasso Sea
tatgaaagaacaatggtcaccaaattcctggcgcttaaagcctgctaaacatcttcctatttataaggatgaggatgttttaaatgattctttagataaaattaaaaaatttcctccactagtttttgctggtgaagcgagatctcttaaatcaagactctctgatgtttcaaaaggaaaagcttttctattgcaaggaggcgattgtgctgaaagttttgcagattttcatcctgataatatcaaaaatacttttaaagttattcttcaaatggctgtagtactaacttttggagcttcatgtcctatcgtaaaagtaggcagaatagctggtcaatttgctaaacctagatcatctgacaaagagacaataaatggagttgagcttgagtcatacaaaggcgatataataaatggaattaattttacaaaagttgatagatctcctgatcctgctagactgattcaagcatataatcaatctgcatctactttaaatttattaagagctttttctc

SEQ ID NO: 242199 - DNA, 919 bp, Unknown
  Bacterial polypeptide expressing nucleotide sequence isolated from the Sargasso Sea
atgccgcacgcctggagccccgaaagctggagggccaagcccatccagcagcagcctgaataccctgacgccagccacctcgcccgtgtcgaacagaccctggcaggctacccgccgctggtcttcgcgggcgaagcgcgcgagctgcgccgccagttcgccgaggtgacccaggggcgtgccttcctgctgcagggtggcgactgcgccgaaagcttcgccgaattctctgcggcgaagattcgcgacaccttcaaggtgctgttgcagatggccatcgtcatgaccttcgccgccggctgcccggtggtcaaggtcgggcgcatggcgggtcagttcgccaagccgcgttctgccggcagcgaaaccatcgacgacgtgaccctgccggcctaccgtggcgacatcgtcaacggcatcggcttcgatgcgacgagccgcgttcccgacccggagcgcctgctgcaggcctaccaccaggccacggccagcctcaacctgctgcgcgccttcgcccagggcggctttgccgacctgcaccaggtgcaccagtggaacctcgacttcatcgccaactcggcgctgtcggagaagtaccaccagctcgccgggcgtatcgatgaaaccctgtcgttcatgcgcgccgtgggcatggacagcgcaccgcaactgcgcgagaccagcttcttcaccgcccacgaagcgctgctgctgaactacgagcaggccttcgtgcgcaaggacagcctgaccggccgctggtacgactgctccgcacacatgctgtggatcggcgatcgcacccgccagctcgatggcgcccacgtcgagttcatgcgcggcatcgagaaccccatcggggtcaaggtcggtccgagcatggacccggatgaactgatccgcctgatcgacaccctca

SEQ ID NO: 242200 - DNA, 557 bp, Unknown
  Bacterial polypeptide expressing nucleotide sequence isolated from the Sargasso Sea
aatgaaaaaatggaaattaaatagctggagaaattatcctgttaaacacatcccaacttatgaggatgaaaaagaacttaatatggttcttggaaaaataaaaaattttcctccactagtttttgctggtgaaacaagacatttaaaacaacaacttgcagaagttgttgatggaaaagcatttttactacagggcggtgattgtgcggaaagttttgcagaatttaatcctgataacataagggattattttaaagtcattttgcaaatgtctttagtattgacttattcagcttcattacctgttgtaaaacttgggagaattgcaggacaattttcaaagcctagaagcgcttctacagaaaagcaaggtgataaagaactaccaagttatttaggtgataatataaatggtattgattttactgaaaaatctagaaagcctgatcctaaaagattatttaaagcttattctcaatctgcttctacattaaatttattaagagctttttgtcatggtggatttgctgatttacaaaagtacacctatggaatac

SEQ ID NO: 242201 - DNA, 448 bp, Unknown
  Bacterial polypeptide expressing nucleotide sequence isolated from the Sargasso Sea
aatgcagtcagcttcaaaatcccatcatttcctaggtgtaaatgaaaatggaatggcttctattgttaatacaacaggaaatccagatggccatatagttttaagaggaggctcaaaaggtccaaatttcgaaagtcaatatgttcaaagaatttcagctgaattaaagcaatgtaatcttcctcataaagtgatgattgattgtagtcatggaaattccaataaagacttccgaaaacagtctgaagtactaaaaaatatagcttcacaaataagtaatggagaaaaaaatattttaggagttatgcttgaaagtcatttgaaggaaggtaatcaaaaacttttaaaaaaagaggatcttgagtttggaagaagtatcacagatgcatgtatagatatagaaacaacaaaagaactgctagctattttgtataaatcagttaattaa

SEQ ID NO: 242202 - DNA, 916 bp, Unknown
  Bacterial polypeptide expressing nucleotide sequence isolated from the Sargasso Sea
attgcaaatgtcattggttttaactgcttccgcgtcagttcctgttgtgaaagtaggaagaatagcaggtcaattttcaaaaccacgaagcgctcctacagaaaaaaaagatggaaaagaattaccaagttatttaggtgacaatattaatggtatggaatttacagaaaagtcaagaattcctgatgccaagagattatttagagcatactctcagtcagcttcaacattaaatttattaagagctttctctcaagggggatttgcagatctaagacaagttcatttgtggaatcttggatttataaaagataaaacaaaaggcaagtacaaagaaattgaagataaaataagcgaagcacttgcatttatggaagcatgtggaattaattctgataataatagaaggctaagatcagtaaatttttatacatctcacgaagctttgttgcttccttttgaagagtctatgacacgaatagactcaacaactggcgaatatcatgacacctcagcacattttgtatggattggagatagaacaagacagcctgacggagcacatgtggaattctgtagagggataaaaaatcctattggtctaaaatgtggtccttctttaaaaccggaggaacttgtgaatttatgcaaaattttaaatccagaaaatgagcctggtagagtaactttgattgcaagatttggtgctgataatgtagaaaagtttcttccaaagttaattaaatctgtaaagaaagagggtttaaatgttgtttggtcatgtgatcctatgcatgggaatacaattaaagcagctacaggttttaaaactagaactttcgatagtataataaaagaggtaaaagatttctttagaatacatcaagccgagggcacttatgctggaggattacat

SEQ ID NO: 242203 - DNA, 652 bp, Unknown
  Bacterial polypeptide expressing nucleotide sequence isolated from the Sargasso Sea
tatgaaaaattggaaaacaaatagttggaaaaagtaccctgttaaacacatcccgagttatgatgatgaaaaacagttaaacatggttttgaataaattaaaatcatctccacctttagtatttgctggagaaaccagacatctaaaagaacaattagctaatgtggttgatggaaaagcgttcttgttacaaggaggagattgtgcagagagttttgctgaatttcatcctgataatataagagatacgtttaaagtaattttacaaatgtcacttgtattaacgtactctgcatcattgcctgtagttaaacttggtagaattgctggccaattttctaaacctagaagcgcacccactgaaaaacaaggtgataaagaacttccaagctacctaggtgataatattaatgctattgagtttgatgaaaaatctagaagaccagatccaaaaagattatttagagcatattctcaatctgcatcaactttaaacttattaagagctttttcaaatggaggttttgcagatctaaaaaaagtgcatttatggaacttgggctatattaaaactagcccgcaagcaaaaaagttcaaagaactagaagataaaattgctgatgctttggcatttatggaggcatgtggaata

SEQ ID NO: 242204 - DNA, 922 bp, Unknown
  Bacterial polypeptide expressing nucleotide sequence isolated from the Sargasso Sea
tttacaaatggctgttgtttgacgtttggtgcttcttgtccaattgttaaagtaggaagaattgctggacaatttgcaaagccaagatcatctgccacagaagttattaatgatttagaacttgagtcttataaaggcgatataattaatggtatcgacttcaatcaaaaagacagagatcctaatccagatagattgattcaagcttacaatcagtctgcatcaacacttaatctattaagagctttttctcaaggtgggtttgccaatttaaataaaatacatcaatggaacctaaattttgttaaaggtgagaatgctgctaaatttagagaaatatcttctagaattgacgaatgcttatcttttatggaagcatgtggaataaatggaaacagtgtaagacaattaaatgaaacagacttctttacaagtcatgaagcgttacttcttcaatatgaggaagcattaacaagaatagatagtacttcaggtaagtggtacgatgtttctgctcatatgttgtgggtaggtgatagaacaagacaacttgatggagcacatattgaatttttaagaggtattgagaaccctataggtattaaagtaggtccaagcacaaacacagaagaactattaaagatattagacgtgttgaatccaaataatgaggctggaaaaataacgctaatatgtagaatgggccatgaaaaagttagtgtaatacttccaaaaataattaggtcagttaatttaactcgcaaaaatgttgtttggacttgtgaccccatgcatggaaatactataaaatctaacacgggttttaaaactaggccattaaaagatataatttctgaaattcagcaattttttcaaattcatagaagtgagggaacatatcctggtggcgtccatttagaaa

SEQ ID NO: 242205 - DNA, 517 bp, Unknown
  Bacterial polypeptide expressing nucleotide sequence isolated from the Sargasso Sea
atgagtaaaaaatggtcaccaaaaagttggagaaataaagatgctcttcatatgccaaactataagaatgaagatcatctaaataaaactttaaatgaaatttccaaatatccacctttagtttttgctggagaggcgaggctgttaaaaaacaaacttggcgaagttgcaaatggaaatgcgtttttattacaaggtggtgattgtgcagaaagttttgcagattttcatccagataatatcagagatacatttaaagttattttacaaatggctgttgtgttgacttttggtgcttcttgtccaattgttaaagtaggaagaattgctggacaatttgctaagccaagatcttctgccacagaggtaattaatgatttagaacttgagtcatataaaggtgatataattaatggaattgacttcaatcaaaaagatagagatcctgatccagatagattaattaaggcttataatcggtctgcatcaacactaaatttattaagagctttttctc

SEQ ID NO: 242206 - DNA, 685 bp, Unknown
  Bacterial polypeptide expressing nucleotide sequence isolated from the Sargasso Sea
atgaaaaattggaaagttaattcttggagaaaatatccagttaagcacattccatcatatgatgatgagaaagagcttaacatggtgttgaacaaattaaagtcatcaccaccattagtttttgctggagagactagacatttaaaagatcaacttgctgaagttgtagatggtaaagcttttttacttcaaggaggagattgcgcagagagttttgcagaatttcaccctgataatattagagatacgtttaaattaattttacagatgtctcttgttttaacatattcagcatctttaccggttgttaagcttggaagaatcgcaggtcaattttctaaaccaagaagtgcaccaacagaaaagcagggtggtaaagaattacctagttatttaggtgacaatataaattcaattgaatttaatgagaaggctagaaggccagatccaaaaaggttgtttagagcatattctcaatcagcatcaacattgaacttattgagagccttttccaacggaggttttgcagatttaaaaaaagtgcacttatggaatttaggttatattaaaaatagcccacaagcaaaaaaatttaaagagttagaggacaaaattgcagatgcacttgggttcatggcagcatgtggaataactccagaatttaacagaagactttataccgtca

SEQ ID NO: 242207 - DNA, 754 bp, Unknown
  Bacterial polypeptide expressing nucleotide sequence isolated from the Sargasso Sea
atgtggcaaaataatagctggcggaagtatagagcaaaacatatcccagaatatccagataaacatggtttaaaaattgtcgaggaaacccttaaggggtttcctccattagtttttgctggcgaggttcgttcactcagaaaagctctttctgaagttgccgagggcaatgggttccttcttcagggtggggattgtgctgaaagttttacagaatttagcgctgataatattcgagacactttcagagtactccttcagatggcggttatcctgacctctggaataaatgtccctgtcacaaaagttggtagaatggcaggacagtttgcaaaaccacgatcaagcgcaactgaaacaatcgagggtaaagccctcccaagttatgcaggtgatataattaatgatattgaattcattgatgaaaaacgaataccggaccctcagcgtttgttaaaagcatactctcaggcagcttccacattaaacctactacgggcctttgctgatggtggttacgcagaccttcgtcatgtaaactcttggaatatgggctttgtaaaaagcggtccccaaggagaacgatataggcatttagcacaccagatccaggaaagtttaaactttatggaagcccttggagtaacctcagataacacgccacagcttagaaaggtttcattttatacaagccatgaagcactcctattgccctatgaagaagctcttactcgaattgattctaccagtggtg

SEQ ID NO: 242208 - DNA, 847 bp, Unknown
  Bacterial polypeptide expressing nucleotide sequence isolated from the Sargasso Sea
atctgctcttgaatacgcccacctgttaaaagaggctagagactcattaagtactaatttacttgtcattatgagggtgtattttgaaaaaccaagaacaactgtaggttggaaaggtttgattaatgatccagatatcaatgagagctatgatgcaaataagggcttgatgttagctagaaaaattctcagagacgtaactgcaatagggcttccagttggaacagaatttttagatccaatttcacctcaatatgttgcagatcttatttcttggggagccataggtgctagaactgcagagagtcaatcgcatagagagctagcctctggtctctcatgtccaattggtatcaagaatggaacaactggtgcattaaaaccagcaattgatggcattcaagctgcaaatcatccacatgtatttttttctaacacaaaagatggacgagtctcaatatataaaacctccggaaattcagactcacatattattttaagaggcggaaaagagcctaattttggctcagaagcaattcaacaaactttaacagcattagtggaggccgatgtaaatgactccattatggttgatgcaagtcatggaaatagccaaaaacaatttaaaaaacaaattaatgttgtaaatgatctggctacacaaatttcagcaggcaaccaaagtttaagaggtctgatgatcgaaagtcatttagttgagggcaatcaaagtatcacagaaagtctcacttacggtcagagtattacagatgcatgcatgaattgggatgatactcttaactgccttaacgtaatcagcgaagctgttgaaaagaggcgaggataa

SEQ ID NO: 242209 - DNA, 379 bp, Unknown
  Bacterial polypeptide expressing nucleotide sequence isolated from the Sargasso Sea
aatgatccaaaccgaagacctcaatgttaccggcgttaatcccctgactgctcctaaattcatcaaagcagaatatcccatttcggataaggccagtgaaacggtatttaagtttcgcaaacagattaaggatgttctggatgaaaaggattccaggcaattggtcatagtcggtccttgttcaatccaccatgctgatatagcaatagattatgcggacaaactcaccaagttgatacccgaagtcgaagacaaattattggtagtgatgagggtttattttgaaaagccccgaacaactgtaggatggaagggattgatcaacgacccagacctggacggaagtcacaagatcgagaaagggatcaagctgccagaa

SEQ ID NO: 242210 - DNA, 697 bp, Unknown
  Bacterial polypeptide expressing nucleotide sequence isolated from the Sargasso Sea
atgaaaaattggaaagtaaatagttggagaaagtatcctgttaagcacataccaacgtatggagatgaaaaggaacttaatagtgttttaaataaattgaaaacatttccaccacttgtatttgcaggtgagacaagacatcttaaagatcaattagctaaagtagtcgatggaaatgcctttttattacaaggcggagactgcgcagaaagttttgcagaatttcatcctgacaatattagagatacctttaaagttattcttcaaatggctctggtgatgacatattcagcatctttacctatagtaaaggttggtagaattgctggacagttttctaaaccaagaagtgctccaacagaaaaacaaggtaatatagaattaccaagttacttaggtgataatattaatgcaatagattttaatgaaaaagctagaagacctgatccaaaaagaatgtttaaagcatactctcaatcagcttctacacttaatcttttaagagctttttcaaaaggtggttttgcagatttgaataaagttcacttatggaacttagattatattaaaaaaagccctcaggcaaaaaaatttaaagacttagaggataaaattgctgacgctttagctttcatggaagcatgtggaataacatcagattttaataataggttatatactgtaaatttttggacgt

SEQ ID NO: 242211 - DNA, 899 bp, Unknown
  Bacterial polypeptide expressing nucleotide sequence isolated from the Sargasso Sea
tttaggagacaatataaattcgatagaatttaatgaaaaagctagaagaccagatcctaagagattgttcagagcttattcacaatctgcagcaacattaaatttattaagagccttttcacacggaggttttgcagatttaaaaaaagtccacttatggaatttaggttatattaaaaatagtcctcaagctaaaaaatttaaagaattagaagacaaaattgcagatgctcttggatttatggccgcttgtggaataacaccagaatttaatagaagactatacactgttaatttctggacttcacatgaagctcttcatttaccttttgaagaaagtatgacaagaacagactcgacaactggcgaataccacaatacttcagctcactttgtttggattggagatagaactagacaattagatggtggacatgttgaattctgcaggggaattgaaaacccaatcggtattaaatgtggaccaacttcaaaagcagacgaaattgctaaaatatgtgaagttattaatcctaaaaatgaaaaaggaaaaatcactttaatttctagattcggacatgataaagttgaaaaatttttacctaaacttatcagaggaattaaacaagagggattaaatgttgtttggtcatgtgatccaatgcatggaaatactttagtctcaacgacaggttttaaaacaagaccatttaataatgttgttaaagaggtaaaaaatgtttttgaggttcatcaaagtgaaggatcttatgctggtggacttcatatagaaatgactggtcaaaatgtgacagaatgtaccggtggtgctaaaaatatatctgatcaagatttatcaagcagatatcatactcattgtgacccaagattaatgcaga

SEQ ID NO: 242212 - DNA, 325 bp, Unknown
  Bacterial polypeptide expressing nucleotide sequence isolated from the Sargasso Sea
tatgactaagaattggtcaaaagatagctggagaagtaagcctattttacaagttccagaatacgatgatttagatcaattgaaaaaggttgagtcacgcctgacctcttatcccccgctagtttttgctggagaagcaagaagacttaaagaaaatcttgcaaaagtatctagaggtgaagctttcttacttcaaggaggagattgtgcagaaagttttgcagaacacaatccagataacataagagatacctttagagtaattcttcaaatggcgattgtttttacatttggggctggctgtccagtaattaaagttggaaga

SEQ ID NO: 242213 - DNA, 571 bp, Unknown
  Bacterial polypeptide expressing nucleotide sequence isolated from the Sargasso Sea
tatgaaaaaatggaaagtaaatagctggaaaaattacccagtaaaacatattcctgaatatcaggatgagaaagagctaaacttagttttaaataaattaagaaattttcctccactagtttttgcaggagaaacaagacatcttaaagatcaactagcaaacgtggttgatgggaaagcattcttgttacaaggtggagattgcgctgagagttttgcggaattccatcccgataatatacgagattattttaaattaatgttacaaatgtcattggttttaacttactcagcctcattacctgttgttaaattaggtagaattgcaggccaattttcaaaaccaagaagtgctccaacagaaaaaattggagaaaaagagctacctagttacttgggagataatataaattcaatagaatttactgaaaaagcaagaataccagacccaaaaagacttttcagagcttattctcaatctgcttcaacactaaatttgttaagagcattttctaatggtggatttgctgatttaaaaaatgtccatatgtggaatttgggatatataaaa

SEQ ID NO: 242214 - DNA, 772 bp, Unknown
  Bacterial polypeptide expressing nucleotide sequence isolated from the Sargasso Sea
aatgaaaaaatggaaaataaatagttggagaaattatcctgtaaaacacattcctgtttatgaggatgaaaaagagcttaatatggttctaggaaaaataaaaaattttcctcccttagtatttgctggagaaactagacatctaaaacaacagcttgcagaagttgttgatggaaaagctttcttactacaaggaggagattgtgcagaaagttttgtagaatttaacccagataatataagagattattttaaagttattttacaaatgtcattggttttaacttattcagcttcattgccagttgtaaaacttggaagaattgcagggcaattttcaaaacccagaagtgcgccaacagaaaaacaaggtgataaagaattaccaagctatctaggcgacaatataaatggtattgattttactgagaaatcgagaaaaccagaccctaaaagattatttaaagcttattcacaatccgcttctactttaaatttattaagagctttttgtcatggtggatttgcagatttacaaaaagttcatctatggaataccggttatattaagaaaagtcctcaagctaaaaaatttaaagaattagaagataaaatagctgacgctttagcatttatggatgcctgtggaataaactcggattttaatagaagacttaaaacagtaaatttttggacatctcatgaagcattattacttccttttgaggaaagcatgacaagagttgattcaactactggagaataccatgat

SEQ ID NO: 242215 - DNA, 757 bp, Unknown
  Bacterial polypeptide expressing nucleotide sequence isolated from the Sargasso Sea
acagaaaaacaaggtgatgtggaattaccaagttatttaggtgataatattaatgcaatagattttaacgaaaaagctagaagacctgatccaaaaagattgtataaagcatattctcaatcagcttcaacgcttaatttacttagagcattttcaaaaggtggttttgcagatttgaataaagttcatttatggaacttagattatattaaaaaaagtcctcaagcgaaaaaatttaaagacctagaggataaaattgctgatgcattagcatttatggaagcatgtggaataacttcagactttaacaatagattatacactgtaaatttttggacttcacatgaagcgttgcacttaccttttgaagaaagtatgactagagtagactctaccactggtgagtaccatgatacttctgctcattttgtctggattggtgatagaacaaggcaattagatggtggacatgttgaattttgtcgaggaatagaaaatccaattggaataaagtgtggccccacttctaaacctgaggagattgcaaaaatttgtgagttaataaatccaaaaaatgaaaaaggtaaaattactttaatttcaagatttggtcatcaaaatgtagaaaagtttttaccaaagttaattagaggaattaaaaaagaaggtttaaatgtagtttggtcatgcgatcccatgcatggtaacactataaaatctaccactggttttaaaacacgaccttttaacgatgtag

SEQ ID NO: 242216 - DNA, 157 bp, Unknown
  Bacterial polypeptide expressing nucleotide sequence isolated from the Sargasso Sea
tatgattgaaagtaaccttgaagaagggaaccagaaagccgacgatctggataatctaacatacggtaaaagtattactgatgcatgtataaattggaaagatactaaagactgcctctatagattggctgaatcagtaagagatagaaataagtaa

SEQ ID NO: 242217 - DNA, 907 bp, Unknown
  Bacterial polypeptide expressing nucleotide sequence isolated from the Sargasso Sea
tatgaggatgaaaaagaattaaatatggttcttaacaaaataaaaaattttcctcctttagtttttgctggtgagacaagacatttaaaagaacagctttcaaatgttgttgatgggaaagcttttttgttacaaggaggcgattgtgccgaaagttttgcagaatttaatccagacaatataagagattattttaaagttatgctacaaatgtcattagtattaacttattccgcatctttgccagttgtcaaacttggaagagttgctggacaattttcaaaaccaagaagcgcaccaacggaaaaacaaggaaacactgaactaccaagttatttgggtgacaatatcaatggtattgagttcactgaaaaggcgagaagacctgatccaaaaagattatttaaagcttactcccaatcagcttctacattaaatttgttaagagctttttgtcatggtggatttgcagatttaaaaaaagttcatctttggaatttgggttacataaaaaaaagtccacaagctaaaaaatttaaagaattagaagataaaatagctgatgctttagcttttatggatgcatgcggaataaattcagattttaatagaagattaaaaactgtaaatttctggacttcccatgaagcattactgttaccttttgaagaaaatatgacaagagtagactctacaactggggaatatcatgatacctcagcacattttgtttggataggggatagaacaagacaacttgacggaggccatgttgagttttgtagaggtattgaaaatccaataggtattaaatgtggcccaacatctaaacctgatgaaatagctaaaatttgtaatgtgattaatcctaagaatgaaaaaggaaagataactttgatttcaagat

SEQ ID NO: 242218 - DNA, 416 bp, Unknown
  Bacterial polypeptide expressing nucleotide sequence isolated from the Sargasso Sea
ccagggccacgcgtccattgtttccaccaccggcaatccggatggccaccttgttctgcgcggtggtggcggaagcactaactaccacgctgaatcgattaatgcggtgtctgagattctgcaggcagcgggcttgccccatcgggtgatggtggattgcagccatggcaattccaacaaggattaccggcggcagtcggaggtactcgagtcggtggcccagcaggtgcggggtggttcccgttcggtgctcggggtgatgctcgagagcaacatcgttgccggcaatcagaagctgcctgccgatctcagccagttgacctacgggcagagcatcacggatgcctgcatcgatttgtcgaccaccgagtcactgcttgagcagctggcagcagccgtgccggtcatggtctgag

SEQ ID NO: 242219 - DNA, 724 bp, Unknown
  Bacterial polypeptide expressing nucleotide sequence isolated from the Sargasso Sea
atgaaaaaatggaacttaaatagctggacgaaataccctgcaaagcatttgcctgtctataaggataaaaaagagctggatttagtgctgggtaaagttaaaaaatatcctcctttagtttttgcaggtgaaacgcgatcactaaaaaaatctttggctgatgtagtaaaaggtaaagcctttttacttcaaggcggagattgcgctgaaagttttgctgaatttcatccagataatattagagatacattaaaagtaattttacagatgtcgttagttttaactgcttctgcgtcagtgccagtcgttaaagttggaagaatagctggacaattttctaaaccaagaagtgctccaacagaaaaaaaagatggaaaagaattaccaagttatttaggtgataatattaatggaatggattttaatgaaaaggcaagaataccagatgcaaaaagattgtttagagcgtattctcaatcggcttcgactttaaaccttctgagagctttttctcaaggaggctttgccgatcttagacaagttcatttgtggaatttaggatttattaaagacaaaactaaaggcaaatataaagagattgaagataagattagcgatgctttagctttcatgcaagcttgtggaattaactctgataataatagaagattaagaacggtaaatgtttatacttctcatggaagctcttttgttaccctttgaa

SEQ ID NO: 242220 - DNA, 364 bp, Unknown
  Bacterial polypeptide expressing nucleotide sequence isolated from the Sargasso Sea
atgatccaaaccgaagaccttaatgttacccatgttaatcccctgactgctcctaaattcattaaagcagaatatcccatttcggataaggccagtgaaacggtatttaagtttcgcaaacagattaaagatgtactggatgaaaaggattccaggcaattggtcatagttggtccttgttcaatacaccatgctgatatagcaatggattatgcggacaaactcaccaagttgattcccgaagtcgaagacaaattattggtagtgatgagggtttattttgaaaagccccgcacgacagtaggatggaaaggattgattaacgatcgggacctggatggaagccacaagatcgagaaaggga

SEQ ID NO: 242221 - DNA, 730 bp, Unknown
  Bacterial polypeptide expressing nucleotide sequence isolated from the Sargasso Sea
aatgaaaaattggaaaataaatagctggagaaaataccctgtcaaacatattcctaaatatcaagatgagaaggaattggagatggttttaaataaattgaaaacttttcctccgttagtttttgcaggtgaaacaagacatttaaaagatcagttagcaatggtaaatgatggaaaagcttttctattacaaggtggtgattgtgcagaaagttttgcggaatttcatcctgacaatataagagatacctttaaggttattcttcaaatggctctagtgatgacttactcagcttctttacctattgtaaaacttggaagaattgctggacaattttcaaaacctagaagcgcaccaactgaaaaacaaggtgataaagaattaccaagttatttgggagacaatataaatgcaatagattttaatgaaaaagctagaagaccggatccaaaaagaatgttcaaggcttattctcaatctgcatcaactttaaaccttttaagagcattttcaaaaggtggttttgctgatttaaataaggttcacttatggaatttagattatattaagaaaagtccccaagctaagaaatttaaagaattagaagataaaatagcagatgcattagcttttatggaagcttgtggaattacatctgattttaataatagattatacacagttaatttttggacttctcatgaagctctttacacttacccttttgaa

SEQ ID NO: 242222 - DNA, 556 bp, Unknown
  Bacterial polypeptide expressing nucleotide sequence isolated from the Sargasso Sea
cgcgagatggcgagtggtttgtctatgccggtcggttttaaaaatggtacggacggtaatctgaacattgcactgaatgcgctgcaatcagcggctagtggccacagttttattggtatcaaccaaaaaggtcaggtgtctttggtgcaaaccgcaggaaacccggatggccatgttattttgcgtggcggctctaaaccaaactatgacgaagaaagtgtccaggcagctttggctgcgctgcgtaaacatggtttacctgaaggtctggtgatcgactgtagccatggaaattccagtaaagatcataccagacaaggcatagtggctcagtctgtgattgagcagcgtgtcaaaggtaacaaagccattatcggcattatgctggaaagtcatattcacgccgggcgtcaggatttggtggatggtaaagccgaactttatggtgtatctgtgacagatgcttgtatcgactgggccaccactgcagagttgttggcagctttagaacagcagctatccttaacagaatcatcatctgaagtagcagcctgag

SEQ ID NO: 242223 - DNA, 364 bp, Unknown
  Bacterial polypeptide expressing nucleotide sequence isolated from the Sargasso Sea
gatggacatatagttttaaggggcggttcgaaaggcccaaatttcgaaagtgatcatgtacaaagaatttcagaggaattgaggcagtgtaatcttccccataaagtgatgattgattgtagtcatggaaattccaataaagatttccgaaaacagtcggaagtgctaaaaaatgtagcttatcaaattagtaatggtgaaaaaaatattttaggagttatgcttgaaagtcatttgaaagaaggtaatcaaaaacttttaaaaaaagaggatcttgagtttggaagaagtattacagatgcgtgcatcaatatagaaacaacaaaaaaactgctcgctattttatataactcatttaattaag

SEQ ID NO: 242224 - DNA, 673 bp, Unknown
  Bacterial polypeptide expressing nucleotide sequence isolated from the Sargasso Sea
atggaaaaaaattggaaaccaaatagttggagagataagcctgctaaacatctgcctaaatacaaagatgtaaattctcttgatttaatgacaaagaaattatcaaatttccccccattggtttttgctggtgagtctagaaaattagaaaaacaattagctgaagttgcaaatggaaaagcgttccttcttcaaggtggagattgtgcagaatctttttctgagtttcatcctaacaatattagagactcttttaaagtaatgcttcaaatggcagtggttttaacattcggagcttcttgccctgttgttaaggttggaagaatggcaggtcaatttgctaaacctagatcacaagaaactgaaattatagataatttagaattagaatcttataaaggagatataattaatggtatagactttaataaagaatctagagagccaaatccagacagacttttacaagcttataatcagtctgcatctactttaaatttgttaagagcttttgcacaaggtgggtttgcaaatttaaaacaaattcatcaatggaatctaagttatattgaagaaggtcaaactaagaaaaagtttgaagaaatggctaatagaattgatgaatgtttagtttttatggaagcttgtggaataaatgatcaaaatgtgcaca

SEQ ID NO: 242225 - DNA, 781 bp, Unknown
  Bacterial polypeptide expressing nucleotide sequence isolated from the Sargasso Sea
atgaaaaaatggactttaaatagttggaaaaattatccagttaaacacatccctacatacgaggatgagaaaaaacttaatatggttttaaaaaagttaaattcttttcctccattggtttttgctggcgaaactagatctttaaaaaaatcactagctcaagtggtcgaaggaaaagcttttttactacaaggtggagattgcgcagaaagctttgctgaatttcatccagacaatataagagatactttcaaagtgattttacaaatggctcttgttttaactttttcggcttccttgcctgttgtaaaaataggaagaattgctggacaattttcaaaaccaagaagttcgcctgttgaagttaaaaatggaaaggaacttccaacttatttaggtgataatataaatggaattgagtttaatgaaaaagcaagaaaacctgatccaatgagattgtttaaagcttattcgcaggcagcatcaacattaaatctattaagagctttttcacaaggtggttttgcagacctaagaaaagttcatttgtggaatttaggattcgtaaataaaagtccacaaggaaaaaaatataaagagatagaagataaaataagcgattcattagcttttatggaagcttgcggagttaatccagaaaaccatagaagacttagaatggtaaatttttacacctcacacgaagctttgcttttgccatttgagcagtcaatgacaagaattgattcaacttcaggaaaataccatgacacatctgcac

SEQ ID NO: 242226 - DNA, 468 bp, Unknown
  Bacterial polypeptide expressing nucleotide sequence isolated from the Sargasso Sea
cggcagacgctattggttcggctcataatccacataaatttctatcagttactaaagaaggaagagcagcaatattttactcttctggaaataaagactgtcacgttatccttagaggcggcactgaacccaattacagtaaagaagatatcgataaaactgcaaaaatacttaaaaaaaataatcttgttgagtcaatcatggtagatatgagtcatggaaatagcagtaaacagcataagaagcaattggttgtctgtgaagatatagccaatcaaatttcttctggtgaagatcggattacaggagttatgattgaaagtaatattgaagaaggaaatcaaagtgccaaagacttagataatcttgtttatggtaaaagcattacagatgcctgcatcaattgggaagatactaagcaatgcctgagtcaattagctaaatctgtgtcactaagaaataattaat

SEQ ID NO: 242227 - DNA, 604 bp, Unknown
  Bacterial polypeptide expressing nucleotide sequence isolated from the Sargasso Sea
atgagcaaaaattggacaatagattcatggagaaatttatctattaaacatcaacctgtttataaagataaacaaaaacttgaagatgttgaaaacagattgaaatctttgccaccattagtatttgccggagaagcaagaacattaaaagaaaaattatcagaagtatgcgaaggtaaggcatttttattacaaggtggtgattgtgccgagtcttttgcagagttcaatgcagataatttacgtgatacttttagagttttattgcaaatggctgctgtattaacatatggagcttctcttcctattattaaagtagggagacttgcaggacaatttgctaagccacgttctgctccaacagaaattaaagaaggaaaggaacttccatcatacttaggtgatataataaatggaattgattttacagaagaagaaagagagcctgatcctgaaagaatgctaaatgcatatagtcaagcagcttcagctttaaatctacttagggcttttgccactggtggttatgcggatttacatgaagtacacagatggaatttagagtttttagaaggaagtatacaagatgacaaatatagaaata

SEQ ID NO: 242228 - DNA, 310 bp, Unknown
  Bacterial polypeptide expressing nucleotide sequence isolated from the Sargasso Sea
catgttcaaagaaatttcatctgaattacagcaatgtaatcttcctcataaagtgatgattgattgtagtcatggaaattccaataaagacttccgaaaacagtctgaagtcctaaagaacatagcttcacaaataagtaatggtgaaaaaaatattttaggagttatgcttgaaagccatttgaaggaaggtaatcaaaaactttcaaaaaaagaggatcttgagtttggcagaagcatcacagatgcatgtatagatatagaaacaacaaaagaattactcgctatcttgtatcgttcagtcagttag

SEQ ID NO: 242229 - DNA, 937 bp, Unknown
  Bacterial polypeptide expressing nucleotide sequence isolated from the Sargasso Sea
atgaagaaatggtctgttaacagttggagaaattacgaagctaagcatttgccagagtatccagatgtgaagaaattagaaaatactgaaggtcagttaagatcttacccaccgcttgtttttgcaggtgaagcaagagatttaaaaaggaatctcgccaaagtttcagagggtaaagcatttttattgcaaggtggcgattgtgcagaaagttttgatgatttcaatgcagattatataagagatacatttaaagtattattacaaatgtctgtcacattaactgctgcgggtaattgccctgttgtaaaagttggaagaatggcgggccaatttgcaaaaccgcgaagcgcacctaaagaagaaatagatggtgttgagttagatagttataagggcgacataataaatgatatggattttactgaagatgcaagagttcctgaccctgatcgcatgatcagagcatacactcaatcagctgctacactaaatttattgagagcttttgctaaaggtggattttcagatttaaataaagttcatcaatggaatatgggatttgtagatgaaagtcctcaaggaaagaaatttagggagctagcgaataaaatctcagacacactatctttcatggaagctattggaatttcttcaagaaatacaaaacgtttaagaagcgttgacttctttacaagtcatgaggctcttttgcttccttacgaagaatgtttgacgcgactcgatagtacatcaggtgaagtttatgatacatcagctcatatggtttggattggtgatcgaacaagacagcctgatggagcacatgtagaattttgcagagggattaaaaatccaattggaattaaatgcggaccatctttagatcctgaggaattgaaaaagcttcttgatattctgaaccctgagaatgagg

SEQ ID NO: 242230 - DNA, 803 bp, Unknown
  Bacterial polypeptide expressing nucleotide sequence isolated from the Sargasso Sea
gctgttgttttaacgtttggtgcttcttgtcttattgttaaagtaggaagaattgctggacaattcgcaaagccaagatcatctgccacagaagttattaatgatttagaacttgagtcttataaaggtgatataattaatgggatcgacttcaatcaaaaagacagagatcctaatccagatagattgattcaagcctacaatcagtctgcatcaacacttaatttattaagagctttttctcaaggcggttttgccaatttaaataaaatacatcaatggaacctaaattttgttaaaggtgaaaatgctgctaaatttagagagatatcttctagaattgatgaatgcttatcttttatggaggcatgtggaataaatggaaacagtgtaagacaattaaatgaaacagacttctttacaagtcatgaagctttacttcttcaatatgaggaagcattaacaagaatagatagtacttcaggcaagtggtacgatgtttcagctcacatgttgtgggtgggtgacagaacacgacaaatagatggagcacatattgagtttttaagaggtattgagaaccctataggtattaaagtgggtccaagcacaaaaacagatgaactattaaagatattagatgtgttgaatccaaataatgaagctggaaaaataacattgatatgtagaatgggtcatgaaaaagttagcggaatacttccaaaaataattaggtcagttaattcagctggtaaaaatgttgtttggacttgtgaccctatgcatggaaatactataaaatc

SEQ ID NO: 242231 - DNA, 549 bp, Unknown
  Bacterial polypeptide expressing nucleotide sequence isolated from the Sargasso Sea
tatgaaaaaatggaaagcaaatagttggagaaattatccagttaaacacatccctgaatataaagatcaggaagagttaaatgttgttttaggcaagctaaagaattttcctcctttagtatttgctggtgaaactagacatcttaaagatcagcttgcaaacgtagtagatggaaaagcatttttgttgcaaggtggagactgtgctgagagttttgcagaatttcatccggataatattagagactattttaaactaatgttgcagatgtctttagtgcttacatattcagcatctttgcctgttgttaaacttggaagaattgctgggcaattttctaaaccaagaagtgcgccaactgaaaaaattggagatgtagaactacctagttatctaggagacaatattaattctatagaatttactgaaaaaggaagagcttatgatccaaagagattatttagagcttattcacaatctgcttcaactttaaatttattaagagcattttctaatggtggttttgccgatttaaaaaatgttcatat

SEQ ID NO: 242232 - DNA, 938 bp, Unknown
  Bacterial polypeptide expressing nucleotide sequence isolated from the Sargasso Sea
agttgttgatggtaaggcttttttacttcaaggtggtgattgtgctgaaagctttgcagaatttcatccagacaaaattagagattacttcaaagtttttttacaaatgtccttagttttaacttactcagcctcattaccagttgtaaaattaggaagaattgctggtcaattttctaaacctagaagtgcgccgaccgagaaaataggtgataaagaacttccaagctatttaggagacaatattaattcaattgaatttacagagaaagcaaggcgacctgatcctagaagattatttaaagcttattcacagtcagcatctacattaaacttaattagagctttctgtcatggtggatttgctgatttaaaaaaagttcatttatggaatcttggttatattaaaaaaagtccgcaagctaaaaaatttaaagaactagaagataaaattgctgatgctctagcatttatggatgcatgtggaattaattcagaatttaacagaagacttaaaactgtaaatttctggacatcacatgaggctttactacttccttttgaagaagcaatgacaagagtagactcaacatcaggacaatatcatgatacgtctgctcattttgtttggataggtgatagaacaagacaattagatggtggacatgttgaattttgtagaggtattgaaaatcctataggaattaaatgtggaccaacatcgaaaccagaagagatcgctaaaatatgtgaattaataaatccaaaaaatgaaaaaggtaaaattacactaatttctagatttgggcatgacaaagttgaaaaatttttacctaaactaattagaggaattaagaaagagggattaaatgtaatttggtcatgtgacccaatgcatgggaatacattagtatcttcaactggttttaaaacagacc

SEQ ID NO: 242233 - DNA, 631 bp, Unknown
  Bacterial polypeptide expressing nucleotide sequence isolated from the Sargasso Sea
atgagcgataaatggtcacccaaaagttggagaaataaagatgctcttcatatgccaaactatcagaatgaagatcatctaaataaaactctgaatgaaatttccaaatatccacctttagtttttgctggagaggcgagactattaaaagagaaacttggagaagttgcaaacggaaatgcttttttattacaaggtggagattgtgcagaaagttttgctgattttcatccagataatattagagatacatttaaagttattttacaaatggctgttgttttgacatttggtgcttcttgtccaattgttaaagtaggaagaattgccggacaatttgcaaaaccaagatcatctgccacagaagtaattaatgatttagaacttgagtcatataaaggcgatataattaatgggattgatttcaatcaaaaagacagagatcctaatccagatagattaattcaagcctacaatcagtctgcatcaacactgaatttattaagagctttttctcaaggcggttttgccaatttaaataaaatacatcaatggaacctaaattttgttaaaggtgaaaatgctgctaaatttagagagatatcttctagaattgacgagtgcttatctt

SEQ ID NO: 242234 - DNA, 777 bp, Unknown
  Bacterial polypeptide expressing nucleotide sequence isolated from the Sargasso Sea
tatgactcaagaatggagcaaatcaggttggaggaaatttccaaggactcagatgccatcatatctaaacaacacaacgctaagtagcattgaaaagaagctagcaacatatcctccattagtgtttgctggagaggcgcgtcgtcttaagctgcaactctcaaacgttgtccaggggaaggcttttttactacaaggaggagattgcgctgagagctttgaggagttcagcgcagatttgattcgggatagttataaagtattgttacaaatggcggttgttttaacttttggaggcaaatgtcccattgtaaagattggaaggatggcgggtcagtttgcaaaaccgcggtcggcagattttgagataattgacggcattaaggtaccatcatatcgtggagatattataaatggaatgggagtggatgaaagagaacctgatccatacagaatgcttcaggcatatacgcaagctgcagcatcattgaatttgttaagagcattctcgcaaggtggctttgcggatattaagagggtacattcttggactttagagagtgctatgggtggaccagaatattcaaaatttcatgaccttgcagacaaaatatcggactctttagagtttatgcgcgctgcgggtgtttcttcatcagagaacgaggttttgaataaagttgacttttacacgagccatgaggctttgttacttgaatacgaagaagccttatgccgagttgatagtacatctggagcatatgtggcgggttctgg

SEQ ID NO: 242235 - DNA, 733 bp, Unknown
  Bacterial polypeptide expressing nucleotide sequence isolated from the Sargasso Sea
tatgaaaaaatggaatttaaatagttggaaaaaattacctgctaaacatttacctgtttatcaggacaaggaagaacttgatttagttttaagtaaaattaaaaaatatccacctctagtttttgcaggcgagtctagatctttaaaaaaagccttatcagaagttgctgaaggtaaagcatttttacttcaagggggagattgcgcagaaagttttgcagagtttcatccagacaacataagagatacttttaaagttcttttacaaatgtctttagttttaacagcatcagcttcagtgccagtcgtaaaggttgggagaattgctgggcaattttctaaacctagaagtgcgcccacagaaaaaaaagatggaaaagaattgccaagttatttaggtgacaatattaatggaatggagtttacagaaaaagcaagaatacctgatgcaaaaagattatttcgagcatattcgcaatctgcatctacattaaacttactaagagccttttcccaaggggggtttgctgacctcaggcaagtacacttatggaatttaggttttattaaagacaaaacaaaaggtaagtataaagaaatagaagataaaataagcgatgctttggcattcatggaagcttgcggaattaattcagataacaatcgaagattgagaactgtaaattttatacttcgcatgaagctttacttttaccatttgaagaatctatga

SEQ ID NO: 242236 - DNA, 634 bp, Unknown
  Bacterial polypeptide expressing nucleotide sequence isolated from the Sargasso Sea
gcttggtgttgcgactgaggcacttgatccaatcatgcctcaatatttgggtgatctaactagctggactgctattggagcaagaaccgcagaatctcagacgcacagagagatggcaagcggtttatccactcctgttggttttaagaatggaaccgatggctcacttgctgttgctgtcaatgcaatcaaatcatcaagacaatctcatcatttcttaggtctagatgatggcggcagaatcactgtttataagacaaaaggaaacaaatactcccatgtggtcttaagaggaggggttaagccgaattatgacagcagaagcattaaatcatgcgagaagcagctgaccgattcagaattaccgatgaagatcatggttgactgcagtcatggcaatacgaataaggatttcagattacaacccaaggtagcaaaaagcattgttaatcaagtcaaaaaagggaatcaatcaattatggggataatgcttgaaagcaatatcaatgctggcaatcaaaagataaccgagaatcttaatgatcttaaatatggtgtttctttaactgatgcttgtatcgattgggagacaactgaagatttattaatgaatctcagaacgtcacttatttag

SEQ ID NO: 242237 - DNA, 886 bp, Unknown
  Bacterial polypeptide expressing nucleotide sequence isolated from the Sargasso Sea
attaagagcatacttctcaatcatgcttctacattaaatcttcttagatcatttgctcaaggaggttttgcaaatttacgtaaagtgaattcatggaatatgggatttgttaaagcaagtaaagaaggtaaaaagtatgagaaaatagctgccaaaattaatgaatacttagattttatggatgctgtaggagtaaatacatctactgttatagacttaaataccgttgagttttttacaagccatgaaggacttcacttgccatatgaatctgcattaacgcgcgtagattcactaacaaatgaagtgtattgtacatcagcacactttatatggattggagatagaacgcgctttattgatagtgcgcatgtagaattttgcagaggaataagcaatccaattggaattaaatgtggtcctagtcttgatccagatgaattagttaaaattattgaaacaatcaatccagcaaatgaggctggaaagatttcattaatttttagatatggtgaagataatattgataaacatttgccaggattggttgaaacaataactaaaaataacaaaaatgttttatggatttcagatcctatgcatggaaatactgtaaagtcttcatctggtctaaaaactcgtgattttaattcattgcttaatgaaacatcaaaagctattaaaattcttaaagaaagaggatgtcatttaggaggaattcacttggaaatgacaggtcaaaatgtcactgaatgtactggaggaatttacaaagtaagtgatgatgatttaaattcaagataccatacgcattgtgacccaagattgaatgctaatcaagcgctagaactctctttcaatattgcggaggagctgcaaggttaaa

SEQ ID NO: 242238 - DNA, 877 bp, Unknown
  Bacterial polypeptide expressing nucleotide sequence isolated from the Sargasso Sea
tatgaaaactcagtggggtcacctagttcttgggcgttcaaaaacagcaaaacatcagcctatttataaagatgaagctcagctgaatgactcattagataaaattaaaaattttccacctttagtatttgcaggtgaatctagatctttaaaatctaaacttgcaaaagtatcaaatggcaaagctttcttattgcaaggcggagactgtgctgagagttttgcagattttcatcctgataatataaaaaatagttttaaggtgatcctacaaatggcggtagttttaacatttggagcttcctgccctgttgtaaaagtaggaagaatagctggccaatttgctaaacctagatcatctaataaagaaataattaatggaattgagttagagtcttacaaaggtgatataattaatggtattgagtttactaaagctgacagattaccagatcctaaaagacttattcaagcatataatcaatctgcatctacattaaatttattaagagcattctcacaaggtggatatgctaatttaaataaaatacatcaatggaaccttaactttgtagaagaagaaaatgctattaaatttacagaaattgctgataggattgacgaatgtattgcttttatgaaggcatgcggaatcaatgatactaatgtgcgtcaaatttatgaaacagaattttttacaagtcatgaagctttgttacttgattatgaggaagcattaaccagaattgatagtactacaggtaaatggtacgatgtttcagcacatatgctttgggtaggtgatagaactcgtcagttggatggtgcgcatattgagtttgtgagaggtattgaaaacccagttggtattaaagtt

SEQ ID NO: 242239 - DNA, 571 bp, Unknown
  Bacterial polypeptide expressing nucleotide sequence isolated from the Sargasso Sea
tatgaaaaaatggaatctaaatagttggaaaaaattacctgctaaacatttacctgtttatcaggacaagcaagaacttgatttagttttaagtaaaattaaaaaatatccacctttggtttttgcaggtgagtctagatctttaaaaaaagctttatcagaagttgctgaaggtaaagcatttttacttcaagggggagattgtgcagaaagttttgcagagtttcatccagataacataagagatacttttaaagttcttttacaaatgtctttagttttaacagcatcagcctcagttccagtcgtaaaagttggaagaattgctggacaattttctaaacctagaagtgcacccacagaaaaaaaagatggaaaagaattgccaagttatttaggtgacaacattaatggaatggaatttactgaaaaggctagaattccagatgcgaaaagattatttagagcatactcccaatcagcttctactttaaacttattgagagctttttcacaaggaggatttgctgaccttagacaagtacatttatggaatttaggatttataaaa

SEQ ID NO: 242240 - DNA, 640 bp, Unknown
  Bacterial polypeptide expressing nucleotide sequence isolated from the Sargasso Sea
atgagtgaaaaatggtcacctaaaagttggagaaataaagaagctcttcacatgcctaactatcagaatgaagatcaccttaatcaaactcttaatgaaatttctaaatatccgcctttagtttttgctggagaggcaagactattaaaaaagaaactaggggacgtagcaaaaggtaatgcctttttactacagggtggagactgtgctgaaagttttgcagattttcatccagataatattagagatacatttaaagtaattttacaaatggccgttgttttgacttttggagcttcctgtccaattgttaaagtaggaagaattgctggacaatttgcaaagccaagatcatcagctacagaagtaattaatggtttagaacttgagtcatacaaaggtgatataattaatggtattgattttaatcaaaaggatagagatcctaatccagatagattaattcaagcttataatcagtctgcatcgacattaaatctgttaagagctttttctcaaggtggattcgccaatttaaacaaaattcaccaatggaatttaaattttgttaaaggtgaaaatgctgcaaaatttagagagatatcttcaagaattgatgaatgcttatcctttatggaag

SEQ ID NO: 242241 - DNA, 907 bp, Unknown
  Bacterial polypeptide expressing nucleotide sequence isolated from the Sargasso Sea
agatttttttaaggttgttttgcaaatgtcattaattttaacagtctcttcaaaattacctgttataaaagtaggacgggtcgctggacaattttcaaaacctagaagtgcaccagtagaagtgaaagatggtaaagagttaccaagttacttgggtgataacattaactcaatggattttacaaaagatggaagagagccccagccagaaagattattaaaagcttactctcaatctgccgcgactttaaatttgttgcgtgctttttctcaaggtggatttgcagatttaaataaagttcatttttggaatatgtcttttgttaatgaaactgcacaaaaaaaatataaagaaattgcagaaaaagttagtgacgccttagcttttatggaggcttgtggaatcaattcagagaacaatagaagattaagaacagtcaatttctacacaagtcacgaagcattattattgccagtagaagaagcaatgacaagagtagactcaactacaggcgaatatcataatacgtcagctcattttttatggattggagataggacacgacaattagatggagctcatgtggaatattgtaaaggtataaaaaatccacttggtattaaatgtggaccatcatctgatccaaaagaaattgtaaaattaactgaggttttaaatcctgataatgaggcaggaagaattacattaattgcaagatttggtcatgaccaagttacaaagtttttacctaaattaataaaagaaataaaaaaagctggaagaaatgttatttggtcttgcgacccaatgcatggaaatacaataaaatcttctacaggatttaaaacaagaccatttgataatgtattaaatgaagtaaaaaatttctttaaagtgcatcaaaac

SEQ ID NO: 242242 - DNA, 983 bp, Unknown
  Bacterial polypeptide expressing nucleotide sequence isolated from the Sargasso Sea
agtcaaattaggtagaatggagggtcaatttgccaaacctcgtagttcagatttgaaagaaaaagatgacctgaaattacctagttacagaggagatattattaattcatacgaatttacaaaagagtctcgtgaacctgatccacaaagaatgatgcaggcctacaatcattcagcttcaactttaaacttgttaagagctttcgctcaaggcggatttgctagtttaacgcaattaaacaaatggaatttagattttgcaagtaattttaattccactcaaaaatataagttaatttctcaaaaaattgaagaaagtattaatttcatgaatgcttgtggaattaatgaaaataacactcgagaacttcgtgaaactgatttttatacaagccatgaagcattgcttttaccttatgaggaagcttttacgcgcgtagatagtactaccggtgattggtataatgtaaattctcattttctttgggtaggagatagaactagagatcctgatggtgcccacatacattatctaagtggaattaaaaatccacttggtttaaaagttgggccatccactaacatagatgatttgaagaaaaatattgaaattcttaatcctgaaaatgaagggggtagattaactctgattgtcagaatgggtgctgaaaaaattcagtctacatttccaaacttattaaaagaaattgataaattaggtcttaatataacttgggtttgtgatccaatgcatggaaatacttcaacaagtaattcaggatataagaccagagcaacagataatatttttaatgaaattaaatcattctttgagattcatcattctcaaggaagtatccctggtggagtacatctagaactgacaggacttaatgtaacagaatgcgttggaggacctgaggacatcaaagatgaaaatttaggagatagatatcatactttttgtgatcccaagacttaat

SEQ ID NO: 242243 - DNA, 880 bp, Unknown
  Bacterial polypeptide expressing nucleotide sequence isolated from the Sargasso Sea
cagggtgatatggaattaccaagttatcttggtgacaatattaatgggatagaattttcaaaaaaagcaagaaaacctgatccaaaaagattgtttaaagcttattctcaagcagcctctacattaaacttgctgagagcattttgtcatggtggatttgcagatcttaaaaaagttcatctttggaatttgggttatattaaaaaaagtcctcaagcaaaaaaatttagagagctggaagataaaattgcagatgctttagcatttatggatgcatgtggaataaactctgattttaatagaagacttaaaacagtaaatttttggacttctcatgaggctttattgcttccttttgaagaaagtatgaccagaattgactcaacgacaggagaatatcatgatacttctgctcactttgtttggataggtgacagaacaaggcaattagacggtggacatgttgaattttgtagaggaattgaaaatccaattggtattaagtgtggacccacgtcaaaaccagaggaaatagttaaaatttgcaatgtaattaatcccaaaaatgaaaaaggaaaaataactttgatttcaagatttggtcatgaaaatgttggaaaatttttaccaaaattagttagaacaattaaaaaagaaggtttaaatgttatttggtcttgtgatccaatgcatggaaacactgttaaatcatctacaggttttaaaactagaccttttaataatgttttaaaagaagtcaaaaatgtttttgctgttcaccagagcgagggttcttacgcaggggggttacatatagaaatgaccggacaaaatgttacagaatgtacgggtggtacacaaaaaattctgataaagacta

SEQ ID NO: 242244 - DNA, 781 bp, Unknown
  Bacterial polypeptide expressing nucleotide sequence isolated from the Sargasso Sea
atttgcaaagccaagatcatctgccacagaagttattaatgatttagaacttgaatcttataaaggcgatataattaatgggatcgactttaatcaaaaagatagagatcctaatccagatagattaattcaagcctacaatcagtctgcatcaacacttaatttattaagagctttttctcaaggtggttttgctaatttaaataaaatacatcaatggaacctaaattttgttaaaggtgaaaatgctgttaaatttagagagatatcttctagaattgacgaatgcttatcttttatgcaggcatgcggaataaatggaaatagtgtaagacaattaaatgaaacagacttctttacaagccatgaagctttacttcttcaatacgaagaagcattaacaagaatagatagtacttcaggaaagtggtatgatgtgtcggctcatatgttgtgggtaggtgatagaacacgacaactagatggagcacacattgaatttttaagaggtattgaaaatcctataggtatcaaagtaggtccaagcacaaagacagaagaacttttaaagatattagatgtgttgaatccaaataatgaggctggaaaaataacgctgatatgtagaatgggccatgaaaaagttagtggaatacttccaaaaataattaagtcagtaaattcagctggtaaaaatgttgtttggacttgtgatcctatgcatggaaatacaatcaagtctaatacgggttttaaaactaggccattaaaagatataatt

SEQ ID NO: 242245 - DNA, 820 bp, Unknown
  Bacterial polypeptide expressing nucleotide sequence isolated from the Sargasso Sea
atagtcaacgaccccgatttcaatgctggctcacgagcagcaaacccaaggcgacttcttcaggcttatcaccagagctcctcaaccctaaaccttttgcgagcgtttactagaggaggatttgcaaaccttgcccaagttcactcttggaaccaagaattcgtcgctagcagtcctgctggagagcaatatcgggagattgctgatggaataaccaatgccctagcattcatgaaagcatgcggtataacctcactcaataactctgcattgaacgaagtggacttttatacaagccatgaagctttgttattaggttacgaagaagcattgacacggatcgactctacatctggaaaatggtatgactgttctgcacatatgctctggataggtgaaaggactaggcaagtagaaggtgctcatcttgagttcctccgaggagttgagaatccactcggatgcaaaattggtccttctgccacacctgaagatgttttaaagatctgtgaagtcctcaatcctgaatctactcccggccggttaaccctaatttctcgctttggtgcaggcaatgtagaagattgcctgcctcctatcgttgatgctgttacaaccgccggacaccctgttgtctgggcttgtgatccgatgcatggaaatacttttaccagttccagtggtcataaaacaagacatctagatgatgtccttgccgagctcagccaatttttttctgtacaccagtcactaggaacgtgggcgggcggtatccatgttgagctaactggtggaaatgtaacagaatgcttaggcggtg

SEQ ID NO: 242246 - DNA, 511 bp, Unknown
  Bacterial polypeptide expressing nucleotide sequence isolated from the Sargasso Sea
tatgaaaaaatggaaaacaaatagttggagaaattatccagttaaacacattcctcaatatgagaatgaaaaagaactaaatatggttcttaacaaaataaaaaattttcctccattagtttttgctggagagacaagacatttaaaacaacaactttcagatgttgttgatggtaaggcatttttgttgcaaggaggagattgtgctgaaagttttgctgaatttaatccggataatataagagattattttaaagttatattacaaatgtctttggttttaacttattctgcatctttaccagtggtaaagttaggcagaattgcaggacaattttctaaaccaagaagtgcaccaactgaaaaacaaggcaataaagaactacctagctatttgggggacaacataaatggcatagagtttaacgaaaaagcaaggagacctgatccaaaaagattatttaaagcgtattctcaagcagcctcaacactaaatttattaagagcattt

SEQ ID NO: 242247 - DNA, 301 bp, Unknown
  Bacterial polypeptide expressing nucleotide sequence isolated from the Sargasso Sea
tatggattatctaactgacaacacaagaataattgagaggcatgacttaattactcccatagaattgattgaaagatatccgatttctaatgatgttgccaaacttatttatggaacaaggaatgagattagcaatatattgcacggcaaagatgacagacttttaattgtatgtggtccttgctcaatccatgatgagaaatctgcgcttgagtatgcgaaaaaattaaaatcagaaaattttaaacatcaagagaaccttctaattgtgatgagagtatatttgaaaaacccagaacta

SEQ ID NO: 242248 - DNA, 413 bp, Unknown
  Bacterial polypeptide expressing nucleotide sequence isolated from the Sargasso Sea
catgacccacgcacaccgctccgccacccccatctccacccacgacaccacccgcattgatgacacgcgcatcaaggccgtgcgcccattgatcacgcctgcgctgctgcaagagtggctgcccacgcccgatgcggcgctgaccctggttgaatccagccgcgctgcgatctcgcgcatcctgcatgggcaggacgaccggctgatcgtggtggtggggccttgctccatccacgaccatggccaggccatggactatgcgcgccagctcaaggcacaggccgatgcgctgcaggacgacctgctcatcgtgatgcgcgtgtattttgaaaagccgcgcaccaccgtgggctggaagggctacatcaacgatccgcacctcgatggcagctttgccatcaacgaagggctgg

SEQ ID NO: 242249 - DNA, 322 bp, Unknown
  Bacterial polypeptide expressing nucleotide sequence isolated from the Sargasso Sea
aatgacgacttcatcaaataatccagctttagaaaagacatctgatttacatgttgttgaaacacgtccattaatacctccaagcagattacataatgatatacctttagatcataaatcagctatgacagttgcaaatacgcgaagatcgatacaaaatattttgcataataatgatccgaaacttttagtcattgttggtccatgttcaatacatgatttagaggcagcaaagcaatattcaaaatatatccaaaattttagagaaatttacaaagataaattagaaatagttatgagagtatattttgaaaaacctaga

SEQ ID NO: 242250 - DNA, 835 bp, Unknown
  Bacterial polypeptide expressing nucleotide sequence isolated from the Sargasso Sea
tatgctccggcttttaaaaggggcaagagattcattaagcgctgatttgttgataataatgagagtatattttgagaaacctagaacgacagtgggttggaaaggtttaatcaatgatccagatattaatgaaagttatgatgtaaataaaggcttgatgctggcaagaaaaattctaagagatattactgcattggggctaccaataggaacagaattcctagatcccatttctcctcaatatgtagcagatcttgtgtcttggggtgccataggagctagaacagctgaaagtcagtctcatagagaattagcctctggtctttcttgtcccataggtattaaaaatggaacaactggagctttaaaacctgcaattgacggcatccaagcagctaaccatcctcatgtatttttctcaaatacaaaagatggtcgagtatcaatatataaaacatctggaaattcagatgcacacatcatattgcgcgggggtaaagagccaaattttagttcagactcaattcaacaaacattaactgcattaactgaagcggatgtaaatgactctattatggttgatgcaagtcatggaaatagtcaaaaacaatttaaaaaacaaattgatgttgtagaaaacttagctgtacaaattgctgagggtaacaatagtttgaggggtttaatgcttgaaagtcatcttgttgaaggaaatcaaagtattacagataaccttgtatatggacaaagtattaccgatgcctgcatgaattgggatgatacactaaactgcttaaaactatttagtgaagctgttcaaaagaggcgaggataa

SEQ ID NO: 242251 - DNA, 511 bp, Unknown
  Bacterial polypeptide expressing nucleotide sequence isolated from the Sargasso Sea
gaaagttttgcagaattctcagccgataatattagggatacgtttcgtgttctcttgcaaatggcacttgtcctcacttttggtggtggtcttccagttgtaaaggttggccgattggctggtcagtttgcaaaacctagatctagttctgtggagaaacagggtgatcaggaattaccgagctatcgaggtgacattgtaaattctatcgaatttgagcccgaaaaaagaacgccggaccccggacgcctcttgaaggcatataatcaatcagcgtcgacgctgaatttattaagagctttcgctcaaggtgggtttgcgaacctagaagaaattcacaggtggacactagggtttgtgtctaactctcctcaaggcgagcgctatgagaagctgtcacatagattggatgagaccctaaggttcatgcaagcatgcgggctgacttccgactcaattagacagcttcgggaaacagatttttacacttctcatgaggctctcttgctag

SEQ ID NO: 242252 - DNA, 904 bp, Unknown
  Bacterial polypeptide expressing nucleotide sequence isolated from the Sargasso Sea
ttattgcagggtggtgactgtgccgaaagctttgccgaatttcacccagataatattagagatacatttaaagttcttttacaaatgtcattagtcttaacagcttctgcttcagttcctgttgttaaagttggaagaattgcaggtcagttttcaaaaccaagaagcgcaccaaccgaaaaaaaggacggaaaagaactaccaagttatttaggtgataatataaatggtatggagtttacagaaaaagctagagtcccagatccaaaaagattatttagagcttactctcaatcagcctcaacgctaaaccttttgagagctttttcacaaggtggttttgcagatttaagacaagtccatctttggaacttaggttttatcaaagataaaactaaaggtaagtataaagaaattgaagataaaataagtgacgcgctagcttttatggagtcgtgcggtataaactccgataacaatagaagattaagaactgtaaatttttatacttctcacgaagcattattacttccatttgaagagtcaatgacaagagttgactcaacaaccggtgagtatcatgatacttcagctcattttgtttggattggtgatagaacgagacaacccgacggtgcacatgtagagttttgcagagggataaagaatcctattggacttaagtgtggtccaagtttaaaacctgaggagttaataaatctttgcaacattcttaaccccaataatgaaccaggaagaatgactttaatttctagatttggtgcagacaacgttgaaaagtttttgcctaaactaataaaagaggtaaccaaagagggattaaatgttgtttggtcatgcgatccaatgcatggaaatacgattaaagcagctaccggtttaa

SEQ ID NO: 242253 - DNA, 898 bp, Unknown
  Bacterial polypeptide expressing nucleotide sequence isolated from the Sargasso Sea
aaacctagaagtgcgccaacagaaaaaaaagacggaaaagaattaccaagttatttaggtgataacattaatggaatggagtttactgaaaaagcaagaatacctgatgcaaaaagattatttcgagcatactcacaatctgcttctactttaaatttactcagagctttttctcaaggaggctttgctgacctcagacaagtacacctatggaatttaggttttataaaagacaaaacgaagggaaagtataaagaaatagaggataaaataagtgatgctttagcgtttatggaagcgtgtggaattaattctgataacaatcgtagattaagaactgtaaatttttatacttctcacgaagctttacatttaccgttcgaagaatctatgactagaattgactcaacaactggagaataccatgatacttcagcccattttgtgtggataggtgatagaacgaggcaaccagatggagctcatgtagaattttgcagaggtattaaaaatcctcttggtctgaaatgtggaccaactttaaatccagatgaattaataaatttatgtaatattttaaaccccaataatgaagctggacgactaacattaatttccaggtttggcgcagatagtgttgagaaatatttgccaaaattaacaagggcaattaagaaagagggtcttaaagttatatggtcttgtgacccaatgcatggaaacactatcaaagctgcaacaggatttaaaactagacctttcgaaagtgtcttaaaagaggtaaaaaatttcttcgctgtaagtcaagcggaagggagctatgctggtgggttacatatagagatgacaggtcaagatgtgactgagtgcacaggtggggctcaaaaaatatccgaga

SEQ ID NO: 242254 - DNA, 775 bp, Unknown
  Bacterial polypeptide expressing nucleotide sequence isolated from the Sargasso Sea
gaaaaacatggaaataaagagttaccaagttatctaggggataatataaatggaattgattttactgaaaaatctagaaaacctgaccctaaaagattattcaaggcttattcacagtctgcatctactttaaacttgttaagagctttttgtcatggaggttttgcagatttacagaaagttcatctttggaacacaggttatattaaaaaaagcccacaagccaagaagtttaaagaactagaagataagatagcagatgctttagcatttatggaagcttgtggaattaattctgactttaatagaagactcaaaactgtaaatttttggacgtcacatgaggctttgttgctaccttttgaagaaagcatgacaagaatagattctacaacaggagaacaccatgatacttcagcccactttgtttggataggtgacagaacaagacagttagacggaggtcatgtagaattttgtagaggtatagaaaatccaattggtattaaatgtggaccaacctctaaacctgaagaaatagttaaaatttgcaatgtaattaatcctaaaaatgaaaaaggaaaaataactttaatttcaaggtttggtcatcaaaatgttgaaaaatttttaccaaaattaattcgaagtataaaaaaagagggtttaaatgttatttggtcttgcgatccaatgcatggaaatactataaaatcaacaactggtttaaaaacaagaccttttaataacgttttaaatgaagttaaaaatgttt

SEQ ID NO: 242255 - DNA, 628 bp, Unknown
  Bacterial polypeptide expressing nucleotide sequence isolated from the Sargasso Sea
atgaaaaaatggaaaataaatagttggaggaattatcctgtaaaacacatcccaaagtacgaggatgaaaaagatcttaatttggttttaaataaattaaagtcatttccaccacttgtgtttgctggagaaactcgtcaccttaaagatcaactagcgaatgttgttgatggaaaagcatttttgttgcaaggcggagattgcgcagagagttttgctgagtttaaccctgataatataagagatactttcaaagttattcttcagatggctttggttatgacttattcagcttcactgcctattgttaaagttggaagaatagctggtcagttttctaaaccaagaagtgcaccaacagaaaaacaaggcaataaagtattaccaagttatttaggtgataatattaatgcgatagatttcactgaaaaagcaagaagaccagatcctaaaagaatgtttaaagcatactcacagtctgcttcaacacttaatcttttaagagcgttttcaaaaggtggttttgcagatttaaataaagtgcatttatggaatttagattacataaagaaaagtcctcaagctaaaaaatttaaagaactagaggataagattgctgatgcattgt

SEQ ID NO: 242256 - DNA, 819 bp, Unknown
  Bacterial polypeptide expressing nucleotide sequence isolated from the Sargasso Sea
tatgaaaaaatggaacttaaatagttggactaaattacctgctaaacatttacctgtttatcagaacaaggaggaactcgagttggttttaagtaaaattaaaaaatacccacctttagtttttgcaggagagtcaaggtctttaaaaaaagctctagctgatgtagccgaaggaaaagcttttttactacaaggtggagattgtgctgaaagttttgctgaatttcatccagataatattagagatacatttaaagttctcttacaaatgtcactagttcttactgcgtcagcttcaatgccagttgtaaaagttggaagaattgctggtcaattttcaaaaccaagaagcgcacctactgaaaaaaaagatggaaaagaattaccaagctatttaggcgataacattaatggaatggaatttacagaaaaagctagaattccagatgctaaaagattatttagagcctactctcaatctgcatcgactttaaatttattaagagctttttcgcagggaggatttgccgatttaaggcaagttcatttatggaatttgggatttatcaaagacaaaactaaaggtaagtacaaagaaatagaggataagataagtgatgcccttgcttttatggaagcgtgcggaattaattctgacaataatcgaagattaagatctgttaatttttatacatctcatgaggctttacttttaccctttgaagaatctatgaccagagttgactcaactacaggtgaataccatgatacttcagcacattttgtttggataggtgataggacaagacaacccgacgg

SEQ ID NO: 242257 - DNA, 760 bp, Unknown
  Bacterial polypeptide expressing nucleotide sequence isolated from the Sargasso Sea
tatgaaaaattggaaagtaaatagttggagaaagtatcctgtcaaacacatacctacgtatggtgatgagaaggaacttaatagtgttttaaataagttaaaaacatttccaccacttgtgtttgcaggtgagaccaggcatcttaaagatcaacttgcaaaagtagttgatggtaaagcttttttattacaaggtggagactgtgcagagagttttgcagaatttcatcctgacaatataagagatacttttaaagtaattcttcaaatggctttagtgatgacgtactcagcatctttaccaattgtaaaacttgggagaatagcaggacaattttctaagccaagaagcgcgccaactgaaaagcagggtagtgtagaactgccaagttatttaggtgataatatcaatgcaatagattttaatgaaaaagctagaagacctgatccaaagagaatgtttaaagcgtattctcaatcagcatctacattaaatcttttaagagctttttcaaaaggtggttttgcagacttaaacaaagttcatttatggaacttagattatattaaaaaaagtcctcaggctaaaaaatttaaagatctagaagataaaatagcagacgcattagcatttatggaggcatgtggaataacttcagattttaataatagattatatactgtaaatttctggacatcacacgaagcattacatttaccatttgaggagagtatgactagagtggactctaccactggt

SEQ ID NO: 242258 - DNA, 676 bp, Unknown
  Bacterial polypeptide expressing nucleotide sequence isolated from the Sargasso Sea
atgaaaaattggaaagttaatagttggagaaaatatcctgtcaagcacatacctacgtatgatgatgaaaaggagcttaataatgttttaaataaacttaaaacatttcctcctcttgtatttgctggtgagactagacatcttaaagaacaattagctaaagtagtagatggtaaagcttttttacttcaaggtggagattgtgcagaaagttttgctgaatttcatcctgataatattagagatacttttaaagttattcttcaaatggctttagtaatgacttactctgcctcagtaccaatcgttaaattaggaagaatagctggtcagttttcaaaaccaaggagtgctccaacagaaaaaataggggacaaggaattaccaagttatttaggtgacaatattaatgcaatagatttcactgaaaaagcaaggagatatgatccaaaaagaatgtttagagcttattcacaatctgcttcaacacttaatcttttgagagctttttctaaaggtggttttgcagacttaaataaagttcatttgtggaatttagattatattaaaaaaagtccacaagctaaaaaatttaaagatttagaggataagatagctgatgctttagcattcatggatgcttgtgggattacttcagattttaataatagaatgt

SEQ ID NO: 242259 - DNA, 850 bp, Unknown
  Bacterial polypeptide expressing nucleotide sequence isolated from the Sargasso Sea
aatggctttggttttatcatcttctgcatctctacctgtagttaaagtaggaagaatagctggacagttttctaaaccaagaagttctcccatcgaaaataagaatggcaaagaattaccaacttatttaggagacaatataaatggtatcgaatttaccgaggaggctcgtaaacccgatgcgaagagattatttagagcttactcacaatctgcctcaactttaaatttattaagggcattttcacaagggggttttgcagatttacgccaagttcatttatggaatcttggttttgtaaaaggaagtcctcaaggaaaaaaatataaagaagtagaagataaaattagtgatgcattatcatttatggaagcgtgtggtataaacgctgacaataatagaagattgagaacagtaaacttttatacttcccacgaagctctacttttgcctttcgagcaagcaatgacaagaatcgactcaacaactggagagtatcacgatacatcagcacattttgtttggattggagacagaacaagacaattagatggaggccatgtcgaattttgtagaggaataaaaaatccaataggcctgaaatgtgggcccacacttaaacccgaggaattaataaaattatgcaataaactgaatccacaaaatgaacccggaagattaactttaatttctagattcggagcagataatgttgataaatttttacctaaattgataagatcagtaaagaaagagggattaaatgtgatttggtcttgtgacccaatgcatggaaataccttggtatctaccacaggttttaaaacaagaccttttaataatatagtt

SEQ ID NO: 242260 - DNA, 903 bp, Unknown
  Bacterial polypeptide expressing nucleotide sequence isolated from the Sargasso Sea
gtcattttccaaccaagaagtgcaccaacagaaaaacaaggagacaaagaattaccaagttacttggggtgataatataaatgctatagaattcaatgaaaaagcaagaaggccagacccaaaaagactatttaaagcttactcgcaatcagcttcaactttaaatttattaagagctttttgtcacggaggttttgcagatttaaaaaaagtacatctctggaatttgggttatattaaaaaatcccctcaagcaaaaaaatttaaagaattagaagataagatagcagacgctttagcatttatggatgcctgtggaattaatgctgattttaatagaagattaaaaacagtaaacttttggacatcacacgaagctttattattaccatttgaagaatctatgactcgagtagactctacaacaggagaatatcatgatacatctgctcattttgtttggataggcgatagaacaagacagttagatggtggacatgtagagttttgtagaggtattgaaaatcctattggcattaaatgtggtccaacatctaaacctgacgaaatcgttaaaatttgtaatttaatcaatcctaaaaatgaaaaaggtaaaataactttaatttcaaggtttggacatgaaaatgttgaaaaatttttacctaaattaataagaataattaaaaaagagggtattaatgttatttggtcatgcgaccctatgcatggtaataccataaaatctacaactggttttaaaacaagaccatttaataatgttttaaaagaagttaaaaacgtttttggtgttcatcaaagcgaaggatcatatgctggtggattgcacatagaaatgacaggtcaaaatgttacagaatgtacaggcggtactcaaaaaaa

SEQ ID NO: 242261 - DNA, 526 bp, Unknown
  Bacterial polypeptide expressing nucleotide sequence isolated from the Sargasso Sea
atgaaaaattggaaagttaatagctggagaaaatacccagtaaaacatataccggaatatccggataaaaaagaattggatcaagttttaaataaaattaaaacctttcctcctcttgttttcgctggtgaaactagacatcttaaacaacaactcgcagaagttgtcgatggtaaagcatttttattacaaggtggtgattgcgcagaaagttttgcagaatttcatcctgataatatcagggatacatttaaattaatgctgcaaatgtctctagtattaacttactcggcatcattgccagttgtaaaattaggaagaattgcaggacagttttcaaaaccaagaagttcaccagttgaaactaaagacggtgtagagttaccaagttacttaggtgacaatataaatggaattgaatttaaggaaaaagcaagagtgccagatcctaaaagattatataaagcgtattctcaatctgcctctactttaaatcttcttagagcattttctcatggaggttttg

SEQ ID NO: 242262 - DNA, 751 bp, Unknown
  Bacterial polypeptide expressing nucleotide sequence isolated from the Sargasso Sea
caatttgcaaaaccacgaagtgcgcctaaagaagaaataaacggtgttgagttagatagctataagggtgacattataaatgatatggactttactgaagatgcgagagttcccgaccctgatcgaatgatcagagcatacacacaatcagctgctacactaaatttattaagagcttttgctaaaggtggattttcagatttaaataaagttcatcaatggaatatgggatttgtagatgaaagttctcaaggaaagaaatttagagaactagcgaataaaatctcggacacactttcttttatggaagctattggaatttcatcaagaaacacaaaacgtttaagaagcgttgacttctttacaagtcacgaggctctattgcttccttatgaagaatgtctgacgcggcttgatagtacatcaggtgaagtttatgacacatcagctcacatggtttggattggtgatcgaaccagacagcctgatggagcacatgtagaattctgcagagggattaaaaacccaattggaattaaatgtggaccatctttagatcctcaggagttgaaaaagcttcttgatattctaaaccctgagaatgaggctggaaaaataacattaatttgtcgatttggttctgagactataaatgaaaagttaccgaagcttatacaaccgttcttaaattcagatcataatttagtttggtcttgtgatccaatgcacggtaacaccatgaaagctaatt

SEQ ID NO: 242263 - DNA, 802 bp, Unknown
  Bacterial polypeptide expressing nucleotide sequence isolated from the Sargasso Sea
atgaaaactcaatggtcaccaagctcatggcgttcaaagccagctaaacatcttccgatttataatgatgaagtttttttaaaaaaatcattagataaaattaaaaattttcctcctttagtatttgcgggtgaagcgagatcattaaaatctaaacttgctgaagtttcaaaaggtaaagcctttttattacaaggtggtgactgtgctgaaagctttgctgaatttcatccagataatattaaaaatacttttaaggtaatactacaaatggcagttgtattaacttttggagcatcttgccctgttgtgaaagttggaagaattgctggtcaatttgcaaaacctagatcatcagataaggaaaccataaatggggtagagttggaatcatataaaggtgatataatcaatggaattgattttacagaagctcaaagattgcctgatccatcaagacttatccaagcttataatcaatcagcttcaacattaaatttattaagagcattttctcaaggaggttatgccaatcttaataaaattcaccaatggaatttaaattttcttgaagaagaaaacgctaataaattttctgagatagcagataggattgatgaatgtttaggtttcatgaaagcatgtggaataaatgacaaaaatgttaggcaaataaatgaaacagagttttttactagtcatgaagcacttttattagaatatgaagaagcacttactagaatagatagtacttctggtaaatggtatgatgtttctgcacatatggttatgggtgggtgat

SEQ ID NO: 242264 - DNA, 821 bp, Unknown
  Bacterial polypeptide expressing nucleotide sequence isolated from the Sargasso Sea
tttgccagagtataaagacaaaaaagagctggatttagtattaagcaaagtatcaaaatatccacctttagtatttgcaggtgaaacaagatccttaaaaaagtctctagcagatgtagttgaaggaaaagctttccttcttcagggaggagattgtgctgaaagttttgcagaatttcatccggataatattcgtgatactttaaaagtaattttacaaatgtctttagttctaactgcttcagcgtcagtgccagttgtaaaagtaggtagaattgcagggcaattttcaaaacccagaagttcaccaacagaaaaaaaagatggcaaagagcttccaagttatttaggtgataatattaacggtatggaatttagtgagaaagcaagactaccagatgctaaaagattatttagagcttattctcaatcagcttcaaccttaaatttattaagagctttttcacaaggaggttttgctgatttaaggcaagtgcatttatggaatttaggttttattaaagataaaacaaaaggaaaatataaagagatagaagacaaaattagcgatgcattaagcttcatggaggcgtgcggaataaattctgacaacaatagaagattaagaacagttaatttttatacatctcatgaagctttacttttaccttttgaagaagctatgactagagttgactccacaacaggtgagtatcatgatacatcagctcactttgtatggattggggatcgtactagacaacttgaaggtgctcatgttgaattttgtagaggtataaaaaatcctttgggattaaaat

SEQ ID NO: 242265 - DNA, 613 bp, Unknown
  Bacterial polypeptide expressing nucleotide sequence isolated from the Sargasso Sea
atgaaaaattggaaaataaatagctggaggaagcatcctgttaaacatattcctgaatatgaagataaaaatgaattggagatggttttaaataagttaaaaacttttcctccgctagtatttgcaggtgaaacaagacatttaaaagatcaattggcaatggtcaatgatggaaaagcatttttattacaaggtggtgattgtgcggaaagttttgcggaattccacccagataatattagagatacttttaaggttattcttcaaatgtcactggtgatgacctactcagcatccctacctattgtgaaacttggaagaattgctggacaattttcaaaaccaagaagtgctccaactgaaaaacaaggtgataaagaattaccaagttatttgggagataatataaatgcaatagattttaatgaaaaagctagaagacctgatccaaaaagaatgtttaaggcttattctcaatctgcttcaactttaaatcttttaagagcattttcaaaaggtggttttgccgacctaaataaggttcacttatggaatttagattatatcaagaaaagtccacaatctaagaaatttagagagttagaagataaaa

SEQ ID NO: 242266 - DNA, 571 bp, Unknown
  Bacterial polypeptide expressing nucleotide sequence isolated from the Sargasso Sea
gtgctgttggtgcagaaccacagaaagtcaaagtcatcgagaattggcctcaggattatcctgtcctgtagggtttaaaaatggtacggatggaggaatacaaatagccatagatgcgattaaagcagcaagtaaaaagcataactttttatcagtcactaaagaaggaaagtcagcaatcttctcgacaactggaaatagagattgtcatataattttacggggtggtaaaagtacgaattatcaatctaaggatgtatctattgtatccgatgctttaataaaaaacgatttaccagttaacattatgattgatgctagtcatgctaatagtcaaaaagaccacacaaaacagagtgtagttgttagagacatagctgatcaaattattaataataatcaatcaatctgcggagtaatgctagaaagtaatttagttgctggacgccaagatattgctaaacctgctgatttaacttatggacagagtattacagatgcttgcatcggatgggatgaaactgaagaactaattatgatgttaaacaatgctattgaagataagtcatga

SEQ ID NO: 242267 - DNA, 778 bp, Unknown
  Bacterial polypeptide expressing nucleotide sequence isolated from the Sargasso Sea
atgattgattggaaaatagatagctggaggaaacttcctattaagcaagtgcccgaatatagtgatcttactaaagttactaagattgaaaaggaattatgtatcaggccacctttagtttttgctgaagaagctagaagattaagaaaaaggatggctgatgtagctgaaggtaatgcttttttattacaaggtggtgattgcgctgaatcttttgctgaacataacgctaataatataagagatagttttagagtattattacaaatggctgttgtacttacttttggatcagccttacctgttgttaaaataggaaggttagctggtcaatactctaagcctagatcatcaccctttgaagaaataaataatatctctttacctagttaccgaggtgatatggtaaatgatatggaatttgatagaaaagctagagagcctgatccagaacgccttcttcaagtttatgataagtctgcttcaactttgaatttattacgagcttttgcaagtggtggcatggcagatttaacaaagttgcacgaatggaacctagagtttgttagaggtactaaagaggcagaaaaatataaagagttggcagcacagataacttcttcacttgagtttatgaatgcttgtggtatgacacctgaaaatactgcccaacttcgtgaaactgaattttatacatcgcatgagggattgttacttaattatgaagaagcccttaccagaaaagacactatcacagaagagaaaggttggtttgcta

SEQ ID NO: 242268 - DNA, 856 bp, Unknown
  Bacterial polypeptide expressing nucleotide sequence isolated from the Sargasso Sea
catttgcccgactatccagatgctcaaaaacttgaggatactgaaaaacagttacgatcttatccaccacttgtatttgctggagaagctagagatctaaaacgtaatcttgctaaggtttctgaaggtaaagcatttcttttacaaggtggagattgcgctgaaagttttgatgatttcaatgcagattatattagagatacattcaaagtattactgcaaatgtctgttacattaactgctgcaggtaattgtcctgttgttaaagttggaagaatggcaggtcaatttgcaaaaccacgaagtgcacctaaagaagaaatcaatggaatagagttggacagttataaaggcgatattattaatgacatggactttactgaacaggcaagagttcctgatcccaatcgaatgatcagagcttacactcaatctgctgcttcacttaatttattaagagcttttgcaaaaggaggtttctctgatttaaataaagtgcatcaatggaatatggggtttgttgatgaaagtcctcagggaaagaaattcagagaacttgctgataaaatttctgatactatttcgttcatggaagctattggcatttcatcaagaaatacaaagagattaagaagcgttgatttctttacaagtcatgaagcacttcttttgccttatgaagaatgtcttactcgattagatagcacaacaggggaggtttatgacacttccgctcatatggtgtggattggtgatcgtactaggcagcctgatggagcccatgttgagttttgcagaggaatcaaaaatccaattgggataaaatgtgggccatctttagatccagaggaatgaa

SEQ ID NO: 242269 - DNA, 941 bp, Unknown
  Bacterial polypeptide expressing nucleotide sequence isolated from the Sargasso Sea
tatgtatgaggacgaaaaggaactaaatagtgttttgagtaaattaaaaacatttcctcctttagtatttgcaggtgaaacaagacatttaaaagatcaattagcaaaagttgtggatggcaaagcttttctacttcaaggaggagattgtgcagaaagttttgcagaatttcatccagataatattagagatacttttaaggtgattcttcaaatgtctttgatattgacatattctgcatcattaccagttgttaaactaggaagaatagctggtcaattttctaaaccaaggagcgcaccgactgagaaacaaggcaataaagagttaccaagttatttaggtgacaacataaatgctatagaatttacagaaaaagctaggagacctgatccaaaaagattatttaaagcttattcacaatctgcctcaacactaaatttattgagagccttttccaagggtggttttgctgacttgaacaaagttcatttatggaatttagattatattaaaaaaagtccccaagctaaaaaatttaaagatctagaagataaaattgctgatgccttagcattcatggaggcttgtggaataacttcagattttaataatagattatacacagtaaatttttggacatcacacgaagctttacatttaccattcgaagaaagtatgaccagagttgattctactactggtgaatatcatgacacttctgcacattttgtctggattggtgatagaactagacaattagatggtggacatgttgaattttgtaaaggaatagaaaatccaattggaattaaatgtggtccaacttcaaaacccgatgaaatagctaaaatttgtgaggtcataaatcccaaaaatgaaaaaggtaaaataactttgatatctagatttggtcataagaatgttgaaaaatttttac

SEQ ID NO: 242270 - DNA, 901 bp, Unknown
  Bacterial polypeptide expressing nucleotide sequence isolated from the Sargasso Sea
gcatcaactttgaacttgttaagagcattttcaaaaggaggttttgcagacttgaataaagttcacttgtggaatttagactatattaaaaaaagtcctcaagctaaaaaatttaaggatttagaggacaagatagcggatgcattagcattcatgtcagcatgtggaattacatcagattttaataacagattgtatacagttaatttttggacatcgcacgaggctttacatctgccttttgaggaaagtatgacgagaatagattcaacaactggagaataccacgatacatctgcacattttgtgtggatcggtgatagaactagacagctagatggaggccatgtcgagttttgcagaggaatagaaaatccaataggaataaaatgtggacctacaagtaaaccagaagaaatagtaaaaatttgcaacttaataaatccaaaaaatgaaaaaggcaaaattacactaatatctagatttggacacgactcagttgaaaagtttttaccgaaacttgtaagaaccattaagaaagaaggtttaaacgtaatttggtcttgtgatcctatgcatggaaacacgatcaaatctacaactgggtttaaaactagaccattcaacagagtcctaaaagaagtaagagatgtatttgccgttcatcaaagtgagggtacatacgcaggaggcttacatattgaaatgactggtcaaaatgtgacagaatgcactggtggtgcaagaaaaatttctgatgctgatttatcaagcagataccacactcattgtgatcctaggcttaatgcagatcaagccttagaattagcatttttaatatcagatgagattaaaaagaatagcagctattcgaaaaattctattcaagtggcatcttgat

SEQ ID NO: 242271 - DNA, 573 bp, Unknown
  Bacterial polypeptide expressing nucleotide sequence isolated from the Sargasso Sea
tatgaaaaattggaaaccaaacagttggagaaaatatcctgttaaacatgttccttcttatgaaagtgaaaaggaacttaatcaggtattaagtaaaattaaatcttttcctccactagtttttgctggtgagacaagacatcttaaagatcaactttcacaagttgttgatggaaaagcttttcttttacaaggaggagactgcgcagaaagttttgctgagtttaatcctgacaatataagagatacatttaaagtaattcttcaaatgtcattggtacttacgtactcagcttcgcttccaattataaagcttggaaggatagccggacagtttgcaaaacctagaagtgcaccaactgaaaagcaaggcaataaagaattaccaagttatttaggtgataacgtaaatggaattgattttactgaaaaatctagaagacatgatccaaaaagattatttaaggcatactctcaatctgcttcaacattaaatcttttaagagcattttctaatgggggttttgctgatttaaaaaatgtacacttatggaatttagggtacattaaaaa

SEQ ID NO: 242272 - DNA, 922 bp, Unknown
  Bacterial polypeptide expressing nucleotide sequence isolated from the Sargasso Sea
agaaagtatcctgtcaaacacataccaacgtatggtgatgagaaggagcttaatagtgttttaaacaaattaaaaacatttccaccacttgtatttgcaggtgagacaagacatttaaaagatcaattgtcaaaagtagttgatggcaaagcttttttattgcaaggcggtgactgtgccgaaagttttgcagaatttcatcctgacaatataagagatacttttaaagtaattcttcaaatggctttggtgatgacatactctgcgtctttacctattgtaaaacttggaaggattgctggacagttttctaaaccaagaagtgctccaacagaaaaacaaggtgatgtagaattaccaagttatttaggtgataacattaatgcaatagactttaatgaaaaagctagaagacctgatccaaaaagaatgtacaaagcgtattctcaatcagcttcaacgcttaatttacttagagcattttcaaaaggtggttttgcagatttgaacaaagttcatttatggaatttagattacattaaaaaaagtcctcaagcgaaaaaatttaaagatctagaggataaaattgctgatgcactggcttttatggaagcatgtggaataacttcagactttaataatagattatacactgtaaatttctggacatcacatgaagcgttgcacttaccctttgaggaaagtatgactagagtagactctactaccggtgagtatcacgatacatctgctcattttgtctggattggtgatagaacaagacagttagatggtggacatgtcgaattttgtagaggaatagaaaatcctattggaataaagtgtgggcctacttctaaacccgaggagattgcaaaaatttgtgaggtattaaatccaaaaaacgaaaaaggtaaaataa

SEQ ID NO: 242273 - DNA, 430 bp, Unknown
  Bacterial polypeptide expressing nucleotide sequence isolated from the Sargasso Sea
atgtggacattaaatagttggaaaaattataaagctaaacatcttccagaatacaaaaaccaaaagcacctagataaagtgctcacttctttaagagactttccccctttagtttttgcaggagaggttagatcgcttagaaattcactcgcaaaagcttctgagggtgaggcttttctattgcaagggggagattgtgcagaaagcttttctgaattcaatgctgataacataagagatacctttagagtaattttgcaaatggcgatcattctaacctctggtactaacctgccaattataaaagttggaaggatggctggacagtttgcaaaacctcggtctagtccaactgaaaaaataaatgatgttgagcttgaaagctataagggtgacattataaatggtattgaatttgataaatctcaaa

SEQ ID NO: 242274 - DNA, 882 bp, Unknown
  Bacterial polypeptide expressing nucleotide sequence isolated from the Sargasso Sea
gggtggagattgtgcagaaagttttgagcattttagtgctgatggtattcgcgatacttttaaagttatgctgcaaatggctatggtccttacctatggcgcaaaagttccagttgtaaaagttggtcgtatggctggacaatttgccaaaccgaggtcggctccgacggaaactattaatgacgtcgaattacctagctaccgcggagatatcattaacgagttagattttacccctgaagcaagaattccagatccatctaaaatgcttcaggcttacacccaagcagctgcaactttaaacttattgagagctttttcgaaaggtggatatgccgatgttcaccttgtccatggttggacacttggattcatagagggtgaaaaagcctctaaatatagggaaatggctaatagaattagtgatgctctagattttatgaaagctgcaggcttaaatagtcatttatcaaatgaactgcgaacagtggatttttatacaagccatgaaggtttgcttttggagtacgaagaggctcttactcgactagactcgacgtctggtaattggttagctggctctggccacatgatttggataggcgatcgaacgagacagccagatggcgctcatgtgaatttttgtagcggtgtcttaaatcctattgggctaaaatgtggccctacaatgactgaggatgatttaaaaaagttgttggacaaattaaatcctgagaatgaagcaggaaaacttacactgatcgcacgctttggtgcaggaaaagttggagatcatttgccgcgcttgattaaagtagtcaaagaaagcggtagtaatgttgtatggacctgtgatccaatgcacggaaatacatttaaatc

SEQ ID NO: 242275 - DNA, 724 bp, Unknown
  Bacterial polypeptide expressing nucleotide sequence isolated from the Sargasso Sea
ggcgatataataaatggcatagattttaatgagaaagataggaatcctgatccagatagacttatacaagcatacaatcaatctgcagctactctaaacttattgagagctttttctcaaggaggctttgcaaatttaaataaaattcatcaatggaatttaaattttgttaaagatgaaaacgcaactaagtttagagaaatttcatcaagaattgatgagtgtctttcttttatggaggcatgtggaattaatggaaaaagtgtgagacaattaaatgaaacagatttttttactagtcacgaagcattacttcttgaatatgaagaagcacttacaagaattgatagtacttcaggtaaatggtacgatgtttcagctcatatgttgtgggtaggggatagaacaagacagttggagggtgctcatattgagtttttaaaaggaattgagaatcctctaggcattaaagttggtccaagtactgatacagatgagcttcttaaaattttagatttattaaatcctaataatgaatctggaaaaattacacttatatgtagaatgggccatgaaaaagtagctgggatacttccaaaaataatacaatctaccaaaggttcgggtaaaaatgttgtttggacttgtgatccaatgcatggaaacactattaaatctaaaaagggttttaaaactaggccactaaaagatatcatttcagaaa

SEQ ID NO: 242276 - DNA, 907 bp, Unknown
  Bacterial polypeptide expressing nucleotide sequence isolated from the Sargasso Sea
aaggtgatattgcaaatgtcattaattttaacatactcagcgtctttgcctgttgtaaaactaggtaggatagcaggacagttttctaagccaagaagcgcaccaactgaaatacaaggtggtaaagaacttccaagttatcttggtgataatattaacggaattgaatttacagagaaagcgagaaaacctgaccctaaaagattattcaaagcttattctcaggctgcttcgactttaaatttattaagagctttcgcaaaaggaggttttgctgatttaaataaagttcatttatggaatttggattatataaaaaaaagtccccaagcaaaaaaattcaaagatctagaagataaaattgctgatgctttagcatttatggaagcatgcggtattacttctgattttaataatagattatacactgttaatttttggacgtcacacgaagctttacttttgccttttgaagaaagtatgactagagttgactcaacaacaggagaatatcatgatacatctgcacattttgtttggataggtgatagaactagacaattagatggtggtcatgttgaattttgtaaaggaatacaaaatccaattggaattaaatgtggcccaacatcaaaacctgatgaaattgcaaaaatttgtaatgttttaaatccaaataacgaaaaaggaaaaattacattaatttcaagatttggtcatgaaaaagttgagaaatttttaccaaaattaattagaggcataaaaaaagaaggactaaatgttatttggtcttgtgatccaatgcatggtaatacaattaaatctacttcaggttttaaaactagaccttttaacaatgttgtttcagaggtaaaaaatgtttttgcagtgcatcaaagtgaaggct

SEQ ID NO: 242277 - DNA, 721 bp, Unknown
  Bacterial polypeptide expressing nucleotide sequence isolated from the Sargasso Sea
aatgagcttagaagtgtggcagacagatagttggcgtaattatacagccaaacatatccctgattatccagataaagatgatttaaacactgtggaagacacccttaaaggttttcccccacttgtttttgcaggtgaggttcgctcacttcgaaaagctttatctgaagtttctgaaggaaatgggttccttcttcaaggcggggattgcgctgaaagtttttcggaatttagtgctgataatattcgagacacttttagagtcatactgcaaatggctgttattttgacctctggtattaatacacctgtaacaaaagtcggtagaatggctgggcaatttgcaaaaccacggtcaaagccaacagaaacaattaatggtaaagcactacctagctatgcaggtgatataataaacgatattcagtttaatgatgaaaagcgtattccagacccacaacgccttttaaaagcatattcccaagcagcatccacactaaacctgttgagggcattcgctgatggcgggtatgctgatcttcgtcatgtgaattcttggaatatggggtttgtaaaaagcggacctcagggtgaaaggtatagacatttagcaaatcaaatacaagatagtctaaacttcatgcaagcattaggagtgacatcaaataacacaccccaactaaggaaggtgtctttctatacaagccatgaagcattacta

SEQ ID NO: 242278 - DNA, 781 bp, Unknown
  Bacterial polypeptide expressing nucleotide sequence isolated from the Sargasso Sea
aatatacatattgcagatattacccccatcatctctcccgatgaattaaaatcaaccgtcaaaatttcatctgaaacgtccgagtttgtcatcaactcccggaatgaaatatccaatattttaaccaataaagacaaccgcttaatggtaattgttgggccatgctcaattcataatccagatgcggcattggactatgcaaaaaaactcgctccactcaaacaaaaataccaagataaactcatgatcatcatgcgaacttattttgaaaagccacgaaccaatattggatggaaagggctcattaatgaccctgaattaaacggaaaaaacaacatccaacaaggccttaaagatgcacgaaaattaatgctcgagatcttaaaacttggcttacccacaggaagtgaattactagaccccatacttccccaatattatgcggacttgatctgttgggcatccattggtgccagaaccagcgagtctcaaacacaccgagaaatggcgagtgggttatccatgccaattggatttaaaaatgcaaccgatggcaatattgatgtggccattcatgccatccaagccgcgcaacacccccacgcattcattggtgtcactcaagatggcaccattgcacgggttgaatcaaacggaaacccccatgcccatttaattattcgagggggtgccaacgggccaaactactcttccgttcaaatggaagagcacaaagaaaaaatcgaacaatccaaaatagacacccgtattttggtggatt

SEQ ID NO: 242279 - DNA, 876 bp, Unknown
  Bacterial polypeptide expressing nucleotide sequence isolated from the Sargasso Sea
tggagtttactgaaaaagcaagaataccagatgcaaaaagattattccgagcatattcccagtctgcttcaactttaaatttattaagagccttctctcaaggtggttttgcggatcttagacaagttcatttatggaatttaggttttattaaagataaaactaaaggaaaatataaagaggtagaagataaaataagtgatgcgcttgcttttatggaggcttgtggaataaactcagacaacaatcgtagattaagatctgtaaatttttatacatctcatgaagccctacttttacctttcgaggagtcaatgactagaatagactcaactactggggagtatcacgatacgtcagcacattttgtttggataggagatagaacaagacaacctgatggagctcacgtagaattttgtagaggtattaaaaatccaataggattgaaatgtggaccaacattaaaaccagaggagcttataaatttgtgcaatattcttaatccagataatgaaccaggaaggttaaccttaatatccagatttggcgcagacaatgttgaaaaatatttaccaaaattaattaaggtagttaagaaagaaggtttaaaagtagtatggtcttgcgatcctatgcatgggaacactattaaagctgctactggttttaaaaccagaccttttgagagcgttcttaaagaggtcaaaaatttctttgcagtaagccagaccgaaggaagttatgcaggcggattacatatagaaatgactggccaagatgtgacagagtgtactggtggagcccaaaaaatatcagaaaatgatttgtctaatagatacaggactcattgtgatccaaagattaaatgctgat

SEQ ID NO: 242280 - DNA, 552 bp, Unknown
  Bacterial polypeptide expressing nucleotide sequence isolated from the Sargasso Sea
tatggattacagaactgataatacgagaatcgtagagagactagaaatagtctctccaaacaagctattgggtgaacttccaatcacaaatgatgtttccagccttgtttatggtacaagaaatgaaataagttctattttacatggtagagatgatcgcattcttgtggtttgtggcccttgctcaattcacgatcctaaatctgcaaaagagtatgccttaaggctcaaagaacaatatgaagtccttggcaaagaattattaattgtgatgagggtttattttgaaaaacctagaacaactgtgggttggaagggtatgattaatgatccagacataaacgaaacatacgatataaataaaggtattcacttagcaagatcgttgcttttagagtttggaaaaatgggattaccttgtggaactgaattcttagatcttattagtcctcaatatgttgcagatcttatttcttggggagcaattggagcaagaaccgcagaaagccaaactcacagggagcttgcttctggtatgtcatgtccaatagg

SEQ ID NO: 242281 - DNA, 919 bp, Unknown
  Bacterial polypeptide expressing nucleotide sequence isolated from the Sargasso Sea
aatcaagaaatactaatcactccagaagaactgaaacgccagctacctgcgacggaggaagtgaaacgggggatatcccaaaatagggaaattgtaagatctattatcgacggtacagacagacgtttactcctagttgttggcccgtgttcgattcacaacccgagagaagctattgattatgcagagagactcaaggcgctaagcgaatcggttaatgacaagctatttatagtcatgagagcctacttcgagaaaccaagaagtacggtcggctggaagggcttaatcaatgaccctcatctagatgacagtttcaagattgccgaaggactcgctatggccagaaagcttttacttgaaatatcaaagctgggcttgcccttagccaatgaagcacttgatccgattactccccagtatctgcaagaactcttctcctggactgcaatcggcgcaaggacgtccgagtcacaaacacaccgagaaatggcctctggtctcagctgcccggttggcttcaaaaatggaactgatggatcgttggatgttgccttgaacgccctgcaatccgtaaaaagtcctcaccgtttcttgggtatcagcccagatggtaaggtcagtatcgtaacaacaaaaggcaatgcgcatgctcacgttgttttgcgcggtggaacaaatgggccaaactactacccagaaaatatagcggtatgcgaggaagagctggagagcatcggggcaacccaagcgatcatggtggattgctcgcatgcaaattcaaataaagatcatacgaagcagggctctgttctggaagctgtcgctgagcaaataagcgtcggcaataaatcaataagaggcgtaatgctagagagcaaccttaacccagggaatcagaaagtagatagtctcaaga

SEQ ID NO: 242282 - DNA, 676 bp, Unknown
  Bacterial polypeptide expressing nucleotide sequence isolated from the Sargasso Sea
atgaaaaattggaaagtaaatagctggagaaagtatcctgtcaaacacataccaacgtatggtgatgagaaggagctaaatagtgttttaaataaattaaaaacgtttccgccacttgtatttgcaggtgaaacaagacacttaaaagatcaattatctaaagttgtcgatggcaaagcttttttattgcaaggtggtgactgtgctgaaagttttgcagaatttcatcctgacaatataagagatacttttaaagtaattcttcaaatggctttagtgatgacatactctgcatctttacctattgtaaaacttggaaggattgctggacagttttctaaaccaagaagtgctccaacagaaaaacaaggtaatgtagaattaccaagttatttaggtgataacattaatgcaatagactttaacgaaaaagctagaagacctgatccaaaaagaatgtataaagcatattctcaatcagcttcaacgcttaatttacttagagcattttcaaaaggtggttttgcagatttgaacaaagttcatttatggaatttagattatattaaaaaaagtcctcaagcaaaaaaatttaaagacctagaggacaaaattgctgatgcattagcttttatggaagcatgtggaataacttcagactttaataatagattat

SEQ ID NO: 242283 - DNA, 685 bp, Unknown
  Bacterial polypeptide expressing nucleotide sequence isolated from the Sargasso Sea
aatgaaaaattggaaaataaatagctggagaaaatatcccgtaaaacatattcctcaatatgatgatgaaaaggaattggaaatggttttaagtaaattgaaaacctttcctccactagtttttgcgggtgaaacaagacatttaaaagatcagttagcaatggtaaatgatggaaaagcgtttctattgcaaggtggtgactgtgcagagagttttgcggaatttcatcctgacaatataagagatacttttaaggttattcttcaaatggcattagtgatgacttactcagcatctttaccaattgtaaaacttggaagaattgctggacaattttcaaaaccaagaagtgcatcaactgaaaaacaaggtgataaagaacttccaagttatttgggagataatataaatgcaatagattttaatgaaaaagctagaagacctgatccgaaaagaatgttcaaggcttattctcagtctgcttcaactttaaatttgttaagagctttttcaaaaggtggttttgctgacttaaataaggttcatttatggaatttagattatattaagaaaagtccacaagctaaaaaatttaaagagttagaagataaaatagcagatgcattagcttttatggatgcttgtggaattacatctgattttaatatagattatatactgtaa

SEQ ID NO: 242284 - DNA, 693 bp, Unknown
  Bacterial polypeptide expressing nucleotide sequence isolated from the Sargasso Sea
tatgaaaaaatggaaaataaatagttggagaaattatcctgttaaacatattcctgagtatgaggatcagggtgaattagatttagttttaagtaaattaaaaaattttcctccattagttttcgcaggcgaaactaggcatttaaaagatcaattagcaaatgttacagatggaaaagcttttttgttgcaaggaggtgattgcgccgagagttttgctgaatttaatcctgacaatattagagattatttcaagttaatgcttcagatgtctttagtattaacatattcagcttccttacctgttgtaaaattaggtagaattgctggtcaattttcaaaacccagaagtgctcctacagagaaaataggtgatacagaactaccaagttatttaggtgacaacataaattcaatagaatttacaaaaaaagctcgagtaccagatccaaaaagactttttagagcatattcacagtccgcttcaacattaaatttattaagagcattttcaaatggcggattcgcagatttaaaaaatgttcacatgtggaacttaggttatattaaatcagcaacacaggctaaaaaatttaaagagttagaagataaaattgcagatgctctagcttttatggaggcttgtgggataacttcagattttaatagaagactatatactgtaaatttttg

SEQ ID NO: 242285 - DNA, 1084 bp, Unknown
  Bacterial polypeptide expressing nucleotide sequence isolated from the Sargasso Sea
atggatgaagtttggaaaaaatcctcttggagaattaaaaaaaagcatcaaatgcctgattatgaagacaaagatcaacttaataaagttgtaaattcactttgtagccttcctccacttgtatttgctggtgaagttagaaacctaaaaaatgatttagcaaaggttgaatctggaaaggcttttttattgcaaggtggtgattgcgctgaaagttttgaagaattctcagctgatttaattagggatacttttaaagtattattaaaaatggcagtggttttaacttttgggggtaaaaagcctgttgttaagataggtcgaatggctggtcaatttgcaaaacccagatcatctgattttgaaattataaatggtcaaaagctaccttcatatcgaggtgatataattaatgacatttctccaacagtaaaagatagaattcctaatcctgaaaggatgttgaaggcttacactcaatcttccgcttctctaaatctacttagagcttttagccaaggtggttttgctgatataagcagagtacattcttgggttttagaaagtacaaaaggagaagatggatataaaaaattctttgaattagcaacaaaaataacaaatgctttagaatttatgagcgctgctggagtaaattcaaataattcagattctttgagtaaagttgatttttataccagtcatgaagcactattactagaatatgaggaagctctttgtagagaagatagcacaactggtttgcctttagcaggatctggccacatgatatggataggggatagaactagacaaattgatggtgcgcatgttgaattttgtaaaggagtacaaaatccaatcggtcttaagtgtggtccatctctagatccagatgaattagttcatctttgtcaaattttaaatccgaaaaatgaacctggcaggcttacactaattactcgttttggttctgataagattgccgatcatcttcctaaaattataaaggcagtaaataatgcaaaattaagaacagtatggtgttgtgatcccaatgcatggaaacacaatcaaatctcaa

SEQ ID NO: 242286 - DNA, 739 bp, Unknown
  Bacterial polypeptide expressing nucleotide sequence isolated from the Sargasso Sea
ggcatcacgccagaaaatgcaaggccacttaccgagaccgaactatatactagccacgaagctttattgcttggctacgaagagtcgctcacccgccgtgatactataaccgaacagcacggatggtatgcaacctcggcgcatatggtgtggattggtgatagaacccgccagcccgatggtgcacatgttgaatatatgcgtggcatttcaaacccgattgggttgaaatgcgggccgtcgcttgatcctgacgaactggtccggctgactgaaattttgaacccagacaatattgctgggcgcttaacattgattgtacgtatgggcgctgacaaggtgcggacaggcttgccgcctttgctgaaggctgtacaaaagtcaggggcgaatgttgtgtggtgttgtgatccaatgcatggcaatacaattaaggcaagctctggctataaaacacgccgggtggatgatgtgatggctgaggtcaccgggttttttgatgcgcatgacgatgtcggcacttatccgggcggtgtgcattttgaaatgactggccaaaatgtgactgaatgtgtcggcggcgttgttgatgtgaccgaagccagcctcggcgatcgctatcatacccattgtgacccccgtatgaatggcgcgcaggcattggagctagcctttttattggctgatttgctgaaacgacggcgtggcggacggtcggttttgtccgaggcagtataat

SEQ ID NO: 242287 - DNA, 943 bp, Unknown
  Bacterial polypeptide expressing nucleotide sequence isolated from the Sargasso Sea
atgaagaaatggtctgttaacagttggagaaattacgaggctaagcatttgccagagtatccagatgtgaagaaattagaaaaaactgaggatcagttaagatcttacccgccgcttgtttttgcaggtgaagcaagagatttaaaaagaaatcttgctaaagtttcagagggtaaagcatttttgctgcaaggtggtgattgcgcagaaagttttgatgatttcaatgcagattatataagagatacatttaaagtattattgcaaatgtcagtcacattaactgctgcaggtaattgccctgtcgtaaaagtcggaagaatggcaggtcagtttgcaaaaccgcgaagtgcacctaaagaagaaatagatggcgttgagttagatagttataagggcgacattataaatgatatggattttactgaagatgcgagagttcctgatcctgatcgcatgatcagagcatatactcaatcagctgctacacttaatttattgagagcttttgctaaaggtggattttcagatttaaataaagttcatcaatggaatatgggatttgtagatgaaagttctcaaggaaagaaatttagagaattagcgaataaaatctcagacacactatcttttatggaagctattggaatttcttcaagaaacacaaaacgtctaagaagcgttgacttctttacaagtcacgaggctttattgcttccttatgaagaatgtctgacgcgactagatagtacatcaggtgaggtttatgacacatcagcccatatggtttggattggtgaccgaaccagacagcttgacggagcacatgtagaattttgcagagggattaaaaatccaattggaattaaatgcggaccatctttagatcctgaggaattgaaaaagcttcttgatattctgaaccctgagaatgaggctggaa

SEQ ID NO: 242288 - DNA, 1375 bp, Unknown
  Bacterial polypeptide expressing nucleotide sequence isolated from the Sargasso Sea
tctgaaggattggacgccgtcgtcgtggcgccagaggaaggcgttgcagcagccgatgtacgaggacgaggcggagctggcggaggcgctggcgacgatccaaaaccggcctccgttggttttcgcgggggaatcgagagatttgcaagaaaagctcgcgaatgcggctgccggtaatgcgttcgtgttgttcggtggtgattgcgcggagagcttcaaggagttcaaggcggataacgtgcgggacacgtatcgcgtcttgttgcaaatgtccgtcgtgttgatgtacggctcgggcgtgcccgtggtgaagctcggtcgcatggccggtcaattcgccaagccgcgctccgaagatttcgaaacgatcgacggcgtgtctttgccctcgtaccggggcgataacatcaacagctgtgagttcacgccggaggctcgactaccggatccggagagactcatcaaaggctacgatcagtcgtgcgcgacgctcaacctgttgcgcgctttcagcaacggtggttacgccgccatgacgcgcgtgagcgattggaacttggatttcatgaccaacacgtccgaaggtcaccaatacgaagacctcgcgcagcgcgtcgacgccgccatcgactttatggcggcgtgcggcatcgacgaacaccacccgacgatgcaagagacgtccttttacacggcgcacgaagcccttcacttgggctacgaagaggcgctcacgagacaagattccacgaccgaggattattacgggtgctccgcgcacttcttgtggtgcggtgagcgcacgcgccaaccggaaggtgcgcacatggagtacttccgcggcatctccaacccgatcggaatcaagatctccgacaagagcgacggcgaaggtgtcgtcagcctcgtcaagacgctgaacccggacaatattccgggtcgcatcaccctcgtctcgcgcatgggcgcggccaagttgcgtgagcaccttccgcgtctcatctccgccatcgaagacgccgggttgaacgtcttgtgggtcacggatccgatgcacggaaacaccgtcaagacggacaacggctacaagacgcgtccgttcgaggccgtgcgagacgagatcatggcattcttcgaggtgcatgagaagatgggcacgcacccgggtggggttcacttagaaatgaccggtcagaacgtgacggagtgcacgggtgggtacatggacgtctccgtcgaagatttggagaagcgttacctcacgcactgtgatccgcgtctcaacgcgagtcaagccatcgagctcgccttcttgatggctaacgagttgaatgacatgcgtcgccgtcgcgcgaacggtaccacgccgcgttaa

SEQ ID NO: 242289 - DNA, 1122 bp, Unknown
  Bacterial polypeptide expressing nucleotide sequence isolated from the Sargasso Sea
tatgaaaaaatggaaaacaaatagttggagaaattatccagttaaacacattcctacttatgaggatgaaaaagaacttaatatggttctaggaaaaataaaaaatttccccccattagtatttgctggagaaacaagacacttgaaacaacaactagctgatgttgttgatggaaaagcttttttattgcaaggaggtgactgcgcagaaagttttgtagaatttaatccagataatattagagactattttaaagttatgttgcaaatgtcacttgttttgacttattctgcttccttaccagtagttaagcttggaagagttgcaggtcaattttctaaaccaagaagcgcacccacagaaaagcaaggtgatatagaattaccaagttatcttggtgataatataaatggaatagaatttacagaaaaagctagaaaacctgatccaaaaagactgtttaaagcttattcacaatcagcatctactttaaatttaataagagctttttgtcatggtggatttgctgatttaaaaaaagttcatctttggaatttgggctatattaaaaaaagcccacaagctaagaaatttaaagaattagaagataaaattgcagatgctttagcatttatggatgcttgtggtataaattcagattttaacagaagattaaaaacagttaacttttggacatctcacgaagctttattacttccttttgaagagagtatgacaagaattgattcaacaactggagaatatcacgatacatcagcacattttgtatggataggtgatagaactagacagctagatggtggacatgttgaattttgtagaggaattgaaaatccgattggtattaaatgtggaccaacatcaaaaccagaagaaatagtaaaaatttgtaatgcaattaatcctaaaaatgaaaaaggaaaaataacattaatttcaagatttggtcatgaaaatgttggtaaatttttaccaaaattagttagaactatcaaaaaagaaggtttgaatgttatttggtcttgtgacccaatgcatggaaacacagttaaatcttctacaggtttcaaaactagaccatttaacaatgttctaaaaga

SEQ ID NO: 242290 - DNA, 1227 bp, Unknown
  Bacterial polypeptide expressing nucleotide sequence isolated from the Sargasso Sea
gaaaacaagaaggaattgaatatggttcttgataagataagaaattttcctcccttagtttttgctggcgaaacacgaactttaaaaaatcatttagctgatgtagttgatggaaaagcttttctgcttcaaggaggagattgtgctgaaagttttgctgaatttcatcctgacaatataagggacacatttaaagttattttacagatgtcattggtaatgacttattctgcttcggttccagtagtaaaagttggaagaatagcaggacaattttctaaaccgagaagctcacctactgaaataaaaaatggaaaagaattgcctagttacttgggagataatattaatggaattgaattttcagaaaaacttagaaaaccagatgctaaaagattgtttaaagcatattcgcagtcagcttctacattaaatttactaagagctttatcacaaggaggttttgccgatttaaataaagttcatttatggaatttaggatttttaaagaaaagccctgaagggaaaaaatttaaagaacttgaagacaaaatagctgatgcgttatcctttatggatgcttgtggaattaattcagattttaacaggagattaaaaactgtaaattgtttcacttcacatgaagcattgttattaccttttgaagaagcaatgacaagaatagattctactacaggaaagtatcatgatacttctgctcattttgtatggattggtgatagaacaagacaacctagcgggggacatgtagagttttgcagaggaattgaaaatccaataggaattaaatgcggaccaagtttaaaaactgatgaattaataaaactttgtaatatattaaatcctaaaaatgaaaagggaagaattacattaatttctagatttggtcatgacaatgtagaaaagtttttgcctaaattgattagagcaattaaaaaagaaggacataatgtagtttggtcatgtgatccaatgcatggaaatacaatcaagtcagctaacggatttaaaacaagaccttttaataatgttgtaaaagaagtgaaaaaagtttttgccgttcacaaagcagaaggaagttatgctggaggactacatattgaaatgacaggaaaaaatgtaactgaatgcacaggtggagctcaaaaaatatctgaaaaagatttatcacatagataccacactcattgcgaccctaggcttaat

SEQ ID NO: 242291 - DNA, 1381 bp, Unknown
  Bacterial polypeptide expressing nucleotide sequence isolated from the Sargasso Sea
tatgaaaaaatggaaaacaaatagttggagaaattatccagttaaacacatccctgcttatgaggatgaaaaagaacttaatatggttcttggaaaaataaaaaattttccaccgttagtgtttgctggagaaacaagacatttgaaacaacaactagcagatgttgttgatggaaaagctttcttattacaaggaggtgactgtgccgaaagttttgctgaatttaatccagacaatattagagattattttaaagttatgttgcaaatgtctttagttttaacatattcagcatccttaccagttgttaaacttggtaggatagcgggacaattttcaaaacccagaagcgcaccaactgaaaaacagggtgatatagagttaccaagctatcttggagataatataaatggaatagagtttaataaaaaagctagaagacctgatcctaaaagattgtttaaagcttattcacaagcagcatcaacactaaatttaattagagctttttgccatggtggatttgctgatttaaagaaagttcatttatggaacttagggtacattaaaaaaagccctcaagctaagaagtttaaagaattagaggataaaatcgcagacgcattagcatttatggatgcgtgtgggataaattcagattttaatagaagacttaaaacagttaacttttggacttctcatgaagctttattacttccttttgaggaaagtatgacaaggattgactcaacaactggagagtatcacgatacatcagcacacttcgtttggataggtgatagaacaagacaattagatggaggccatgttgaattctgtagaggaatagaaaatccaattggtattaaatgtggaccaacatcaaaaccagaagaaatagttaaaatttgtaatgctataaaccctaaaaatgaaaaaggaaaaataactttaatttcaaggtttggttgtgagaatgttggaaaatttttaccaaaattagttagaaatattaaaaaagaaggactaaatgtaatttggtcttgcgatcctatgcatggaaacacagttaaatcttctacaggtttcaaaacgagaccgtttaacaatgttctaaaagaagttaaaaatgttttcgctgttcaccaaagcgaaggatcttatgctggaggattgcatattgagatgaccggacaaaatgtcactgaatgtacaggagggacacaaaaaatttctgataaagacttatcaagtagataccgtacacattgtgacccaagattaaatgctaatcaagccttagaattgtcatttttaatttctgatgaaattaaaaaaaattccatttacgcacgaagtggaattagagcggtttcttaa

SEQ ID NO: 242292 - DNA, 712 bp, Unknown
  Bacterial polypeptide expressing nucleotide sequence isolated from the Sargasso Sea
catgaaaaattggaaagtaaacagttggagaaagtatcccgtcaaacacgtacctaagtacgatgatgagaaggagttaaataatgtcttggataaattaaagacatttcctcctttagtatttgcaggtgaaactagacatttaaaagatcaattggcaaaagttgtagatggtaaagcgtttcttcttcaaggtggggactgcgcagagagtttcgcagaatttcatccagataacataagagatacttttaaagtcattcttcaaatgtctttaatattaacttactcagcgtcactaccagtggttaagcttggaagaatagctggtcaattttctaaaccaaggagtgcacctacagagaaacaaggtaacaaagaattaccaagttacttaggtgataatattaatgctatagaattttctgaaaaaggtagaagagcagatcccaaaagattgtttaaagcttattcacaatctgcatctacactaaatttattacgagctttttctaaagggggttttgcagatttaaacaaagttcatttatggaatttagattatattaaaaaaagtcctcaagctaaaaaatttaaggatttggaagataaaattgctgatgctttagcctttatggaagcctgtggaataacttcagattttaataacagattatatactgtaaacttctggacatcacatgaagcttta

SEQ ID NO: 242293 - DNA, 1022 bp, Unknown
  Bacterial polypeptide expressing nucleotide sequence isolated from the Sargasso Sea
tgaagaatctttagcagaagttgttaaaggtaaagctttcttattacaaggaggagattgcgctgaaagttttgaagagtttaatcctgataatataagagatacatttaaagctattcttcaaatgtctttagttttgactcattcagcatcaatgccagtaattaaagtcggaagaattgctggtcaattttcaaaaccaagaagctcaccagtcgaaaaaaaagatggtaaagaactacctagttatttaggtgataatattaatggaatggaattttctgaaaaagcaagaattccagatgcaaaaagattatttagagcctatgctcagtcagcatctacactaaatttaattagagcattttcacaaggaggatttgcagatttaaggcaggtgcatttgtggaacttaggttttattaacaaaaaaacaaaagggaaatataaagaaatagaagataagattagtgatgctttatcttttatggaagcttgtggaattactcctgaaaataatagaagattaagaacagttaatttttatacatcacatgaagcccttttacttccttttgaagaggctatgacaagagttgactcaacaactggagaatatcacgacacatctgcacattttgtttggattggagatagaacaagacaaccagatggagcacatgttgaattttgcagaggtattaaaaatcctatagggttaaaatgcggaccatctcttaagcctgatgagctaataaaactttgtaatattttaaatcctgataatgaagctggaagacttactttaatttctagatttggagcaaacaaagctgaagagtttttaccaaaattaattaaagcagttaaaaaagaaggattaaatgtaatttggtcatgtgacccaatgcacggcaacactataaaagcaactagtggattgaaaacaagaccttttgataatgtcttaaaagaagtaaaaaatgtatttggcatccatcaagccgagggcacttatgcag

SEQ ID NO: 242294 - DNA, 538 bp, Unknown
  Bacterial polypeptide expressing nucleotide sequence isolated from the Sargasso Sea
aatgagcaagatagttgacgatttacgtatagtttcagagcagttattaagcccacctgcagtgttaaagcaggctttacctttatccagtgcaggatctgactttattcagaaatcccgccaggaaattgctgacatagtgcatggccgtgatccgcgtctgttggtgattacaggtccatgttctatccatgacccagtgtcagctatggattacgcccgtcgcctgaagcaactgcaactgcaatacaaagacaccttatacattgtgatgcgggtgtactttgaaaaaccacgtactacggtcggttggaaaggctttatcaacgatccacatctggatgattcttttgatctggaaacgggcctgaccaaaggtcgtcgtttgttgctggatttagtcgagatggaattgcctgcggcaaccgaagctttagatccaatcagtcctcagtatctgtctgatttaatcagctgggccgctgttggggctcgtactgtggagtcacaaacccaccgcgagatggccagtggtttg

SEQ ID NO: 242295 - DNA, 458 bp, Unknown
  Bacterial polypeptide expressing nucleotide sequence isolated from the Sargasso Sea
aattaatgcaatgcagtcagcttcaaaatcccatcacttcttaggtgtaaatgaaaatggaatggcttctatagtcaatactacaggaaatccagatggacatatagttttaaggggcggttcaaaaggcccaaatttcgaaagtgatcatgtacaaagaatttcagcagaattgaggcaatgtaatcttccccataaagtgatgattgattgtagtcatggaaactccaataaagatttccgaaaacagtcggaagtgctaaaaaatgtagcttctcaaattagtaatggtgaaaaaaatattttaggagttatgcttgaaagtcatttgaaggaaggaaatcaaaaacttttaaaaaaagaagatctccagtttggcagaagcattacagatgcctgtatagatatagaaacaacaaaagaattaatggctatcttatacgattcacttagctagt

SEQ ID NO: 242296 - DNA, 1342 bp, Unknown
  Bacterial polypeptide expressing nucleotide sequence isolated from the Sargasso Sea
aatgtcaaagtggtctaaagattcttggaaaaacttcaagattaaacatatccctcaatacaatgacccagatcagcttgaaaaagcattaaaaaaactagaaggatttccaccattagtgtttgctggagaatgtagaaatttaaagcaagatcttgcaaaggctagcaaaggagatgcctttttagttcagggtggagattgtgcagaaagctttaaggaatttaatgcaaataatattagagatactttcagggtcattttgcaaatgagtgctgttatcacagcaaagcttaaagttcccgttattaagcttggaagaattgcaggacaatttgcaaagccaagatcttctgatttagaaactaaagatggaaaaactttaaatagttattacggagattctattaatagtattgaattttcggaggaaaaaagagaaccgaatcctgcacgtttattaagagcatactctcaatctgcttccactttaaacctacttagatcatttgctcaaggaggttttgctaacttacgaaaagtgaattcatggaatatgggatttgttaaggcaagtaaagaaggaaagaagtatgaaaaaattgcagcaaaaattaatgaatatttagattttatggatgctgtaggagtaaatacatctactgtaatagacttaaataccgttgaattttttaccagccatgaaggacttcacttaccatatgaagctgcattaactcgagtagattcactaacaaatgaagtgtattgtacatcagcacactttatatggattggagatagaacgcgctttattgatagtgcacatgtagaattttgtagaggaataagcaatccaattggaattaaatgtggtcctagtcttgatccagatgaattagttaaaattattgaaacaatcaatccagcaaatgaacctggaaagatttcattaatatttagatatggtgaagaaagtattgataaacatttaccaggactggttgagacaataacaaaaaataacaaaaatgttttatggatctcagatcctatgcatggaaatactgtaaagtcttcatctggtttaaaaactcgtgattttaactctttgcttaatgaaacatcgaaagctattaaaattcttaaagacagaggatgtcatttaggaggaattcacttggaaatgacaggtcaaaatgtaactgaatgtactggaggaatttataaagtaagtgacgatgatttaaattcaagatatcatactcattgtgatccaagattgaatgctaatcaagcgctagaactctctttcaatattgctgaggagctgcaaggttaa

SEQ ID NO: 242297 - DNA, 1230 bp, Unknown
  Bacterial polypeptide expressing nucleotide sequence isolated from the Sargasso Sea
tatgaaaaagtggaaattaaatagctggagaaattatcctgttaaacacatcccaacatacgaggatgagaaggaattgaattctgttttaaataaattaaaatcttttcctcctttagtttttgcaggcgaaacgagacatctcaaacaacagttggcagaggttgttgatggtaaagcttttctattacaaggaggagattgtgcagaaagttttgctgaatttaatccagacaacataagagattattttaaagcgatgttacaaatgtctttagttttaacttattctgcatctttgccagttgtaaagttaggaagaatagctggacaattttcaaaaccaaggagcgctccaactgaaaaacaaggagatcttgaattacctagttatttaggtgacaatataaatggtatagaattctcagaaaaatcaagaagaccagacccaaaaagattatttaaagcttattcgcaagcagcatcaactttaaatttaattagagctttttgtcatggtggatttgcagatcttaaaaaagttcatttatggaatttaggatatattaaaaatagccctcaagctgcaaaatttaaagaactcgaagacaaaattgcagatgcattagctttcatggaggcatgtggaataactgcagaatttaatagaagattaaaaactgtaaatttttggacatcccacgaagctttactacttccatttgaagaaagcatgactagagttgactcaacaacaggagagcatcatgatacatcagcgcatttcgtttggattggtgatagaacaagacaacttaacggaggacatgtagaattttgtagaggaatagaaaatccaattggaattaaatgtggaccaacttcagatccagaagaaatagttaaaatatgcaatgtaataaatccaaaaaatgaaaaaggtaaaattacgttaatatctagatttggacatgacaaggttgaaaaatttttaccgaaattaattcgaaaagttaaaaaagaaggtattcatgttgtatggtcgtgtgatccaatgcatggcaatacaattaaatctacaactggatttaagactagaccatttaacaaagtactaagtgaggttaagaatgtatttgctgtacatcaagcggaaggcacttttgcgggaggtattcatatagaaatgacaggtcagaatgtgacagaatgtacaggtgagcacaaaaa

SEQ ID NO: 242298 - DNA, 1048 bp, Unknown
  Bacterial polypeptide expressing nucleotide sequence isolated from the Sargasso Sea
atgattgattggaaaatagatagctggagaaaacttcctattaaacaagttcccgaatatagtgatcttactaaagttattagtgtggaaaaagaattatctattagaccacctttagtttttgctgaagaagctagaagattaagaaaaagaatggctgatgtggctgagggtaatgcttttttattacaaggtggtgattgcgctgagtcgtttgctgaacataacgctaataatataagagatagttttagagtattattacaaatggctgttgttctcacttttggatcagccttgcctgtagttaaaataggaaggttggctggccaatactctaagcctagatcatctccttttgaagaaataaacaatgtctctttacctagctatcgtggtgacatggtaaacgatatggcattcgacaaaaaagcaagagagcctgacccagtgcgtcttattcaagtttatgataaatctgcttcgactttgaatttgttaagagcattcgcaagtgggggtatggcggatttaacaaaattgcatgaatggaaccttgagtttgttagaggtactaaagaggcagataaatacaaagagttagcgtctcagataactgcttcacttgagtttatgaatgcttgtggtatgacacctgaaaacactgtccaacttcgtgaaactgaattttacacatctcacgagggattgttacttaattatgaagaagctctaacaagaaaagatactatcacagaggagaaaggctggtttgctacatctgctcatatgttatggattggagatagaacaagaagtattgatgaggctcatgttgaatatatgagaggaatagctaatcccatagggcttaaatgtggaccctctacagaacctgatgatttactaagattaattgaaaagcttaatccacttaatcaagcgggccgattaactttgattgctagaatgggctcttcagaaatccataaaaaattaaaaccattaatttcagcagttaagaggtctggattagttgtgggttggt

SEQ ID NO: 242299 - DNA, 847 bp, Unknown
  Bacterial polypeptide expressing nucleotide sequence isolated from the Sargasso Sea
tatgaataagacacaacaagataatcctgacttatatgatgctaacgtcatacaaacacagcctttacctgcccctacagaacttattgaagaatttcctgtatctaatgaactgagtaattttataacaacaggaagaaatgaactacataatattcttgctggagaagacgatagatttgttatcatcactggtccctgctcaatacacgatacggatgcaggtttagattatgctaaaaaactgaaaccattagtagataaatataaagataagcttttggtcatgatgagagtgtattttgaaaaaccaagaaccactgtaggttggaagggtctagtttatgatcctgacttgaacggtacttttgatatgatctcgggattaaaaaaagctaggaaatttcttcttgatgttgctaatcttggactgtggtctggtacagaatttctagatcctattacacctcaatattttggtgatcttatttcttggggagctattggggcaagaacttctgaaagtcaaacccatcgccaattagcaagcggtctcagtatgcctgtaggtttcaaaaatggaactggtggaagtattcaattagctgtagatggaataatttcatcaaattcaaaacatggttttttaggcgttgatcgctctggtaaagcatcaattgtcaccacaagaggcaatcaagatgcgcatcttatattaagaggtggaagtgataaaccgaactatgatgcgcagtcagtttctgatgctgtcaataaacttcaagattctggcgcaaatacgagcattattaaaaattgctcacatgctaattcatttaaagaccat

SEQ ID NO: 242300 - DNA, 971 bp, Unknown
  Bacterial polypeptide expressing nucleotide sequence isolated from the Sargasso Sea
caacggaatggattttaatgagaaagcaagagtgccagatgcaaaaagattatttagagcttattctcaatcagcttcaactttaaatttattaagagctttttctcaaggtggttttgctgatttaagacaagttcatttatggaatttaggatttattaaagataaaactaaaggtaaatacaaagagattgaagataaaattagcgatgctttagcgtttatgcaagcttgtggaataaactctgataataatagaagattaagaactgttaatttttatacttctcacgaagctcttttgctaccatttgaagaagccatgacaagagtcgattcaactactggagaataccatgatacttcggctcactttgtttggattggagatagaacaagacaaccagatggagctcatgttgaattttgcagaggtattaaaaaccctttaggtttaaaatgcggtccgaccttaaaaccagaggaacttgtaaaactctgtaatattcttaatccaaaaaatgagccaggaagaatgaccttgatttcaagatttggagcagacaacgtagaaaaatatttacctaaattaattaaagtaattaaaaaagagggattaaatgtaatatggtcatgtgatcctatgcacggtaacactattaaagcagccacaggatttaagacaagaccttttgataatgttttaaaagaggtaaaaaacttttttggcgtacatcaatctgaaggaagttacgctggaggattacacgtcgaaatgactggtcaggatgtgaccgaatgcacaggcggggcacagaaaatatctgaaaatgagttatctagtagatacagaactcattgcgacccaagattgaatgctgatcaagctttagaattagcttttctaatttctgaagaaattaagaaaaactctaaatattcaaaaaaaattatccaagccgcgtcttaat

SEQ ID NO: 242301 - DNA, 709 bp, Unknown
  Bacterial polypeptide expressing nucleotide sequence isolated from the Sargasso Sea
catgaaaaattggaaagtaaatagctggagaaagtatcctgtcaaacacataccaacgtatggtgatgagaaggaacttaatagtgttttaaataaattaaaaacatttccaccacttgtatttgcaggtgagactagacatttaaaagatcaattatctaaagtagttgatggtaaagcttttttattgcaaggcggtgactgtgctgagagttttgcagaatttcatcctgacaacataagagatactttcaaagtaattcttcaaatggctttggtgatgacatactctgcgtctttacctattgtaaaacttggtaggattgcaggacagttttctaaaccaagaagtgctccaacagagaaacaaggtgatatagaattaccgagttatttaggtgataacattaatgcaatagactttaacgaaaaagctagaagacctgatccaaaaagaatgtataaagcttattctcaatcagcttcaacacttaatttattgcgagcattttcaaaaggaggttttgcagatttaaataaagttcatttgtggaatttagattatattaaaaaaagtccccaagcgaaaaaatttaaagacctggaggataaaattgctgatgcgttagcatttatggagtcgtgtggaataacttcagattttaataatagattgtacacagtaaatttctggacatcacacgaggcg

SEQ ID NO: 242302 - DNA, 859 bp, Unknown
  Bacterial polypeptide expressing nucleotide sequence isolated from the Sargasso Sea
atggataaaaattggacaccatctagttggagaaaaaaagatgcatctcatatgccaaaatatatggatcaaaagcatcttaataaaacccttgaagaaatttctaaattccctcctttagtttttgctggcgaagcaagactattaaaggaaaaattaaaagatgtttctgaagggaatgcttttttacttcaaggaggtgattgtgctgaaagttttgctgatttccatcctgataatataagagatacgtttaaagtaattttacaaatggctgttgttcttacatttggtgcttcatgtcctatagttaaggtgggtagaatcgcgggtcaatttgctaaacctagatcttcggcaactgaaactatagataatttagaattagagtcatataaaggtgatataattaatggtattaattttaatcaaaaggaaagaaaccctgatccagacagattaattcaagcttataatcaatcagcatcaactttgaatttgcttagagctttttctcaaggtggatttgcaaatttaagtaaaattcatcaatggaatttaaattttgttaaagatgaaaacgcaactaaatttcgagaaatatcaaatagaattgacgaatgcttaagttttatggaagcttgtggcataaatggtaatagtgttaggcaattaaatgagactgattttttcacaagtcatgaggctttacttctacaatatgaagaagccttaacaagaattgatagcacttcaggcaagtggtatgatgtatctgctcatatgctttgggtaggtgacagaactaggcaattaaatggtgctcacattgaatttttgaaaggtatagaaaacccaa

SEQ ID NO: 242303 - DNA, 1038 bp, Unknown
  Bacterial polypeptide expressing nucleotide sequence isolated from the Sargasso Sea
aaccaagaagtgcgcctactgaaaaaaaaaatggaaaagagttgccaagttatctaggagataacattaatggaatggattttactgaaaaggctagagtaccagatgcaaaaagattatttagagcatactcacagtcagcttctacattaaatttattaagagctttctctcaaggggggtttgctgatttaaggcaagttcatctttggaatttaggttttattaaagacaaaactaaaggtaaatacaaagaaatagaagacaagattagtgacgcattagcttttatggaagcttgtggaataaattctgataacaatcgaaggttaagaacagttaacttttatacatctcatgaggctcttttacttccatttgaagaagcaatgacaagagttgactcaacaacaggggagtatcatgacacatcagcgcattttgtatggataggagacagaactaggcaacctgatggggcacatgttgaattttgtagaggaattaaaaatcctttaggattgaaatgtggtccaacacttaaacctgaagaacttgttgaactatgtaatattttgaatccagagaatgaaccaggtagaatgacattaatttctcgatttggagcagataatgttgataaacatttaccaaaactcattaagactgtaaaaaaagagggattaaatgtaatttggtcgtgtgacccaatgcacggcaatactattaaagctgctacaggatttaaaacaagaccttttgatagcatactaaaagaggtaaaaaactttttttcagttcatcaatcagaaggaagttacgccggcggattgcatattgaaatgacaggtcaaaatgtgacagagtgtacaggtggagctcaaaaaatcacagaaactgatttatcaaatagatacagaactcactgcgaccctagattgaatgctgaccaagcactagagctagctttcctaatttctgatgaaattaagaaaaattcaaaatattcaaaaaaaattattcaagccgcgtcttaat

SEQ ID NO: 242304 - DNA, 1012 bp, Unknown
  Bacterial polypeptide expressing nucleotide sequence isolated from the Sargasso Sea
gatggagtctgagttagaaagttataaaggcgatatcattaatgatatggagtttactcaatcttcaagagtgcctgaccctcaacgaatgatcagagcatacactcaatcagcagcaactcttaatttattaagagcttttgcaaagggtggtttttctgacctaaataaagttcaccaatggaatatgggttttgttgatgagagtcctcaaggaaaaaaattcagagatttagctgataaaatatcagatacactatcttttatggatgccataggtatttcatctggaaatacaaaaagattaagaaatgttgatttttttacaagtcatgaagcactccttttgccatatgaggaatgtttaacacgtacagatagtacaactggtgaagtgtacgatacatctgctcacatggtgtggattggtgatagaacaagacaacttgatggagctcacgtagaattttgtagaggtattaaaaaccctattggaattaagtgtggtccaactttagatcccgatgaattaaagaaattgatcgatgtattaaatcccgaaaatgaagctggtaaaattaccctcatttgtagatttggggttgataatgttgaagagaagttgcccaaactaattggaccttttgctaactcagattacaaccttgtttggtcatgcgaccccatgcacggtaatactatgaaagctaattctggctttaagaccagacctttcgagagggttattcaagaagttgagtcattttttgatattcatcactctttaggaacatatcctggtggagtgcatttggagatgacggggcaaaacgtgactgagtgcattggtggtgcccaagcgataaaagatgaagatttatctgccagataccatactcattgtgaccctagacttaacgcaaaccaggcattagaacttgccttcttaatatctgacaagctcagagaatctcaagaacctcacaagtcaaaaattataattgccaagtaa

SEQ ID NO: 242305 - DNA, 1072 bp, Unknown
  Bacterial polypeptide expressing nucleotide sequence isolated from the Sargasso Sea
atgactaaatggtctgcaaatagctggagaaaatataaggcacttcatatacctgaatatccagatcaagaaaaacttagccaagttgaaaaacagttagctagttttccacctcttgtgtttgctggtgaagcgagagaattaaagagaaatcttggcaaagtatcagatagaaaagccttccttcttcaaggtggggattgtgctgaaagtttcgatgatttcaatgcagactatataagagactcatttaaagttttactacaaatgtcagttactttaattgctgctggaaattgtcctgttgtgaaagttggaagaatggcaggtcaatttgcaaaacctagaagtgctccaaaggaagaaattaacggtatcgaactagacagttataagggagatattataaatggtatggattttgatgaagcgagtagagttccagatcccaatagaatgatccaggcatatactcaagctgcggcaacacttaatttacttcgagcatttgctaaagggggtttttcagatctttctaaagttcatcaatggaatatggggtttgttgatgatagcctgcaaggacaaaaatatagagaaattgcaaatcgtatctctgatacacttgagttcatggaagctattggaatttcatcaaagaatacgaagagattaagaagtgtagatttttatacgagtcatgaagctttattgttaccttatgaagaagcaatgacaagactggatagtacttcaggtgaaatgtatgatacttcagcacatatggtttggataggagatcgaactcgtcaaccagatggagcacatgttgagttttgcaggggtatcaaaaatccaattggcattaaatgtggaccgtccctagaccctgacgaattaaaaaaacttatagatattataaatcctgaaaatgaggcaggaaaaattactttaatatgtagatttggtcatgacaaaattagagatgcacttccaaagctcgtcaagccatttataaattctgatcacaaattgatatggtcatgtgatccaatgcaggaaatacgataaa

SEQ ID NO: 242306 - DNA, 940 bp, Unknown
  Bacterial polypeptide expressing nucleotide sequence isolated from the Sargasso Sea
gaacgaaatcctgatcctgatagattaatccaagcttataatcaatcagcttcaacattaaatttattaagagcattttcccaaggaggatttgctaatttaagtaaaattcatcaatggaatttaaattttgtaaaaggtgaaaatgcaactaaatttcaagaaatctctaatagaattgatgagtgtttaagctttatggaagcctgtggaataaatgacaatactgtaagacaattaaatgaaacagatttttttacaagtcatgaagctttgcttcttcaatttgaggaggctttaacaagaattgatagcacttcaggaaaatggtacgatgtttcagctcacatgctttgggttggagatagaactaggcaaatagatggagcacatattgagtttcttagaggtatagaaaacccaattggtattaaagtcggaccaagtacaaaaacagatgagttacttaaaattttagatgcacttaatcctagtaatgaaggtggtaaaattactcttatttgcagaatgggtcatgaaaaagttggaaatattcttccaaatataattaaatcaattcaaaaagctggaaaaaatgtcgtttggacttgtgatccaatgcatggaaatacaataaaatcaaatactggttacaaaacaagacctttgaaagacattatatctgaaattcatcaattttttcaaattcatagaactgagggaacctatccaggaggtgttcatttagaaatgacaggccaagatgttactgagtgtatgggagggcttcaagaaattactgatgaagatttacaaaatagatatcacacttattgtgatccaaggctaaatgcttctcagtcattagagttagcttttttgctatctgattttttaaaagaagaaaaattactttcaaagcaatcttcaaatctataaa

SEQ ID NO: 242307 - DNA, 303 bp, Unknown
  Bacterial polypeptide expressing nucleotide sequence isolated from the Sargasso Sea
catgcaaagagatcccctgaacaacatccatatccagtccgaacaagtgatgatcacgcctgcccagctcaaggagaaactgcccatctccgatcgcgcgctggcattcgtgcaaggggcccgcaataccatcgccgacatcatccaccgtcgcgatcaccgcttgctggtgatctgtggtccctgctccatccacgacatggacgccgccaaagagtacgcaaccagactcaaagcgctgcatgacgcctatcaggactctctctacattgtcatgcgggtctactttgagaagccgcgcac

SEQ ID NO: 242308 - DNA, 1143 bp, Unknown
  Bacterial polypeptide expressing nucleotide sequence isolated from the Sargasso Sea
taagagattattttaaagtgatgttgcaaatgtcattagttttaactttttcagcatctttacctgttgttaagttaggaagagttgctggacaattctcaaaaccaagaagtgccccaacagaaataaaaggtgataaagaacttcctagctatttaggagacaatataaatggtattgagtttactgaaaaagcaagaacacctgatccaaaaagattgtttaaagcttattctcaagcagcttcaactttaaacttgttaagggctttttgccatggtggatttgcagatttaaaaaaagttcatctttggaatttaggttatataaaaaaaagtccacaagctaaaaaatttaaagaattagaggataaaattgctgatgctttagcatttatggatgcatgtggaataaattctgattttaatagaagacttaaaacagtaaacttttggacatcacatgaggcgctattacttccttttgaagagagcatgacaagagtagattcaacaacaggtgaataccatgatacttctgctcactttgtttggataggtgatagaactagacagctagacggtggccatgttgaattttgtagaggtatagaaaatccgataggaattaagtgtggacctacttctaaacctgatgaaatagttaagatttgtaatgtgttaaatccaactaatgaaaaaggtaaaattactttaatttcaagatttggtcatagcaatgttgaaaaatttttaccgaaactgataaaagctattaaaaaagaaggtttaaatgttatatggtcttgcgacccaatgcatggaaatactataaaatcaacaactggatttaaaacaagaccttttaataatgttttaaaagaagtaaaaaatgtttttgcagttcatcaaagtgaaggatcttacgctggtggtttacatatcgaaatgacaggacaaaatgtaacagagtgcacaggtgggacacaaagaatttctgacaacgacttatctagcagatatcgtactcactgtgatccaagattaaatgccaatcaagctttggaacttgcatttttaatttctgacgaaataaaaaagaattccatttatgcaaaaagtggaattagagctgtatcttaag

SEQ ID NO: 242309 - DNA, 395 bp, Unknown
  Bacterial polypeptide expressing nucleotide sequence isolated from the Sargasso Sea
attttactcttctggaaataaagactgtcacgttatccttagaggcggcactgaacccaattacagtaaagaagatatcgataaaactgcaaaaatacttaaaaaaaataatcttgttgagtcaatcatggtagatatgagtcatggaaatagcagtaaacagcataagaagcaattggttgtctgtgaagatatagccaatcaaatttcttcaggtgaagatcgtattacaggagttatgattgaaagtaatattgaagaaggaaatcaaagtgccaaagacttagataatcttgtttatggtaaaagcattacagacgcctgcatcaattgggaagatactaagcaatgcctgagtcaattagctaaatctgtgtcactaagaaataattaat

SEQ ID NO: 242310 - DNA, 640 bp, Unknown
  Bacterial polypeptide expressing nucleotide sequence isolated from the Sargasso Sea
tatgaaaaattggaaagtcaatagctggagaaaataccctgttaagcacatacctacgtatgatgatgaaaaggaacttaatgatgtattggataagttaaaaacttttcctccaatggtatttgcaggtgaaacaagacatttgaaagaacaactagcaaaggtggttgatggtaaagctttcctacttcaaggaggagactgtgctgagagttttgcagaatttcatcctgataacataagggatacttttaaagtaatacttcaaatgtcgttagtgttaacttattcagcctctttaccagtagttaagcttggaagaatcgctgggcagttttcaaaaccaagaagtgcaccaacagaaaaacaaggggataaagaattaccaagttatttgggtgataatatcaatgcaatagattttactgaaaaagctagaagaccagatccaaaaagattatttaaagcatactcgcagtcagcttctactcttaatttactaagagcattttcaaaaggaggttttgcagatttaaataaagtacatttatggaatttagattatattaaaaaaagccctcaagctaaaaaatttaaagaactagaagataaaattgctgatgctctaggatttatggat

SEQ ID NO: 242311 - DNA, 1381 bp, Unknown
  Bacterial polypeptide expressing nucleotide sequence isolated from the Sargasso Sea
aatgaaaaaatggaaaataaatagttggagaaattatcccgtaaaacatattcctaattatggggatgaaaaagaacttaatatggttcttggaaaaataaaaaattttcctcccttagtatttgctggtgaaacaagacatttaaaacaacaacttgcagaagttgctgaaggaaaagcttttttgcttcaaggaggagattgtgcagagagttttgttgaatttaatccagacaatataagagattattttaaagttattttgcaaatgtcgttggttttaacttattctgcatcattgcctgttgtgaaactaggaagaatagctggacaattttcaaaaccaagaagcgctcctacagaaaagcaaggggataaagaattaccaagttatttaggtgacaatattaatggtatagaatttactgaaaaatcaagaagaccagatcccaaaagattatttaaagcttactcacaatcagcatccactttaaacttaataagagctttttgtcatggaggatttgcagatttaaaaaaagtgcatctttggaatttaggttacataaaaaaaagcccgcaagctaaaaagttcaaagaattagaagataaaatatctgatgcattagctttcatggatgcatgtggaataaactcagattttaatagaagacttaagactgtaaatttttggacatcccatgaagctttattattaccttttgaagaaagtatgactagagttgactcaacaactggagagtatcatgatacttctgcccattttgtttggataggtgatagaacaagacagttagatggtggacatgttgaattttgtagagggatagaaaatcctattggtataaaatgtggccctacatcgaaaccagatgaaatagtaaaaatttgtaatttaattaaccccagaaatgaaaaaggtaaaataactttaatctcaagatttggtcatgaaaatgttgaaaaatttttgcctaagcttattagaataattaaaaaagaaggaattaatgttatttggtcatgtgaccctatgcatggtaatactattaaatctacaactggttttaaaacaagaccgtttaataatgttttgaaagaagttaaaaatgtctttggtgtccatcaaagcgaaggatcttatgctggaggattacacatagaaatgacaggtcaaaatgttacagaatgtacaggaggtacacaaaagatttcagataaagatttatctagtagatatagaacacattgtgatccaagattaaatgccaatcaggctttagaactagcttttatgatttcagatgagattaaaaagaattccatttatgcaagaaatggaattaaagcggcttcttaa

SEQ ID NO: 242312 - DNA, 1381 bp, Unknown
  Bacterial polypeptide expressing nucleotide sequence isolated from the Sargasso Sea
tatgaaaaaatggaaaataaatagttggagaaattatcctgtaaaacacattcctgtctatgaggatgaaaaagaacttaatatggttttgggaaaaataaaagatttcccccctttagtttttgccggtgaaactagacatttaaaacaacagcttgcagaagttgttgatggaaaagctttcttattacaaggaggtgactgcgcagaaagttttgcagaatttagtcctgataatattagagattattttaaagttatgttgcaaatgtcactagtattaacatattcagcatcactaccagttgttaaattaggaagaatagcagggcaattttctaaaccaagaagtgcacctacagaaaaaaaaggtgatgttgaactaccaagttatcttggtgacaatattaatggtatagaatttacaaataaatctagaaagcctgatccaaaaagattattcaaagcttattctcaggcagcatctacattaaatttaataagagctttttgtcatggaggatttgctgatttaaaaaaagttcatttatggaatttaggttatataaaaaaaagtcctcaagctaaaaaatttaaagagctagaggataaaatagctgatgcattggcatttatggatgcctgtggaattaattcagaatttaatagaagattaaaaactgtaaatttttggacatcacatgaagcgctgttgctaccttttgaagaaagtatgactagaatagattctactacaggtgaatatcatgatacctcagcacattttgtttggataggtgatagaactagacagttagatggaggtcatgttgaattttgtagaggtatagaaaatcctataggaattaaatgtggaccaacatcaaaacctgatgaaatagcaaaaattattaatgtaattaatccaaaaaatgaaaaaggtaaaataacattaatttcaagatttggacacgacaaagtagaaaaatttttaccaaaattaattagaggcattaaaaaagaaggtcacaatgttgtgtggtcatgtgatcctatgcatggaaatacaattaaatctgccacaggatttaaaacaagacctttcaacaacgtattaaatgaagttaaaaaagttttcgctattcaccaaagtgaaggatcgtatgcaggtgggcttcatatagaaatgacagggcaaaatgttacagaatgtacaggtggtacgcaaaaaatttcagagcaagacttgtctagcagatatagaacacactgcgacccaagattaaatgcaaatcaagcaattgagcttgcatttttaatatctgatgagattaaaaaaaattcaaataacgcaaaaagtggaattagagcggtatcttag

SEQ ID NO: 242313 - DNA, 847 bp, Unknown
  Bacterial polypeptide expressing nucleotide sequence isolated from the Sargasso Sea
gctattgaatatgcagagaggctatcaattgagaataaaaagtttagtgaaaatatcttattagtaatgagagtttattttgaaaaaccaagaactacagttggatggaaaggattaataaacgatcccgatattaacgaaacctataacattgccaaaggtcttgaaatggctagaaaactgcttattgaaattgctgaattgggattgcctgcaggaacagagtttttagatccaatttcaccgcaatatgtaactgacattatttcgtggggggcaattggagcaagaacagctgaaagccaaattcatcgagagcttgcatctggtctttcttgtcctattggcattaagaatggaactgatggtggtttaaaggctgcgattgatggaatacaggcagcaaaccactctcatgtttttcttggtgcaacaaaagaagctgatatagcaatgcttaaaacagctggtaacaatgacgcccatataattttaagaggcggtaaagtgccaaattttgacaaagaatcagtagaaaatactttgactgctctcaaagaagctgaagttaatgaatctataatgattgatgctagtcatggaaatagtcaaaagaaatttaaacaacaaatccctgtaattgattcgatatgcgaacagatttctgatggtaacaaaaatataaaaggtgtaatgattgaaagccacttaaatgagggtaatcaaaaaattaccgaaaaacttaactatggtcaaagtattacagatgcatgtatgggttgggatgatactgtaatgtgtcttagtaaattaaatgatgcaataaatctaaaaagaggtaaataat

SEQ ID NO: 242314 - DNA, 949 bp, Unknown
  Bacterial polypeptide expressing nucleotide sequence isolated from the Sargasso Sea
aatgaaaaaatggaaaattaatagttggagaaattatccagttaagcacatcccaacatatgaggatgagaatgaactgaatttggttttaaacaaattaaaaaaatttccacctttagtatttgcagaagaaacgagacatttaaaacgccaactttccgatgtagcggatggaaaagcattcttgttgcagggtggagattgtgctgaaagttttgcggaatttaacccagataatattagggatacttttaaagttatattacaaatgtcactaattttaacttactctgcgtcattacctgtagtaaaattaggcaggatagcagggcagttttcaaaaccaagaagtgcacctacagaaaaacaaggtgataaggaattaccaagctatttaggagataatattaacggaattcaatttaatgaaaaatcaagaagacctgatcctaaaagattatttaaagcttactcccaatctgcctccacattaaatttactaagagctttttcaaaaggaggttttgctgatttaaataaagttcatttatggaatttagattatataaaaaaaagccctcaagctaaaaaatttaaagatttagaagataaaattgccgatgcattagcgtttatgaaagcatgtggaataacttcagattttaataataggttatatacagtaaacttctggacttctcatgaggccttgctattacctttcgaagaaactatgaccagagtagattcaacaacaggagagtatcatgatacttctgcacattttgtttggattggtgatagaacaagacaattagatggcggtcatgtcgaattctgtaaaggaattgaaaacccgattggaattaaatgtggtcccacctcaaaaccggatgaaatcgcaaaaatttgtaatgcaatcaatccaagaaagaaaaaggaaaaataa

SEQ ID NO: 242315 - DNA, 769 bp, Unknown
  Bacterial polypeptide expressing nucleotide sequence isolated from the Sargasso Sea
atgaaaaaatggacattaaatagttggactaaataccctgcaaaacatcttcctaattatgttgataaaaaggagctggaattagtattaagtaaaattcaaaaatatcctccattagtatttgccggtgaaaccagatctttaaaaaaagctctttcagaggtagtggaaggaaaagcttttttgcttcaaggtggagactgtgcagagagttttgctgaatttcatccagacaatattagagatactttaaaagtaattttacaaatgtctttagttttaactgcttctgcttcagtaccggtggtcaaagtcggaagaatcgctggacaattttctaaaccaaggagtgctcctactgaaaaaaaagatggaaaagaattaccaagttatttaggtgataatataaatggaatggattttaacgaaaaatcgagagtccctgatgcaaaaagattattcagagcatactctcaatcagcatcaacattaaatttgttgagagctttctctcaaggaggtttcgctgacttacgacaagttcatttatggaatttaggttttattaaagacaaaacaaaaggtaagtataaagaaatagaagacaagattagcgatgcgttagctttcatgcaagcgtgtggaataaattcagataataatagaagacttagaacagttaatttctatacttcgcacgaagccttgcttttgcctttcgaagaagccatgacaagaatagactctactacagaaagagtaccatgat

SEQ ID NO: 242316 - DNA, 1144 bp, Unknown
  Bacterial polypeptide expressing nucleotide sequence isolated from the Sargasso Sea
tttgaagagttttctgctgatttgataagagatacttttaaggttttattaaaaatggcggtggttttaacctttggaggtaaaaaacctgttataaagattggtagaatggcaggtcagtttgctaaacctaggtcttctgactttgaaattattaatggtcaaaagctaccttcttatagaggtgatattataaatgatattaaaccaactattgagcatagactacctaaaccagaaagaatgcttaaagcttatacgcaatcttcatcaacacttaatttattaagggcatttagccaaggtggttttgcagacatcagcagagtacattcttgggttctagaaagtactaaaggacaagttgggtatcagaagttctttgatttagctactaaaatcacaaattctttggaatttatgagtgcagctggtgtaaattcagaaaactcagattctttaagaaaagttgatttttatactagccatgaagcacttttattagaatatgaagaagctttatgtagattagatagtactacaggtttacctgttgcaggttctggtcatatgatttggataggagatagaacaaggcagatagatggcgcccatgttgaattttgtaaaggagtacaaaatcctattggccttaagtgcggtccctccactgaccctgatgaactaattcaactgtgtaagattttaaatccagaaaacgaatctggtcggttgacattaattacgcgatttggatcagatttaattagtgaccatcttcccaaaattataaattcagtcaagaatgctaaattgagagttgtatggtcttgtgatccaatgcatggtaatacgattaaatcttctaatggttataaaactaggccatttgaaaaaatactagctgaagtaaaaacatttttcaaaattcatatgtctgagggaaccttccctggtggtgtacatgtagaaatgacaggaaaagacgtcactgaatgtacaggtggaataaaatcaatagatgacgaggatttgcattcaagatatcatactgcatgtgacccaagattaaatgctagtcaatctttagaactcgctttcttaattgctgaagaattggaagctttttttcaaaattcttaat

SEQ ID NO: 242317 - DNA, 305 bp, Unknown
  Bacterial polypeptide expressing nucleotide sequence isolated from the Sargasso Sea
aggttcaggaataacccctaacataattatagattgcagccatggaaattctaataaagaccatacaaaacaagcaacagcgtttaaagatgtggtctcacagaaggctagaggaaattcttcaattgttggcagtatgctagaaagcaatattaacgaaggcaatcagaaattgaccagcgatcctagtgaacttttgcatggtgtttctattactgatgcttgcattaattgggacgaaaacactgaactcttacactgggcattcgatgctttgggcgaggcaaataaggttactgcttaat

SEQ ID NO: 242318 - DNA, 465 bp, Unknown
  Bacterial polypeptide expressing nucleotide sequence isolated from the Sargasso Sea
aatgactaagatagttgacgatttacgtatagtatcggagcagttattaagcccgcctgcggtattaaaacaggctttacctttatctggtgcaggttctgactttattcagaaatcccgtcaggaaattgctgacatagtacatggtcgtgatccacgtttgttggtgatcacaggtccttgctctatccatgacccggtgtccgctatggattacgcccgtcgtttgaaacagttgcaactgcaatacaaggataccttgtatatcgtaatgcgggtgtacttcgaaaaacctcgcactacggtcggctggaagggatttattaatgatccgcacctggatgactcttttgatctggaaacaggtttaactaaaggccgtcgtttactgcttgatttagtggagatggagttgcctgcagctactgaagccttagatccgatcagtccgcagtacttatctga

SEQ ID NO: 242319 - DNA, 726 bp, Unknown
  Bacterial polypeptide expressing nucleotide sequence isolated from the Sargasso Sea
cgtacgacatcaacacaggcctgaggcgggctcgtggcttactgctggacctagccagggagggcatgccggcagcgacggaactgttggatccggtggttccccagtacatcgctgatctgatcagctggactgcgatcggagcccgcaccacggaaagccagacccatcgggagatggcttcaggcttgtcgatgccgatcggctacaagaacagcactgatggcagcgccaccatcgccatcaatgcgatgcaggcggcatcgaaaccgcatcattttctgggaatcaaccacgatggccatgcctcgatcgtgagcacgaccggcaacccggatggtcatctggtgctgcgtggcggttatcagggcagcaactaccacctggaggccgtacaggctgctgcagcggaactgagcaaggcgggcctgaaggatcgtctgatggtggactgcagccatgccaactcgaacaaggatttccgccgccaggccgatgtactcgccacggtggctgatcagttgaaggctggatccgcccatgtgatgggagtgatgatcgaaagtcatctggtggaaggcaatcagaaactcaccgctgatctctcccagctcacctatggccagagcattacggatgcctgcatcagcctggagaccacggatgcgttgctgtcccagctggctgcagccgtagccgagcgcagcagcgttgtgacggcataac

SEQ ID NO: 242320 - DNA, 1369 bp, Unknown
  Bacterial polypeptide expressing nucleotide sequence isolated from the Sargasso Sea
aatgaaaaattggaaaataaatagctggagaaaatatcctgtaaaacatcaacctatatatgatgatgaaaaggaattagacgttgttctaaacaagttaaaaacgtttccacctttagtttttgcaggtgaaactcgacatttaaaaaatcaattatcggaagttgttgatggtaaagcttttcttttacaaggaggagattgtgcagagagttttgcggaatttcatccagataatattagagatacgtttaaggtcatacttcagatgtctttagttttaacttattctgcatcattaccggtagtgaaacttggtagaattgctgggcagttttcaaaacccagaagtgctcctactgaaaaacagggtgataaagaattacccagttatttaggtgacaacatcaatgctattgattttaatgagaaagctagaagacctgatccaaagagattatttaaagcatattctcaatcagcatcaacattaaatcttttgcgtgctttttcaaaaggtggatttgcagatttaaacaaagttcacctatggaatttagattatattaagaagagcccacaatctaaaaaatttaaagaactagaagataaaattgcagatgcattagcttttatggaagcatgtggaattacatcagattttaataatagattatatactgtaaacttctggacttctcatgaagctttacatttaccatttgaagaaagcatgactagaatagactctacaactggtgagtatcatgatacctctgctcactttgtatggattggagatagaacaagacaattagatggtggacacgttgagttttgtagaggtatagaaaatccaattggtattaagtgtggaccaacatcaaaaccagatgaaattgctaaaatttgtgaagctattaatcctaaaaacgaaaaaggaaaaataactttaatttcaagattcggtcatcaaaatgttgagaaatttttaccgaaattaataagaggtattaaaaaagagggattgaatgttttatggtcatgtgatccatgtcatggcaataccataaaagcgtcaactggatttaaaacaagaccgtttaatgatgtagttaaagaagttaaaaatgttttcgcagttcatcaagcagagggttcatacgctggtgggttgcatgttgagatgactggtcaagatgtgacagagtgtacaggaggagcaaaaaaaatatctgatactgacttatcaagcagatatcatacccactgtgatccaagattaaactctgatcaagctatagaattagcatttttaatttcagatgagataaaaaagaatagtttatattccagaatctgcaattaa

SEQ ID NO: 242321 - DNA, 263 bp, Unknown
  Bacterial polypeptide expressing nucleotide sequence isolated from the Sargasso Sea
taaagtgatgattgattgtagtcatggtaattccaataaagacttccgaaaacagtcagaagtgctaaaaaatatagcttctcaaattagcaatggtgaaaaaaatattctaggagtgatgcttgaaagtcatttgaaggagggaaatcaaaaacttttaaaaaaagaagatcttcaatttggcagaagtattacagatgcatgtatagatatagaaacaacaaaggaattactcgctattttatacaattcacttagctagt

SEQ ID NO: 242322 - DNA, 187 bp, Unknown
  Bacterial polypeptide expressing nucleotide sequence isolated from the Sargasso Sea
aagtctggtgaaacaaggatcaccggagtcatgattgaaagtaaccttgaagaagggaaccaaaaagccgatgatctggataatctaacatacggtaaaagtattactgatgcatgtattaattggaaagatactaaagactgcctctatagattggctgaatcagtaagagatagaaataagtaac

SEQ ID NO: 242323 - DNA, 1342 bp, Unknown
  Bacterial polypeptide expressing nucleotide sequence isolated from the Sargasso Sea
atgagtaagtggactaaaaattcttgggaaaattttactgtaaaacatatacctgaatacaaagataaggatgctttaaaaaaagcgttaaaaaagattgaaaaatttccaccattagtttttgctggtgaatgtaatagtcttaaacaaaaacttgcttcagctgttgaaggtaaagcttttttaattcaaggaggagattgcgctgaaagttttaaggagtttaatgcaaataatattagagatacttttagagtcattttacaaatgagtgccatttttactgcaaaaatgaaggttccaatcataaaagtaggaaggattgcaggtcaatttgctaagccaaggtcatctgactttgaaacagttaatgataaaacattaccaagttattttggagattctataaatagtattgaattttctgaagaaaaaagagagcctaatccttcaaggcttttaagagcatattcacaatcagcatctacccttaatcttattaggtcttttgcacaaggaggatttgcaaacttgagaaaagttaattcctggaatatgggttttgtaaaagctacaccagaaggaaggaaatatgaaaaaatagcaaaccaaataaatgaatatcttgatttcattgaagctattggagtaaatacttcctctgtagattatctaaattctgtagatttttacacaagtcatgaagcattgcatttaccatttgaatctgcacttacaagaacggattcaatttctggtaaaacttttgctacatcatcgcatatggtctggattggagacagaacaagatttttagatagtgcccatgttgaatattgttctggaattgataatccaattggtatcaaatgtggaccaagtttagatccggtagagctcataaaaataattgataaaattaatccagataatgaggttggaaaaatttcattgatctttaggtatggtgaaaacaaagtccaagaacatcttccaagcttgattgacgaaataattaaaaatggaaaaaaagttttatggatttcagatccaatgcatggtaatacagtgaaatcttcctcgggtttgaaaacaagagattttagttctttattgaacgaaacttctcaggctataagcattctcaaggataaaggatgtcatttgggtggaattcatctagaaatgacaggacaaaatgttactgaatgtactggtggcatttataaattgagtgatgaggatttaaattcaaggtatcacactcattgtgatccaagattaaatgctaatcaagcattagaactatctttcaatattgctgaggaattaaaaaagtaaa

SEQ ID NO: 242324 - DNA, 1030 bp, Unknown
  Bacterial polypeptide expressing nucleotide sequence isolated from the Sargasso Sea
atgaaaaaatggaatttaaatagttggacaaactttcctgctaaacacttgcctgtatacaaggataaagaggaacttgatttagttttaagtaaaattaaaaaatatcctcctttagtatttgcaggtgagtctagatcccttaaaaaatctttagcagaagttgctgagggaaaagcatttttattacaaggcggagattgcgcagaaagttttgcggaatttcatcctgacaatataagagatactttcaaagttcttttacaaatgtctttagttttaacagcatcagcttctgtacctgttgtaaaagttgggagaatagctgggcaattttcaaaaccaaggagcgctccaactgaaaaaaaagatggaaaagaattaccaagttatctaggtgataatattaatggaatggaatttacagaaaaggctagaattccagatgcaaaaagattattcagagcgtattcacaatcagcatcaacgttaaatttattaagagctttttcacaaggaggattcgctgatcttagacaagttcatctatggaatttaggatttattaaagataaaactaaaggtaaatataaagaaattgaagataagataagtgacgcactttcttttatggaagcttgtggaattaattcagataataatagaagattaagaactgtaaacttttatacttcacacgaagctttgcatttaccattcgaggagtctatgactcgcgtagactcaactacaggagaatatcatgatacttcagctcattttgtttggataggagatagaacaagacaaactgatggagctcatgtggagttttgtagaggtataaaaaatcctataggtctcaaatgtggtccaacgttaaaaccagaagaattaattaacttatgtaatattcttaatcctgaaaacgaagccggcagattaacattaatttcaagatttggagctgataatgttcaaaaatatttaccaaaattaatgcaagctataaaaaaaggagggtcttaaa

SEQ ID NO: 242325 - DNA, 694 bp, Unknown
  Bacterial polypeptide expressing nucleotide sequence isolated from the Sargasso Sea
tatgaaaaaatggaaattaaatagttggagaaattatccagtaaagcacatccccacttatgaggatgaaaaagaacttaatatggttcttaacaaaataagaaactttcctcctttagtttttgctggagagactagacatttaaaacaacaacttgctgatgttgttgatggtaaagcttttttattacaaggaggagattgtgcggaaagttttgcagaatttaatccagacaatataagagattattttaaagttatgttgcaaatgtcacttgttttaacttattcagcatcattaccagttgtaaaattaggaagaatagcaggacaattttctaaaccaagaagtgcaccaacagaaaaacaaagtgataaagagctaccaagttaccttggtgataatataaatggtattgaatttaatgcgaaagctagaaaaccggatccaaaaagattatttaaagcatattcacaagctgcctctacattaaatttattaagagctttttgtcatggaggatttgcagatttaaaaaaagttcacctttggaacttgggctatataaagaaaagtccacaagctaaaaaatttaaagaattggaagataaaattgcagacgctttagcatttatggatgcttgcgggataaattcagactttaacagaagattaaaaacagtaaatttttga

SEQ ID NO: 242326 - DNA, 355 bp, Unknown
  Bacterial polypeptide expressing nucleotide sequence isolated from the Sargasso Sea
atagttttaagaggaggctcaaaaggtccaaatttcgaaagtcaatatgttcaaagaatttcagctgaattaaagcaatgtaatcttcctcataaagtgatgattgattgtagtcatggaaattccaataaagacttccgaaaacagtctgaagtactaaaaaatatagcttcacaaataagtaatggagaaaaaaatattttaggagttatgcttgaaagtcatttgaaggaaggtaatcaaaaacttttaaaaaaagaggatcttgagtttggaagaagtatcacagatgcatgtatagatatagaaacaacaaaagaactgctagctattttgtataaatcagttaattaag

SEQ ID NO: 242327 - DNA, 922 bp, Unknown
  Bacterial polypeptide expressing nucleotide sequence isolated from the Sargasso Sea
gtttaaggcttattctcaatctgcatcaactttaaatcttttaagagcattttcaaaaggtggttttgctgacctaaataaggttcacttatggaatttagattatattaagaaaagtccccaatctaaaaaatttaaagagttagaagataaaatagcagatgcattggcttttatggatgcttgtggaattacatctgattttaataatagattatatacagttaacttttggacttctcatgaagctttacacttaccttttgaggaaagcatgactagagtagattcaactacaggtgaatatcatgatacttcagctcactttgtttggataggggatagaacaagacaattagatggaggacatgttgagttttgtaagggaatagaaaatcctattggcatcaaatgtggtccaacttccaaacctgatgagattgcaaaaatatgcgaggttataaatcctaaaaacgaaaaaggaaaaattactctaatttcaagatttggtcatcagaacgttgaaaaattcttaccaaaattaatcagaggaattaaaaaagagggattaaatgttgtttggtcatgtgatccaatgcatggcaatacaattaaatcaactactggttttaaaacaagaccgtttaatgatgttgttagtgaagttaaaaatgtatttgcagttcatcaagctgaaggttcttatgcaggaggtcttcatgttgaaatgacagggcaagatgtgacagagtgtacaggtggagcaaaaaaaatatccgatgcagatttatcaagcagatatcatacacactgtgatccaagattgaattcggatcaagctatagaattagcatttttaatttcagatgagataaaaaagaatagtttgtattctaaaactgcaattaaagcggcatcttaa

SEQ ID NO: 242328 - DNA, 793 bp, Unknown
  Bacterial polypeptide expressing nucleotide sequence isolated from the Sargasso Sea
tatgcataatacaagtgatttgagaatctcaggaaggcaggaagtaatttctgcaagttccttattggacaaacaaccaatttcagatttatcttcccaaacagtttttaattctagaaaagaattttctgaaatactcagtaaaaaagataaaagattagcagttgttgttgggccatgttctatccatgacactgagtcggctatggaatatgcaaaccttttactcaaggaaaagaaagctctcgaaaaagaacttctgattattatgagagtgtatttcgaaaaaccaagaacaacagttggctggaaaggccttattaatgatccagatctggataattctttcaacattgataaaggtttatcggtatcaaggcaacttttaagagatataaatgatttaggtatgcctgctggaacagaatttttagatgttataacgccccaatatatagctgatttaatctcctggggggccataggagctagaactacagagagtcaaatccatagggagcttgcctccggttcttcctgtcccattggctttaaaaacgctacaaacggaggcattcaagtagctgctgatgccataggatctgccctacatcctcacaaatttctatcagtcacaaaagaaggtaaagcagccatattttcttcttctggtaacaaagactgtcacgttattcttagaggtggaaaagacccgaattatgaaaaagagtttatagatcaaacttctgagattctaaaatcaaactctcttctaagattcaatcatggttga

SEQ ID NO: 242329 - DNA, 730 bp, Unknown
  Bacterial polypeptide expressing nucleotide sequence isolated from the Sargasso Sea
ggcaccttcgacgtggagctggggctgcaccgcgcccgcgagctgctctgctggctggccgagctggagttgccgctggcgaccgaagcgctcgaccccatcagcccgcaatacctggcggagctcttctcctggtcggccatcggcgcccgcaccaccgaatcccagacccacagggagatggcctccggtctctccatgccggttggcttcaagaacggcaccgacggcaacctgggcaccgccatcaatgcgctgcaggcggcctccagcccccacgccttcatggggatcaaccagcagggccaggtcgcgttgctgcagacccagggcaacccggatggccacgtgatcctgcgcggcggcaagcacccgaactacgactcggtcaatgtgtcgctggcggaagaggcgctggagaaggcgggcctgctgcccggcctggtagtggattgcagccatggcaactccagcaaggatcaccggctgcagcccaaggtggcggacaacgtgatccaccagatccaggaaggcaaccgctccatcatcggggtgatgctcgaatccaacctgttcgaaggcaatcagtccagcgagcagcccaagtgcgagatgcgctacggtgtctccatcaccgatgcctgcatcgattgggagaccacggatgcgctgctggcccgctgccacagccagctggcggcaccacttttggccagaaccaaggtataag

SEQ ID NO: 242330 - DNA, 462 bp, Unknown
  Bacterial polypeptide expressing nucleotide sequence isolated from the Sargasso Sea
aatgaaaagtaaaatacataatataaacgttgtagccaaagagaagttgccttctccaaaagcactcaaagacaccttgcctctaagcaataaagcaaggaagacagtcttatctaaacgaaaagaattaatgagtattttggacggcaaagattcaaggcttgtcgttgtagtggggccttgctccattcatgacacagatttggctaaagattacgcctctagactaaaagatctctccaaagaggtagaggatgctttcttgatcttgatgagggtatattttgaaaaaccaagaaccaccaccggctggaaaggtttgatcaatgatcctaacatcgatgatacatttcagattgataaaggcattcatattgcaagatcattgcttattgatctaaacgaaatgggtcttggagttgcaacagaggcacttgatccaatcatgcctcaatatttggg

SEQ ID NO: 242331 - DNA, 535 bp, Unknown
  Bacterial polypeptide expressing nucleotide sequence isolated from the Sargasso Sea
ccaccgcgtaaaagacttgtcagaacgggtcgctggcaacctgtacctggtcatgcgcgtttactttgagaagccgcgaacaactgtcggctggaagggtctgatcaatgaccccaacctcgacgattcctttgagattgagaatggccttacgatcggtcgcacattgctcagggatatactgacgctggggctgccgaccgccacggaagcgctcgaccctattacgccacagtacctgcatgatctcatcagctggtctgccatcggggccagaacaaccgaatcacaaacccatcgtgaaatggccagcggtctatcttctcccgtggggttcaaaaatggtaccgacggcggtttggcagtcgcggtcaacgccttgcagtcagttgccaatccgcatcgctttttgggcatcaactcggaaggcaaggtgtcggtgtttgaaaccagcggcaatcggtatggtcacattgtactgagaggggggcagtcatggcccgaactatcgcgccgagcagatcgctcaatgtga

SEQ ID NO: 242332 - DNA, 889 bp, Unknown
  Bacterial polypeptide expressing nucleotide sequence isolated from the Sargasso Sea
atgaattattcaactgataacacaagaattgttgatagaaagaaagttcctgctccctatgagttagtgaataagtaccctattaatgatgaaatttcaaaacttgtatacggtacaagaaatgaaattagccaaattcttcaccataaagatgatcgaatatttgttgttgtagggccatgttcaatacatgatccacaaagtgctattgaatatgcagagaggctatcaattgagaataaaaagtttagtgaaaatatcttattagtaatgagagtttattttgaaaaaccaagaactacagttggatggaaaggattaataaacgatcctgatattaacgaaacctataacattgccaaaggtcttgaaatggctagaaaactgcttattgaaattgctgaattgggattgcctgcaggaacagagtttttagatccaatttcaccgcaatatgtaactgacattatttcgtggggggcaattggtgcaagaacagctgaaagtcaaattcatcgagagctagcatctggtctttcttgtcctattggcataaagaatggaactgatggtggtttaaaagctgcgattgatggaatacaagcagcaaaccactctcatgtttttcttggtgcaacaaaagaagctgatatagctatgcttaaaacagctggtaataatgacgcccacataattttaagaggtggcaaagtgccaaattttaacaaagaatcaatagaaaatactttgactgctcttaaagaagctgaagttaatgaatccataatgattgatgccagtcatggaaatagtcaaaagaaatttaaacaacaaatccctgtaattgattcgatatgcgaacagatttctgatggaaataaaatataaa

SEQ ID NO: 242333 - DNA, 945 bp, Unknown
  Bacterial polypeptide expressing nucleotide sequence isolated from the Sargasso Sea
tgacaaagtagatctagttactcctaatgatgtgatctcaaaatatcctctaactgatgagatatctaaactagtatatgggactagaaatgaggtaagtcaaatactgcatggtaaagacgatagattaatagctgtagttggtccctgctcaatacatgatccggattctgctgaagaatatgcaaaacttttaatagatgaaaagaaaaaatatgaagaagatattcttttgattatgagagtctattttgagaaaccaagaacaagcataggctggaaaggtcttattaacgatccagatatggataatacttttgatgcaaacaaagggctttttcttgcaagatctatacttcataagatttctcagcttggacttcctgtcggcacagagtttcttgatccgatttctcctcagtttgtcgctgatcttatttcatggggtgccattggagcaagaactgctgaaagtcagattcatcgagagttggcatcaggactttcatgtccaattggctttaaaaacggaacaacgggcgatttaaatccggctatttttggtatgaaagcttcaaatcattctcatgtatttttttctaatactaaagaaggaatggtttctatatataagacatctggaaactctgatacacatatcattctcagaggtggaaccaagccaaacctttatccagatgatattagagaaactattgatgcgctcaatgaagcgaaagcaaatgactcaatcatgattgatgtgagccatggcaatagtcaaaaagtctttaaaagacagcttgagaatatcggagttgtatctaagcaaatatctgatggtatgaatgagattagaggagtaatgatagaaagtcacttacgagaaggtaatcagaagattggtgaggatttggaatatggggcaagtgttacagatgcatg

SEQ ID NO: 242334 - DNA, 526 bp, Unknown
  Bacterial polypeptide expressing nucleotide sequence isolated from the Sargasso Sea
atgaattactcgactgacaacacaagaattattgatagaaggaaagttcctgctccatatgaacttgtaaataagcatccaattgatgatcaaatcgcaaagttagtctatggaactagaaatgaagttagtcaaatattacatgataaagacgatagagtttttgttgttgttggtccatgctccatacatgatccagaaagtgcccttgaatatgctcaaaagttagttactgaaagtcaaaaatacagtgaaaatctccttattataatgagagtatattttgagaaaccaagaacaacagttggatggaaaggtctcattaatgatccagatattaatgaaacatttaatatatcaaaaggtattgaaatggccagaaagcttctcataaatattgcaaaattgggtctgccggcaggaactgaatttcttgatccaatttctcctcagtatgtaacagatgtcatatcatggggagccattggagcaagaacagctgagagtcaaattcatagagagcttg

SEQ ID NO: 242335 - DNA, 607 bp, Unknown
  Bacterial polypeptide expressing nucleotide sequence isolated from the Sargasso Sea
atgaattactcaactgacaatacccgaataattgacaaagtagatttagttactcctaatgatgtgatctcaaaatatcctctcactgatgagatatctaaactagtatatggaactagaaatgaggtaagtcaaatactgcatggtaaagacgacagattaatagctgtagttggtccctgctcaattcatgatccagattctgctgaagaatatgcaaaacttttaattgatgaaaagaaaaaatatgaagaagatattcttttgattatgagagtctattttgagaaacctagaacaagcataggctggaaaggtcttattaatgacccagatatgaataatacttttgatgcaaataaagggctttttcttgcaagatctatacttcataagatttctcagcttggacttcctgttggcactgagtttcttgatccgatttctcctcagtttgtagctgatcttatttcatggggtgccattggagcaagaactgctgaaagtcagattcatcgagagttggcatcaggactttcgtgtccaattggctttaaaaacggaacaacgggtgatttaaatccggctatttatggtatgaaagctt

SEQ ID NO: 242336 - DNA, 965 bp, Unknown
  Bacterial polypeptide expressing nucleotide sequence isolated from the Sargasso Sea
taataaacaccctattaacgatgaaatctcaaaacttgtatatggaacaaggaatgaaataagtcagattttacatgacaaagatgatcgattgttcgtagttgttgggccatgctcaattcatgacccagagagtgcaattgaatatgcagaaaggcttaatgaagaaagcaagaaattcaatgaaaatcttttattaataatgcgagtatattttgaaaaaccaagaactacagtaggatggaaaggtttaattaacgaccctgatattaatgaaactttcaatatcgcaaaaggtgtagaaatagcaagaaagttattaattgatatagccaatcttgggctgcctgccggaactgaatttcttgatcctatatctccgcagtatgtaactgatgttatttcatggggagcaattggtgcaagaactgctgaaagtcaaattcatagagaacttgcatcaggtctttcatgtccaattggtattaaaaatggaactgatggaggtttaaaggctgctatagatggtatacaggctgcaaatcactctcatgttttccttggagcgacaaaagaagcagatatagccatgcttaaaactgctgggaatattgatacgcatattatcttaagaggcggcaagaccccaaattatgataaggattcagttgagaatacattaattgctttaagagaagcagaagtaaatgagtcaataatgattgatgccagtcatggaaatagtcaaaagaaatttaaaaaacaaataccagttattgatagcatttctaatcaaattattgagggaaataaaaatattaaaggcataatgattgaaagccatttaaatgaagggaatcaaaaaatatcagataatttaaagtatggtcaaagcattactgatgcatgcatgggctgggaagacactattaaatgtcttgagaatttaaatactgctgtagata

SEQ ID NO: 242337 - DNA, 500 bp, Unknown
  Bacterial polypeptide expressing nucleotide sequence isolated from the Sargasso Sea
tatgaattatttaaccgataacacaagaattgttgatagaaagaaagttcctgctccctatgagctagtgaacaaataccctattaatgatgaaatttcaaaacttgtatacggtacaagaaatgaaattagccaaattcttcatgataaagatgatcgaatctttgttgttgtaggaccatgttcaattcatgatccacaaagtgctattgaatatgcagagaggctatctattgagaataaaaagtttagtgaaaatatcttaatagtaatgagagtttattttgaaaaaccaagaactacagttggatggaaaggattgataaacgatcccgatattaacgaaacgtataacattgccaaaggtgtcgaaatggctagaaaaatgcttattgaaattgctgaattgggattgcctgcaggaacagaatttttagatccaatatcaccgcaatatgtaactgacattatttcgtggggggcaattggcgcaagaacag

SEQ ID NO: 242338 - DNA, 889 bp, Unknown
  Bacterial polypeptide expressing nucleotide sequence isolated from the Sargasso Sea
agcaatagttggcccctgctcaattcatgatccggattctgctgaagaatatgcaaaacttttaattgatgaaaagaaaaaatatgaagaagatattcttttgataatgagggtctattttgaaaaaccaagaacaagcataggctggaaaggtcttattaatgacccagatatggataatacttttgatgcaaataaagggctttttcttgcaagatctatacttcataaaatttctgagcttggacttcctgttggcactgagtttcttgatccaatttctccccagtttgttgctgatctaatttcatggggagctattggagctagaactgctgaaagtcagattcatcgagagctagcatcaggactttcatgtccaattggctttaaaaatggaacaacaggtgatctaaatccagctatttatggcataaaagcttcaaatcattctcatgtatttttttcaaatactaaggaagggatggtttctatttataaaacatccgggaactctgatacgcatatcattctcagaggtggaactgagccaaaccttcatccagaagatatacgagaaactattaatgcacttcaagaagcagaagcaaatgactcaattatgattgatgtaagtcatggcaatagtcaaaaagtctttaaaaggcagcttgagaatataggcattgtttcaaagcaagtatctgatggtatgaatgaaattagaggggtaatgatagaaagtcacttaaaagaaggtaatcaaaaaattggtaatgatttgcaatatggacaaagtattacagatgcatgcattaactttgaagatacaaaacaatgtctttctgagctctcctctgctgttccagctaggagatcgaaaagctag

SEQ ID NO: 242339 - DNA, 421 bp, Unknown
  Bacterial polypeptide expressing nucleotide sequence isolated from the Sargasso Sea
atggaatctatttaccacacagacaatacaagaattgttgaaaagtttgatctaattacacctaataatgtaatttcggagtatccactaactgatgaaatttcaaaattagtatacggaactagaaatgaagctagtcaaattctccatggcaaagatgatagagtgcttgtaatatgcggaccttgctctatacatgatccaatatccgcaatggaatatgctcagcttttaaaagaggcaagagattcattaagcgccgatttgttgataataatgagagtatattttgagaaacctagaactacagtaggttggaaaggtttaatcaatgatccagatattaatgaaagttatgatgcaaataaaggcttaatgctggcaagaaaaattctaagagatattactgcattggggctgc

SEQ ID NO: 242340 - DNA, 637 bp, Unknown
  Bacterial polypeptide expressing nucleotide sequence isolated from the Sargasso Sea
catgatcaaggacaccgtaaataatgttcacgtaagtaccgaagatgtacttataacccctgaagcgcttagtgctgaattgcctgtgtcagacaaagcgttagcggctatctctgagtctagaaagattgtttcagatatcattcatcgtcgcgaccatagattgcttgtagtgtgtggaccatgttctatacacgacgttgaagccgcgaaagagtacgcacttaagcttaaagagcttcatgaatcatgcaaagacacgctatttatcgttatgcgtgtgtacttcgaaaagccgcgtaccacaacagggtggaaaggtttaattaacgacccgcatatcgacggtacatttgatatcgaaaccggtcttcgtaaggcaagagagttgttaatttggcttgcagaattagagctgcctgttgcaacagaagcactggatccaattagtccacaatatcttgctgagctatttagctgggctgctatcggtgcgcgtacctctgaatcgcaaacccaccgtgaaatggccagcggcctgtctatgcctgtaggattcaaaaatggtacagatggaagcctagatattgccataaacgcccttaaatcggccgcatcgggtcaccgctttatggga

SEQ ID NO: 242341 - DNA, 943 bp, Unknown
  Bacterial polypeptide expressing nucleotide sequence isolated from the Sargasso Sea
atgaattactcaactgacaacacaagaattattgatagaaggaaagttcctgctccatacgaacttgtaaataaacatccaattgacgatcaaatcgcaaagttagtctatggaactagaaatgaagttagtcaaatattacatgatatagacgatagagtttttgttgtagttggtccatgctccatacatgatccagaaagtgcctttgaatatgctcaaaagttagttactgaaagtcaaaaatatagtgaaaatctcctgattataatgagagtatattttgaaaaaccaagaacaacagttggatggaaaggtcttattaatgatccagacattaatgaaacatttaatatatcaaaaggtattgaaatggccagaaagcttctcatagatattgcaaaattgggtctgccagcgggaactgaatttcttgatccaatttctcctcagtatgtaacagatgtcatatcatggggagccataggagcaagaacagctgaaagtcaaattcatagagagcttgcctcaggtttatcttgtcctgttggaattaaaaatggtacatctggtagtcttaaagctgcgattgatgggattcaagctgctaatcactcacatgtattccttggagcaacaaaagaatctgacatcgctatgttaaaaacagctggtaacaatgatgttcatatcattcttaggggtggcaaggtaccaaattatgataaggaatcagttgaaaatactttaactgctcttaaagaagctgaagtaaatgaatcaataatgattgatgcgagtcatggaaatagccagaaaaaatttaaacaacaaataccagtcattcaatcaatttcagaacaaattgcagaaggaaatgaaaatattaaaggtgtaatgattgagagtcatttgaatgagggtaatcaaaaaaataggtgat

SEQ ID NO: 242342 - DNA, 624 bp, Unknown
  Bacterial polypeptide expressing nucleotide sequence isolated from the Sargasso Sea
gcgcaacagaaacacttgacccaattacacctcaatatcttgcagacttgatttcatggagtgcaatcggtgcaagaaccaccgaatcacaaactcatagagaaatggcaagtggattgtcgatgcctgtgggttttaaaaatggaactgatggaggattgagtgtggccatcaatgccatgaaatcggcattacaaccgcaccatttcttagggattaataatgaaggactatcttcagcaattcaaacttccggaaacaacaatgtgcatctagtactacgaggtggaaataatggccctaattatgatgccctctctattcagaaagcttctgcatctctagcttctgaagggctacctaaaagtattatgattgactgcaatcatgccaactccggtaaagatccatctcgtcaggaacttgtattaagagatgcaatacaccaaattaaaacgggagataagtcaattatcggtataatgattgaaagtaacataaacggaggtaatcagcctatttctgcaagcctaaaatatggagtatccatcacagacgcctgtcttgattgggagaatactgaaagaattattctcaatgcgcaccaatccctttcgacctaaa

SEQ ID NO: 242343 - DNA, 393 bp, Unknown
  Bacterial polypeptide expressing nucleotide sequence isolated from the Sargasso Sea
aatgacgacatcatcaaataattcagctttagaaaagacatcagatttacatgttgttgaaacacgtccattaattcctccaagcagattacataatgatatacctttagatcatgcctctgctaatacagtatctaaaacaagaagatcgatacaaaatattttgcatcatgatgataaaaaacttttagttattgttggtccatgttcaattcatgatattgaggcggcaaaggaatattcaaaatatattcaagactttcgagaaatttataaagataaattagaaataatcatgagagtatattttgagaagccaagaacaactattggttggaagggattgataaatgatcctcatctagatgattcttatgatataaatactgggtt

SEQ ID NO: 242344 - DNA, 553 bp, Unknown
  Bacterial polypeptide expressing nucleotide sequence isolated from the Sargasso Sea
gatgtcaaagtttatatcaaatgagattattaacacaaatgtggaaataatgaaagaattaataacacctaattatttacatacatgttttccaaatactggtaaaattgcgaattttgtaaagaaaaatagggaagaaatacggaatatattaaatggtgaagatgtaagaaagttaatgatagtaggaccatgttcaattcataatatagagatggcgaaagaatatgggagagaattattaaaaatagcagaaaaatataaagataaaattaagatagtcatgcgtgtttattttgagaaaccgaggactacagtagggtggaaaggtttaattaatgatccagatatgaacggaacattcaatataaataagggattaaaaatggcaagggatttattgctttatttaaatcttataggagttccatgtgggtatgaaatattggatacatttacggcgcaatatattggtgatttaattagttggggcgcaataggagcaaggactactgaaagtcaggtacatagacagatggtttcgggattgtct

SEQ ID NO: 242345 - DNA, 763 bp, Unknown
  Bacterial polypeptide expressing nucleotide sequence isolated from the Sargasso Sea
tatgtacataactgacaacagcagaatattatcaagagaggagctatctactccagaggaaatcattaatgaacttccaatttctaaagacaattcaaaattagtatttggagcccgaaggaatattagcaaaattcttcataaccttgatgaccggatgatagttgtcgtaggtccttgctcaattcatgacccagaatcagctctcgagtacgcaagcctccttaaaggtttttcagaaactgttgaaaatgaaatattaataataatgagggtttattttgaaaaacctcgtacaactattggttggaagggcctaataaatgatccacaattagataattcattcaaaataaatgacggattaagagttgctagaaaagttttaagagatatttcagagataggcttgccagctggaacagagtttctagacctcatatctccacaatatatttccgatctcgttagttggggtgcaattggtgcaagaacatcagagagtcaggttcatagggaattaacatctggtctatcctgtccagttggtataaaaaattcaacaaatggcgaatttaaacctgccattgacggtataaaatcagctcaatttcaacatgttttcttaggaacaacaaaaaagggaaaagttgcaatttttaaaacctctggaaacgatgatactcacataatattgagaggtgggaagcagcctaattatcatgcagaggctgttaacaaatgtattgaggaattgaacagt

SEQ ID NO: 242346 - DNA, 572 bp, Unknown
  Bacterial polypeptide expressing nucleotide sequence isolated from the Sargasso Sea
ttggacagctataggtgcgcggaccactgaaagtcaaactcatagggaaatggcatcaggattatctatgcctattggatttaaaaatggaacggatggttcttttgcaactgcaatcaatgcaatgcagtcagcttcaaaatcgcatcatttcttaggtgtaaatgaaaatggaatggcttctattgttaataccacaggaaatccagacggacatatagttttaaggggcgggtcaaaaggtccaaatttcgaaagtgaacacgttcaaagaatttcatctgaattgcagcaatgtaatcttccccataaagtcatgattgattgtagtcatggtaattccaataaagacttccgaaaacagtcggaagtgcttaaaaatatagcctctcaaataagtaatggtgaaaaaaatattttaggagttatgcttgaaagtcatttaaaggagggaaatcaaaaacttttaaaaaaagagaatctccagtttggcagaagcattacagatgcatgcatagatatagaaacaacgaaagaattactcgccactttatacaattcacttagctagt

SEQ ID NO: 242347 - DNA, 340 bp, Unknown
  Bacterial polypeptide expressing nucleotide sequence isolated from the Sargasso Sea
atgtccattcacaccgatgaattgcgcacccgtcgcctggaggccctgatcacccccagcgagctggcgcacgccttcccgttaaccgacaccatcgcccagaacctgctggatgcccgccgccaagtggaagccattctgtccggtgaggatcagcgcctgctggtcatcgtcggcccctgctccatccacgatcccgccgccgcccacgaatacgccctgcgtctgaacaccctgcgtgaagagtacaaagagagcctgtgcatcgtgatgcgcacctacttcgaaaagccgcgcaccatcgtcggctggaaggggctcatcaatgatccgcgcctgg

SEQ ID NO: 242348 - DNA, 778 bp, Unknown
  Bacterial polypeptide expressing nucleotide sequence isolated from the Sargasso Sea
aagtccttattacccgcaggagctaaaagcgactctgccactctctgagcacgcgtatcgttatatcctcaatgcacgcaaaaccgtggcggatattgtccataagcgcgatcaccgcgtgcttatcgtcactggaccttgttctatccatgatatcgatgccgccaaggaatacgctttaaagcttaaaaagttacacgatgaactcagcgatgagttctacatcttaatgcgagtctactttgagaagccacgtaccacagtgggttggaaggggatgattaacgaccccgatatggatgaatccttcgatgtcgaaaaaggcttaaagatggcgcgtgagctgatgatttggcttgcagagcttgagctgcccgtcgccaccgaagcgctcgaccctatcagtccgcaatatatttcggagctagtgacttggtcggccattggtgctcgcacgactgaatcgcaaacccacagggaaatggcgtcgggtttgtctatgcccgttggctttaaaaatggtacagatggaaagctcgatgtggcaattaatgcccttaaatcggcggccagcagccacagatttatggggattaaccaacagggtcaagtcgctctgttgcaaacggcgggaaaccccgatgggcatgtgatcctgcgcggcggcgtaacaccaaactacgatgcggccagtgtggctgaatgtgaagcgcagctacataaggccaaactcaatgcgcgccttattatcgattgcagtcatggcaattccctctag

SEQ ID NO: 242349 - DNA, 542 bp, Unknown
  Bacterial polypeptide expressing nucleotide sequence isolated from the Sargasso Sea
aatgactagaactgaaaatgttaatattgttgaagtattgccgataacttcaccaaaaaaactcaaagaccttttgcctctttcagacaaagtaattgacaacgtattaaatgcaagaaatgatataaaaaaaattttagcaggaaaggactctcgtttattgattattgtaggcccatgctctattcatgatcctcatgcagcaattgaatatgcagaacgtttaaaaaaacttgctgatgaagtttcagaaacggttcttattgtgatgcgtgtctattttgaaaaaccgcgaaccacagttggctggaaaggattgattaatgacccagaattagacggaagccacaaaataaataagggtattgaactagcccgaaagttactgcaaaaaattaatgctctaggcctcccttgcgcaacagaaacacttgacccaattacacctcaatatctagcggatttgatttcatggagcgcaattggggcaagaaccactgaatcacaaacacatagagaaatggcaagtggattgtcgatgc

SEQ ID NO: 242350 - DNA, 685 bp, Unknown
  Bacterial polypeptide expressing nucleotide sequence isolated from the Sargasso Sea
atggaaaatattagagatataaatataaaagattattcacctataacacctccgaaagtttttatagatgagataccaatttctaaaaaatcagaaaacattgtttcagactcaagaaaaataatttccgatattgtacatgggaaagacaacagaattcttttaatcactggtccatgctcaatacatgatgtagatgcaggcctagagtatgcaaaattattgactgaatttagtaagagcattaaaaatttctatattgtcatgagagtatattttgaaaagccaagaacaactattggctggaaaggtttaattaatgacccagaccttaataatactttcaacatggataaaggattaaggaaagctagaacatttttaaatgatgtaacatcattaggtatgccaacagccaccgagttccttgacccatttactcctcaataccttgctgactttgtttcttggggagccattggagccagaactacagaaagtcaaactcacagacaaatggctagtggattaagtatgcctgttggatttaaaaatggcactggaggaagtattcaaattgcagttgatgcaatgggggctgcacaaggtgaacatgccttccttggaataaatgaagatggtcaaagtagcataatccacacaactggaaataaatatagtcacc

SEQ ID NO: 242351 - DNA, 817 bp, Unknown
  Bacterial polypeptide expressing nucleotide sequence isolated from the Sargasso Sea
atgaattattcaacagataacacaagaattattgatagaaaaaaagttcctgctccttatgaactggtgaacaaatatccaattaatgatgaaatttctaaacttgtttatggaacaagaaatgaaataagtcaaatcttgcataacaaagatgatcggttatttgtaatcgttggtccatgttcaattcatgatcccaaaagtgctattgaatatgcagaaatgctctcaaatgaaaataaaaaatataatgagaacctcttagttattatgagagtttattttgagaaaccaagaacaactgtaggttggaaaggtttaattaatgatccagacataaatgaaacatacaacattgcaaaaggtgttgagatggcaagaaaattgttaatagatattgcggatcttggtttgccagctggaactgagtttcttgatcctatttctcctcaatatgtcactgacataatttcatggggcgcaattggtgcaagaactgctgagagtcaaattcatagagaacttgcatctgggctttcgtgtcctattggtataaaaaatgctacaaatggtggtctaaaggcggctattgatggaattcaagctgcaaatcattctcatgttttccttggtgcaacaaaagaggctgatatagctatgcttaagactgctggaaacaacgatactcatataatccttagagggggtaaggtaccaaattttgataaggaatcagttgaacaaacgctgactgccctaaaagaagccgaagtgaatgaatctataatgattgatgctagtcatggaaatagtcaaa

SEQ ID NO: 242352 - DNA, 532 bp, Unknown
  Bacterial polypeptide expressing nucleotide sequence isolated from the Sargasso Sea
ggcttcgggtttatcgatgcccattggcttcaagaacggcacagatggtggtgtgaccgtggccatcaacgcaatgcaggcagccgcccgtccgcatcattttctgggaattaaccgccagggacatgcctcaatcgtttctacaacgggcaaccctgatggtcatttggtcttgcgtggtggtggcggcaacaccaactaccacgctgaatccatcaattcagtggcggagactttgaaggcagcagggttgccccaccgggtgatggtggactgcagccatggcaattccaataaggactatcggcgccagtccgaggtgctcgagtcggtagctcagcaggtgcgcggtggttcccgttccgtgctcggcgtgatgcttgagagcaacatcgttgccggcaatcagaagctgccggcggacctgagccagctcacctacggccagagcatcacggatgcttgcatcgaccttgcaacgactgaatccctgctcgaacagctcgctgcagcggttccggtggcggtctga

SEQ ID NO: 242353 - DNA, 886 bp, Unknown
  Bacterial polypeptide expressing nucleotide sequence isolated from the Sargasso Sea
tgtagttgttggcccatgctcaattcatgacccagaaagtgcaatcgaatatgcagaaagacttactgaagaaagtaagaaattcaatgaaaatcttttattaataatgcgagtatattttgaaaaaccaagaactacagtaggatggaaaggcttaattaacgacccggatattaatgaaagcttcaatatcgcaaaaggtgtagagatagcaagaaagttattaattgatatagccaatcttggactgcctgccggaactgaatttcttgatcctatatctccacagtatgtaactgatgttatttcatggggagcaattggtgcaagaactgctgaaagtcaaattcatagagagcttgcatcaggtctttcatgtccaattggtattaaaaatggaactgatggaggtttaaaggctgctatagatggtatacaggctgcaaatcactctcatgttttccttggagcaacaaaagaagcagatatagccatgcttaaaactgctgggaatattgatacgcatattatcttaagaggcggcaaaaccccaaattatgataaggattcagttgagaatacattaattgctttaagagaggcagaagtaaatgagtcaataatgattgatgccagtcatggaaatagccaaaagaaatttaaagaacaaataccagttattgataacatttctaatcaaattattgaaggcaataaaaatattaaaggcataatgattgaaagccatttaaatgaaggaaatcaaaaaatatcagataatttaaagtatggtcaaagcattactgatgcatgcatgggctgggaagatactattaaatgtcttgagaatttaaatgctgctgttgataaaaaaaggggtaattaa

SEQ ID NO: 242354 - DNA, 537 bp, Unknown
  Bacterial polypeptide expressing nucleotide sequence isolated from the Sargasso Sea
atttcccccgcactgctgctggacgagctgccggtgccggccgccacgcagacgctcgtcgaggacacgcgccgcgcgatcggcgacatcctgcacggccgcgatgaccggctgctgctagtcgtcggcccgtgctcgatccacgatcacgaccaggcactcgattacgcgcgccgcctgaaggcggccgccgatgcgctgaaggacgacctgctgatcacgatgcgcgtctacttcgagaagccgcgcacgacggtcggctggaagggctacatcaacgatccgcgcctcgacggcagcttccgcatcaacgaagggctgcgcgccgcgcggcaactgctgctcgacatcaacgcgctgggcctgccggcatcgaccgaattcctcgacctgctgagcccgcagtacatcgccgacctgatcgcgtggggtgcgattggcgcgcggacgaccgagagccagagccatcgacagctcgcgtcgggcctgagctgcccgatcggcttcaagaacggcaccgacggcggcgtgcaggtc

SEQ ID NO: 242355 - DNA, 468 bp, Unknown
  Bacterial polypeptide expressing nucleotide sequence isolated from the Sargasso Sea
aatgaaaagcaaaatacataatataaatgtcgtagctaaagagaagttgccttctccaaaagcgctcaaagacaccttgcctttaagcactaagtcaaggaagactgtcctatctaagcgaaaggaattaatgagtattttggatggcaatgattctaggcttgtggttgttgtaggaccttgttcaattcatgataccaatttggcaaaagattatgcattgaggttgaaagagctttctaaagaagttgaagacgctttcttgatattgatgagggtttattttgaaaaaccaagaacaaccactggctggaagggtttgataaatgatccaaatattgatgacacattccagattgacaaaggcattcatattgctcgttcactgcttattgatctcaatgaaatgggacttggtgtcgcaactgaggcacttgacccaatcatgcctcaatatttgggtgatct

SEQ ID NO: 242356 - DNA, 617 bp, Unknown
  Bacterial polypeptide expressing nucleotide sequence isolated from the Sargasso Sea
actagaaatgaggtaagtcaaatactgcatggtaaagacgacagattaatagctgtagttggtccctgctcaatacatgatccggattctgctgaagaatatgcaaaacttttaattgatgaaaagaaaaaatatgaagaagatattcttttgattatgagagtctattttgagaaaccaagaacaagcataggctggaaaggtcttattaatgacccagatatggataatacttttgatgcaaataaaggactttttcttgcaagatctatacttcataagatttctcagcttggacttcctgttggcacagagtttcttgatccgatttctcctcagtttgtcgctgatcttatttcatggggcgccattggagcaagaactgctgaaagtcagattcatcgagagttggcatcaggactttcatgtccaattggctttaaaaacggaacaacgggcgatttaaatccggctatttatggtatgaaagcttcaaatcattcacatgtatttttttctaatactaaagaaggaatggtttctatatataagacatctggaaactctgatacacatatcattctcagaggtggaaccaaaccaaacctttatccaga

SEQ ID NO: 242357 - DNA, 851 bp, Unknown
  Bacterial polypeptide expressing nucleotide sequence isolated from the Sargasso Sea
aatggaaaaaataagagatttaaacataaaaaattattcgccaataacacctcctaaaaattttatggatgaaataccaatttccgaaaattcaaagaaagttgtttcagaatctagaaatattatttctaatattgttcatggaaaagataaaagatttttattgataaccggcccatgctctatacatgatgtagaagctggattagagtatgcaaaattattaacagaatttagtaagaaaattaaaaatttttatttggttatgagggtatattttgaaaaacctcgaacaactgttggatggaaaggtttaataaatgatcctgaccttaacaacacatttgatatggacaaaggtcttaaaaaagctcgaacttttttaaacgatgttacctctttagggatgcctacagcaactgaatttttagatccttttactccgcaatatctagcagactttgtatcatggggtgcaattggtgcgagaactactgagagtcaaactcacaggcaaatggctagcggcctaagtatgcctattggatttaaaaatggaacaggtggaagtatacaaattgcagtagatgcaatgggtgctgcacaaggagaacatgcgtttttaggtattaatgaacttggtcaaagcagtataattcaaactttaggaaataaatacagtcatttaattttaaggggcagtacacaaggaactaattttgacgagaaaagtgtatcagatgctataaatttagttagcaatcaaggaatgcatccgtctgtagtagttgattggtcacacgcaaattgcggaaaagatcataaaaaaatgaatatttctttcagagagt

SEQ ID NO: 242358 - DNA, 454 bp, Unknown
  Bacterial polypeptide expressing nucleotide sequence isolated from the Sargasso Sea
atgacgacttcatccaataatcaatctttagaaaaaacatctgatttgcatgttgttgaaacacgtccattaatacctccaatcaaacttcataatgatatacctttagattatacctctgcagaaactgtctctaagaccagaagatcaatacaaaatattttgcataagaatgatccaaggattttagtcatagtgggaccatgctcaatccatgacgttgaggctgctaaagaatattcagaatatattcaggaatttagaaaaatttataaagatagattagaaattgtaatgagagtatattttgaaaaaccgagaactacaattggttggaaaggattaataaatgatccacatctagatggttcatatgacattaatacaggtttgcgaagagcgagaaatttactatcttatctggcaactcgtggtattccctctgctactgaat

SEQ ID NO: 242359 - DNA, 595 bp, Unknown
  Bacterial polypeptide expressing nucleotide sequence isolated from the Sargasso Sea
catgcataagacaagtgatttaagaatctcaggtaggcaggaagtaatttctgcaagctccttattggaccaacaaccaatttcagatatttcctcccaaatagttttcaattcaagaaaagaattttctgaaatactcagtaaaaaagataaaagattagcagtcgttgttgggccatgttctatccatgacactgagtcggctatggaatatgcaaaccttttacttaaggaaaagaaagctctagaaaaagaacttctgattgttatgagagtgtatttcgaaaaaccaagaacaacagttggttggaaaggcctcattaatgatccagatctggataattctttcaatattgataaaggtttatcagtatcaaggcaactcttgagagatataaatgatttaggtatgcctgctggaacagaatttttagatgttataacgccccaatatatagctgatctaatctcctggggagccataggagctagaactacagagagtcaaatccatagggagctcgcttccggttcttcctgtcccattggctttaaaaacgcaacaaacggaggtattcaagtagctgctgatgcc

SEQ ID NO: 242360 - DNA, 805 bp, Unknown
  Bacterial polypeptide expressing nucleotide sequence isolated from the Sargasso Sea
agaaataggcgatattatcaatgaaacttctgataaatttctaatattagttgggccttgttctattcacgatgttcaggcctgcctggagtatgcaaataagcttaaaactttatctgaccaagtaaatgacaaaattatgattgtaatgcgtacatactttgagaaacctagaaccacaactggatggaaaggttttataaatgatccgaatttaaatgattcatttgatgtgcatgaaggcttaaaaaaagctagaggttttcttaatcaaatattacatataggattacctaccgctacagaattcttagatccatttatgccccaatattatggtgacttaatttcatggggtgcaattggagcaagaactgtagaaagccaaactcatagacaattatctagtggattaagcatgccgattggattcaaaaacggaacaggaggttctgtacaaatagctattgatgcaatcatagctgctaaaaatcaacatgtattcctcggaattgatgaaaaaggacaaacatctgttgtgaaaacaagcggtaataaatatggacatttaatacttagaggtggaaaaacaggtcctaattatgacagcaagtctgtagaatctgcagtaaatagcttgattgaaaataaattggatcctaaactagtaattgattgctctcatggtaattcgaataaagatcacaagaaccaatcaaaagtattcaaatcgatcatggagcaaaaaaaaagtggccaaaatgctatttttggtgtaatgctagaaagtcatcttaatcccagg

SEQ ID NO: 242361 - DNA, 913 bp, Unknown
  Bacterial polypeptide expressing nucleotide sequence isolated from the Sargasso Sea
tatgactaagaattggtcaaaagatagctggagaagtaagcctattttacaagttccagaatacgatgatttagatcaattgaaaaaggttgagtcacgcctgacctcttatcccccgctagtttttgctggagaagcaagaagacttaaagaaaatcttgcaaaagtatctagaggtgaagctttcttacttcaaggaggagattgtgcagaaagttttgcagaacacaatccagataacataagagatacctttagagtaattcttcaaatggcgattgttttaacatttggggctggctgtccagtaattaaagttggaagaatagcaggtcaatttgctaaaccaagatctgcacctttagaaaaacaggaagaaattgagctaccaagttataggggtgatattataaataatattgaatttgttgaagatcttagaattcctgatcctgaaagacaaattatggcatatagacaatctgcttcaacattgaatcttcttagagcttttgcacaaggtggttatgcaaatcttgatcatgttcataaatggaatatgggttttgttaaagaaagtaaacaaggcgaacaatatgaacaagtagctaatagaatttcagaaaccttggattttatgaacgctgttggaataaattcggatacaacccctgagttacgatctgtcgatttttacactagtcatgagtcactattgctaggttatgaagaatgcttaactagagtggactcaacaagtggtgattggtacgatacatctgcacatatgctttggattggagatagaacgaggcagcctgatggcgctcatattgaatttgtaagaggaataaagaatccaataggaatgaaatgtggtccttcattagacccagacgaattattaaattaa

SEQ ID NO: 242362 - DNA, 586 bp, Unknown
  Bacterial polypeptide expressing nucleotide sequence isolated from the Sargasso Sea
aatgatccaaaccgaagaccttaatgttaccggggttaatcccctgactgctccaaaatacatcaaagtagaataccccatttcggataaggccagtgaaacggtatttaagtttcgaaaacagattaaagatgtactggatgaaaaggattccaggcaattggtcatagttggtccttgttcaatacaccatgctgatatagcactggattatgcggataaactcaccaagttgattcccgaagtcgaagacaaattgttggtggtgatgagggtttattttgaaaagccccgcacaactgtaggatggaaaggattgatcaacgatccggacctggacggaagtcataagatcgagaaagggatcaagcttgccagaaagattcttctcaacatcaatgaaatgggaattccgtgtgcgacggaaaccctggatccgatcactccgcagtatcttgccgatttaatttcatggagcgcgataggagcaagaacgacggagtcccaaacccatcgagaaatggccagcgggctttcaatgcctgttggcttcaagaacggaaccgatggggggttagaagttgcc

SEQ ID NO: 242363 - DNA, 694 bp, Unknown
  Bacterial polypeptide expressing nucleotide sequence isolated from the Sargasso Sea
atggtttgtcgagtggaacaagttacaaacttaagaattaccgattcggtgaccctgccctcaccggtcgagttgcgtggagaaattccccgatcgaccgaacaaaaggccttcgtcacccagtcacgccgggagttgcacgctctcattcacggagaggacaagcgtttgcttgccgtggtcggaccgtgctccattcatgacctgaaatcatgccgcgagtatgccgaacgctttgccaagctttccgccgaattgaaggaccgccttcttttggtaatgcgggtttatttcgaaaagccccgtaccaccgtgggatggaagggcctgatcatggaccccaagctcaatggaacctgtgacattcccgaaggcttgcgcatcgcccgcggatttttgggagaggttctggatttgggcattcccaccgccaccgaactgctcgaccccattaccccgcaatttatctccgattccttgtgttgggcggcgatcggcgcccgcacctcggaatcgcaaacccatcgccaaatggcatccgggctatccatgccggtcggtttcaagaacgccaccgccggggatctgaaggccgcggtcaacggaatcatcgcagccacgcaaagccagacctttctcggaatcaccgaagacggcaaggcgtccgccgtgaccaccgggggcaaccccgatt

SEQ ID NO: 242364 - DNA, 721 bp, Unknown
  Bacterial polypeptide expressing nucleotide sequence isolated from the Sargasso Sea
aatgatcctcatctagataattcttatgatattaatactggtttaagaagggcaagaagtttgctttcatatttagcaactcgtggaattccctctgctacagagttattagatccaattgttcctcaatatattgctgatttaataagttggacagccataggggcgcggaccactgaaagtcaaactcatcgtgaaatggcatcaggattatcaatgcctataggttttaaaaatggaacagatggttcttttactactgcaataaatgcaatgcagtcagcttcaaaatctcatcatttcttgggtgtaaatgaaaatggaatggcttctattgttaatacaacaggtaatccagatggacacatagttttaagaggcggttcaaaaggcccaaattttgaaagtgaacacgttaaaagaatttcctctgagttgaagcaatctaatcttccccataaggtgatgattgattgtagtcatggtaattccaataaagattttcgaaaacagtcggaagtactaaaaaatgtagcttctcaaattaaaattggtgaaaaaaatattttaggagttatgcttgaaagtcatttgaaggagggaaatcaaaaacttttaaaaaaagaggatctccagtttggcagaagcattacagatgcatgcatagatatagaaacaacgaaagaattactcgctattttatacaattcacttagctagt

SEQ ID NO: 242365 - DNA, 822 bp, Unknown
  Bacterial polypeptide expressing nucleotide sequence isolated from the Sargasso Sea
tatgaattattcaactgataacacaagaattattgatagaaagaaagttcctgctccttatgagttagtgaataagtaccctattaatgatgaaatttcaaaacttgtatacggtacaagaaatgaaattagtcaaattcttcatgataaagatgatcgattatttgttgttgtgggaccatgttcaatacatgatccgcaaagtgctatcgaatacgcagaaaagctatctattgaaaataaaaagttgagtgaaaatatcttaataataatgagagtttattttgaaaaaccaagaactacagttggatggaaaggattgataaacgatcccgatattaacgaaacctataatattgccaaaggagtcgaaatggctagaaaattgcttattgaaattgctgaattgggattgcctgcaggaacagaatttttagatccaatttcaccgcaatatgtaactgacattatttcttggggggcgattggcgcaagaacagctgaaagccaaattcatcgtgagcttgcatctggtctttcttgtcctattggcataaagaatggtactgatggtggtttaaaagctgcaattgatggaatacaagcagcaaatcattctcatgtttttcttggtgcaacaaaagaagctgatatagctatgcttaaaacagctggtaataatgacgcccacataattttaagaggtggtaaagtgccaaattttgataaagaatcagtagaaaatactttgactgctcttaaagaagctgaagttaatgaatccataatgattgatgccagtcatggaaatagtcaaaagaa

SEQ ID NO: 242366 - DNA, 563 bp, Unknown
  Bacterial polypeptide expressing nucleotide sequence isolated from the Sargasso Sea
tatgactaaaaattggtcaaaagatagctggagaagtaagcctattttacaagttccagaatacgatgatttagatcaattgaaaaaggttgagtcacgcctgacctcttatcccccactagtttttgccggagaggcaagaagacttaaagagaatcttgcaaaagtttctaggggtgaagctttcttgcttcaaggaggagattgcgcagaaagttttgcagaacataatccagataatataagagatacctttagagtaattcttcaaatggcgattgttttgacatttggggctggatgtccagtaattaaagttggaagaatagcaggtcaatttgctaaaccaagatctgcgcctttagaaaagcagggagaaattgagctgccaagttatagaggtgatattataaataatattgaatttgttgaggatctaagaattcctgatcctgaaagacaaattatggcatatagacaatctgcttcaacattgaatcttcttagagcttttgcacaaggtggttatgcaaatcttgatcatgttcataaatgggatatgg

SEQ ID NO: 242367 - DNA, 541 bp, Unknown
  Bacterial polypeptide expressing nucleotide sequence isolated from the Sargasso Sea
atgaaaagtaaaatacataacataaacgttgtagccaaagagaagttgccttctccaaaagcactcaaagacaccttgcctcttagcaataaagcaaggaaaacagtgttatcaaagcgaaaagaattaatgagtattttggatggcaaagattcaaggcttgttgttgtggtggggccttgctccattcatgacacagatttggctaaagattatgcctcgagactaaaagagctctccaaagagatggaggatgcgttcttgatcttgatgagggtatattttgaaaaaccaagaaccaccacaggctggaaaggcttgatcaatgatcccaatatagatgatacatttcagattgataaaggcattcatattgcaagatcattgcttattgatctaaacgaaatgggtcttggggttgcaacagaggcacttgatccaatcatgcctcaatatttgggtgatctgacaagctggactgccattggtgctagaacagcagaatcccaaacacacagggaaatggcaagcggattatcta

SEQ ID NO: 242368 - DNA, 831 bp, Unknown
  Bacterial polypeptide expressing nucleotide sequence isolated from the Sargasso Sea
cattctttccagcgatgacccgcgattgttagcgattgtgggaccatgttctatccatgatcccattgcggccattgattacgcgtatcgccttttggagatggctcgtaaacttgaggaagatctagttatcgtcatgcgagtatattttgagaagcctcgtactacagtaggttggaaaggattaattaatgatcccggccttgatgatacctttgaaataaatcgaggtcttcgcgtagccaggaagctcttgctcgatctttctgatatggggcttcccaccggcactgaatacttggatctgataagccctcagtacattgctgatttgatttcttggggagccattggtgcgagaacaacagaaagtcaaacacatcgagaattggcttcaggactttcttgtccggttggattcaaaaacgctactaatggcgatattcaggttgcaattgatgctataggatccgcaattaagccgcaccattttttgtcggtcacaaagtctggtcattctgcaattttccatacaaaaggtaatgaagattgccatgtgatcttgcgcggagggcgtgctccaaattacgatatgttttctgtagatgacacgtcattgcttttagataaagcgggacttccgtcaagaataatgatcgatgctagtcatgcgaatagtcgtaagaaaccaacaaagcaaattgatgtgactctcgatattgccaatcaggtgagacggggtgatggccgcatttttggagtcatgcttgaaagcaatcttgtagagggtaggcaggatgtagcgagtgatcgtaaattgacatatggaca

SEQ ID NO: 242369 - DNA, 608 bp, Unknown
  Bacterial polypeptide expressing nucleotide sequence isolated from the Sargasso Sea
aatgagagaacagatacataatataaatgttgttgctaaggagaaattgctttcaccaaaagcacttaaggcaaccctgcctttaaccaggtctgccaggaaaacagttttacaatctcgtaagagtttgatgtcaatcctcgatggtaaagatgatcgattgattattgtggtcggcccctgttccatccatgataccagcctagcaatcgactacgcagaacgcttaaagaaacttgcaaagttggtagaggacaagtttttgatcttaatgagggtttacttcgaaaaaccaaggactacgactggttggaaaggattaattaatgaccctaatattgatgataccttccagattgataagggtgttcatatcgcaagatcactgatgattcagctcaatgaaatgggtctaggcgttgctactgaagcgcttgatccaattatgcctcaatatttaggagatttaaccagttggactgcaatcggagcaaggaccgctgaatcccaaacacatcgagaaatggctagcggtttatccacaccagttggttttaagaatggaacagatggttcattatctgtagcaatcaatgcgataaaatcct

SEQ ID NO: 242370 - DNA, 613 bp, Unknown
  Bacterial polypeptide expressing nucleotide sequence isolated from the Sargasso Sea
aatgaattactctacagacaacacaagaattattgatagaaggaaagttcctgctccatacgaacttgtaaataaacatccaattgacgatcaaattgcaaagttagtctttggaactagaaatgaaattagtcaaatattacatgataaagacgatagagtttttgttgtagttggtccatgctccatacatgatccagaaagtgcccttgaatatgctcaaaagttagttactgaaagtcaaaaatatagtgaaaatctcttgattataatgagagtatattttgagaaaccaagaacaacagtaggatggaaaggtctcattaatgatccagacattaatgaaacatttaatatatcaaaaggtattgaaatggccagaaagcttctcatagatattgcaaaattgggtttgccggcgggaactgaatttcttgatccaatttctcctcagtatgtaacagatgtcatatcatggggagccattggagcaagaacagctgagagtcaaattcatagagagcttgcttcaggtttatcttgtcctgttggaattaaaaatggtacaactggtggtcttaaagctgcgattgatgggattcaagctgctaat

SEQ ID NO: 242371 - DNA, 369 bp, Unknown
  Bacterial polypeptide expressing nucleotide sequence isolated from the Sargasso Sea
aatgaattactcaaccgataacacaagaatcattgaccgcaacaaggttccagctccatatgaacttgtaaataaatatcctattaatagtgagatttctaaacttgtttacggaacaaggaacgaaataagtcaaatcttgcatgacaaagatgatagattatttgtagttgtcggaccatgctcaattcatgatccagaaagcgcaatagagtatgctgaaagactagttaaagagagcaagaaatttaatgaaaatctattattaataatgcgagtatattttgaaaaacctcgaaccactgtgggttggaaaggtttaattaatgatcctgatttaaatgaaacttttaatattttcaaaaggaa

SEQ ID NO: 242372 - DNA, 527 bp, Unknown
  Bacterial polypeptide expressing nucleotide sequence isolated from the Sargasso Sea
aatgatccaaaccgaagaccttaatgttacaggtgttaatcctctgactgctcctaaatttatcaaagcagaatatcccatttcggataaggccagtgaaaccgtatttaagtttcgcaaacagattaaagatgttttggatgaaaaggattccaggcaattggtcatagttggtccttgttcaatccaccattctgatatagcaatggattatgcggacaaactcaccaagttgattcccgaagtagaagacaaattattggtagtgatgagggtttattttgaaaagccccgcacgactgtaggatggaaagggttgatcaacgatccggaccttgacggaagccacaagatcgagaaagggatcaagcttgccagaaaaattcttcttaatatcaatgaaatggggattccgtgtgcgacagaaaccctcgatccgatcactccacaataccttgccgatttaatttcatggagcgcgattggagcaagaacgacggagtcccaaacccatcgagaaatggcca

SEQ ID NO: 242373 - DNA, 832 bp, Unknown
  Bacterial polypeptide expressing nucleotide sequence isolated from the Sargasso Sea
cagacccaaacccgttggatgacgctttaccatcattcagcagccacgttaaatttgttacgtgcttttgcacaaggtggattagcggacctgcatcaggttagccgctggaatctgggctttgttgacgccaatccattaaaaggccgctaccaggatgtggctcagcgtattcaggaagcactgcgttttatggaaatttgcggtattacggcagagaactcgccgtcaattcgcgaaacatctttatatacctcgcatgaagcgctgttgctgaactacgaagaagctttaacccgccgtgattcgttaacaggtgaatggtatgactgttcagcccatatggtctggataggcgagcgtaccagacagttggatcatgctcatcttgagtttttccgtggcatcaaaaacccagtgggtgtgaaagtgggccctggtatggatgaagtggatttattgcgccttatcgacgcgttgaatccggagaatattcctgggcgcctgacattaatcacccgaatgggcgctgataaactggctgaaaagttacctgctttagtccgtcgggtagagcgcgaaggccgtaaagtggtctggagttctgatcctatgcatggcaatacggttaaagccagcaacgactacaaaacccgtgactttgaagcgattttgcgtgaaatccgctatttctttgcggtgcatcaggcagaaggcactcatgccggtggtatccacctggaaatgacaggcgataacgtcactgaatgtactggtggcgcttatggtttgtctgaaaacgatttaagcaagcgttacaccactcagtgtg

SEQ ID NO: 242374 - DNA, 724 bp, Unknown
  Bacterial polypeptide expressing nucleotide sequence isolated from the Sargasso Sea
aatgatcctgaattagacggaagtcacaaaataaacaaaggtatcgaactcgctcgtcggttactactggatattaatgcactaggcctgccttgtgccacagaaacacttgacccaattatgcctcaatatctggcggatttgatttcatggagcgcaattggagcaagaacaactgaatcacaaacacacagggaaatggccagtggattgtcgatgcctgtaggttttaaaaacgggactgacggaggattgagtgtggccatcaatgccatgaaatctgcattgcaaccgcaccattttctgggtatcaataatgaaggtttatcttctgcgattcaaacttctggaaacagcaatttacacctagtactgcgtggcggcagcaatggccccaattacgatgctctgtctattcacaaagctgcggaatccttagcatcagaaggattacctaaagccattatgatagactgtaatcatgctaactcagggaaagacccctctcgacaggaacttgtattaagagacgcaatacaccagataaaaaacggtgataattcaattgtcggcataatgatcgaaagcaacataaacggaggtaatcagccgatatcagctagcctgcaatatggcgtatccattacagatgcctgtcttgattgggaaaatacaaacagaattattcttaacgcacatcaatccctgataacattcagctaat

SEQ ID NO: 242375 - DNA, 960 bp, Unknown
  Bacterial polypeptide expressing nucleotide sequence isolated from the Sargasso Sea
ggcaaagcatttttactgcaaggcggagattgtgcggagagctttagtgactttaatgcaccaaaaattcgtgacacttttaaagtattgttgcaaatggccgtggtactcacctttgccggcggttgtcctgtagtcaaagtagcacgtatggctggccaatacgccaagcctcgctccagcgatttagaaaccatagctggtgtatctcatccaagctaccgtggtgatatagtcaacagctttgaattcaccgccgaagcccgtaagccggatccaaaccgtttaatgacggcttaccatcattcagctgccaccttaaatttgttacgtgcttttgcacaaggtggattagcagacctgcatcaggtcagccgctggaatctgggttttgttgacgccaatccactgaaaggccgctatcaggatgtggctcagcgtattcaggaagcgctgcggtttatggagatttgcggtattacggctgaaaactcaccctctatccgtgaaacctctttgtatacctcgcatgaagcgctgttactgaattacgaagaagccttaacccgtcgtgattcgttaacaggtgactggtatgactgttcagcccatatggtctggataggcgaacggacccgtcagttggatcatgcacatcttgagtttttccgtggcatcaaaaaccctgtgggtgtgaaagtgggccctggtatggatgaagtggatttattgcgccttatagacgcgttgaatccggacaatactccaggccgcctgacgttgatcacccggatgggcgcggataaattagccgaaaagttacctgctttagtacgtcgtgttgagcgtgaaggtcgcaaagtggtctggagttcagatcctatgcatggcaacacagtcaaagccagcaacgattacaaaacccgtgactttgaagcgattttgcgtgaaatccgttat

SEQ ID NO: 242376 - DNA, 761 bp, Unknown
  Bacterial polypeptide expressing nucleotide sequence isolated from the Sargasso Sea
aatgcaaaaaacaagcgatttaagaatatcaggaaggcaggaagtaatttctgcaagctctctcttggccgagcaaccaatatcagaggtttcttctgaaacggtttttaatgccagaaaagagttttcagaaattctttataagaaagacaatagattggctgttgtagttgggccctgttcgatacatgacaccaatgcagccatggagtatgcaaatctcttgttggaagaaaaaaataatcttaaagatgagcttctcatcattatgagggtatatttcgaaaagcccagaaccacagtaggatggaaaggcctaattaatgatccggatcttgataattctttcaatattgataaaggtctatctgtatctagacagctattaagagatataaatgacttaggtatgccagcagggacagaattccttgatgtaattacacctcaatatattgctgacctaatctcttggggtgcaataggagctagaaccactgagagtcaggtccatagagaattggcttcaggttcatcgtgtccaataggctttaaaaatgcaactaatggaggcatacaagtagctgcagatgctataggttctgcccttcatcctcataagtttttatctgtaacaaaagacggaagagctgcaattttttcttcatctggcaataaggattgtcacgtttatttaaggggtggaaaagaatcaaattattcaaacaagcatatcaacgaaacttctgagttacttagat

SEQ ID NO: 242377 - DNA, 496 bp, Unknown
  Bacterial polypeptide expressing nucleotide sequence isolated from the Sargasso Sea
ggttttaaaaatggtacagatggttcttttactactgcaataaatgcaatgcagtctgcttcaaaatctcatcatttcttaggtgtaaatgataatggaatggcttctattgttaatacaacaggtaatccagatggacatatagttttgagaggcggtttaaaagggccaaattttgaaagtgaacatgttaaaagaatttcctctgaattgaaggaatgtaatcttccccataaagtgatgattgattgtagtcatggaaattccaataaagacttccaaaaacagtcggatgtactgaaaaatatagcttctcaaataagtaatggtgaaaaaaatattttaggagttatgcttgaaagtcatttgaaggaaggaaatcaaaaacttgtaaaaaaagaagatctccagtttggcagaagcattacagacgcatgtatagatatagaaacaacaaaagaattacttgctattttatacaattcacttagctagt

SEQ ID NO: 242378 - DNA, 728 bp, Unknown
  Bacterial polypeptide expressing nucleotide sequence isolated from the Sargasso Sea
ctttgaaaaaccaagaacaagcattggctggaaaggtcttattaatgacccagatatggataatacttttgatgcaaataaagggctttttcttgcaagatctatactccataaaatttctgaacttggacttcctgttggcactgagtttcttgatccaatttctccacaatttgttgctgatctagtttcatggggtgccattggagccagaactgctgaaagtcagattcatcgagaactggcatcgggactttcatgtccaattggatttaaaaacggaacaacgggtgatttaaatccagctatttatggtatgaaagcttcaaaccattcacatgtatttttttcaaatactaaggaaggaatggtttctatttataaaacatctgggaactctgatacacatatcattctcagaggtggcactaaaccaaacctttacccagatgatataagagaaactattaatgcacttaatgaagctgaagcaaatgactcaatcatgattgatgtaagccatggcaatagtcaaaaagtgtataaaagacaacttgaaaatattggggttatctctaagcaaatatctgatggcatgaatgaaataagaggaataatgatagagagccatctaagagaaggtaatcagaagattggcgaggatttacaatatggacaaagtattacagatgcatgcattcactttgaagatacaaaacaatgtcttt

SEQ ID NO: 242379 - DNA, 853 bp, Unknown
  Bacterial polypeptide expressing nucleotide sequence isolated from the Sargasso Sea
agtcaaattcttcatggcaaagatgatagagtgcttgttgtatgtggaccctgctctatacatgacccacaatccgcaatggaatatgctcggcttttaaaaggggcaagagattcattaagcgctgatttgttgataataatgagagtatattttgagaaacctagaacgacagtgggttggaaaggtttaatcaatgatccagatattaatgaaagttatgatgtaaataaaggcttgatgctggcaagaaaaattctaagagatattactgcattggggctaccaataggaacagaattcctagatcccatttctcctcaatatgtagcagatcttgtgtcttggggtgccataggagctagaacagctgaaagtcagtctcatagagaattagcctctggtctttcttgtcccataggtattaaaaatggaacaactggagctttaaaacctgcaattgacggcatccaagcagctaaccatcctcatgtatttttctcaaatacaaaagatggtcgagtatcaatatataaaacatctggaaattcagatgcacacatcatattgcgcgggggtaaagagccaaattttagttcagactcaattcaacaaacattaactgcattaactgaagcggatgtaaatgactctattatggttgatgcaagtcatggaaatagtcaaaaacaatttaaaaaacaaattgatgttgtagaaaacttagctgtacaaattgctgaaggtaacaatagtttgaggggtttaatgctgaaagtcatcttgttgaaagaaatcaaagtattacagataaccttgtatatggacaaagtattaccgatgcctgcatgaa

SEQ ID NO: 242380 - DNA, 701 bp, Unknown
  Bacterial polypeptide expressing nucleotide sequence isolated from the Sargasso Sea
catgcagaacctcgacaatccttcccacgatcgcgaggtaggcagcgccgacgcgacgcaggacaccacgcgcatcgacgacgtccgcatcggcgccgtgcgcccgctgatttcccccgcactgctgctggacgagctgccggtgccggccgccacgcagacgctcgtcgaggacacgcgccgcgcgatcggcgacatcctgcacggccgcgatgaccggctgctgctcgtcgtcggcccgtgctcgatccacgatcacgaccaggcactcgattacgcgcgccgcctgaaggcggccgccgatgcgctgaaggacgacctgctgatcacgatgcgcgtctacttcgagaagccgcgcacgacggtcggctggaagggctacatcaacgatccgcgcctcgacggcagcttccgcatcaacgaagggctgcgcgccgcgcggcaactgctgctcgacatcaacgcgctgggcctgccggcatcgaccgaattcctcgacctgctgagcccgcagtacatcgccgacctgatcgcgtggggtgcgattggcgcgcggacgaccgagagccagagccatcgacagctcgcgtcgggcctgagctgcccgatcggcttcaagaacggcaccgacggcggcgtgcaggtcgcgtccgacgcgatcgtcgcggcagcggcgagccatgcgttcatggggatgacga

SEQ ID NO: 242381 - DNA, 1375 bp, Unknown
  Bacterial polypeptide expressing nucleotide sequence isolated from the Sargasso Sea
atgacaaatgaatggtcacctaagtcatggagggcaaaaaaagctaaacacattcctttttatgaagatgaaaaggagttaaacaatgtattggctaaaatcgaaaaatttcctcctttagtttttgcaggtgaagcaagaatgcttcaaaacaaacttgctgaagtttctgaagggaatgcttttcttttacaaggtggggattgcgcagaaagtttttctgattttcatcctgataatataagagatacttttaaagtaattcttcaaatggctgttgttttgacgtttggagcttcatgccctgttgttaaagtaggcaggatcgcaggacaatttgcaaaaccaagatctcaagacactgaaacaatcaataaaatagagttagaatcttataagggagatataattaatggtttagattttaatgaaaaatcccgtaaacctgatccaaatagattgattcaggcttataatcaatcagcttcaacccttaatttactaagagctttttctcagggtggttttgctaatttacataagattcatcaatggaatcttagctttgttgaaggagaaaatgctgaaaagtttaaacaaatatctgacaggattgatgagtgtttagcttttatgaatgcatgtggaattaatgatcaaaatgtaagtcaattgtatgaaacagatttttttacaagtcatgaagcacttttgttaccatatgaagaagcaatgacaagaatagatagtactaatggtaaatggtatgatgtttctgctcatatgctatgggttggtgatagaactaggcaatttgatggtgctcatattgaatttgttagaggcataggaaatccaattggcattaaagttggaccttcttcaagtattgatgatttattgaaaatcattcaattaattaaccctgaaaatatcccaggaagaataactttaatttgtagaatgggttctgacaaaataatgcaaaaacttcctaaaattgtagataatgttcataaagaaggtagaagtgtagtttggacatgtgatccaatgcatggcaatactattaaatcaaattctggatacaaaacaagacctctaaataatataatttctgaaatacaacaattttttcaaatccatagatctataggtactcatccaggaggagttcatgtagaaatgactggtatggatgtaactgaatgtatgggtggtcttcaaaaaattacagatgaagatttaaaaaatagataccatacttattgtgatccaagacttaatgcttcacaatcattagaattagcttttttattagctgaatttttgaaagatgataagtttagttcacaaatctctttaaatctttaat

SEQ ID NO: 242382 - DNA, 841 bp, Unknown
  Bacterial polypeptide expressing nucleotide sequence isolated from the Sargasso Sea
atgaaaaaatggaaattaaatagttggaggaactatccggtaaaacacatccctacttatgaggatgaaaaagaacttaatatggttcttaataaaattaaaaactttccccctttagtttttgctggagagactagacatttaaaacaacaacttgctgatgttgttgatggaaaagcttttttgttgcaaggaggagattgtgcagaaagttttgcagaatttaatccagataacattagagactattttaaagttatgttgcaaatgtcattggttttaacatattcagcatctttaccagttgtaaaattaggaagaattgcaggacagttttcaaaaccacgaagtgcaccaacagagaaacaaggtgacaaagagctcccaagctatcttggcgataatataaatggaatagaatttaatgaaaaagccagaagacctgacccaaagagattatttaaagcttactcacaagcagcttcaactttaaacttactaagagcattctgtcatggtggattcgcagatttaaaaatggttcatctttggaatttgggttatattaaaaaaagtccccaagcaaaaaaatttaaagaattagaagataaaatagctgatgccttggcatttatggatgcttgcggaataaattcagattttaatagaagacttaaaacagtaaatttttggacttctcatgaggcacttttattaccttttgaagaaactatgacaagagtagactcaaccactggtgaataccatgatacttcagcccatttcgtttggataggtgatagaacaagacagttaaatggtggccatgtagaattttgca

SEQ ID NO: 242383 - DNA, 1219 bp, Unknown
  Bacterial polypeptide expressing nucleotide sequence isolated from the Sargasso Sea
tatgaaaactcaatggtcaccacattcctggcgctcaaagccagcaaaacacatgccaatttataaagatgaaaattctttaaaggaatgtttagataagataaaaaaatttcctcccttagtatttgctggagaagcaagatctttaaaatctaaacttgctaaagtttcaacaggtgaggcatttttattacaaggtggtgattgtgccgaaagctttgtagattttcatcctgataatattaaaaacagttttaaagtaattttgcaaatggcagtggttttaacatttggagcctcttgccctgttgttaaagttggaagaatagctgggcaatttgctaaacctcgatcatctgataaagaaacaattaatggagtagaattagagtcatataaaggagacataattaatggaatagaatttacaaagtcagatagaactccagatccttcaagactaattcaggcatataatcagtcagcttcaactttgaatttgcttagggctttttcacaaggaggatacgctaatttaaataaaatacatcaatggaatcttaattttgttgaagaagagaacgctaataaatttgcagagattgcagatagaatagatgaatgtcttgctttcatgaaagcatgtggcattaatgatggcaatgtaagccaaatttatgaaacagaatttttcacaagtcatgaagctctattgttagattatgaagaagctttaaccagaattgatagtacttctggtaaatggtatgatgtttctgctcacatgctctgggtaggtgatagaactcgccaattggatggagcgcatattgagtttgtaaaaggaattgaaaatccaattggaataaaggttggacctacttcagatcctgaagaattagttaaaataatcgatattataaatcctgaaaatgaagcaggaaaagtaactttaatttgtcgaatgggagctgaaaaaatagatagtcacttaccttcaataattaaaaaggttaaaaatgaaggaaaaattgttgtatgggcttgcgatccaatgcatggaaacacaataaagtccaaaactggatataaaactagaccagtaaataatattttctctgaaattcaaaagttttttgctattcataaagcttcaggcacttatccaggaggtattcatcttgaaatgactggttcagatgtaacagagtgtatggag

SEQ ID NO: 242384 - DNA, 1174 bp, Unknown
  Bacterial polypeptide expressing nucleotide sequence isolated from the Sargasso Sea
agaaagttttgcagaatttaatccagataacataagagactattttaaagttatgttacaaatgtcattggttttaacgtactcggcatctttaccagtagtaaaattaggaaggatcgcaggccagttttcaaaaccgcgaagtgctccaacagaaaaacagggagacaaagaacttccaagctatcttggtgataatataaatggtatagaatttaatgaaaaagctagaagacctgacccaaagagattatttaaagcttattcacaagcagcttcgactttaaatttactaagagctttttgtcatggcggattcgcggatttaaaaatggttcatctttggaatttgggttatataaaaaaaagtccccaagaaaaaaaatttaaagaattagaagataaaattgctgatgctttggcatttatggatgcttgtggaataaattcagattttaacagaagactcaagacagttaatttttggacatctcatgaagcattactattaccatttgaagaaagcatgacaagaatagattcaacaactggagaatatcacgacacttcagcacactttgtttggataggtgacagaactagacagttagatggaggacatgttgaattttgtagaggaattgaaaatccaataggaataaaatgtggacctacttctaagcctgatgaaattgtaaagatttgcaatgtattaaacgctaagaatgaaaaaggtaaaataacattaatttcaagatttggtcacgataatgttgaaaaatttttacctaagttaattagagcaattaaaaaagaaggtttaaacgttatatggtcttgtgatcctatgcatggaaacactattaaatctacaactggttttaaaacaagaccttttaataatgttttaaaagaagttaaaaatgtttttggcgttcatcaaagcgaaggatcttatgcaggtggcctacacattgaaatgactggacaaaatgtaacagaatgtactggaggaactcaaaaaatttctgatcaagatttgtctagcaggtatcgtactcactgtgatccgagattaaatgcaaatcaagccttagaacttgcatttttaatttctgatgaaataaagaaaaattctatttacgcaaaaagcggcattagagctgtatcttaa

SEQ ID NO: 242385 - DNA, 1255 bp, Unknown
  Bacterial polypeptide expressing nucleotide sequence isolated from the Sargasso Sea
ccctttttagtatttgccgaagaagctaggagacttaggaaaagaatggcagatgttgcagagggcaaagcttttttacttcagggtggtgactgcgctgaatcttttgcagaacataatgctaataatattagggatagctttagagtgttgttacaaatggctgttgtgcttacttttggttctgctttacctgttataaagataggaagattggcaggtcaatattctaagcctagatcttcaccttttgaagtaattaatgatgtttctttgccaagttatcgtggagatatggttaatgatatggcctttgaagataaagcacgcgaacctaatccagagaggcttcttcaagtttatgataaatctgcctctacattaaatttgctgagagcttttgcaggtggtggtatggcagatttgactaaattacatgaatggaaccttgagtttgttagtggaactaatgaagcaataaaatataaagaacttgcatctcaaataacttcatcattagagtttatgaatgcttgtggcatgacaccagagaatactgctcagcttagagaaactgaattttatacttcgcacgaaggtcttttacttaattacgaagaagcactcactagaaaagacactattactgaagaaaaaggatggtttgcaacttcagcacatatgctatgggtaggagatagaactagaagtattgatgaagcgcacatagaatatatgagaggcatagctaacccaattggtttaaaatgtggaccctcaacagatcctgacgatttattaagacttattgaaaagctaaacccattaaatcaagctggacgacttactcttattgctagaatgggttctgccgaggtctataaaaaattaaaacctttaataacagctgttaaaaaatcaggtttgatcgttggttggtgttgtgatccaatgcatggaaatacggtaaaagcatcttcaggatttaagacaagaaaaatggatgatattgtggctgaagttagaggtttctttgaagttcataatgaaatgcatactgtacctggaggtgtccattttgaaatgacaggacaaaatgttactgaatgtgttggtggagtgtatgaagtaaatgaagctaacttagctgacagatatcatacacattgtgatccaagacttaatgcaactcaatccttggagttagcgtttttagtagctgatttgcttgcagaaataagaaataaccttgcaa

SEQ ID NO: 242386 - DNA, 432 bp, Unknown
  Bacterial polypeptide expressing nucleotide sequence isolated from the Sargasso Sea
tatggattacagaactgacaatacgagaattgtagagaagctagaaatagttcctcccaatgatctattagataaactgccgattactaagaacgtttctagccttgtttatggaacaagaaatgaaatcagctcgatacttcatggaacagatgatcgaatattggtagtttgtggcccatgctcaattcacgacccagaatctgcaaaagaatatgcaaataaacttaaagagcaatatgacgctttaagcaaagatttactgatagtcatgagagtctattttgagaagcctagaacaactgttggctggaaaggcttaatcaatgatccggacataaatgaatcttatgatgttaataaaggaattcatatagctagatcattgcttttagattttgggaatatgggattaccttgtggtacagaatt

SEQ ID NO: 242387 - DNA, 712 bp, Unknown
  Bacterial polypeptide expressing nucleotide sequence isolated from the Sargasso Sea
atgatccaaaccgaagaccttaatgttaccggggttaatcccctgactgctccaaaatacatcaaagcagaacatcccatttcggataaggccagtgaaacagtatttaagtttcgcaaacagattaaagatgttctggatgaaaaggattccaggcaattggtcatagttggtccttgttcaatccaccatgctgatatagcactggattatgcggataaactcaccaagttgattcccgaagtcgaagataaattattggtagtgatgagggtttattttgaaaagccccgcacaactgtaggatggaaagggttgatcaacgatccggacctggacggaagtcacaagatcgagaaagggatcaaacttgccagaaagattcttctcaatatcaatgaaataggaattccgtgtgcgacggaaaccttggatccgatcactccccagtaccttgccgatctaatttcatggagtgcgataggagcaagaacgacggaatcccaaacccatcgagaaatggccagtgggctttcaatgcctgtaggcttcaagaacgggaccgatggagggttggaagttgccatcaatgccatgcgatcagcagaaaatgcccatcatttcttgggagtgagtcatgatgggaatgtttctattataaacacaaaaagggaattcttatgcccacctggtcatgcgggaggcaaggaag

SEQ ID NO: 242388 - DNA, 1381 bp, Unknown
  Bacterial polypeptide expressing nucleotide sequence isolated from the Sargasso Sea
atgaaaaaatggaaattagatagttggaaaaattaccctgtcaagcatatcccaaaatatgatgatatggatgagcttaatctcgtactaaataagattaaacgttttccaccattagtatttgctggagagtctaggtctcttataaaacaactgtcagatgtttgtgatggaaaagcttttttattacaaggtggtgactgtgcggaaagttttgctgaatttcatcctgataatataaaggatacttttaaagtaattttacaaatggctttggttttgtcatcctctgcatctctacctgtagttaaagtaggaagaatagctggacagttttcaaaaccaagaagttctcccatcgaaaataagaatggtaaggaattaccaacttatttaggagacaacataaatggtattgaatttactgaggaggctcgtaaacctgacgcaaagagattatttagagcatactcacaatctgcctcaactttaaatttattaagggcattttcacaaggaggttttgcagatttacgtcaagtacatttgtggaatctcggttttgtaaaaggaagtcctcaaggaaaaaaatataaagaagtagaggataaaataagtgatgcattatcatttatggaagcgtgtggtataaacgctgacaataatagaagattaagaacggtaaatttttatacttcccacgaagctcttcttttacctttcgagcaagcgatgacaagagttgactcaacaactggagagtatcatgatacctcagcacactttgtttggattggagacagaacaagacaattagatggaggccatgttgaattttgtagaggaataaaaaatccaataggtttaaaatgtgggcctacgcttaagcctgaagaattaataaaattgtgtaataaacttaatccacaaaatgaacctggaagattaactttaatttctagattcggagctgataatgtcgataaatttttaccaaaattgattagatcggttaagaaagagggattaaatgtgatttggtcctgtgatccaatgcatggaaatactttggtatctaccacaggttttaaaacaagacctttcaacaacatagttaaggaaatcaaaaaagtttttgccgttcatcaatcagaaggttcttatgcaggtggcttacatatagaaatgacaggacaagatgtgacagaatgcactggtggagctcaaaaaatatctgaaaaagatttatctcacagatatcacacacattgtgaccctagattgaatgcaaatcaagctttagagcttgcattcttaatttcagatgagattaagaaaaattctcaatattcaaaaaatattattcaagcggcatcttagt

SEQ ID NO: 242389 - DNA, 1194 bp, Unknown
  Bacterial polypeptide expressing nucleotide sequence isolated from the Sargasso Sea
aatgaaaaaatggactttaaatagttggaaaaaatttccagccaaacatataccagagtacaaagacaccaaggaacttgatttagttttaagtaaagtaaaaaaatatccgcctttagtctttgcaggtgagtctcgttcattaaaaaaagctctagcaaatgtggttgatggaaaagcttttttattacaaggaggagattgtgctgaaagttttgctgagtttcacccagacaatataagagatacttttaaagtaattttacaaatgtctcttgtcctgaccgcatcagcttcggttcccgtagttaaagttggaagaatcgcgggacaattttcaaagcctagaagttcaccaactgaaaaaaaagacggaaaagaattaccaagttatttaggcgacaatataaatggaatggaatttactgaaaaagcaagaattccagatgccaaaagattattcagagcttattcacaatctgcatcaacattaaatttattaagagctttttcccaaggaggttttgctgatttaaggcaagtacatttgtggaatttgggatttataaaagataaaacaaaaggaaagtataaagagattgaggataaaataagtgatgcactagcttttatggaggcttgtggcattaactcagatacaaatagaagattaagaacagtaaacatttatacttctcacgaggctttgttgttacctttcgaagaagcgatgacaagagtggactcgacaactggtgagtaccacgatacttcagctcactttgtttggataggtgacagaacaagacaacttgacggcgctcatgtagaattttgtagaggtataaagaatccaataggtttaaaatgcggaccttctttaaaacctgatgaattaataaagctttgtaatgttcttaacccagaaaatgagccaggaagaattacactaatttctagatttggtgccaacaatgtcgaaaagtttttaccaaaattaatcaaggcagtaaaaaaagagggtctcaaagttgtttggtcatgcgacccaatgcatggaaatacaattaaagctgctacaggctttaaaacaagaacattcgatagcgttgttaaggaagttaaaaacttttttggcgtgagtcaggcagaaggaagttacgctggcggtctgcatatagagatgacagtcaa

SEQ ID NO: 242390 - DNA, 1378 bp, Unknown
  Bacterial polypeptide expressing nucleotide sequence isolated from the Sargasso Sea
atgaaaaaatggaacttaaatagttggactaaattacctgctaaacacttacctgtttatcatgataaggaagagctggatttagttttaagtaaaattaaaaaatatcctccgctagtatttgctggagagtcaagatctctaaaaaaagctttagctgatgtagttgagggaaaagcatttttattacagggaggagattgtgctgaaagtttcgcagagtttcatccagataatatcagagatactttcaaagtccttttacaaatgtctttggttctaactgcatctgcttcaatgccagtagtaaaagttggaagaatagcaggtcaattttcaaagccaagaagtgcacctactgaaaaaaaagacggaaaagaattaccaagttatttaggcgacaatatcaatggtatggaatttactgaaaaagctagaatacctgatgctaagagattatttagagcttactctcaatcagcatcaacattaaatttattaagagctttttcacaaggtggttttgctgatttaagacaagttcacttatggaacttaggattcataaaagataaaactaaaggtaaatataaagagatagaagataaaattagtgacgcacttgcatttatggaggcatgtgggattaattctgataacaaccgaagacttaggtcagttaatttttacacatcacatgaagctctgcatttaccttttgaggagtcgatgacgagaatagactctacgactggagaatatcatgatacttcggcacactttgtttggataggagataggacaagacagactgacggagcacacgtagaattttgtagagggataaaaaatccaataggacttaaatgtggaccaacattaaaaccagaggagcttataaatctttgcaacatacttaatccagaaaatgaagctggaagattaactttaatttcaagatttggtgctgataatgtagataaatatctaccaaaattaattaaagctattaaaaaagagggtataaaagtaatctggtcatgtgacccaatgcatggaaatacgattaaagctgctactggttttaaaactagaacttttgaaagcgtacttaaagaagtaaaaaatttctttgcggtaagtcaagctgaagggagttatgcaggcggtcttcatgtagagatgacaggtcaagatgtgacagaatgcactggtggagctcagaagatctcggaaaatgatctttcaaatagatacagaacccattgcgatcctagactaaatgcagatcaagcattagaattagctttccttatttccgaggaaattaagaaaaattcaaaaatatcaaataaaattattcaagccgcgtcttaat

SEQ ID NO: 242391 - DNA, 856 bp, Unknown
  Bacterial polypeptide expressing nucleotide sequence isolated from the Sargasso Sea
tatgaattattcgacagataatacaagaatcattgatcgtagaaaggtccctgctccctatgagcttgtgaataaatttccaattaatgatgaaattgcaaaacttgtatacggaacaagaaatgaaataagtcaaattttgcatggaaaagatgatcgtctttttgttgttgttggaccttgttcaattcacgatcctgaaagtgcaattgaatatgccactaaacttacggaacaaaattcaaaattaaaagaaaatttgctcataattatgagagtatattttgagaaacctagaacaactgtaggctggaaaggattaattaatgatccagatataaatgaaacatacgatatagctaaaggagttgaaatggcaaggaaacttcttattgaaattgctaatctaaaacttcctgcaggaactgaatttttagatcctatctcaccacaatatgtcacagatataatatcttggggtgcaattggcgcaagaactgcagaaagtcagattcatagagagttagcgtcaggcttgtcctgtcccataggtattaagaatgggactaatggtggacttaaagcagctatagatggaatacaagctgcaaatcattcacatgttttcctgggagcaacaaaagaggctgatattgctatgcttaaaacagctggtaatcatgactcacatattattttacgtggaggaaaaaatccaaattatgacaaacaatctgttgaggctactttgactgctttgagagaagcagatgtaaatgaatctattatgatagatgctagtcatggaaatagtcagaaaaaatttaaacaacaaataccagtaattgaaaatatt

SEQ ID NO: 242392 - DNA, 727 bp, Unknown
  Bacterial polypeptide expressing nucleotide sequence isolated from the Sargasso Sea
atgaactattctactgataacacaagaattattgaccgtaataaggttccagcaccttatgagctagtaaataaacaccctattaatgatgaaatctcaaaacttgtatatggaacaaggaatgaaataagtcagattttgcatgacaaagatgatcgattgtttgtagttgttggcccatgttcaattcatgatccggaaagtgcgatcgaatatgcagaaagacttgctaaagaaagtaagaaattcaacgaaaatcttttattaataatgcgtgtatattttgaaaagccaagaactactgtgggatggaaaggcttaattaacgacccagatattaatgaaagtttcaatattgcaaaaggtgtagaaatggcaagaaagttattaattgatatagccaatcttggactgcctgccggaactgaatttcttgatcctatatctccgcagtatgtaactgacgttatttcatggggagcaattggcgcaagaactgccgaaagtcaaattcatagagagcttgcatcaggtctttcatgtccaattggtattaaaaatggaactgatggaggtttaaaggctgctatagatggtatacaggcggcaaatcactctcatgttttccttggagcaacaaaagaagcagatatagcgatgcttaaaactgctgggaatattgatacgcatattatcttaagaggtgggaagaccccgaattatgata

SEQ ID NO: 242393 - DNA, 1354 bp, Unknown
  Bacterial polypeptide expressing nucleotide sequence isolated from the Sargasso Sea
atggctaacaactggtcaaaagatagctggagaaataaacctgtagttcaagtacctgagtatgacgatcaaaaggctcttgaaaaggttgaaaaaagattatcttcctatccacctcttgtttttgcgggtgaagctagaagattaaaagaacatttagctaaagtttgccgtggagaagcttttttacttcagggtggagattgtgcagaaagttttgcagaacacaatcctgataatataagagatacttttagggttattcttcagatggcaattgttttaacttttggagctggttgcccagtaattaaggttggaagaatagccggtcaatttgctaaaccaagatctgcacctttagaaaagcaaggagaaatcgagctaccaagttataggggtgatattataaataatattgaatttgtcgaagatttaagaattcctgatcctgaaagacagattatggcttatagacaatctgcctcaacattgaatcttctcagagcttttgcgcaaggtggttacgcaaatcttgatcatgtccataagtggaacatgggttttgtaaaagaaagtaaacaaggtgaacaatatgaacaagtggctaatagaatctctgaagcattagattttatggatgctgttggaataaactcaaacacaacccctgaacttagatctgttgatttttatacaagccatgaatcactgttattaggttatgaagaatgcttaacaagggtggattcaactagcggtgattggtacgatacatctgcgcatatgttatggattggcgatagaacaagacaaccagatggtgctcatattgagtttgtaagaggaatcaaaaaccctataggaatgaaatgtggtccttctttagattctgatgaattattaaaattaattgatttaataaacccttctaatgaggagggaagattaactcttataacaagatatggggcagataatcttgatgatcatttaccaaaattaattagagctgttgaaaaagaaggaaaaaaagttgtttggtcttgtgaccctatgcacggaaatactattaaagcttcaaatggatataaaactagacctcttgatagtattttgacagaagtaaaacaattcattgatattcatgaatctgaaggaacttacgctggaggtgttcatattgaaatgacaggccaaaatgtaacagaatgtctaggtggcactcaaaaaatttctgaagaagatttaactgatagataccatactcattgcgatccaagattaaacgctaaccaagctttagatctatcttttttaatttctgaaagattaaaagagttaagaagctaaa

SEQ ID NO: 242394 - DNA, 1090 bp, Unknown
  Bacterial polypeptide expressing nucleotide sequence isolated from the Sargasso Sea
atgatcaaggacaccgtaaataatgttcacgtaagtaccgaagatgtacttataacccctgaagcgcttagtgctgaattgcctgtgtcagacaaagcgttagcggctatctctgagtctagaaagattgtttcagatatcattcatcgtcgcgaccatagattgcttgtagtgtgtggaccatgttctatacacgacgttgaagccgcgaaagagtacgcacttaagcttaaagagcttcatgaatcatgcaaagacacactatttatcgttatgcgtgtgtacttcgaaaagccgcgtaccacaacaggttggaaaggtttaattaacgacccgcatatcgacggtacatttgatattgaaaccggtcttcgtaaggcaagagagttgttaatttggcttgcagaattagagctgcctgttgcaacagaagcactggatccaattagtccacaatatcttgctgagctatttagctgggctgctatcggtgcgcgtacctctgaatcgcaaacccaccgtgaaatggccagcggcctgtctatgcctgtaggattcaaaaatggtacagatggaagcctagatattgccataaacgcccttaaatcggccgcatcgggtcaccgctttatgggaatcaataagcaaggccaggtaagtattatcgggaccagcggtaatccagatggccacattattttgcgcggtggaaagcagcctaactacgactcggtttgcgtatcagagtgcgagattgagctgcaggatgctggtttaacagcgggcttagtagtagattgcagccatgcaaactcttcaaaagattatcgccgtcagccattggttgcacagaacgtggtcaatcaaattctagaaggcaatcagtctatcattggcgttatgttggaaagtcacttgaaaccgggtaatcaaaaagctgaaggtaaaaagccagaagaacttgagtatggtgtttcaatcacagacggatgtattgattgggaaacaacagagaacttaatatctcaaaccagagataagttaataactgtgttacccttacgccaaaataagcgcacggtggcataaa

SEQ ID NO: 242395 - DNA, 1051 bp, Unknown
  Bacterial polypeptide expressing nucleotide sequence isolated from the Sargasso Sea
atgaattattcgactgacaatacaaggattatagatagaagaaaagtgcctgctccatatgagctagttaataaatatccaataaatgatgatattgccaaacttgtatatggtacaagaaatcaagttagccagatacttcatgataaagatgatcgaatattcgttgttgttggcccttgctcaattcatgacccagaaagtgcaatcgaatatgcaaataagttagtaaatgaaagtaaaaattttcatgagaacttattgatcataatgagagtttattttgaaaaaccaagaactacagttggatggaagggtttaattaatgacccagaccttaatgagacatataacatatccaaaggtattgaattagctagaaaggtattaattgaaattgccaaattaggattaccagcaggtactgaattccttgaccctatctcacctcaatatgtcacggatgttatatcttggggagcaattggagcaagaactgcagaaagccaaattcatagagaacttgcatcaggtttatcttgtccaattggtattaaaaatgggactgatggaagtctaaaggctgcaatagatggaatacaagctgcaaatcattcgcatgtttttcttggagcaacaaaagaagcagatatagcgatgcttaaaacttctggtaataacgatgctcatattattttaaggggaggaaaaacacccaactatgatactcaatcaattaacagcactctgactgcattaaaagaagccgaagtaaatgaatcaattatgattgatgctagtcatggaaatagtcaaaagaaatttaaacaacaaattcctgttgttgaatcaatttgtgatcaaatcataaacggaggccacaacattaaaggggttatgattgaaagtcacttaaatgaaggaaatcagaaaattacagaaaacttaaagtatggacagagtattacagatgcatgtttgggctgggatgatactttaatatgtttaaaaatgcttaatgaagctattattaataaaagaggtaaatagt

SEQ ID NO: 242396 - DNA, 1039 bp, Unknown
  Bacterial polypeptide expressing nucleotide sequence isolated from the Sargasso Sea
aatgattcaaaccgaagaccttaatgttaccggggttaatcccctgactgctccaaaattcatcaaagcagaatatcccataacagataaggccagtgaaacggtatttaagtttcgcaaacagattaaagatgttctggatgaaaaggattccaggcaattggtcatagttggtccttgttcaatccaccatgctgatatagcaatggattatgcggataaactcaccaagttgattcccgaagtcgaagataaactattggtagtgatgagggtttattttgaaaagccccgaacaactgtaggatggaaagggttgatcaacgatccggacctggacggaagtcacaagatcgagaaagggattaagcttgccagaaagattcttcttaatatcaatgaaatgggaattccgtgtgcgacggaaaccctggatccgatcactccacagtaccttgccgatttaatttcatggagtgcgataggagcaagaacaacggagtcccaaacccatcgagaaatggccagtgggctttcaatgcctgtaggcttcaagaacgggaccgatggagggttggaagttgccatcaatgccatgcgatcagcagaaaatgcccatcatttcttgggagtgagtcatgatgggaatgtttctgtcattaacacaaaagggaattcctatgctcatttggtcatgcgtggaggcaaggaagggccgaatttcgatgtggtttcagtaggcaaagctcttgatgaattggagaaagccgggttaagaaaaaaagtgatggtggactgcaatcatgccaattccgggaaagacccttaccgtcaggaacaggtactcagagcagtacttcatcaagtgaacgatgggagaaaagcgatcctcggaaccatgatcgaaagcaacttaggcggaggaaatcagccgattgggcccgatatggaatacggtgtttcgattaccgatgcatgtcttgactggaagaacacccgaaggatccttctggatgcacaccaaatgcttgaaaattga

SEQ ID NO: 242397 - DNA, 1204 bp, Unknown
  Bacterial polypeptide expressing nucleotide sequence isolated from the Sargasso Sea
aggtaaagcatttttgctgcaaggtggtgattgtgcagaaagttttgatgatttcaatgcagattatataagagatacatttaaagtattattgcaaatgtcagttacattaactgctgcaggtaattgccctgtcgtaaaagttggaagaatggcaggccaatttgcaaaaccacgaagtgcacctaaagaagaaatagatggtgttgagttagatagctataagggtgacattataaatgatatggactttactgaagatgcgagagttcctgatcctgatcgaatgatcagagcatacacacaatcagctgcaacacttaatttattaagagcttttgctaaaggtggattttcagatttgaataaagttcatcaatggaatatgggatttgtagatgaaagttctcaagggaagaaatttagagaactagcgaataaaatctcggacacactttcttttatggaagctattggaatttcatcaagaaacacaaaacgtttaagaagcgttgacttctttacaagtcacgaagctctattgcttccttatgaagaatgtctgacgcgacttgatagtacatcaggtgaagtttacgacacatcagctcacatggtttggatcggtgatcgcaccagacagcctgacggagcacatgtagaattttgcagagggattaaaaatccaattggaataaaatgtggaccatctttaaatcctgaggaattgaaaaagcttcttgatattcttaaccccgagaatgaggctggaaaaataacattaatttgtcgatttggttctgagactataaatgaaaagttgccaaagcttatacaaccttttttaaattcagatcacaatttagtatggtcttgtgatccaatgcacggtaacaccatgaaagctaattcaggctttaaaacaaggccatttgaaagtgttcttaaagaagttgagacattttttgatattcaccatcaaatgggaacatacccaggtggagtacatttagaaatgacaggtcaaaatgtaactgaatgtattggtggcgctcaagccattaaggatgaagatctttcagcacgatatcatacccattgtgacccaaggctgaatgccaaatcagcacttgaacttgcattttttatatctgaccagcttagagagtcccaagaacacataattcaagattacgattgctag

SEQ ID NO: 242398 - DNA, 1177 bp, Unknown
  Bacterial polypeptide expressing nucleotide sequence isolated from the Sargasso Sea
atgcaaactaattggtcacctagttcttggcgttcaaaaacagcaaaacatcagcctatttataatgatgcaactcagttaaataattcattagataaaattaaaaaatttccacctttagtatttgcaggtgaggctagatcgttgaaatctaaactagcaaaagtatcaaatggccaagcatttttattacaaggcggagactgtgctgagagttttgcagattttcatcctgataatataaaaaatagttttaaagttattcttcaaatggcagtagttttaacatttggagcttcctgccctgttgtaaaagtaggtagaatagctgggcaatttgctaagcctaggtcttcagataaagaaaatattaatggaattgagctagagtcttacaaaggtgatataattaatggaattgagtttactaaagatgatagagttccagatcctaaaagacttattcaagcatataatcaatctgcatctacattaaatttattgagagcattttcccaaggaggatatgccaatctaaataaaatacatcaatggaaccttaattttgtggaggaagaaaatgctaataaatttacagaaattgcagacagaattgacgaatgtattgcttttatgaatgcatgtggaattaatgatactaatgtgcgtcaaatctatgaaactgaattttttactagtcatgaagctctactgcttgattatgaggaagcattaacaagaattgatagtacttcaggtaaatggtatgatgtttcagcacatatgctttgggtaggtgatagaactcgtcagttggatggagcacatatcgagtttgtaagaggtattgaaaacccaattggtattaaagttggacctacttcagatccagatgaattagtaaaaattattgattatataaatccaaataatgaggctggtaaagttactttaatttgccgaatgggagctgacaaaatagataaccatttgccagaaataatcaaattggttaacaaggaaggtaaggttgttgtgtgggcatgtgatccaatgcatggaaatacaataaaatctaaaacaggctttaaaactagaccagtaaaaaacattttcgctgaaattcagaagttttttgcaattcataaaagcataggaacttatcctggtggagtca

SEQ ID NO: 242399 - DNA, 1033 bp, Unknown
  Bacterial polypeptide expressing nucleotide sequence isolated from the Sargasso Sea
atgaaactagaaaatataaatatttccgatcatgaggtactcataacgcccgattcgttgaaatctgacatgccagtttcggcggcaattaccgagcaaataaatgaatcaaggaaaatcgtaagaaacatcatatcaaagaaagataaaagactgcttgtcgttgttggaccgtgctccattcatgacccaaacgcggcaatcgactacgcacataggctaaaaaaactatccctgttattggacaagagactctatattgtaatgcgctcctatttcgagaagccacgcagcaccgttggatggaaggggctgattaacgacccctaccttgacgacagcttcaagatttcagaagggcttaagattgcaagaaagcttcttctggagatctctgagatcggtttgccgcttgcgacagaagcacttgaccccattacacctcaataccttcaagacttgatttcttggtctgcaatcggagcgcgaacaaccgaatcacagacacaccgagaaatggcgtcaggtctcagctgtgcaataggattcaaaaatggcacagatggctcattagaggtagcgatcaatgctatgcagtctgcggtcgcgccccatcggtttttaggtattaatccttcgggccaggtcagtattattcacactcgaggtaatcccgatgttcacgtagttctaagaggcggctctaacggtccaaattatgggaaagaggcagtcctcgaaagcgaacaacaattacaagaaaagggactcaatccttccattatgatcgattgctcccacgccaactcaaacaaggatcataaaaaccagtccaaagtgttagacaacatcagcgaacaaatccgagaaggcaacgaatcgataaccggagtaatgattgaaagtaatatcgggccagggaatcaatcgatcagcgaacaattagaatatggagtctccataaccgatgcatgtgtggattgggacgaaactgatcggatgctaacaaaactagcagagactttacgctagt

SEQ ID NO: 242400 - DNA, 1039 bp, Unknown
  Bacterial polypeptide expressing nucleotide sequence isolated from the Sargasso Sea
aatgatccaaaccgaagaccttaatgttaccggcgttaatcccctgactgctccaaaattcatcaaagcagaatatcccatcacggataaggccagtgaaacggtatttaagtttcgaaaacagattaaagatgttctggatgaaaaggattccaggcaattggttatagttggtccttgttcaatacaccatgcagatatagcactggattatgcggacaaactcaccaagttgattcccgaagtcgaaaacaaattattggtagtgatgagggtttattttgaaaagccccgcacaactgtaggatggaaagggttgatcaacgatccggacctggacggaagtcacaagatcgagaaagggatcaagcttgccagaaaaattcttctcaatatcaatgaaatggggattccgtgtgcgacggaaaccctggacccgattactccgcagtaccttgccgatttaatttcatggagtgcgattggagcaagaacgacggagtcccaaacccatcgagaaatggccagtgggctttcaatgcctgtaggcttcaagaacggaaccgatggtggattggaagttgccatcaatgccatgcgatcagcaggaaatgctcatcattttctgggagtgagtcatgatgggaatgtttctgtcataaacacaaaagggaattcctatgctcatttggtcatgcgtggaggcaaggaagggccgaatttcgatgtggtttcagtaggcaaagctcttgatgaattggagaaagccggattgagaaaaaaagtgatggtggactgcaatcatgccaattccggaaaagatccttaccgccaggaacaggttctcagggcagtacttcaccaagtgaacgatggtagaaaagccatcctcggcaccatgatcgaaagcaacttaggtggaggaaatcagccgattgggcccgatatggaatacggcgtgtcgattaccgatgcatgccttgactgggagaacacccgaaggatccttctggatgcacaccaaatgcttgaaaattaa

SEQ ID NO: 242401 - DNA, 1051 bp, Unknown
  Bacterial polypeptide expressing nucleotide sequence isolated from the Sargasso Sea
atgaattattcaactgataacacaagaattattgatagaaagaaagttcctgctccctatgagttagtaaataagtaccctattaatgatgaaatttcaaaacttgtatacggtacaagaaatgaaattagccaaattcttcatgataaagatgatcgaatatttgtagtggttgggccatgttcaatacatgatccacaaagtgcaattgaatacgcaaaaaagttatctaatgaaaataaaaattttagtgaaaatctcttagtaataatgagagtttattttgaaaagccaagaactacagttggatggaaaggattgataaatgatcccgatattaatgaaacctataacattgccaaaggtgttgagatggctagaaaattgcttattgaaattgctgaattgggattgcctgcaggaacagaatttttagatccaatttcacctcaatatgtaactgatattatttcgtggggagcaattggtgcaagaacagcagaaagccaaattcatcgagagctcgcatctggtctttcatgtcctattggcataaagaacggtacagatggtggtttaaaagctgcaattgatggaatacaagcagcaaatcattcccatgtttttcttggtgcaacaaaagaagctgatattgctatgcttaaaacagctggcaataatgatacccacattattttaagaggtggtaaagtgccaaattttgacaaagaatcagtagaaagcactttgactgctcttaaagaagctgaagttaatgaatccataatgattgatgccagtcatggaaatagtcaaaagaaatttaaacaacaaatccctgttattgattcgatatgcgaacagatttcagatggtaacaaaaatataaaaggtgtaatgattgaaagccacttaaatgagggtaaccaaaaaattactgaaaaacttaactatggtcaaagtattacagatgcatgtatgggttgggaagatactgtaatgtgccttagcaaattaaatgatgcaataaatctaaaaagaggtaaataat

SEQ ID NO: 242402 - DNA, 1051 bp, Unknown
  Bacterial polypeptide expressing nucleotide sequence isolated from the Sargasso Sea
atgaattattcaactgacaatacaaggattattgatagaaggaaagtgcctgctccatatgagctggttaataaatatccaataaatgatgaaatagcaaaacttgtatatggaacaagaaatcaaatcagtcaaatacttcacgataaagatgatcggatatttgttgtcgttggtccctgctctattcatgatccagaaagtgcaattgaatatgcaaataaattatcaaatgaaagcaaaaattttaatgagaatttattgataataatgagggtttattttgaaaagcctagaactacagttggttggaaaggtttgatcaatgacccagatctaaatgagacatataacattgccaaaggcgtagaattggcaagaaaattattaattgagattgctgaattagggctgccagcgggtactgaatttctagatccaatctcaccgcaatatgtcacagatataatatcttggggcgcaattggagcaagaactgctgaaagtcaaattcatagagaacttgcttcaggtctatcatgtccaattggtataaaaaatggtactgatggaagtctaaaggctgctatagatggaatacaagcagcgaatcattcacacgtctttttgggtgcaacaaaagaagcagatattgctatgcttaaaactgctggaaataatgatgctcatattatcctaaggggtggaaagactcctaattatgataatgaatcaatttacaacactctgactgcgctgaaagaagctgaggtaaatgaatcaataatgattgatgctagtcatggaaatagccaaaagaaatttaaacaacaaatccctgttgttgaatctatttgcgatcagatcatcaatggagaccgatgcataaaaggagttatgattgaaagtcacttgaatgagggaaatcaagatattacagaaaacttaaaatatggacaaagcattactgatgcatgtttgggttgggacgataccttaatgtgtttaagaatgcttaacgaagctgttattaaaaaaagaggtaaatagt

SEQ ID NO: 242403 - DNA, 1072 bp, Unknown
  Bacterial polypeptide expressing nucleotide sequence isolated from the Sargasso Sea
atgcaatatttaacagacaatactaggataaaagggcttttggaggtcacacctccaatcaagctaattgacaagttgccgctgtcctcaaaagcatcaaagctggtatacgaatcaagaaatgaattatcctcaattcttaagcaagaagatgaccgtttgttagttgtagtaggtccttgttcaattcatgacccaaaggctgccattgaatatgcaaaaaaattaaagccacttgctgatgctttatcgaaagagctcaaaatagtgatgagagtttattttgaaaaacctagaaccacaattggatggaaaggtttgataaacgatccagacattgataacagtttcaatattaataaaggactgaaaactgccaggaaacttcttttagaaataaatgaattaggattgcctgcgggaacagaatatctcgatattatcactccgcaatatatctctgatttaataacttggggggccattggagctagaaccactgagagtcagattcatagagaattagcctcaggtttgtcttgtcctgttggctttaaaaatagtactaatggttcagtaaaagtagctgttgatgctttaaaggccgctagtcattcacatatcttcctctcaatcaccaaagaaggtaagtcagctatcttcaactcggcgggcaatcaagattgtcatgtcatccttagaggaggaagcgagcccaattacaaagacaaagatataaaagaaacatcaaaaatacttaaagaaaatggactgatagattccgtcatggttgatatgagtcatgggaatagcagcaaacaattcaaaaaacagttaatagtaaatcaagacctttgtaaccaaatatcatctggatctaaaaatatcattggggttatgattgaaagcaatttaattgagggaaaccaaagctctgataaaaaagataagctcgaatacggacaaagtatcaccgatgcttgtgtgggttgggaagatacagaaattatgctgaacttgctttctagtgctgtcaaaaatcgaagacagaatatgaaggtttcagcataaa

SEQ ID NO: 242404 - DNA, 703 bp, Unknown
  Bacterial polypeptide expressing nucleotide sequence isolated from the Sargasso Sea
attcttatgatattaatactgggtttaagaagggcaagaagtttgctttcatatttagcaactcgaggcataccttctgctacagaattactagatccaattgttcctcaatacattgccgatttaataagttggacagccataggtgcgcggaccacagaaagtcaaactcatagagaaatggcatcaggattatcaatgcctataggctttaaaaatggaacggatggttcttttactactgcaattaatgcaatgcagtcagcttcaaaatcccatcacttcttaggtgtaaatgaaaatggaatggcttctatagttaatactacaggaaatccagatggacatatagttttaaggggcggttcaaaaggcccaaattttgaaagtgatcatgtacaaagaatttcagcagaattgaggcagtgtaatcttccccataaagtgatgattgattgtagtcatggaaattccaataaagatttccgaaaacagtcagaagtgctaaaaaatgtagcttctcaaattagtaatggtgaaaaaaatattttaggagttatgcttgaaagtcatttgaaagaaggaaatcaaaaacttttaaaaaaagaagatctccagtttggcagaagcattacagatgcatgtatagatatagaaacaacaaaagaattaatcgctattttatacgattcacttagttagt

SEQ ID NO: 242405 - DNA, 1375 bp, Unknown
  Bacterial polypeptide expressing nucleotide sequence isolated from the Sargasso Sea
tatgagcgataaatggtcaccaaatagttggagaaataaaaatgctcttcatatgcctaactatcagaatgaagatcatctaaataaaactctaaatgaaatttccaaatatccacctttagtttttgctggagaagcgagactattaaaaaagaaacttggagaagtttcaaacggaaatgcttttttattacaaggtggagattgtgcagaaagttttgcagattttcatccagataatattagagatacatttaaagttattttacaaatggctgttgtattaacgtttggcgcttcttgtccaattgttaaagtaggaagaattgctggacagtttgcaaagccaagatcatctgccacagaagttattaatgatttagaacttgagtcttataaaggcgatataattaatgggatagacttcaatcaaaaagacagagatcctaatccagatagattaattcaggcctacaatcagtctgcatctacacttaatcttttaagagctttttctcagggcggttttgccaatttaaataaaatacatcaatggaacctaaattttgttaaaggtgagaatgctgctaaatttagagagatatcttctagaattgacgaatgcttatcttttatggaggcatgtggaataaatggaaacagtgtaagacaattaaatgaaacagacttctttacaagtcatgaagctttacttcttcaatatgaggaagcattaacaagaatagatagtacttcaggtaagtggtacgatgtttcagctcacatgttgtgggtaggtgacagaacacgacaacttgatggagcacatattgaatttttaagaggtattgagaaccctataggtattaaagtgggtccaagcacaaagacagaagaactattaaagatattagatgtgttgaatccaaataatgaagctggaaaaataacgctgatatgtagaatgggtcatgaaaaagttagtggaatacttccaaaaataattagatcagttaattcagctggtaaaaatgttgtttggacttgtgaccccatgcatggaaatactatcaaatctaacacgggttttaaaactaggccattaaaagatataatttctgaaattcagcaattttttcaaattcacagaagcgaaggaacatatccaggcggcgtccatttagaaatgactggtcaagatgttacagaatgtatgggaggtcttcaagaaataacagatgaagatctaaaaaatagatatcatacatattgtgatccgagactaaatgcctcgcagtctctagaattggcttttttattatcagattttttaaaagaagaaaaattgctctcaaagcaatcttcaaatttataa

SEQ ID NO: 242406 - DNA, 1054 bp, Unknown
  Bacterial polypeptide expressing nucleotide sequence isolated from the Sargasso Sea
atggaatctatttaccacacagataacactagaattgttgaaaaattcgatcttattacgcctaataatgtaatttcagagtatccactaactgacgaaatttctaaattagtctatggaactcgaaatgaagctagtcaaattcttcacggtaaagacgacagagtgcttgttgtttgtggaccatgctccattcatgatccagtatccgcaatggaatatgcgcagcttttaaaaggagctagagattccttaagcgctgatttgctaataataatgagagtatattttgaaaaacctagaacaacagtgggatggaaaggtttaataaatgatcctgatattaatgagagttatgatgctaataaaggcttaatgcttgcaagaaaaattctaagggatatcacagcaatgggccttcccatcggaacagaattcctagatcccatttctcctcaatatgtagcagatctcgtatcttggggcgccatcggtgcaaggacagctgaaagtcaatctcatagagaattagcctctggtctctcatgcccaattgggattaaaaatggcacaactggagccttaaaacctgcaattgatggcatccaagcagcgaatcatcctcatgtatttttttcaaatacaaaagatggtcgtgtatcaatttataaaacatccggaaattcagatgcacacataatattgcgtggtggaaaagagccaaattttaatccagatgcaattcaacaaacattaacagcattgactgaagcagatgtaaatgactctattatggttgatgctagtcatggaaatagtcaaaaacaatttaaaaaacaaattgatgtggttgaaaacttagctgaacaaatttctggtggaaacaatattctgaggggtttaatgctagaaagtcatctggttgaaggaaatcaaagcattacagataaccttgtatatggccaaagtattaccgatgcgtgcatgaattgggatgatacactaaactgcctccaacttatcagcaaagctgttcaaaagaggcgaggataat

SEQ ID NO: 242407 - DNA, 595 bp, Unknown
  Bacterial polypeptide expressing nucleotide sequence isolated from the Sargasso Sea
atgaattattcaactgataacacaagaattgttgatagaaagaaagttcctgctccctatgagttagtgaataagtaccctattaatgatgaaatttcaaaacttgtatacggtacaagaaatgaaattagccaaattcttcaccataaagatgatcgaatatttgttgttgtagggccatgttcaatacatgatccacaaagtgctattgaatatgcagagaggctatcaattgagaataaaaagtttagtgaaaatatcttattagtaatgagagtttattttgaaaaaccaagaactacagttggatggaaaggattaataaacgatcccgatattaacgaaacctataacattgccaaaggtcttgaaatggctagaaaactgcttattgaaattgctgaattgggattgcctgcaggaacagagtttttagatccaatttcaccgcaatatgtaactgacattatttcgtggggggcaattggagcaagaacagctgaaagccaaattcatcgagagcttgcatctggtctttcttgtcctattggcattaagaatggaactgatggtggtttaaaagactgcgattgat

SEQ ID NO: 242408 - DNA, 1069 bp, Unknown
  Bacterial polypeptide expressing nucleotide sequence isolated from the Sargasso Sea
atggccaccacctcggatttgcatgtggtggagacccgtccgctggtggctccggctttgctgcacggagatctgccgattgatgccgccgccatggagacggtcgcatcggcccgtcgacggattcaggccattttgcgcggcgaggatcagcgtctgctggtggtggtgggcccctgctcggtgcacgatgtgaaggcagcgcgggagtacgccgaacggctggcccccatccgggaacggctgaaggatcagctggaggtggtgatgcgggtgtacttcgaaaagccgcgcacaacagtgggttggaaagggctgatcaatgacccccatctcgatggctcctacgacatcaacacaggtctgagacgggctcgtggcttgctgctggatctggcacgggagggcatgccggcggcgacggaactgttggatccggtggttccccagtacatcgccgatctgatcagctggactgcgatcggggcgcgcaccaccgagagccagacccatcgggagatggcgtcggggttgtcaatgccgatcggctacaagaacagcaccgatggcagcgccaccatcgccatcaatgccatgcaggcggcatcaaagcctcaccacttcctggggatcaaccgcgacggtcatgcctcgattgtgagcaccaccggtaatccggatggtcatctggtgttgcgcggcggtcatcagggcagcaactaccacctggaggccgttcaagctgcggcagctgaactcagtaaggcgggcctgaaggatcgtctgatggtggattgcagccatgccaactcaaacaaggatttccgccgccaggccgatgtgctcgccacggtggctgatcagttaagggctggttccagtcatgtgatgggcgtgatgatcgagagtcatctggtggaaggcaatcagaaactcaccgccgatctctctcagctcacctacggccagagcatcaccgatgcctgcatcagcctggagaccacggaagtgctgctgtcacagttggccgaagctgtgtccgattgcagcagagttgtaacggcgtgat

SEQ ID NO: 242409 - DNA, 1048 bp, Unknown
  Bacterial polypeptide expressing nucleotide sequence isolated from the Sargasso Sea
catgaaaaatatacagaacttaaatataagagaaatagcgaagctaccatctcctgatgaatttataaaaaatattccattatcaaactctcagtcaaacttaattatggaatcaagaaaagttatagaaaacatcttaactggtaaggacgataggatattattgttagttggtccttgctctattcatgatagaaatctaggtatagagtatgcaaaaaggcttagagatttagcggaaaaagttaaggatactatatatattgtaatgagggtctactttgaaaaacctagaacaactgtaggttggaaaggtctaatcaatgaccctgatcttaatggatcttttaatattccaaaaggaatagaactagcaagaaatatattatcagatgttacagaattaggtatgcctactgccactgaatttctagacccatttactccacaatatattggagatttagtttcttggggcgcaattggagccagaactgcagaaagtcaaactcatagacaaatggcaagtggattatcaatgcctatagggtttaagaatggtaccggaggatcagttcagttagctatagatggcatgattgcctgtttaggagaacatgcatttttaggaatagataatgatggcaatagttcagttgtaataacaaaaggtaatcctgctaatcatgtaattcttagaggtggtgcatcaggaacaaattatgataaagaatcagtaagagatgcacaagaactattagaaaaaaacgaactagatcctgttgttgttatagattgtgctcatggtaattcaaataaggatcataataggcagcctattgtatttaaagatgttatatctcaaagaatgcaaggtaataaaaatatcgttggccttatgatcgaaagtaatataaatcctggtaaccaaactctaggagaaaatttagctgatctagactatggagtatctataacagataaatgtgtaggttgggaaaaaactgaagaaattattttagaagctagtaaagaattaaagaattaa

SEQ ID NO: 242410 - DNA, 1191 bp, Unknown
  Bacterial polypeptide expressing nucleotide sequence isolated from the Sargasso Sea
aagtatctaggggtgaagctttcttgcttcaaggaggagattgcgcagaaagttttgcagaacataatccagataacataagagatacctttagagtaattcttcaaatggcgattgttttgacattcggggctggatgtccagtaattaaagttggaagaatagcaggtcaatttgctaaaccaagatctgcgcctttagaaaagcagggagaaattgagctaccaagttatagaggtgatattataaataatattgaatttgttgaagatcttagaattcctgatcctgaaagacaaattatggcatatagacaatctgcttcaacattgaatcttcttagagcttttgcacaaggtggttatgcaaatcttgatcatgttcataaatggaatatgggttttgttaaagaaagtaagcaaggcgaacaatatgaacaagtagctaatagaatttcagaaaccttgggttttatggatgctgttggaatcaattcggatacaacccctgagttacgatctgttgatttttacactagtcatgagtcactattgctaggttatgaagaatgcttaactagagtagactcaacaagtggtgattggtacgatacatctgcacatatgctttggattggagatagaacgaggcagcctgatggcgctcatattgaatttgtaagaggaataaagaatccaataggaatgaaatgcggtccttcattagacccagacgaattattaaaactaatagatataattaatccttctaatgaggaaggaagattaacccttataacaagatatggagcaaataatcttgatgatcatttaccaaaattaattaaagcagttgaaaaagaaggaaaaaaagtagtttggtcatgtgatcctatgcatggaaataccattaaagcatcaaatggatataaaactagaccacttgatagtattttaactgaagtaaagcaatttattgatattcatgaatctgaagggacttacgctggaggtgttcatattgaaatgacaggccaaaacgtaacagaatgcttaggtggtactcaacaaatatctgaagaagatttaaccgatagataccatactcattgcgatccacgattaaatgctaatcaagctttagatctagcttttttaatttctgaaagattaaaagagttaagaagctaaa

SEQ ID NO: 242411 - DNA, 1348 bp, Unknown
  Bacterial polypeptide expressing nucleotide sequence isolated from the Sargasso Sea
aatgaataattggaatatagatagttggagaagccgccaagcaaaacacataccagtatatccagatcaaggtaaattgaaagaggttgaaaataccttaaaggattttcctcctttggtatttgctggagaagtgcgctccttaaaaaatagtttatctgaggttgctgatggtaatgctttcttacttcaaggtggagactgcgctgagagtttttcagagtttcacgctgacaatattcgtgatacttttcgtgtaattcttcagatggctgttatactcacctctggaacaaaattaccaataataaaagttggtagaatggcagggcaatttgctaaacctagatccaacccaagcgaaattaataatggtcaagaactacctagttatgctggtgatatcattaatgggatagaatttgatgcaaataaacgaaaaccagagcccagtagaatgctgaccgcttactctcaagcggcatctacattaaacttattaagggcatttgctgatggtggctatgctgaccttcgacatgtacaatcatggaacatgggtttcgttaaaagcggcccacaaggtgaaagatacagatatttggcagaggagatacaaaaaagtttacacttcatggatgctttgggtatatcgtcggaaaatactcctcaattaagaacagtacaatattatacaagtcatgaggcacttttattaccgtttgaggaagcacttacaagggttgattccacttcaggaatgatatacaacacatcagctcattttctatggatcggagatagaacaagatttattgatagtgcccatgttgaattttgcagaggtattcaaaaccctttaggaataaaatgtggccctagctcagatccagaggaattagttaaaataatagatatcctgaacccgatgaatgaatccgggaaaatcactcttattacccgttttggtaatggaagtgtagaaaattttcttcccaaattaattagaaaaataaccgaagaaggaaaaaatgtaatctggtcatgtgatccaatgcatggtaatacaatgaaaagtaattctggtaaaaaaactagaaaatttgaaaatatactgggagaagttaaatccaatattgaggtacataaatcagaaggaacccatgcgggaggaatacatttagaaatgaccggacaaaatgtgacagagtgtattggtggtttagatgatatttcagattctgacctaaatgatagatatcatacacactgtgaccctaggctaaatgcaaatcaggcaattgaaatggcatttcttattgcagaccaattaaacaacacaccatga

SEQ ID NO: 242412 - DNA, 1378 bp, Unknown
  Bacterial polypeptide expressing nucleotide sequence isolated from the Sargasso Sea
tatgaaaaaatggactttaaatagttggaaaaaatttccagcaaaacatataccggaataccaagatcaaaaggaacttgatttggttttgagcaaagtaaaaaaatatccacctttagtttttgcgggtgaatctcgatcacttaaaaaagccctaggagacgttgttcaaggaaaagcatttttattacaaggaggagattgcgctgaaagttttgcagagttcaatcccgacaatataagagatacatttaagataattttacaaatgtctttagttttaacagcatctgcatctgtaccagttgttaaaattggaaggattgcaggacagttttctaaaccacgaagcgcaccgacagaaaaaagagatggaaaagaattacctagctatttaggtgacaatataaatgggatggaatttacagaaaaatcaagacaacctgatgcaaaaagattatttagagcatattctcaatcagcatcaacactgaatttattgagagccttttcccaaggaggttttgctgatttgagacaagttcatttatggaatttaggatttattaaagatataacaaaaggcaaatacaaagaaatagaggacaaaataagtgatgctttagcttttatggaagcgtgtggtattaactcggataacaatagaagattaaggactgtaaatttttatacttcacacgaagcattacatttgccattcgaacaagcaatgacaagagtcgattcaactactggagaatatcatgatacctcagctcactttgtgtggattggagacagaacaagacaagtagatggtgcgcatgttgaattttgtaaaggtattaaaaatccaatcggtttaaagtgtggaccaactttgaaagcagacgaactgattaaactttgtaatattttaaatcctaacaacgaacctggtagaatgacattaatatcaagattcggtgctgacaatgttgaaaaatatttacccaaactaattaagtcagtaaaaaaagagggattaaatgttgtttggtcttgcgatccaatgcatggcaataccataaaggcagcaaccggttttaaaacaagaactttcgacagcgttgtaaaagaagttaaaaacttctttgctgttagtcaatctgagggtagctacgcaggtggccttcatgtagaaatgacaggtcaagatgtgacagaatgtactggtggagcgcaaaaaatatctgaaaaagatttatctaacagatatagaactcattgtgatccaagattgaatgctgaccaagctttagaactagctttcttgatttcagaggaaattaagaaaaattcaaaaatttcaaataaaattattcaagccgcgtcttaa

SEQ ID NO: 242413 - DNA, 424 bp, Unknown
  Bacterial polypeptide expressing nucleotide sequence isolated from the Sargasso Sea
aatgcaaaaaactagtgatttaagaatagccgacaggcaggaagtaatttctgcaagcactctattgtctgatcaaccaatatctcaagaatcatcagagactgtttttcaagctagaaaaagcttttcaaaaatattaaataaaaaggacagtaggttagcagtggttgttggcccgtgttcgattcatgatacgtcagctgcaatggattatgctcaaagacttaaagaggagagtctaaaatataaagatcaactacacatcataatgagagtttactttgaaaagcctagaactactgtcggttggaaaggactgattaatgatccagatttagatgattcctttcaaattgataaaggcctttctattgcaagacaacttttaagagatataaatgacatgggattgcctgccggaaca

SEQ ID NO: 242414 - DNA, 506 bp, Unknown
  Bacterial polypeptide expressing nucleotide sequence isolated from the Sargasso Sea
aatgaattactcaactgacaatacccgaatcattgacaaggtagatttagttactcctaatgatgtgatctcaaaatatcctcttactgatgagatatctaaactagtatatggaacaagaaatgaggtaagtcagatactacatggtaaagatgacagattgatagcagtagttggtccctgttcaattcatgatccaaattctgctgaagaatatgcaaaacttttaattgatgagaagcaaaaatatgaagaagatattcttttgattatgagagtctactttgagaaaccaagaacaagcattggctggaaaggtcttataaatgatcctgatatggacaatacttttgatgctaataaaggactttttctagcaagatctatacttcataagatttctgagcttggccttcctgttggtactgagtttcttgatccaatttctccgcagtttgtagctaatctaatttcatggggcgccattggagccagaactgctaaaa

SEQ ID NO: 242415 - DNA, 1048 bp, Unknown
  Bacterial polypeptide expressing nucleotide sequence isolated from the Sargasso Sea
tatgaattattcaactgataacacaagaattatagataggagaaaagttccagctccatatgaacttgtgaataaatatccaataaatgatcaaatttcaaaactggtatatggcacaagaaatgaaattagtcagattcttcacaataaagatgacaggttatttgtagttgttggcccctgttcaattcatgaccctaaaagtgccctggaatatgcagaaaagcttgctaaagagaataaaaggttatctaaaaacattcttgtaattatgagagtctattttgaaaaaccaagaactactgttggctggaagggtttaattaatgatccagatattaatgaaacttttaatattgcaaaaggtgttgagttagcaagaaagttattaattaatattgcagaattaggtttgccagctggaacggagtttttagatcctatctctcctcagtatgtgacagatattatttcatggggtgctataggagccagaacggctgaaagtcaaattcacagagagcttgcttcaggactttcttgtccagttggtattaaaaatggaactgatggaggtttaaaagctgctattgatggaattcaagcagcaaatcactcacatgtctttttaggcgcaacaaaagaggcagacatagctatgttaaaaactgctggaaataatgatactcatataattcttcgaggcggtaaagagccaaattatgattcagaatctgttgaaagtactttagtagcattgagagaggcagaagttaatgaatctataatgattgatgcgagtcatgggaatagtcaaaaaatattcaaacaacagattccagttgttgaatcaatttgcgaacagatgctcaatggtaataacaatattaaaggcgttatgattgaaagtcatttaaacgaagggaatcaaaaaatttctgaaagtttaaaatatggacaaagcataactgatgcgtgtatgggctgggaagatactgtcaagtgccttgaaatgcttagtagcgcagttgaaaacaaaagaggttag

SEQ ID NO: 242416 - DNA, 343 bp, Unknown
  Bacterial polypeptide expressing nucleotide sequence isolated from the Sargasso Sea
aatgaaaagtaaaatacataatataaacgttgtagccaaagagaagttgccttctccaaaagcactcaaagacaccttgcctctaagcaataaagcaaggaagacagtcttatctaaacgaaaagaattaatgagtattttggacggcaaagattcaaggcttgtcgttgtagtagggccttgctccattcatgacacagatttggctaaagattatgcctctagactaaaagatctctccaaagaggtagaggatgctttcttgatcttgatgagggtatattttgaaaaaccaagaaccaccaccggctggaaaggtttgatcaatgatcctaaaatcgat

SEQ ID NO: 242417 - DNA, 1093 bp, Unknown
  Bacterial polypeptide expressing nucleotide sequence isolated from the Sargasso Sea
catgcaacaggatacgatcaataacgtacacatcagttcagagaaagtccttattacaccgcaggagctaaaagcgactctgccactctctgagcacgcgtatcgttatatcctcaatgcacgcaaaaccgtggcggatattgtccataagcgcgatcaccgcgtgcttatcgtcactggaccttgttctatccatgatatcgatgccgccaaggaatacgctttaaagcttaaaaagttacacgatgaactcagcgatgagttctacatcttaatgcgagtctactttgagaagccacgtaccacagtgggttggaaggggatgattaacgaccccgatatggatgaatccttcgatgtcgaaaaaggcttaaagatggcgcgtgagctgatgatttggcttgcagagcttgagctgcccgtcgccaccgaagcgctcgaccctatcagtccgcaatatatttcggagctagtgacttggtcggccattggtgctcgcacgactgaatcgcaaacccacagggaaatggcgtcgggtttgtctatgcccgttggctttaaaaatggtacagatggaaagctcgatgtggcaattaatgcccttaaatcggcggccagcagccacagatttatggggattaaccaacagggtcaagtcgctctgttgcaaacggcgggaaaccccgatgggcatgtgatcctgcgcggcggcgtaacaccaaactacgatgcggccagtgtggctgaatgtgaagcgcagctacataaggccaaactcaatgcgcgccttattatcgattgcagtcatggcaattcctctaaggattacaccaggcaagtccctgtgtgtgaagatgtgtttgcgcagatctacaacggcaataagtccattattggcgtgatgctagaaagtcatttaaacgaaggtaatcaaagttgtgataaaccattaagcgaattggcctacggggtttctgtgacagactcctgtattaattgggaaaaaaccgaaagcgttttacgtgcgggcgcatcgaagttatcttcggtattgccaacgcgttttgatatgctcaaagtggccaatgcttga

SEQ ID NO: 242418 - DNA, 1054 bp, Unknown
  Bacterial polypeptide expressing nucleotide sequence isolated from the Sargasso Sea
aatgaattactcgactgacaacacaagaattattgatagaaggaaagttcctgctccatacgaacttgtaaataaacatccaattgacgatcaaattgcaaagttagtctatggaactagaaatgaagttagtcaaatattacatgataaagacgatagagtttttgttgtagttggtccatgctccatacatgatccagaaagtgcccttgaatatgctcaaaagttagttactgaaagtcaaaaatatagtgaaaatctcctgattataatgagagtatattttgagaaaccaagaacaacagtaggatggaaaggtctcattaatgatccagacattaatgaaacatttaatatatcaaaaggtattgaaatggccagaaagcttctcatagatattgcaaaattgggtctgccggcgggaactgaatttcttgatccaatttctcctcagtatgtaacagatgtcatatcatggggagccataggagcaagaacagctgagagtcaaattcatagagagcttgcctcaggtttatcttgtcctgttggaattaaaaatggtacaactggtggtcttaaagctgcgattgatgggattcaagctgctaatcactcacatgtatttcttggagcaacaaaagaatctgacatcgctatgttaaaaacagctgggaacaatgatgttcatatcattcttagaggtggtaaggtaccaaattatgataaggaatcagttgaaaatactttaactgctcttaaagaagctgaagtaaatgaatcaataatgattgatgcgagtcatggaaatagccagaaaaaattcaaacaacaaataccggttattcaatcaatttcagaacaaattgcagagggaaataaaaatattaaaggtgtaatgattgaaagtcacttaaatgagggtaatcaaaaaataggtgatagtttaaattacggtcaaagtattacagatgcctgtatgggctgggaagataccatttcttgtcttaacatgcttaatcaagcggttttaactaggagaggcagtaagtaa

SEQ ID NO: 242419 - DNA, 1378 bp, Unknown
  Bacterial polypeptide expressing nucleotide sequence isolated from the Sargasso Sea
tatgaataaaaattggaaacctagctcttggagagaaaaaaaggcaaaacacttgcctaattattctgatgaaaaagaattaaatctaattactaataagcttactgcatatccgcctttagtatttgcaggtgaatcaagaaatttattaaagcaattaggagatgtcgctaacggaaaagcatttttacttcaaggtggtgattgtgctgaaagttttgcagattttaatcctaataatatcagggactcttttaaagttatgttacaaatggctgtagttttaacttatggcgcttcttgcccagttgtaaaagttggtcgtattgctggtcaatttgcaaaaccgagatcccaagatacagaaaagttagataatttagaattagaatcttataaaggcgacattataaatggcattgattttaatgaaaaatctagaactgctgatccaaaaagattgatacaagcctataatcagtcagcagctactcttaatttattgagagcatttgctcaaggaggctttgcaaatttaaaacaaattcatcaatggaatttgagttttgcagatgacaatcagtataaaaaaagatttgaagatatggcaaatagaattgatgaatgtttaacttttatggaagcttgtggaattaatgatgaaaatgttcgtcaaatgaatgaaacagatttttatactagtcatgaagctttgttgctaccttatgaagaagcgttaactagagtagatagcacgactggcctttggtatgacgtatctgctcatatgctgtgggtaggagacagaacaagacaacttgatggtgctcatattgaatttattaaaggtatagaaaatccgatcggtataaaagtaggaccttctacagaagttaatgagctcttaaaaattattgaagttgttaatccaaataatattcctggaagggttactttaatatgtcgcatgggggcagataaaatttcttcaattttacctcaaataattagagaagttagtaaaaccgaatataaggtggtttgggcttgtgatcctatgcacggaaatactattaaatctaatacagggtataaaactagaccactaactaatataatttcagagatagagcagttttttaaaattcatcgttcagaaggaacatatcctggcggaatccatctagagatgaccggtcaagatgtaacagaatgtataggcggaattagagaagttactgaagatgacttaaaaagcagatatcatacttactgcgatccaagattaaatgcttcccaatctttagaattggcttttattctttcagattttttaaaagatgaaagaattagattacagcagtcttccaatctataa

SEQ ID NO: 242420 - DNA, 898 bp, Unknown
  Bacterial polypeptide expressing nucleotide sequence isolated from the Sargasso Sea
tagattgatagcagtagttggcccctgctcaattcatgatccaaattctgctgaagaatacgcaaaacttttaattgatgaaaagaaaaaatatgaagaagatattcttttgattatgagagtctactttgaaaaaccaagaacaagcattggctggaaaggtcttattaatgacccagatatggataatacttttgatgcaaataaagggctttttcttgcaagatctatactacataaaatttctgagcttggacttcctgttggcactgaatttcttgatccaatttctccccagtttgttgctgatctagtttcatggggtgccattggtgccagaactgctgaaagtcagattcatcgagagttggcatcaggactttcatgtccaattggctttaaaaacggaacaacgggtgatttaaatccagctatttatggtatgaaagcttcaaatcattcacatgtatttttttcaaatactaaggaaggaatggtttctatttataagacatctgggaactctgatacacatatcattctcagaggtggaaccaaaccgaacctttatccagatgatataagagaaactattgatgcacttaatgaagcgaaagcaaatgactcaatcatgattgatgtgagccatggcaatagtcaaaaagtctttaaaagacagcttgagaatatcggaattgtatctaagcaaatatctgatggtatgaatgaaataagaggagtaatgatagaaagccacttacaagaaggtaatcagaagattggcgaggatttacaatatgggcaaagtattacagatgcatgcattcactttgaagatacaaaaaaatgtctttcagagctctcctcagctgtccaagccaggagatcaaagagctag

SEQ ID NO: 242421 - DNA, 1339 bp, Unknown
  Bacterial polypeptide expressing nucleotide sequence isolated from the Sargasso Sea
caaacatgttccttcttatgaaagtgaaaaggattttaaccaggtattaagtaaaattaaatcttttcccccattagtatttgctggtgagacaagacatcttaaagatcaactttcacaagttgttgatggaaaggcttttcttttacaaggaggagactgtgcagaaagttttgctgagtttaatccggacaatataagagatacatttaaagttattcttcagatgtcattagtacttacatactcagcttcgcttccaattattaaactcggaagaatagcaggacagttcgcaaaacctagaagtgcaccaacagaaaaacagggtgataaagaattaccaagttacttaggtgacaatgtaaatggaattgattttactgaaaaatctagaagacatgatccaaaaagattatttaaggcatattcacagtctgcttcaacattaaatcttttaagagcattttctaatgggggttttgctgatttaaaaaatgtacacttatggaatttaggttacattaaaaaaagtcctcaagccaaaaaatttaaagaacttgaagataaaattgcagatgctttggcatttatggatgcttgtggaattaattcagatttcaatagaagattaaaaacagtaaatttttggacatctcatgaagctttgcatttaccatttgaagaaagtatggctagggttgactcaactacaggagagtatcatgcaacgtcagcacactttgtctggattggtgatagaacaagacaattagacggaggacatgttgaattttgcaaaggtattgaaaacccaataggtattaagtgtggtccgacatctaaaccagaggagattgcaaaaatttgtgaagtaattaatccgaaaaatgaaaaaggtaaaattactttaatatctaggtttggtcatgatcaagtcgaaaaatttttacctaagttgataagaagaattaaaaaggaaggtttaaatgttatttggtcatgtgatccaatgcatggaaatacaataaaatccacaacaggttttaaaacaaggccgtttaataaagtattaaatgaagttaagaatgtttttggagtacatcaaagtgaaagttcttatgctggtggattgcatatagaaatgactggacagaatgtgacagaatgtacaggtggggcaaaaaatatatctgaacaagatttatcaagtagataccacactcattgtgaccctagattgaatgcagatcaagctttagaattggctttcttaatctcagatgagatcaaaaagaattccaactatgcaagaaatgcaattaaagcggcatcttag

SEQ ID NO: 242422 - DNA, 361 bp, Unknown
  Bacterial polypeptide expressing nucleotide sequence isolated from the Sargasso Sea
tatgaattactcaactgataacactagaattattgatagaagaaaggtgcccgcaccctacgagctagtaaataaatatccaataaatgatgaaatttcaaaattagtttatggaactagaaatgaaattagccagattcttcataataaagatgatagattatttgtagtagttggtccctgttcaattcatgatacagaaagtgcccttgagtacgcagaaaagcttgctttacaaaataaaaaactaaataaaaatattctaataattatgagagtatattttgaaaaaccaagaacaactgtcggatggaagggtttaaataatgatcctgatattaatgagaccttcaatattgcc

SEQ ID NO: 242423 - DNA, 1351 bp, Unknown
  Bacterial polypeptide expressing nucleotide sequence isolated from the Sargasso Sea
atgaaatggactaaagatagttggaagaactttgaagcaaagcaaatgccagcttacgctgatcaaggtaatttagactctgtaatagaggagttatcctctatgcctcctttaatatttgctggtgagactaggtctctaaaatcacaaatttatcaagttcaaaaaggagagtctttttatttacaaggcggtgattgtgctgagagctttcaggaattaaaccctaatacaattcgagataattttaaattactattgcaaatgtctgttgttttgacttttgctactaataaaccggttgttaaactagggagaatgggtggacaatttgctaagccaagaagctcagactttgaagaaaaaaatggtcaaaagttacctagttatagaggagatattattaattcatttgagtttaacgagtcctctagagaaccagaccctaaaagaatgattagagcttataatcattcagcttcaactttaaatttattaagagcttttgctcaaggaggttttgctagtttaacacaattaaataaatggaatttagattttgcagataactttgatacaacaaaaaaatttaaagaattatctgaaaaaattgcagaaagtataaaattcatgaatgcctgtggtgtaaatgaaaaaaatacaagagaactaagagagacagatttttacacaagccatgaagcacttcttttaccttatgaacaagcttttacaagaatagatagcactacaggtgagtggtacaatgtaaattctcattttttgtgggttggtgatagaactagagatcctaatggtgctcacatacactatttaagtggtataaaaaatcctttaggtcttaaagtaggtccatctacaaccattgatgatttaaaaaaaaatattgagatactgaatcctgaaaatgaaggtggaagacttacacttattgttagaatgggagcagataaaattaattcaaaataccctgatttattgaaagaaattaataaactcggtcttaatcttacatggatatgtgatcctatgcatggaaatacatctacaagtaaatctggctataaaactagggctactgagaatatttttaaagaaattcagtctttttttgaaattcataaatcagagggttcagtcgcaggaggtgttcaccttgaattaacaggtttagatgtaactgaatgtgtcggggggcctgatgatattaaagatgaaaatttaggtgatagataccatacgttttgtgatccaagactaaatgttaatcaatcattagagctatcttttctactggctgatttattgtccaatggcgaaatgaattagt

SEQ ID NO: 242424 - DNA, 1051 bp, Unknown
  Bacterial polypeptide expressing nucleotide sequence isolated from the Sargasso Sea
tatgtatataactgataacagcagaatcctttcacgtgaggaattacctacaccagaagaagtcattaatgaagtgccattagataaggaatcttctaaattagtattcggtgcaagaagaaatattagcagaatactgcatggattagatgacagaataattgctgttgttggtccatgttcaattcatgatcctaaatcagcaattgaatatgcaaagcttttaaaagaattttcccctgaagtagaagatgaagtattaatagttatgcgtgtatatttcgagaagccaaggacaactataggctggaaaggtttaataaatgatccaagattagataactctttcaaaattaatgaaggtctcagagttgcaagaagattgcttaaaaatatttctgatattggtttgcctacaggcacagaatttttagatctaatttcacctcaatatatttcagatttgataagttggggtgcaattggtgctagaacagcagaaagtcaggttcatagagagctgacgtcaggactatcatgtccaatgggcataaaaaattcaacaaatggtgatttacaagttgctatagatgctatgaaatcagctaaatatcagcatgtattcttaggaacaacaaaacaaggtaaagttgcgatatttaagacttcaggaaacgatgatactcatataatcctacgaggaggagaaaaacctaactatgaaatatctgatattgaagaatgtgtttctaaacttattgaagaaaagacgaataaaaacataatggttgatttcagccatggcaatagccagaaaaaccatgaaaatcaaaaattagtatgtaaatcaatagctaatcaaattgagaaaggcaatatgcatattactggggtcatgatagagagtcatctaaaagaaggaaatcaaaaaatgtcagaaaatcttgaatatggaaaaagcatcacagactcttgtatctgttgggaagaaacaaaagaacttattaaacaattagcaaaatcagttaaaaaaaggcgagacattggataa

SEQ ID NO: 242425 - DNA, 1093 bp, Unknown
  Bacterial polypeptide expressing nucleotide sequence isolated from the Sargasso Sea
atgcaacaggatacgatcaataacgtacacatcagttcagagaaagttcttattacaccgcaggagctaaaagcggctctgccactctctgagcacgcgtatcgttatatcctcaatgcacgcaaaacggtggcggatattgtccataagcgtgataaccgcgtgcttatcgttacaggaccttgctctatccatgatatcgatgccgccaaggaatacgccttaaagcttaaacaactccacgatgaactcagcgatgagttttacatcttgatgcgagtgtactttgagaagccacgtactacagtgggttggaaggggatgattaacgatcctgatatggacgaatccttcgatgtcgagaagggcttgaagatggcccgtgagctgatgatctggttggccgaactcgaactgcctgtagcaaccgaagcgctcgaccctatcagcccgcagtacatctcagaattagtgacttggtcagccattggtgcccgcacgactgagtcacaaacccacagggaaatggcgtcgggtttatctatgcccgttggttttaagaatggcacagacggaaagctcgatgtagccattaacgcgctgaaatcggcggccagcagccacagatttatggggattaaccaacagggccaagtggcgttattgcaaaccgcggggaaccctgatgggcatgtgatcctccgtggcggcgccacgccaaactacgatgctaagagcgtcgccgaatgtgaggcgcagttacataaggccaaactcaatgcgcgccttatcatcgattgcagccatggtaattcctctaaggattacaccaggcaagttcctgtgtgtgaggatgtatttaaccaaatctacaacggcaataagtccatcattggcgtgatgttagaaagccatttaaacgaaggtaatcaaagttgtgataaaccattgagcggattggcctatggggtttctgtgacagactcctgtattaattgggaaaaaaccgaaagcgttttacgtgcgggcgcatcgaagttatcttcggtattagcaacccgtttcgatatgctcaaagtggccaatgcttaag

SEQ ID NO: 242426 - DNA, 535 bp, Unknown
  Bacterial polypeptide expressing nucleotide sequence isolated from the Sargasso Sea
atgaattattcaacagataacacaagaattatagatagaaaaaaagttcctgcgccttatgaactggtaaataaatacccaattaatgatgaaatttctaaacttgtttatggaactagaaatgaaataagtcaaatcttgcataacaaagatgaccggttatttgtaatcgttggtccatgttcaattcatgatcccaaaagtgctattgaatatgcagagatgctctcaaatgaaaataaaaaatataatgagaacctcttagttattatgagagtttattttgagaaaccaagaacaactgtaggttggaaaggtttaattaatgatccggacataaatgaaacatacaacattgcaaaaggtgttgaaatggcaagaaaattattaatagatattgcggatcttggactgccagctggaactgagtttcttgatcctatttctccgcagtatgtcactgacataatttcatggggcgcaattggtgcaagaactgctgagagtcaaattcacagagaacttgcatctgggc

SEQ ID NO: 242427 - DNA, 850 bp, Unknown
  Bacterial polypeptide expressing nucleotide sequence isolated from the Sargasso Sea
gctgaagaatacgcaaaacttttaattgatgaaaagaaaaaatatgaagaagatattcttttgattatgagagtctactttgaaaaaccaagaacaagcattggctggaaaggtcttattaatgacccagatatggataatacttttgatgcaaataaagggctttttcttgcaagatctatactccataaaatttctgaacttggacttcctgttggcactgagtttcttgatccaatttctccacaatttgttgctgatctagtttcatggggtgccattggagccagaactgctgaaagtcagattcatcgagaactggcatcgggactttcatgtccaattggctttaaaaacggaacaacgggtgatttaaatccagctatttatggtatgaaagcttcaaaccattcacatgtatttttttcaaatactaaggaaggaatggtttctatttataaaacatctgggaactctgatacacatatcattctcagaggtggtactaaaccaaacctttacccagatgatataagggaaactattaatgcacttaatgaagctgaagcaaatgactcaatcatgattgatgtaagccatggcaatagtcaaaaagtctttaaaagacagcttgaaaatattggggttatctctaagcaaatatctgatggcatgaatgaaataagaggaataatgatagagagccacctaagagaaggtaatcagaagattggcgaggatttacaatatgggcaaagtattacagatgcatgcattcactttgaagatacaaaacaatgtctttcagagctctcctcagctgttcaagcaaggagatcaaaaagctagg

SEQ ID NO: 242428 - DNA, 763 bp, Unknown
  Bacterial polypeptide expressing nucleotide sequence isolated from the Sargasso Sea
atgcaacaggatacgatcaataacgtacacatcagttcagagaaagttcttattacaccgcaggagctaaaagcgactctgccactctctgagcacgcgtatcgttatatcctcaatgcacgcaaaaccgtggcggatattgtccataagcgcgataaccgcgtgcttatcgtcaccggaccttgttctatccatgatatcgatgccgctaaggaatacgccttaaagcttaaacaactccacgatgaactcagcgatgagttttacatcctgatgcgagtctactttgagaagccacgtaccacagtgggttggaaggggatgattaacgatcctgatatggatgaatccttcgatgtcgagaagggcttaaagatggcccgtgagctgatgatttggttggccgaactcgaactgcctgtggcaaccgaagcgctcgaccctatcagcccgcagtacatctcagaattagtgacttggtcagccattggtgcccgcacgactgagtcgcaaacccacagggaaatggcgtcgggtttatctatgcccgtcggttttaaaaatggtacagacggaaagctcgatgtagccattaacgcgctgaaatcggcggcaagtagccacagatttatggggattaaccaacagggccaagtcgcgttattgcaaactgcgggtaacccagatgggcatgtgatcctccgcggtggcgcaacgccaaactacgatgctcagagcgtcgccgaatgtgaggcgcagttac

SEQ ID NO: 242429 - DNA, 1324 bp, Unknown
  Bacterial polypeptide expressing nucleotide sequence isolated from the Sargasso Sea
atgaaaaaatggaatttaaacagttggactaaactacccgctaaacacctcccagtctatcaagacaaaggtgagcttgatttagttttaagtaaaataaaaaaataccctcctttggtttttgcaggagagtcaagatccttaaagaaagctttagctcaagttgttgagggtgaagcatttttattgcagggcggtgattgtgccgaaagttttgcagaatttcatccagataacatacgagatacttttaaagttcttttacaaatgtcattagttttaacagcatctgcttctgttccagttgtaaaagttggaaggatagctggacaattttctaaaccaagaagtgctccaaccgaaaaaaaagatgggaaagaattaccgagttatttaggcgataatataaatggaatggaatttacagagaaagccagaattcctgatcctaaaagattattcagagcttattctcagtcagcttctacattaaatcttttaagagctttttctcaaggtggtttcgctgatttaagacaggttcatctttggaatttaggttttataaaagataaaacaaaaggtaaatacaaagagatagaagataaaattagtgatgctttagcttttatggaagcttgcggtataaactcagataccaacagaaggctgagaacagttaatttttatacatctcatgaggcgttgttacttcctttcgaagagtcgatgactagagttgactcaacaactggcgagtatcatgatacttcagctcattttgtttggattggagataggactagacaacttgacggtgctcacgttgaattttgtagaggaataaaaaatccaataggactcaaatgtggaccaagcttaaaacctcaagaattaataaacctttgtaatattcttaatcctgaaaatgaaccaggaagaatgactttgatatcaagatttggtgcagacaacgtcgaagagtttttgccaaagcttataaaagaagtaaaaaaagagggattaaatgttgtgtggtcttgtgatccaatgcatggaaatacaattaaagcaactactggttttaaaacaaggacttttgatagcgttgttaaagaagtaagaaatttttttgctgttcatcagtcagagggaacttacgcgggtggtctacatattgaaatgacaggtcaagatgtgactgaatgtactggcggagctcaaaagatttctgaaaacgatctttcaaacagatataggactcattgtgatcctaggttaaatgccaatcaagctttagaattagcatttttaatatctgacg

SEQ ID NO: 242430 - DNA, 938 bp, Unknown
  Bacterial polypeptide expressing nucleotide sequence isolated from the Sargasso Sea
gatgtatataactgacaatagcagaattttatcaagagaagagctttcgactcctgaagagattacaaatgagatacctcttgacaaagagtcctcaaaattaatattcggagcaagaagcaatataagcaaaattctccatggtctagacgacagaattattgctgttgtaggtccatgctctatccacgatccaaaggcagcaattgattatgcaaaaagattgaagccactagctgaaaaaattgaagatgaagtagttgttatcatgcgagtatattttgaaaaacctcgtacgactgtagggtggaaaggtttgattaatgatccaagaatagataattcttttaaaataaatgaagggttaagagttgctaggaaggtcttgagagatatagcgaatgtaggtcttcctgcaggaacggaatttttagacctaatatctccacaatatatttcagaccttgttagttggggagctattggtgcaagaacatctgagagtcaagttcatagagagcttacatcaggtctttcatgccctgttggaataaaaaactcaacaaatggtgaatttaaagcagctattgacggaatgaagtctgcacaatatcaacatgtttttttaggaactactaagcaaggaaaggttgctatatttaaaacctcaggaaatgatgacacacatataattttaagaggtggtaagcagccaaattacgagcctgaagatatccaaaaatgcttagaagaacttaaaaaatcagaagtaaatcaatgcattatggttgattttagtcatggtaacagccaaaaaattcctggcaaccaaaaaaaggtaagccagtcagtttgtaaacaaattgagactggtaataaaaatattgtaggtgtaatgattgaaagtaatattgaagaaggtaatcaaaaaatatctg

SEQ ID NO: 242431 - DNA, 1051 bp, Unknown
  Bacterial polypeptide expressing nucleotide sequence isolated from the Sargasso Sea
tatgtatataactgataacagcagaatcctttcacgcgaagaattacctacgcctgaagaagtgataaatgaagttcctttagataaggaatcttctaaattggtttttggtgctagaaggaatattagcagaatacttcatgggctagatgacaggataattgctgtagttggaccatgttcaattcatgaccctaaatcagcaattgagtatgcaaatctcttaaaaaaattctcaactgaagtagaagatgaagtattaattgtaatgcgtgtatattttgagaagccaagaacaactataggctggaagggtttaataaatgatccgagattagacaactctttcaaaatcaatgagggtctaagagttgcaagaaaattacttaaagatatttctgatattggattacctacaggtacagaatttttagatctaatttcacctcaatatatttcagatttaataagttggggtgcaattggcgcaagaacggcagaaagtcaggttcatagggagcttacctctggtctttcatgtccaatgggtataaaaaattcaactaatggcgatctgcaggttgctgtagatgctatgaaatcagccaagtatcaacatgtatttttggggacaacaaaacaaggaaaagtagcgatattcaaaacttcagggaatgatgatacgcatattattcttcgtggaggagaaaaacctaattatgatgcatccgatatcgaacaatgcatttctacattagcggaagaaaagacgaatatgaatttaatggttgatttcagtcatggcaatagccaaaaaaatcatgaaaaccaaaagatagtatgcaaatcaattgctgaacagatcgaaaaaggcaataagcatattactggggtgatgatagaaagccatttaaaagaaggcaatcaaaaaatgtcagaaaaccttgaatatggtaaaagcatcacagattcatgcatttgttgggaagaaacaaaacaacttattaaagaattagcagattcagttaaaaaaaggagagagattggataa

SEQ ID NO: 242432 - DNA, 1120 bp, Unknown
  Bacterial polypeptide expressing nucleotide sequence isolated from the Sargasso Sea
ttgagcgccatcgacaatcctttgcacgatcaggaagtcggctcggccgacgccacccaggacaccacgcgcatcgacgacgttcgtatcggcgcggtacgtccgctgatttcccccgccctgctgcaggacgaattgcccgtggcgccttcggtgcagacgctcgtcgagaaaacccgcgcggaaatcgccgatattctgcacggccgtgacgaccggctcgtgatgatcgtcggcccgtgttcgattcacgaccatgaccaggcgatcgaatatgcccgcaagctcaaagccgcagcgcaaacctacagggacgatctactgatcgtcatgcgggtctacttcgaaaaaccgcgcacaacggtaggctggaaaggctatatcaacgacccgcgtctcgatggcagctttcgcatcaacgaaggcctgcgtctcgcgcggcaactgctgctcgacatcagcggtctcggtttgcctacggccacggaatttctcgatctgctcagcccgcaatacatcgcggatctgatcgcgtggggtgccatcggcgcgcgtaccacggagagccagagtcaccgtcaacttgcctcggggctgagttgcccgatcggcttcaagaacggcaccgacggcggcgtgcagatcgccgcggatgcgatcgtcgcggcacgcgcaagccatgcgttcatgggtatgaccaagatggggatggcggcgatcttcgaaacgcgtggcaatgacgacgcacacgttatcctgcgcggtggcaagcaagggccgaattacgacagcgcatcggtggaagccacctgcgcgacactcaggtcagccgggctgcgcgagcaggtcatgatcgactgttcgcatgcgaactcgggcaagtcgcatttgcgtcaactggaggtagtacaggatctggcgcagcaactctcgcagcgcgagcgccgcattatcggcgtcatgctcgaaagtcatctggaagaaggccgtcaggatctgaaagccggtgtgccgctgcgtcacggcatatcgattacggacgcctgcgtgagctgggcgcaaaccgagccggtgctcgcaacgctggccgaagcaacccggaaacggcgcgcgggctgaa

SEQ ID NO: 242433 - DNA, 751 bp, Unknown
  Bacterial polypeptide expressing nucleotide sequence isolated from the Sargasso Sea
tatgaattactcaactgataacactagaattattgatagaagaaaggtgcctgcaccctacgagctagtaaataaatatccaataaatgatgaaatttcaaaattagtttatggaactagaaatgaaattagccagattcttcacaataaagatgatagattgtttgtggtagttggtccttgttcaatccatgatccagatagtgctcttgagtatgctgaaaagcttgcaatagaaaataaaaagcttaataaaaatattctaataattatgagagtatattttgaaaaaccaagaacaactgttggatggaagggtttaattaatgatcctgatattaatgagacctttaatattgctaaaggtgttgagttggcaagaaaattattaattaacattgcagaattaggtttgccagctggaactgaattcttagatccaatttcacctcaatatgtgacagatattatttcttggggtgcaattggagcaagaacagctgaaagtcagattcatagagaacttgcttcaggcttatcatgtccaattggcataaaaaatggtactgatggtggtctaaaggctgcaatagatggaattcaagcagcaaatcattctcatgtttttttaggagctacaaaagaggccgacatcgccatgcttaagactgcgggaaataatgatactcacatcatacttcgaggaggcaaagagccaaattatgactcagaatctgttaagagtactcta

SEQ ID NO: 242434 - DNA, 1297 bp, Unknown
  Bacterial polypeptide expressing nucleotide sequence isolated from the Sargasso Sea
gaatgttttaaacgagctatcaagttttccgccattagtatttgcaggtgaaactcgctctttacttaaaaatttagctgatgtttcccaaggtaaagcttttttattgcaaggtggagattgcgcagaaagttttgctgaatttcatccaaataatattagagatttttttaaggtaatattacaaatgtcattagtattaactgtatcatcaaatttaccagttataaaagttgggagaattgctggacaattctcaaaacctagaagttcgccaactgaaaaaaaagataaaatagaattacccagctatcttggtgataatattaatggttcagaatttacgaaagaaagcagaaacccagatccaaatcgtttattgaaagcttattcacaatctgcatcaacattaaatcttttaagagcattttctcaaggaggtttcgcagatttaaataaagttcacctatggaacatgtcatttataaacgacaacgcgaaaacaaaatttaaggaaattgaagaaaaagtaagcgactcactatcttttatggaagcctgtggaataacatcagaaactaatagaagattaagaactgtaaatttttatactagccatgaagctttattattaccggtagaggaagttatgacacgaatagattcaacaactggtgaataccataatacttctgcgcattttttatggataggagatagaactagacaactcgacggggggcacgttgagtattgtaaaggtataaaaaatccaataggcataaaatgtggtccaacttcagaccctaaagaaattattaaacttactgagattttaaatccagataatgatgctggaaaaattactctaataattagactaggtcatgacaaagttaaaattaaattacctaaattaattaaagagattaaaaaagcaggacgaaatgtaatatggtcatgtgatccaatgcacggcaatactgttaaatcatctacaggatttaaaacgcgaccttttgataatattttaaaagaggtgaaagagttttttgatgtacatcaatccgaaggaacttttggaggtgggttacatattgaaatgacaggaaaaaacgtaactgagtgtaccggcggtgcacaaaatataactgataaagatctttcgaatagatatcatactcattgtgatccaagacttaacgcaaaccaggctattgagttagcatttttaatatctgaagaaattaagaaaaattcgcatttttcaaaaaataaaattaaatttgcgtcataa

SEQ ID NO: 242435 - DNA, 1126 bp, Unknown
  Bacterial polypeptide expressing nucleotide sequence isolated from the Sargasso Sea
tcctgctgataatattcgagatacgtttcgcgtaattttacatatggcaatcatccttacctcagggacaaatcttccgattgttaaagttggtagaatggcagggcaatttgccaaaccaaggagtagcccaactgagcaaaaaaatggtcaagaacttgaaagctataaaggcgatattattaatggaattgaatttgatgaaactgtacgcaaacctgaccccgatagaatgcttaaagcatattcacaagctgcttcaacacttaatttattgagggcatttgctgatggaggctatgctgaccttcgttttgtaaactcctggaatatggggtttttgaaatcgggatctgaatatgaaagatatagaaaattagctaataaaatacaagaaagtttgaattttatggatgcacttggtgttacaactgataatactccccaattaagaaaaaccgattattatacatgccatgaggccttactcattccatacgaagaagcacttactcgagtagattcaacctcaggagatatatacgatacatctgctcattttgtttggattggggatagaacaagatttgaaaatagcgcgcatgttgaattttgcaaaggcattaaaaacccgatcggaatcaaatgcggcccttcaacagaccatgatgatttgattaaaataattgataagatcaatccagataatactgctggtaggattacccttattgctcgttatgggaatgataaagtggataaccttcttccaaaattaattaaaagaataacggatgaaggacgtattgtagtatggtcttgcgaccctatgcatggcaatacgatcaaaagctcaaatggaacaaaaactagaccatttgacaaaatactatcagaggtgaagaaaaatattcaactacataatagcctaggatcctggttcggcggtattcatctagaaatgacaggtcaaaatgttacagaatgcactggagggattgaggaaatatcagaatcagatctaaaagatcgctatcatacacattgcgatccgcggttgaacgcaaatcaggcaattgagcttgcatttttaattgccgatgaattgaaaaacaatggcaattag

SEQ ID NO: 242436 - DNA, 575 bp, Unknown
  Bacterial polypeptide expressing nucleotide sequence isolated from the Sargasso Sea
aatgacgacttcatccaataatcaatctttagaaaaaacatctgatttgcatgttgttgaaacacgtccattaatacctccaagcaaacttcgtaatgatatacccttagattatacctctgcagaaactgtctctgctaccagaagatcaatacaaaatattttgcataataatgatcctaggattttagtcatagttggaccatgttcaattcatgatattgaggctgctaaagattattcagaatatatccaagaatttagaaaaatctataaagataaattagaaatagtaatgagagtatattttgaaaaaccaagaactacaattggttggaaaggattaataaatgacccacatctagatggttcctacgacattaatacaggtttacgaagagcaagaaatttattatcttatctagcaactcgcggaataccctctgcgacagagttactagatccaattgttcctcaatatattgctgatttaattagttggacagcaattggtgcaaggactactgaaagtcaaactcatagagaaatggcatcaggtttatctatgcctatag

SEQ ID NO: 242437 - DNA, 595 bp, Unknown
  Bacterial polypeptide expressing nucleotide sequence isolated from the Sargasso Sea
atgaaaagtaaaactgacgaccttcgaataattaatacccaagaacttgtaagtcctcaggaaataattgattccatttcaccatcggataaaggttttgctactatcatcaacgctcgaaatcagattaaaaatattctcaataaatctattaaaaaatttatgatcgtcgttggtccgtgctcaatccatgatgtagatgctgccaaagagtatgcaactagattaaagaaactttcatctttactatctgatagctgtctaatagtcatgagagtttactttgaaaaaccaagaacagttataggctggaagggcctgataaacgaccccgatctagatggatcttttaaaattaacaaaggaataaaaatagcaagaaagctattaatagatctagcagaaatggaaataccgtgtgggcatgaatttttagatttagtaagcccacagtatctatctgatcttataagttggggtgcaataggagcaagaacaacagagagtcaaagccatagagagttggcctctggcctatcatgtccggtaggtttcaaaaacggtacagatggaagtttacaaatagcgattgatg

SEQ ID NO: 242438 - DNA, 805 bp, Unknown
  Bacterial polypeptide expressing nucleotide sequence isolated from the Sargasso Sea
atgacaagaactgaaaaccttaatattgttgaagttttgccgataacttcaccaaaaaaactcaaagatcttctgcctgtttcagacagcgtaattgaaaccgtcttaaatgcaagaaatgccattaaaagcattttagagggaaaggactcacgtttattgatgattgtaggcccatgctctattcatgatacaaaggcagcaattgaatatgcaaaacgtctaaaaaaacttgctgatgaagtttcagaaacagttcttgttgtgatgcgagtctactttgaaaaaccaagaactacaattggatggaaaggattaattaatgatcctgaattagacggaagtcacaaaataaacaaaggtatcgaactggctcgtcgattactgctagatattaatgcactaggcctgccttgtgccacagaaacacttgacccaattacacctcaatatctggcggatttaatttcatggagcgcaattggtgcaagaaccactgaatcacaaacacacagggaaatggccagtggattgtcgatgcctgtaggttttaaaaacggtactgacggaggattgagtgtggccattaatgccatgaaatctgcattgcagcctcaccattttcttggcatcaataatgaagggttatcttccgcgatacaaacttctgggaaccgcaatttacatctggtactgcgtggtggcagcaatggccccaattacgatgctgtgtctattcacaaagctgcggaatccttagcttcagaaggattgcctgaatctattatgatagactgcaatcatg

SEQ ID NO: 242439 - DNA, 883 bp, Unknown
  Bacterial polypeptide expressing nucleotide sequence isolated from the Sargasso Sea
ggtgattgttgggccatgctctgttcatgatgttgatgctgctattgaatattcaaatcgtttagccccattgagggagagatatagtcaaaagctggagattgttatgcgtgtttattttgagaaacctcgcacaactgttggttggaaaggacttattaatgaccctcatcttgataattcatacgatattaatacaggtttaagaaaggcaagaggtctattacttgatttagccaaaaaaggaatgcctgctgcaactgaattacttgatccagtggttcctcaatatattgctgatttaattagttggactgctattggagcaagaactacagagagtcagactcatcgtgaaatggcgtctggattatcaatgccggttggttataagaatggtactgatgggacagcaacgatagcgattaatgcaatgcaagcggcttcaaaacctcatcattttttaggaattaataacgatggtcacgcttcaatagttagtactacaggcaatccagatggtcatcttgttttaagaggtgggaagaatggaactaattatcatcttgatgcaattaatttaattgcagatgaattggcacaatctaagatgcctggaaaagtcatggttgattgtagtcatggcaattcaaataaggattttcgtagacaatcagaagttttacgggatgttgcatcacagttaaaaggtggatcaaagaacataatgggcgtaatgattgaaagtcatcttgttgagggtaatcagaaattaaattcagatttgtcaaaactgacctatgggcaaagtgttacggatgcatgcataaacttctctacaactgaagttttattagaagaacttgctcaatcagtccaatag

SEQ ID NO: 242440 - DNA, 880 bp, Unknown
  Bacterial polypeptide expressing nucleotide sequence isolated from the Sargasso Sea
tcgcaaacggagctacacagggatcgcaatcatgcaaaaagacgcgctgaataacgtacatattaccgacgaacaggttctgatcacgccggatcagctgaaagctgaattcccgctgagcctcgaacaagaagcgcaaattgcgcagtcccgtcagacgatatctgacattattgccggccgcgatccgcgtctgctggtggtgtgtggaccttgctcgatccacgatccagaggcggcaattgaatacgctcatcgttttaaagcacttgccgaagaggtcagcgatagcctctacctggtcatgcgcgtctattttgaaaaacctcgtactaccgtgggctggaaagggttgattaacgatccgcatatggatggctcatttgatgttgaaggcggtctgaagattgcgcgtcgcttgctggtagagctggtgaatatggggttaccgctggcaacggaagcgctggatccaaacagcccgcagtacctcggcgatctgtttagctggtccgctatcggcgcacgtacgaccgaatcccagactcaccgtgaaatggcgtcaggtctgtcaatgccggttggctttaaaaacggtaccgacggtagcctgtcgacggcaattaacgcgatgcgtgccgcagcgatgccgcaccgtttcgtcgggattaaccaggccggccaggtttgtctgctgcaaactcagggcaatccgaacggccacgttattctgcgcggcggtaaagccccaaactacggcccggaagatgtcgagaagtgcgaaaaagagatggctcaggcgggactgaaaccgtcactgatggtagattgcagccatgggaattctaataaagactaccgccgccagcctgcggttgcg

SEQ ID NO: 242441 - DNA, 718 bp, Unknown
  Bacterial polypeptide expressing nucleotide sequence isolated from the Sargasso Sea
gaagttttaccgataacttctccaaaaatactcaaagatattttgccagtttctgacaacgttgttgaaaacgtcttaaatgcaagaaatgctataagaaggattttagaaggagaggactcccgtatgttgatgattgtcggaccatgttctattcatgatccggaggcagctcttgaatatgccgcgcgtctaaaatcgctagctgatgaagtttcaggtacaattctcattgtgatgcgtgtttattttgaaaaaccgcgtactacagttggatggaaaggattgattaatgatcctgaattagacggaactcataaaataaacaaagggatagaacttgctcgacggctactaatagggattaatgccctaggactgccttgtgccacagagacacttgacccaattactcctcaatatttggcggatttgatttcatggagtgcaattggggcaagaaccactgagtcgcaaacacacagggaaatggccagtggattgtcaatgcctgtaggttttaaaaatggaactgatggaggattgagtgttgcaatcaatgccatgaaatccgcattacagccgcaccattttttgggtattaataatgaaggtctatcttccgcaattcaaacttctggaaaccgtaatgtccatttggttttacgtggtggtagtaatggccccaattatgatgctatttctattcacaaagctg

SEQ ID NO: 242442 - DNA, 910 bp, Unknown
  Bacterial polypeptide expressing nucleotide sequence isolated from the Sargasso Sea
aatgtgaacgtagcaggtcagcgagtgttgatctcgccagcggcgctccgcaacacggttgaaatccctgattcagtctatgaattcgtgtcgtcctctcgctcggtgatcgagcagatcattgatcgacaggatcacaggctgatggtggtggtgggcccctgctccattcatgacgtgactgccgcgctcgactacgcaagtcgcctgaaagagttggctgagcgcgttgctaagaatctgtatctggtcatgcgggtttattttgagaaaccccgaacgacgataggctggaagggtttaatcaacgacccaaacctcgacgactcgttcgcgattgaaagcggtctagaaactggacggactctgctcagggatattctcgcgatggggttgccgaccgcgacagaagcgctcgatcccatcactccgcagtacctccacgatctcattagctggtcagcgatcggggcgcgcactaccgaatctcagactcaccgcgagatggccagcgggctttcctcccccgtaggctttaaaaatggtaccgacggcggtctggcggtggcggtgaacgccttgcattcagtcgccaacccgcatcgttttttgggtatcaactcggatggtaaggtttcggtcttcgaaaccagtggcaatcgttatgggcatattgtaatgagggggggtagccacggaccgaattacagcgcagagcatatcgctcgttgtgaggcagtcctcgaggcggcgaaccttcgtgccaacattatggtcgactgcagtcacgccaactccgagaagaatccggccttgcagcctgcggttgcgcagaatgtggttgaacagattgtgcagggcaatcagtccatcatagggatcatgttggagagcaacttagaggcgggga

SEQ ID NO: 242443 - DNA, 907 bp, Unknown
  Bacterial polypeptide expressing nucleotide sequence isolated from the Sargasso Sea
acatcaaagaaatttgtaattgttgttggcccttgctcaatacatgatattgatgcagcaaaagaatacgctatcaaattaaaaaatttaaaaaactcattatctgaaaatatattattggtcatgagggtatattttgaaaaacctagaacagttattggatggaagggcttgattaatgacccagatttagatggatcttttaaaatcaataatggtataaaaatagcaagacagttattaatagatctatccgagatggacataccatgtggtcatgaatttcttgatttagtaagcccacaatacttatctgatttgataagttggggcgcaattggcgctagaactacagagagtcaaagtcatagagagcttgcctcaggattatcttgtccagttggatttaaaaatggaacagatggcagtattcaaattgcaattgatgcaatgaatgctgcaagacactcacatagttttttatctgtaacaaaagaaggaaaatccgcaatatttaacacagcaggcaacaatgactgccacataattctccgcggaggtaataaaaaaacaaatttctcttctaaggatgtgaaggaatccactattacattagagaataataatttgaaacctaatatcatgattgacgcaagccacgccaacagtaaaaaggattataaaaaacagtccactgttgtcgaagatgtcaaacaacagatatgtaatggtgaaaaaaatatcattggaattatgcttgaaagtaatcttgtagaaggcaatcaaaaaattaatagcagagaaaaacttaaatacggtcaaagcattacggattcatgtataggatggaacgaaactgaacaaataattttatcactcgatgaaacattaaaaaataatttatgaa

SEQ ID NO: 242444 - DNA, 739 bp, Unknown
  Bacterial polypeptide expressing nucleotide sequence isolated from the Sargasso Sea
gggtggaagggccttataaatgatccccatttagataattcttatgatattaatactggtttacgacgggcaagaagtttgctgtcctatctagcaactcgtggaatacctgctgctacagaattacttgatccaattgttcctcaatatattgctgatttaataagttggacagccataggcgcgaggactaccgaaagccaaactcatagggaaatggcatcaggattatcaatgcctattggctttaaaaatggaacggatggttctttcaatactgcaataaatgcgatgcagtcagcttcaaaatctcatcatttcttgggggtaaacgaaaatggaatggcttcaattgttaatactacgggaaatcccgatggccatatagttttaagaggcggctcaaaaggcccaaattttgaaagtcatcatgttcaaagaatttcagcggaattaaaagaatttaatcttcctgataaagtaatgattgattgtagtcatggaaattccaacaaagacttccgcaaacagtctgaagtgctaaaaaatatagcttctcaaataaatgatggtgaaaaaaatattttaggagttatgcttgaaagtcatttaaaggaaggtaatcaaaaacttttaaacaaagaggatcttgagtttggtagaagcattacagatgcatgcatagatatagagaccacaaaagaattacttgctattttgtatagttcagttaattagt

SEQ ID NO: 242445 - DNA, 619 bp, Unknown
  Bacterial polypeptide expressing nucleotide sequence isolated from the Sargasso Sea
aatgacgacatcatcaaataattcagctttagaaaagacatcagatttacatgttgttgaaacacgtccattaatacctccaagcagattacataatgatatacctttagatcacgcctctgctaatacagtatctaaaacaagaagatcgatacaaaatattttgcatcataatgatcagaagcttctagtaattgttggtccatgttcaattcatgatctagaggcagcaaaggaatattcaaaatatattcaaaactttcgagaaatttataaagataaattagaaattataatgagagtatattttgagaagccaagaacaactattggttggaagggattaataaatgatcctcatctagatgattcttatgatattaatactggtttaagaagggcaagaagtttgctttcatatctagcaactcgtggcataccttctgctacagaattattagatccaattgttcctcaatacattgcggatttaataagttggacagctataggtgcgcgaactactgaaagtcaaactcatagggaaatggcatcaggattatcaatgcctataggctttaaaaatggaaccgatggctcttttaatactgcaataaat

SEQ ID NO: 242446 - DNA, 803 bp, Unknown
  Bacterial polypeptide expressing nucleotide sequence isolated from the Sargasso Sea
taaagataaattagaaataatcatgagagtatattttgaaaaaccaagaacaactattggttggaagggattgataaatgatccccatctagatgactcttatgatattaatactggtttaagaagggcaagaagtttgctttcatatttagcaacacgtggcataccttccgctacagaattactagatccaattgttcctcaatacattgcagatttaataagttggacagccataggtgcacggaccacagaaagtcaaactcatagggaaatggcatcaggattatcaatgcctataggctttaaaaatggaacggatggttcttttactactgcaataaatgcaatgcagtcagcttcaaaatctcatcatttcttgggtgtaaatgaaaatggaatggcttctatagttaatactacaggaaatcctgatggacatatagttttaaggggcggttcaaaaggtccaaatttcgataatgaaaacgtcaaaaaaatttcagctgaattgaggcaatgtaatcttccccataaagtgatgattgattgtagtcatggaaattccaataaagacttccgaaaacagtctgaagttcttaaaaatatagcttctcaaattagtaatggtgaaaaaaatattttaggagttatgcttgaaagtcatttgaaggaaggaaatcaaaaacttttaaataaagaagatctccagtttggcagaagcattacagatgcatgtatagatatagaaacaacaaaagaattactcgctattttatacaattcaattagcttgttataaa

SEQ ID NO: 242447 - DNA, 970 bp, Unknown
  Bacterial polypeptide expressing nucleotide sequence isolated from the Sargasso Sea
acagaagatctaaatgttgcttcaaatgaagctttaattacaccccagcaattaaagaatgagattcctttgagggggaatgctcttgagtctgttgaaaaagctaggagtacaattttttctatccttgataggaaagatccaagaatatgtgtcgtcgtcggtccctgctctattcatgatacagaagcagcgatcgattatgctaaacgtctaaaagagcttgcggaccaagtccgcgacacattatttattgttatgcgtgtttattttgagaaacctagaacctcgattggctggaagggattgattaatgacccgcatcttgacgattcatttaaaatagaggaaggtctcagaataggccgtaggttactgttggacataatcgatattggtctgcctacttctacagaggcacttgaccctatttctccacaatatatgcaggatttaatttcatggtcagcaattggtgctcgcaccacagagtctcaaactcatagagaaatgtcttcgggcttatcctctgcggttggattcaagaatggtactgacggcggtttgactgtcgccgtaaacgctatgcaatcagtttccagtccgcataggttccttggaataaatacacaaggccaagtttctgtagtcagcaccagagggaatccttatgcgcacgttgtgcttcgaggtggaagtaacggcccaaattatgactcagttcatgtatctcaatgcgaaaaagcgctcgccgatggcggggtcagcagcaatataatgattgactgcagtcacgccaactcgagtaaaaatccagatatacagccactagtattaaaagatgtcactcatcaaatattagagggtaacaagtctattataggtgtaatgctcgagagtttcatcaatggggggagtcaatctattcctgaaaacctcgataatttaaagtatggtatctcagtcacag

SEQ ID NO: 242448 - DNA, 556 bp, Unknown
  Bacterial polypeptide expressing nucleotide sequence isolated from the Sargasso Sea
gatgagtgaaaaaacactaaacgatctgaatgtcatgaacgaagaaaccctcgtgtcgcctactgaactaaaaaatttgataccggcctcagaaagcgcttttcaaaccgttcgagaaggtcgggatgtaattaaaaaaattctagatcgagaagaccctaggctttttattgttgttggcccttgctcaatccacgatccaaatgaagcattagattacgccaaaagattaaaaggtttagcggatcaagtgagtgatgcgctagttcttgtaatgagagtttacttcgaaaaaccgcgcaccacgacgggatggaagggattgattaatgacccaatgatggacgactcctttaaaattgcggaagggctcaaacgaggaagaaaactcctgatagagctagctgagatggggctccctacctcaaccgaagctcttgacccagtcaccccccaataccttcaggatcttatttcctggagtgctattggggcgagaacgacggagtcacaaacccatagagaaatggcaagcggattgtcctctgccgtcggc

SEQ ID NO: 242449 - DNA, 889 bp, Unknown
  Bacterial polypeptide expressing nucleotide sequence isolated from the Sargasso Sea
ccaaaaaccgtcattgaagagtgtccagtacctccgtcggttgctcagcttgtgacgcgtacgcgtgctgaggcgcatgcgattctccatggccaggacgatcgagtcattgtaattgttggaccctgttcgattcatgaccccgttgcggcgctggattatggtgctcgtctagaagcgttacggcagaaatattccaaagatctgttaattgttatgcgagtctatttcgaaaagccccgtactaccgtcgggtggaaaggattgattaatgatcccgaccttgatggctcattcaatatcaataaaggattgaggcttgcccgtaaattgttgctggatcttaacctggctggagtgcctgctggaacagagtgcctagatctgctaacaccacaatatgttgctgatctaattagttggagtgctattggcgcgcgaacgacagaaagtcaattacaccgagagctggcatctggattgtcttgtccggttggatttaagaacggcacggatgggaatcttaagatcgcaatcgatgccgttggtgctgcagcgcatccacatcatttcttgacggtgactaaagctgggtatctaagtatctttgaaaccactggcaatgaggatggccatgtaattctccggggcggtcaatcaccgaactatgataaggaaagtgtcaacacggcagctcaaatgttggaatctgctggttgttctccaagattaatggttgattttagtcacgcaaacagcggaaaacagcatcgtggacaaattactgttggcactgatgtttcgagtcaactggctcagggcgacaataggatagtcggcgtcatgatcgaaagtcatctcgtcgagggccggcaagatgttgtcgcgg

SEQ ID NO: 242450 - DNA, 899 bp, Unknown
  Bacterial polypeptide expressing nucleotide sequence isolated from the Sargasso Sea
atttatacccccaagcagattacataatgatatacctttagatcacacctctgctaatacagtatctaaaacaagaagatcgatacaaaatattttgcatcataatgatcagaagcttttagtcattgttggtccatgttcaattcatgatctggaggcggcaaaggaatattcaaaatatattcaaaactttcgagaaatttataatgacaaattagaaattgttatgagagtttattttgagaaaccaagaacaactattggctggaagggacttattaatgatcctcatctagatgattcttatgatattaatactggtttaagaagagcaagaagtttgcttgcctatctagcaacccgtggaattccgtctgctacagaattattagatccaattgttccacaatacattgctgatttgataagttggacagctataggagcaaggacgactgaaagccaaactcatagggaaatggcgtcaggattatcaatgcctattggttttaaaaatggaacggatggttcttttaatactgcaattaatgctatgcagtcagcctccaaatctcatcatttcttgggtgtaaatgataatggaatggcatctattgttaatactactggaaatccagatggccatatagttttaaggggtggttcaaaaggccctaattttgaaagtcaacatgtccatagaatttcttctgaattaaggcaatataatcttcctcataaagtgatgattgattgtagtcatggtaattccaataaggatttccgaaagcagtctgaagtcttaaacaacgtagcttcgcaaataggtaatggagaaagaaatattttaggtgttatgcttgaaagtcatttaaaggaaggaaatcaaaaactttaaa

SEQ ID NO: 242451 - DNA, 539 bp, Unknown
  Bacterial polypeptide expressing nucleotide sequence isolated from the Sargasso Sea
gattgtcggaccatgctctatccatgatccacaggcagctcttgaatatgcagaacgtcttaaatctctggctgataaagtttcagataaaatttttgttgttatgcgtgtctattttgaaaaacctcgtaccacagtcggatggaaagggctgattaatgatcctgagttagacggaagccacaaaataaaccaagggatagaaattgctcgaaagcttctcattggaattaattccattggtctgccttgcgccacagaaacacttgatcctattacacctcaatatttggctgatttaatttcatggagtgcaatcggggcacggaccactgagtctcaaacacacagggaaatggccagtggtttgtcgatgcctgtaggttttaaaaatggaacagatgggggattgagggtagccataaatgctatgaaatcagcattacagccgcaccactttcttggtataaataatgagggtttatcttctgcaatacaaacttctggcaaccgcaatgtacacctagtgctccgaggtg

SEQ ID NO: 242452 - DNA, 808 bp, Unknown
  Bacterial polypeptide expressing nucleotide sequence isolated from the Sargasso Sea
gctgaagggcgagctggaagtggtgatgcgcgtttactttgaaaaaccgcgtaccaccgttggctggaaggggttaatcaacgacccgcatatggataacagcttccgcatcaacgacggcctgcgcattgcgcgtaagctgctgctggagattaacgacagcggactgcctgcggcgggtgaattccttgatatgatcaccccgcagtacgttgctgacctgatgagctggggcgccatcggcgcgcgcaccaccgaatcccaggtgcatcgcgagctttcatctggcctttcttgtccggtaggttttaaaaacgggaccgacgggacaataaaagtggctattgacgcgatcaacgccgctggcgcaccgcactgcttcctgtcagtgaccaaatggggccattcggcgattgtgaataccagcggcaacagcgactgtcatatcattctgcgcggtggcaaagagccgaactacagtgcgaagcacgttgctgaagtgaaggttgggctggcgaaagcgggcctgccggcgcagatcatgattgatttcagccacgcaaactccagcaagcagtttaaaaaacagatggaagtgggtgccgatgtttgccggcagattgccagcggcgagcaggcgattatgggcgtgatgattgaaagccatctggtggaaggtagccagagtctggagagcggcgtgccgctggcctatggcaaaagcatcaccgatgcctgtatcggctgggaagataccgataccatcctgcgccagctggcggatgcggtaaaagcccgtcgcggttaa

SEQ ID NO: 242453 - DNA, 703 bp, Unknown
  Bacterial polypeptide expressing nucleotide sequence isolated from the Sargasso Sea
atgacgacatcatcaaataattcagctttagagaagacatcagatttacatgttgttgaaacacgtccattaatacctccaagcagattacataatgatatacctttagatcacgcctctgctaatacagtatctaaaacaagaagatcgatacaaaatattctgcatcataatgataagaagcttctagtaatcgtgggtccatgttcaattcatgatctagaggcggcaaaggaatattcaaaatatattcaaaactttcgagaaatttatgaagataaattagaaataataatgcgagtatattttgagaagccaagaacaactattggttggaagggattaataaatgatcctcatctagatgattcttatgatataaacactggtttaagaagggcaagaagtttgctttcatatctagcaactcgtggcataccttctgctacagaattactagatccaattgttccgcaatacattgccgatttaataagttggacagctataggtgcccgaactactgaaagtcaaactcatagggaaatggcatcgggattatcaatgcctataggttttaaaaatggaacggatggttctttttctactgcaataaatgcaatgcagtcagcttcaaaatcccatcattttttaggtgtaaatgaaaatggaatggcttctattattaatactacgggaaatc

SEQ ID NO: 242454 - DNA, 881 bp, Unknown
  Bacterial polypeptide expressing nucleotide sequence isolated from the Sargasso Sea
tttggtcgcaccagcgatcctgcacagcgatctgccgttgtcagatcgggctagtgaaacggtgcgccagacccgtcaaacgattcaacgcattcttcggggggaggatcagcggttgctggtcatcgtcggcccctgctcggttcacgatgtggctgcggcggaggaatacgccggtgcgctggctcttattcgcgaccgtctgaaggacagccttgagatcgtgatgcgggtttatttcgagaagccccggaccacggtgggctggaagggcttgatcaatgacccgcatctcgacggcagttacgacatcaacaccgggctgcgccgggcccgttcactcctgttgcaactggctgagcgcggtttgcccgcggccacggaattgctcgatccaatcgtgccccaatacatcgccgacttggtgagttggacggccatcggtgcccgcaccaccgaaagccaaacccaccgtgagatggcctcgggcttgtccatgcccattggctttaagaacggcaccgatggcggagtgaccgtggccatcaatgccatgcaggcagcagctcggccgcaccatttcctgggcattaaccggcaggggcatgcctcgatcgtgtcgaccactggcaacccttatgggcatttggtgctccgtggtgggggcgggcagaccaacttccactccgaagccattacttcagtggcggcccaactcaaggccgctgcattgcccgatcgggtgatggtggattgcagccatggcaattccaacaaggactatcgccgccaaagtgaggtgctccatgccgtggcagagcaggtgcgtcagggctccacatctgttttgggcgtgatgcttgaaagcaatctggtggagg

SEQ ID NO: 242455 - DNA, 838 bp, Unknown
  Bacterial polypeptide expressing nucleotide sequence isolated from the Sargasso Sea
ccaaaaaaactcaaaaacattttacctgtttctgacatcgttataaaaaacgtcttaaatgcgagaaatgatataaaaagcattttagagggaaaagactctcgtgtattgatgattgtcggaccatgctcaattcatgatccgcaggcagctattgaatatgcagagcgtctaaaaaagattgctgatgaggtttcagatacaattcttgtagtaatgcgtgtatattttgaaaaacctcgtactacagttggatggaaaggattgattaacgatcctgaattagatggaagccacaaaataaatgaaggtatcaaactagctcgtcagttattgcttgaaattaattcacttggactgccttgtgctacagaaacacttgatccaattacaccacaatatttagcagatttgatttcatggagcgcaattggggcaagaactactgaatcacaaacacacagggaaatggccagtggattgtcgatgcccgtaggttttaaaaatggaactgatgggggactgactgtggccatcaatgcgatgaaatccgcattacagccacaccattttctgggaatcaataatgaaggactatcttcagcaattcaaacttctggtaatcgtaatgtacatttggtcctacgaggtggaagcaatggacccaattatgatgctgtttctattcacaaagctgcagaatctctagcatcagaagatttgcctgaggctattatgattgactgcaatcacgccaactctgggaaagacccctcacggcaggaactcgtattaagagacgcaatacaccagataaataaaggtgataattcaatta

SEQ ID NO: 242456 - DNA, 770 bp, Unknown
  Bacterial polypeptide expressing nucleotide sequence isolated from the Sargasso Sea
attacataatgatatacctttagatcacacctctgctaatacagtatctaaaacaagaagatcgatacaaaatattttgcatcataatgatcacaagcttttagtcattgttggtccatgttcaattcatgatatagaggcggcaaaggaatattcacaatatatccaaaactttcgtgaaatttataaagataaattagaaataattatgagagtatattttgagaaaccaagaacaactattggttggaagggtcttataaatgatcctcatctagatgattcttatgatattaatactggtttaagaagggcaagaagtttgctttcatatctagcaactcttggaataccttctgctacagaattactagatccaattgttcctcaatatattgccgatttgataagttggacagccataggcgcgaggactactgaaagtcaaactcatagggaaatggcatcaggcttatcaatgcctataggttttaaaaatgggacggatggttcttttactactgcaataaatgcaatgcagtcagcttcaaaatcgcatcatttcttaggggtaaatgccgatggaatggcttctattgttaatactacgggaaatccagatagccatatagttttaagaggcggctcaaaaggtccaaattttgaaagtcaacatgtacaaagaatttcagctgaactaaagcaatgtaatcttcctcataaagtgatgattgattgtagtcatggaaattccaataaagacttccgaa

SEQ ID NO: 242457 - DNA, 895 bp, Unknown
  Bacterial polypeptide expressing nucleotide sequence isolated from the Sargasso Sea
ccaagagttttggtgattgttggaccatgttcggttcatgatgttgatgccgctattgaatatgcaaattgtttagccccattgagggagaaatatagtcaaaagttagagattgtcatgcgtgtttattttgagaagccacgtacaactgttggttggaaaggacttattaatgatcctcatcttgataattcttacgatattaatactggtttaagaaaggcaagaggtctattacttgatttagccaaaaaaggaatgccggcagcaactgaattgctcgatccagttgttcctcaatatattgctgatttaattagttggactgctattggggcaaggacaacagagagtcagactcatcgtgaaatggcgtctggattgtcaatgccggtgggttataagaatggtactgatgggacagcaacgatagcgattaatgcaatgcaagcggcttcaaaacctcatcattttttaggaattaataacgatggtcacgcttcaatagtgagcactacaggtaatccagatggtcatctcgttctaagaggtggtaagaatggaactaattatcatcttgatgcaattaatttaattgcagatgaattggcaaaatttaagatgcctggaagagtcatggttgattgtagccatggcaactcaaataaagattttcgtagacaatcagaagttttgcgggatgttgcatcacagttaaaaggtggatcaaagaatgtaatgggcgtaatgattgaaagtcatcttgttgagggtaatcagaaattaaattccgatttatcaaaacttacctatgggcaaagtgttacggatgcatgcataaacttttctacaactgaagttttattagaggaactagctgaatcagtcaaataaa

SEQ ID NO: 242458 - DNA, 607 bp, Unknown
  Bacterial polypeptide expressing nucleotide sequence isolated from the Sargasso Sea
atgacgacatcatcaaataattcagctttagaaaagacatcagatttacatgttgttgaaacacgtccattaatacctccaagcagattacataatgatatacctttggatcacgcctctgctaatacagtatctaaaactagaagatcgatacaaaatattttgcatcataatgatcataaacttttagtcattgtgggaccatgttcaattcatgatctagatgcggcaaaggaatattcaaaatatattcaaaatttccgagaaatttataaagataaattagaaataataatgagagtatattttgaaaaaccaagaacaactattggttggaagggattgataaatgatcctcatctagatgattcatatgatattaatactggtttaagaagggcaagaactttgctttcatatttagcaacacgtggtataccttctgctacagaattactagatccaattgttcctcaatacattgccgatttaataagttggacagccataggagcgcggactacagaaagtcaaactcatagggaaatggcatcaggattatcaatgcctataggttttaaaaatggaacggatggttcttttacta

SEQ ID NO: 242459 - DNA, 1075 bp, Unknown
  Bacterial polypeptide expressing nucleotide sequence isolated from the Sargasso Sea
atgacgacatcatcaaataattcagctttagaaaagacatcagatttacatgttgttgaaacacgtccattaatacctccaagcagattacataatgatatacctttggatcacgcctctgctaatacagtatctaaaactagaagatcgatacaaaatattttgcatcataatgatcataaacttttagtcattgtgggaccatgttcaattcatgatctagatgcggcaaaggaatattcaaaatatattcaaaatttccgagaaatttataaagataaattagaaataatcatgagagtatattttgaaaaaccaagaacaactattggttggaagggattgataaatgatcctcatctagatgattcttatgatattaatactggtttaagaagggcaagaactttgctttcatatttagcaacacgtggtataccatctgctacagaattactagatccaattgtccctcaatacattgccgatttaataagttggacagccataggagcgcggactacagaaagtcaaacccatagggaaatggcatcaggattatcaatgcctataggttttaaaaatggaacggatggttcttttactactgcaattaatgcaatgcagtcagcttcaaaatcccatcattttttaggtgtaaatgaaaatggaatggcttctatagttaatactacaggaaatccagatggacatatagttttaaggggcggttcaaaaggcccaaattttgaaagtgatcatgttaaaagaatttccgctgaattgaggcaatgtaatcttccccataaagtgatgattgattgtagtcatggaaattcgaataaagacttcagaaaacagtcggaagtactaaaaaatgtagcttctcaaattagtaatggtgaaaaaaatattttaggagttatgcttgaaagtcatttgaaagaaggaaatcaaaaacttttaaaaaaagaagatcttcagtttggcagaagcattacagatgcatgtatagatatagaaacaacaaaagaattactcgctattttatacaattcaattagcttgttataaa

SEQ ID NO: 242460 - DNA, 1066 bp, Unknown
  Bacterial polypeptide expressing nucleotide sequence isolated from the Sargasso Sea
atgaccattaaaacagacgaattacgcacttccttattagctaaagtcatctcacctgcacaactggcatctgagtacccgttaacccaagatgcagccgattacctcgttcagcaacgtcgtgaagttgaagccattattatgggcgaagatcatcgtctactggtgatcattggcccttgctctatccatgatacgcaagctgccctcgactacgcccgccgtttagctgtgctgcatcaagagttaaaggacgatctctgtattttaatgcgggtgtactttgaaaagccgcgcaccattgttggctggaaagggttaatttccgatcctgacttagatggcagctttgaacccaataaaggattgcgtattgcccgtcagctactacagcaaatcactgagctgaaattgccgattgccaccgagtttttagatatggtgaacggtcaatatattgctgatttaatcacctggggcgctatcggcgctcgcaccactgaaagccaagtccaccgcgaaatggcctcggcactctcctgccctgtgggttttaaaaatggaaccgatggcaatatcaatatcgccgttgatgccgttcgtgccgccaaagtgccacatattttctattcaccagataaagatggcgctatgtcagtatatcgtacccatggtaatccttatgggcacattattttacgcggtggtaaaaaacctaattactttgagcaggatattgaacaagcaagattaaaacttgagtctgtcaatgtaacgccgcgtgtggtggttgattttagccacggtaacagtgaaaaaaatcacctaaaacaactggtcgttgctgaaaatatcatggcgcaaatgcgcgcgggtagtacggccattgccggcatcatggcagaaagtttcttacaggaaggcaatcaaaaagtggttgagggtcaacctttatgctacggccaaagcattaccgatgcctgcttacattgggatgactcagaaaaattactgcgagatctggctaaagcctcacgcgataggcgtgaacttctcggtaaataag

SEQ ID NO: 242461 - DNA, 1060 bp, Unknown
  Bacterial polypeptide expressing nucleotide sequence isolated from the Sargasso Sea
tatgaattacaaaactgatgacttaagaattgaatcaataaaagcagttacaacgccactggaagtttgtaaagaaattccaattacagagcaagctgcaaaaacaacagcgttaacacgtgatgcaatacatcaaatattacataaaaatgataatcgtttaattgtgataactggtccatgttcaattcatgatgtcaatgcagctgaagagtatgcgtctagattaagacctcttatagaaaaatattctgatgatcttttaattataatgcgcgtctactttgaaaaaccaagaacgactgttggatggaaaggtttgattaatgacccttccttagataatagttttaatattaatgaaggactacgactagctagacaattacttcttgatcttaatgaaatgggtgtgccagccggaacagaatatcttgatttaattacgccacaatatgtcactgatttaataagttggggcgcaatcggtgcaagaacaacagaaagccaagttcatcgagagttagcttcgggattgtcatgtcctgtagggtttaaaaatggtacatatggaaccacgaaaattgcagttgatgcgattaatgcggcaactcgaccacatcattttctatcaattagaaaggatggtggtaatgcagctatagtttcaacaaagggtaacgttgatactcatattattttacgtggcggtaaggagccaaattatgatgctgcgcatataaacagagtatcagaagaattaaaagcagctaaactaccagaaaatataatgattgatttaagtcacgcaaatagccgtaaagaacataatttacagattgatgttgctagtgaagtagctgagcagataactaatggtgacagcagaataattggagtcatgattgaaagtcatcttgttgaaggcagacaggatgttaaatctgacaatgagctgacctatggacagagcattactgatgcttgtattggttgggaaaatacagtcaaactaattgattcatttgccaaagcaagtaaaaacagaaaaataaattag

SEQ ID NO: 242462 - DNA, 1075 bp, Unknown
  Bacterial polypeptide expressing nucleotide sequence isolated from the Sargasso Sea
atgcccccgcacaacaccgacgatgtccgcatccgcgaattgaaagaactcacaccgcccgctcacctgatccgcgaattcgcctgcgacgaaacggtgtccgacgtgatctacaactcgcgcaacgcgatgcatcgcattctgcacggcatggaagaccggctgatcgtcatcatcgggccgtgctcgattcacgatacgaaggcggcaatggaatacgccgggcgtctcgtcgaacagcgcaagcgcttcgccggcgaactcgaaattgtgatgcgggtgtacttcgaaaagccgcgtacgacggtgggctggaagggtctcatcaacgacccgtacatggacaacagcttcaagatcaacgacggcctgcgcaccgcgcgcgagttgctgctgcgtatcaacgaactcgggctgccggccggcaccgaatacctggacatgatcagcccgcagtacatcgccgatctgatctcatggggtgcaatcggcgcgcgtacgaccgaatcgcaagtgcaccgcgaactggcttcgggcctgtcgtgcccggtcggtttcaagaacggcacggacggcaacgtcaagattgccgtcgacgcgatcaaggccgcgtcgcagccgcaccatttcctgtccgtcaccaagggcggccactcggcaatcgtctcgacggccggcaatgaagactgccacatcatcctgcgcggcggcaaaacgccgaactacgatgcggacagcgtcaacgcggcatgcgccgacatcggcaaagcgggtctcgcggcgcgtctgatgatcgatgcgagccacgcgaatagctcgaagaagcacgagaaccagattccggtgtgcgcggacattggtcgccagattgcttcgggtgacgaacggattgtcggcgtgatggtggaatcgcatctgatcgccgggcgccaggatttgcaggaaggctgcacgctcacgtacggtcagagtatcaccgatgcctgtatcggctgggacgaaagcgttgccgtgctggaaggtctcgccgaagcggtcaagcaacggcgcgtgacgcgcggtagcggtaattaaa

SEQ ID NO: 242463 - DNA, 1075 bp, Unknown
  Bacterial polypeptide expressing nucleotide sequence isolated from the Sargasso Sea
atgcccccgcacaacaccgacgacgtccgtattcgcgaactcaaggaactgacgccgcccgcccacctgatccgcgaattcgcgtgctccgaagccgcgtccgagctgatctacaactcgcgccagtcgatgcaccgcatcctgcacgggatggacgaccggctgatcgtggtgatcgggccgtgctcgatccatgacacgaaggcggcgatcgaatacgcgggccggctggtgaaggagcgcgagcgcttcaagggcgaactggaaatcgtgatgcgcgtgtacttcgagaagccgcgcacgacggtcggctggaagggcctcatcaacgatccgcacctcgacaacagcttcaagatcaacgaagggctgcgcactgcgcgcgagctgctgctgcagatcaacgagatggggcttccggccgcgaccgagtacctcgacatgatcagcccgcaatacatcgccgacctgatctcgtggggtgcgatcggcgcgcgcacgacggaatcgcaggtgcaccgcgaactcgcgtcggggctgtcgtgcccggtcggcttcaagaacggcaccgacggcaacgtgaagatcgcggtggacgcgatcaaggccgcctcgcagccgcaccatttcctgtcggtgacgaagggcggccattcggcgatcgtgtcgacggcgggcaacgaagactgccacgtgatcctgcgcggcggcaaggcaccgaactacgacgcggacagcgtgaacgccgcgtgcgcggacatcggcaaggccggcctcgccgcgcgcctgatgatcgacgcaagccacgcgaacagctcgaagaagcacgaaaaccagatccccgtgtgcgccgacatcggccgccagatcgcagccggcgacgcccgcatcgtcggcgtgatgatcgaatcgcatctcgtcgaggggcgccaggacctgaaggaaggctgcgagctgacctacggccagagcatcaccgacgcgtgcatcgcgtgggacgacagcgtgaaggtgctcgaaggcctcgcggaatcggtgaaggcccgccgcgtctcgcgcggcagcgggaactgac

SEQ ID NO: 242464 - DNA, 706 bp, Unknown
  Bacterial polypeptide expressing nucleotide sequence isolated from the Sargasso Sea
aatgacgacatcatcaaataattcagctttagaaaagacatcagatttacatgttgttgaaacacgcccattaatacctccaagcagattacataatgatatacctttagatcacgcctctgctaatacagtatctaaaacaagaagatcgatacaaaatattttgcatcataatgatcagaagcttttagtaattgtgggtccatgttcaattcatgatgtagaggcggcaaaggaatattcaaaatatattcaaaatttccgagaaatttataaagataaattagaaataatcatgagagtatattttgaaaaaccaagaacaactattggttggaagggattgataaatgaccctcatctagatgattcttatgatataaatactggtttaagaagggcaagaagtttgctttcatatttagcaactcgtggcataccttctgctacagaattactagatccaattgttcctcaatacatagccgatttaataagttggacagctataggtgcgagaactacagaaagtcaaactcatagggaaatggcatcgggattatcaatgcctataggttttaaaaatggaacggatggttctttttctactgcaataaatgcaatgcagtcagcttcaaaatcccatcattttttaggtgtaaatgaaaatggaatggcttctattattaatactacgggaaatcca

SEQ ID NO: 242465 - DNA, 1069 bp, Unknown
  Bacterial polypeptide expressing nucleotide sequence isolated from the Sargasso Sea
cttgccgtcccccgccgatctggccggcgcgctgcagcctgcgttgcgcgcgacgcgcacggttcatcaggctcgccacgcgatcgtcgacgtgttgaacggcacggacgaccgtctcgtggtcatcgccggcccgtgctcggtgcacgacccggccgccgcgcgcgactatgcggcgcggctcgcgctgcaacgcgcgcgattcgcggacgagctggaaatcgtgatgcgcgtgtacttcgagaagccgcgcacgacggtcggctggaaagggctcatcaacgatccgctgctggacggcagcgaacggatcgacgccgggctgcatacggcccgcgcgctgctgtgcgacatcaacggggcggagatgccggcggcgaccgagtttctcgatccgctgtcgccgcgctatctggccgacctggtcgcgtggggggccatcggcgcgcgcaccgtggaatcgcaggtgcatcgcgagctggcgtcgtcgctgccgatcccgatcggcttcaagaacggcaccgacgggaacgtccaggtggccgtcgatgcgatgcgcgcggccgcgcgagcgcatcgcttcctgtcggtcgatgcgggcgggcggctatgtgcgacggcgtcgcccggcaatccgcatacgcatgtcgtgctgcgcggcgggcgcgaaccgaatttcgacgcggcggccgtgaatgccgtgtgcgagcgcatggtggccgcgcaatgcgcgccgcgcgtgatgatcgacatcagccacggcaacagccgccgccagttccgcaatcaactgggcgtcggcacggccgtcgccgcgcaggtcgcggccggcgacgcgcgcatcgtcggcgtgctgatcgagtcgaacctgatcgaagggcgccaggatctcgtgcccggcatgccgctgcgctacgggcagagcatcaccgatgcgtgcctgtcgttcgccgataccacgccgctcctcgagacgctcgcctacgcagtgcgggcgcgccggcgtggccatgcgccgacgcctgacctcgacttcgcgcgcgagccgctgctcgcgtgctgcgcgtga

SEQ ID NO: 242466 - DNA, 1087 bp, Unknown
  Bacterial polypeptide expressing nucleotide sequence isolated from the Sargasso Sea
aatgtgcgccttcgcggtggaggctctccccactcctgccgacctgttggcacttcacccctgtcccgccgacctggcaaccgggatcgatcagcaccgtcagcaggttcgccagatcctgagcggggaagacgatcgcctgctggtggtcatcggtccctgctccattcacgatcccctcgccgccctcgattacgcccggcggctggcagtgctggcccacgactatcgggatcggctgcagattgtgatgcgcacctatttcgagaagccccgcaccacggtgggctggaaggggctggtgttcgatccccatctggacggcagcaacgacataggtcatggcctgcagctggcacgccagctgctgctcgacatcaaccggctggggctggccaccgccaccgagtttctcgacaccaccagcttcctctacctggccgatctcatcagctggggagcgatcggcgcccggaccacggagtcacaggtgcaccggcagctcgcctctgccctgccctgccccatcggcttcaagaacggtaccgatggcaacatccgggtggctatcgatgccatccaggccagcgaagcgtcccacctgtttaccgcccccggcagccagggcggcatggtggtgatcaagagtgagggcaacccggccggccacatcatcttgcgcggcggcacccgccccaattatcaccagagcgacgtggaagaggcggccgagcggctggcacggcaggggctcacgccccgactgatggtggattgcagccacggcaacagccagaaactgcacaagaaccagatccgggtggcaggagagctctgccgccagctgggggaaggcagcgacgccatcgccgccgtcatggtcgagagcttcctgcaggggggcagccagaaaccggcgccgctggccgagctggtgtatggccagtcggtcaccgatgcctgcctgtgctgggacgatacccagaccctgctcgccatgctggcagaggccgtcgagacacggcgccagcaccctggtcgggcacaaccggacatcacccgctggcatgcccagctggccagttga

SEQ ID NO: 242467 - DNA, 1045 bp, Unknown
  Bacterial polypeptide expressing nucleotide sequence isolated from the Sargasso Sea
aatgaagaacaaaatacacaatataaacgttatcgctaaagagaaactcccttctccaaaagcgctcaaagaaactttgcctttaacctctaaggcaaggaagaccgtcttagctaaacgaaaagaattgatgagaatcttggatggcaatgattctagacttgtcgttgttgttgggccttgctcaattcatgacaccaatttggcaaaagattatgcattgagattaaaagaactctctaaagaactagaggattcattcttggttttgatgagggtttattttgaaaaaccaagaacaacgactggttggaagggtttaataaacgatccaaatattgatgacacattccagattgacaaaggcattcatattgctcgttcattactcattgatctaaatgaaatggggcttggtgttgcgactgaggcacttgacccgatcatgcctcaatatttgggtgatctgactagttggactgctatcggagcaagaactgccgagtctcaaacccatagagagatggccagcggtttatcaactcctgtcggttttaagaatgggactgatggctctcttgccgttgctgtcaatgcaattaaatcatcaagacaatctcatcatttcctaggcctaaatgatggcggcagaatcactgtttatcaaacaaaaggaaacaaatactcccatgtggtcttaagaggaggggctaagcccaattatgacagcagaagtatcaaatcatgcgagaagcagctgattgattcaggccttcccatgaagatcatggttgactgcagtcatggtaatacgaataaggattacagattgcaacccaaggtagcaaaaagcattgttaatcaagtcaaaaaagggaatcaatctattatggggataatgcttgaaagcaatatcaatgctggcaatcaaaagataaccgagaatcttaatgatcttaaatatggcgtttctttgactgatgcctgtatcgattgggagacaactgaagatttactaatgaatcttagaacgtcacttatttag

SEQ ID NO: 242468 - DNA, 1066 bp, Unknown
  Bacterial polypeptide expressing nucleotide sequence isolated from the Sargasso Sea
atgacgacttcatccaataatcaatctttagaaaaaacatctgatttgcatgttgttgaaacacgtccattaatacctccaagcaaacttcataatgatatacctttagattatacctctgcagaaactgtctctaatagtagaagatcaatacaaaatattttgcacaataatgatcctaggattctagtcatagtgggaccatgttcaatccatgatattgaggctgctaaagattattcagaatatattcaggaatttagaaaaatttataaagataaattagaaattgtaatgcgagtatattttgaaaaacccagaactacaattggttggaaaggattaataaatgaccctcatttagatggttcatatgacattaatacaggtttacgaagagcgagaaatctactatcttatttggcaacgcgtgggataccctcagctactgagttattagatccaattgttcctcaatatattgctgatttaatcagttggacagcaattggtgcaaggactactgaaagtcaaactcatagagaaatggcttcaggattatccatgcctattggttttaaaaatggtactgatggttcttttagcacggctattaatgcgatgcagtcggcttcaaaatctcatcatttcttaggtgttaatgatcaaggttatgcttctattgtaaatacaacgggtaatccagatggacatatagttttaagaggaggttctaaaggagttaattatgaaaatcaacatgtaaaaagtatttcttcagaattaaaagtaggtaatcttccttacaaagttatgattgattgtagccatgggaactcaaataaagattacaggaagcaatctgatgttcttaaaaacgtagccaatcagattaagaatggtgaaaaaaatattttaggagtaatgcttgaaagtcatctgaaggagggtaatcaaaaactttcaaacaggaaagatcttgattatggtacgagtattactgatgcttgcataaatatagatacaacaaaaaatttgcttcagattctgtatgattcaattttgt

SEQ ID NO: 242469 - DNA, 1066 bp, Unknown
  Bacterial polypeptide expressing nucleotide sequence isolated from the Sargasso Sea
aatgaccattaaaacagacgaattacgcacttccttattagctaaagtcatctcacctgcacaactggcatctgagtacccgttaacccaagatgcagccgattatctcgtacaacaacgtcgtgaagtcgaagccattattatgggcgaagatcaacgcctattagtgatcattggcccctgctctatccatgatactcaagccgccctcgactacgctcgccgtttagccgtattgcaccaagagttgaaggacgatctctgcattttaatgcgcgtgtattttgaaaaaccacgcactatcgtcggttggaaggggttaatctccgatcctgatttagacggcagcttcgagccaaataaaggtttacgtattgcccgtgagttattgcagcaaatcactgagctgaagttaccgattgccactgaatttttagatatggtgaatggtcaatatattgccgacctaatcacctggggcgctatcggtgcccgcaccaccgaaagccaagtccaccgcgagatggcctcggcgctctcctgccccgtgggctttaagaacggtaccgatggcaatattaatatcgccgtcgatgcggtgcgcgcagcaaaagtgccacatatcttctattcaccggataaagatggcgccatgtctgtctatcgcacccatggtaacccttacggccacatcattttacgtggcggtaaaaagccgaattactttgagcaagacattgaagaagcaagattaaaacttgagtctgtcgatgtaacaccgcgtatggtggttgattttagccatggtaatagcgaaaagaatcacctgaagcagttagtcgttgccgacaatattatggcgcaaatgcgagcaggcagtacggcaattgcgggtgttatggccgaaagtttcttacaggaaggcaatcaaaaagtggttgagggtcaaccattatgctacggccaaagcatcacagatgcgtgcctgcattgggatgactcggagaaattactgcgcgatctggctaaaacctctcgcgatagacgtgagcttctcggcaaataa

SEQ ID NO: 242470 - DNA, 681 bp, Unknown
  Bacterial polypeptide expressing nucleotide sequence isolated from the Sargasso Sea
aatgacgacatcatcaaataattcagctttagaaaagacatcagatttacatgttgtcgaaacacgtccattaatacctccaagcagattacataatgatatacctttagatcatacctctgctgatacagtatctaaaacaagaagatcgatacaaaatattttgcatcataatgataggaagcttttagttattgttggtccatgttcaattcatgatctagatgcggcaaaggaatattcaaaatatattcaaaactttcgagaaatgtataaagataaattagaaataatcatgagagtatattttgagaaaccaagaacaactattggttggaagggacttataaatgatcctcatctagatgattcttatgatattaatactggtttaagaagggcaaggactttgctttcatatcttgcaactcatggaataccttctgctacagaattactagatccaattgttcctcaatatatagccgatttgataagttggacagccataggagcgaggactactgaaagtcaaactcatagagaaatggcatcaggattatcgatgcctataggctttaaaaatggaacggatggttcttttactactgcaataaatgcaatgcagtcagcttccaaatcgcatcatttcttaagtgtaaataacaatggaatggcctc

SEQ ID NO: 242471 - DNA, 1060 bp, Unknown
  Bacterial polypeptide expressing nucleotide sequence isolated from the Sargasso Sea
atgtattaccaaaatgatgacgttcgcattaatgaagtcaaagagttacttccaccgattgcgattcttgaacgatttcctgcttccgaaaacgctgctgcaactgtgtttaacgcccgccaaagcatccataacattcttgctcgtcaagatgatcgtttgttagtcgttattggcccttgctctattcatgatcctaaagccgcattggaatatggccagcgactggttgcgctaagagaacgttatcaagatcagctcgaagtggtgatgcgtgtgtattttgaaaaaccgcgtaccacagtgggttggaagggcctcattaacgatccttatatggataacagcttcaaactgaacgatggtttgcgtactgcgcgtaaacttttagtcgatttgaatgactctggcatgccgaccgcgggtgagtttctcgatatgattaccccgcagtatgtggcggatatgatgtgttggggcgccattggtgcacgcactacggaatcacaagtacatcgcgagttggcctcggggttatcttgtccagtaggctttaaaaatggtaccgacggcacgattaaggtggcgattgatgccattggcgccgcgaatgcgccgcaccactttttatcagtaactaaatttggccattcggcgattgtgtcgaccaaaggtaatcctgattgtcatatcattttgcgtggcggccgtgagccaaattatagcgcaggccatgtggcgcaaatcagcgagcagttgaaaaaggctaagctagtcgacaacatcatgatcgactttagccacgccaacagcagtaaacaatatcaacgtcaaatgcaggttgcgaacgaggttgctgagcaaatagcggcgggtaataaggcaattttcggtgtgatggttgaaagtcacttagtcgagggacgccaagatctgatcgaaggtcaagccttatgttatggtcagagtgtcaccgatgcttgtattggctgggaagatacggaacgtttgttagcggtgttaaatcagagtgtaattgagcgtcgtcagcgcgattaat

SEQ ID NO: 242472 - DNA, 1051 bp, Unknown
  Bacterial polypeptide expressing nucleotide sequence isolated from the Sargasso Sea
atgcaatttacaactgataatataagaatagctggaatgcaggaattgatgcctgcaaataggcttattgaagaacttcccattactgaagaggcttcaagggttgtctttgaatcaaggcaagagatatctgatattttatctaaaaaagatgacagacttattgtagtagttgggccctgctctatacatgatcctgaggcaggcatagattatgccgaaaaactaaaaggtgaaattgataaatacaagaatgaactaaaaattgttatgcgagtatattttgaaaaacctagaacaactgtaggttggaagggtttaatcaatgatccagatttagataattcttttaatatcaataaaggccttaatatagccagaaaacttttattacaaattaatgagatgggggtatgtgccgcaactgaattcttagatgtgattactcctcaatacatagcggatctcatttcctggggcgcaataggagcaagaactactgagagtcaagttcacagagaattagcctcgggtttatcttgtccagttggatttaaaaatagcactaatggaagtatacaagttgccatagatgcaattgggtctgcaaaaaatccgcacatattcttatctgtgactaaagaaggaaattctgctgtgttttcctcttctggtaactctgattgccatgtcattttaagaggaggtaaagaacctaattacagcgctgaatttatttctgaagcaagtaatacgttaaaaagttctaatttagaagaatctttaatggtagatatgagtcatggtaatagtcaaaaacagcataaaaatcagatagaagtttgcaacaatgtctcttctcaaatttcttcaggagaaaataggattgttggagtaatgattgaaagcaatatcgaagaaggcaatcaatctatgaaagatatcaataatctggtctacggaaaaagcatcaccgatgcttgtttaaactttgaagatacaaagtcttgcttagaaaaattagcaacttcaatacaagaaagaagatagc

SEQ ID NO: 242473 - DNA, 1066 bp, Unknown
  Bacterial polypeptide expressing nucleotide sequence isolated from the Sargasso Sea
tatgtccattcacaccgatgaattgcgcacccgtcgcctggagtccctgatcactcccagcgaactggcgcacgccttcccgttaagcgacaccgttgcccagaatctgctggatgcccgccgcgaagtggaagcgatcctggccggtgaggatcagcgcctgctggtcatcgtcggtccctgctccattcacgatccggccgccgcccacgagtacgccctgcgcctcaatgccctgcgcgagcagtataaagagagcctgtgcatcgtgatgcgcacctacttcgagaagccgcgcaccatcgtcggctggaaaggcctcatcaatgatccgcgcctcgatggcagcttcgacgtcaacgaagggctgaaactggcccgcaagctgctggtggacatcaacgccctcggcatgcccaccgccaccgagttcctcgacatggtgaccggccagtacatcagcgatctcatcacctggggcgccatcggcgcgcgcaccaccgaatcccaggtgcaccgcgagatggcctccgccctctcctgcccggtcggcttcaagaacggcaccgacggcaacacccgcatcgccatcgatgcggtacgcgccgcccgtcacagccacatcttctattccccggacaaggacggcaagatgaccatctaccgtaccgccggcaacccctatggccacgtgatcctgcgtggcggccaccgccccaactacgacaccgccagcatcgatgaagcgtgcgaagcgctggccgacgtcggcctgcccgagcggctggtggtggatttcagccacggcaacagcatgaaggatcatcgtcgtcagctgctggtggcgcaggacatctgcgatcagctgcgccgcggccgcaccggcatcgccggcatcatggccgagagcttcctggtggaagggcggcaggacgtggagaacggctgcgccgtcaccttcggccagagcatcaccgatgcctgcctctcctggagcgataccgaaaccctgctggccatgctggccgaggccgcccaggtgcgccttgccaagcagcaggcctga

SEQ ID NO: 242474 - DNA, 1057 bp, Unknown
  Bacterial polypeptide expressing nucleotide sequence isolated from the Sargasso Sea
tatgacaattaataaaaaaactgatgacttaaaaatttcttcaacgagagaattaataacgccattatcattaattacggaaatacctatgtcggatagggcaattcagacagtagttgatagcaggcatcagatagcaaatataattcataaaaaagataagcgtcttctaattattgttggtccatgttctattcataatgaggaggctgcccttgattatgctgaaaaactcatgaaattaaaaaaggatgttgaaagcaatatcttcatcgtcatgagggtttattttgaaaaacccagaacagttcttgggtggaaaggcctaatcaatgatccggatttagacaatagttttaatataaataaaggtattaaaaaagctcgaaaattactcttagatttagcagagatgggcatgcctgcaggtcatgaatatttggacttaattagtcctcagtatatagctgatcttataagttggggagcaatcggggcaagaactacagagagtcaaagccatagagaacttgcatcaggattgtcttgtccagtaggatttaaaaatggaacagacggaggcattcaaatagctatcgatgctatcaagtcagctagtaatcctcataacttcctttcagttacaaaagagggtaaatctgcaatattctctacaactgggaataaagattgccacattattttgagaggaggtaaaaactcgaattatgatagctctagcgttttaaatgttacgaaacagcttgagaaaaataatttaggggctagcattatgattgactcaagtcatgccaatagtcaaaaagatttttcaaaacaaaaaaatgttgtaagagatattcagaaccaaattgttaacggcaatcaagcaatatgtggattgatgattgaaagtaatttggttgaaggacgtcaagaaataggcgatggtaaaaatttaacttatggtcaaagtataacggatgcatgtattggttggaatgaaacggagaaactaattcttgagaccaataacattcttgaaaaaaataaataa

SEQ ID NO: 242475 - DNA, 1051 bp, Unknown
  Bacterial polypeptide expressing nucleotide sequence isolated from the Sargasso Sea
catgcataagacaagtgatttaagaatctcaggaaggcaggaagtaatttctgcaagctccttattggaccaacagccaatttcagatatctcctctcaaacagtttttaattcaagaaaagaattttctgaaatactcagtaaaaaagataaaagattagcagtcgttgttgggccatgctctatccatgacactgagtcggctatggaatatgcaaaccttttactcaaggaaaagaaagctctagaaaaagaacttctgattgttatgagagtgtatttcgaaaaaccaagaacaacagttggttggaaaggcctcattaatgatccagatctggataattctttcaatattgataaaggtttatcagtatcaaggcaactcttgagagatataaatgatttaggtatgcctgctggaacagaatttttagatgttataacgccccaatatatagctgatctaatctcctggggagccataggagctagaactacagagagtcaaatccatagggagctcgcttccggttcttcctgtcccattggctttaaaaacgcaacaaacggaggtattcaagtagctgctgatgccataggatctgccctacatcctcacaaatttctatccgtcacaaaagaaggtaaagcagcgatattttcttcttctggtaataaagactgtcacgttattcttagaggtggaaaagaaccgaattatgaaaaagagtttatagatcaaacttctgagattctaaaatcaaactctcttgaagattcaatcatggttgacatgagtcatggaaacagcagtaaacagcacaaaaaacagatagatgtatgcgataacattgcctctcaaattaagtcaggtgagacgagaattactggagtcatgatagagagcaatatagaggaaggaaatcaaaaggccgacgatttaaataacctgacatatggaaaaagtatcactgatgcatgtatcaactggcaagatactaaagattgtcttcacaaattagctgactcagtaagaattagaaataactaa

SEQ ID NO: 242476 - DNA, 1051 bp, Unknown
  Bacterial polypeptide expressing nucleotide sequence isolated from the Sargasso Sea
atgaaaagtaaaatacataatataaacgttgtagccaaagagaagttgccttctccaaaagcactcaaagacaccttgcctctaagcaataaagcaaggaagacagtcttatctaaacgaaaagaattaatgagtattttggacggcaaagattcaaggcttgtcgttgtggtggggccttgctccattcatgacacagatttggctaaagattatgcctctagactaaaagatctctccaaagaggtagaggatgctttcttgatcttgatgagggtatattttgaaaaaccaagaaccaccaccggctggaaaggtttgatcaatgatcctaacatcgatgatacatttcagatcgataaaggcattcatattgcaagatcattgcttattgatctaaacgaaatgggtcttggagttgcaacagaggcacttgatccaatcatgcctcaatatttgggtgatctgacaagctggaccgccattggtgctagaacagcggaatctcaaacacacagggaaatggcaagcggattatctacgccagttgggtttaaaaatggaaccgatggatcacttgcggttgctgtaaatgcaattaagtcatcaaggcagtcgcatcattttttaggtctcaatgacggcgggaggatcactgtttaccaaacaaagggaaataaatactcacacgttgtcttaagaggcggagctaagcctaactatgacagtcgaagtattcaatcatgcgaaacaaaactcaatgattcaaagttaccaatgaagattatggttgattgcagtcatggcaatacgaacaaggactacagattgcaaccaaaggttgcaaaaagcattgtcaatcaagttaagaaaggcaatcaatcaattatgggcataatgcttgagagtaatataaatgaaggcaatcaaaaaataacagagaatcttgatgatctaaaatatggcgtttcgttgaccgatgcttgcattaattgggaaacaacagaagatttattaatgaatcttagaacggcacttatttcgaaatgat

SEQ ID NO: 242477 - DNA, 1069 bp, Unknown
  Bacterial polypeptide expressing nucleotide sequence isolated from the Sargasso Sea
aatgacgacatcatcaaataattcagctttagaaaagacatcagatttacatgttcttgaaacacgtccattaatacctccaagcagattacataatgatatacctttagatcacgactctgctaatacagtatctaaaacaagaagatcgatacaaaatattttgcatcataatgatcagaagcttttagtcattgtgggtccatgttcaattcatgatcttgaggcggcaaaggaatattcaaaatatattcaaaaattccgagaaatgtataacgataaattagaaataattatgagagtatattttgaaaaaccaagaacaactattggttggaagggattgataaatgatcctcatctagatgattcttatgatattaatactggtttaagaagggcaagaagtttgctttcatatttagcaactcgaggcataccttctgctacagaattactagatccaattgttcctcaatacattgccgatttaataagttggacagccataggtgcgcggaccacagaaagtcaaactcatagagaaatggcatcaggattatcaatgcctataggctttaaaaatggaacggatggttcttttactactgcaattaatgcaatgcagtcagcttcaaaatcccatcacttcttaggtgtaaatgaaaatggaatggcttctatagttaatactacaggaaatccagatggacatatagttttaaggggcggttcaaaaggcccaaattttgaaagtgatcatgtacaaagaatttcagcagaattgaggcagtgtaatcttccccataaagtgatgattgattgtagtcatggaaattccaataaagatttccgaaaacagtcagaagtgctaaaaaatgtagcttctcaaattagtaatggtgaaaaaaatattttaggagttatgcttgaaagtcatttgaaggaaggaaatcaaaaacttttaaaaaaagaagatctccagtttggcagaagcattacagatgcatgtatagatatagaaacaacaaaagaattaatcgctattttatacgattcacttagctag

SEQ ID NO: 242478 - DNA, 1027 bp, Unknown
  Bacterial polypeptide expressing nucleotide sequence isolated from the Sargasso Sea
tatgtattaccaaaatgatgacgttcgcattaatgaagtcaaagagttacttccaccgattgcgattctagaacgatttcctgcttccgaaaacgctgctgcaactgtgtttaacgcccgccaaagcatccataacattctcgctcgccaagatgatcgtttgttagtggtcattggtccttgctcaatccatgatcctaaggccgcattggaatacggccagagactggttgcgctaagagaacgttatcaagatcagctcgaagtggtgatgcgtgtttattttgaaaagccgcgtaccacagtgggttggaagggactcatcaacgatccttatatggataacagcttcaaactgaacgatggtttgcgtaccgcgcgtaaactcttggtcgatttgaatgactctggcatgcctaccgcgggtgaatttctcgatatgatcaccccgcaatatgtggcggatatgatgtgctggggtgccatcggcgcgcgcaccacagaatcgcaggtgcaccgtgaattggcctcggggttatcttgtcctgtaggctttaaaaatggtaccgatggcactattaaggtggcgattgatgccatcggcgccgcgaatgcgccgcaccacttcttatcggtaaccaaatttggccattcggcgattgtgtccaccaaaggtaatcccgattgccatatcattctgcgcggcggccgtgagcctaattacagtgccagccatgtggcgcagatcagcgaacaactgaaaaaggccaagctggtcgacaacataatgatcgatttcagccatgccaacagcagcaaacaatatcaacgccaaatggaagtcgcgaacgatgtggccgaacaattggctgcgggtaataaggcgattttcggtgtgatggtcgaaagccacttagtggaaggacgtcaggatctgattgaaggccaagcgttatgctacggtcagagcatcactgatgcctgtattggttgggacgataccgagcgtttactcgcagtgttaaat

SEQ ID NO: 242479 - DNA, 943 bp, Unknown
  Bacterial polypeptide expressing nucleotide sequence isolated from the Sargasso Sea
atcccgtcaggccatccatcagatcctggccggtgaagatcagcgcttgctggtggtgatcggtccctgttccattcacgaccccgccgccgcgctggagtacggcaagcgcctcaaggtgctgcgtgacgaactcaagggccagctggagatcgtgatgcgggtctacttcgagaagccgcgtaccacggtgggctggaaggggctgatcaacgacccttacctcgacaacagctgccagatcaacgacggcctgcgcatcggtcgcaagctgctgctggatctcaacgacatggggctgccgaccgcctccgaattcctcgacatgatcaccccgcaatacgtggcggatctgatgagctggggcgccatcggggcccgtaccaccgaatcccaggtgcaccgcgagctggcctccggtctctcctgtccggtgggcttcaagaacggcaccgacggcaccatcaaggtggccatcgacgccatcggggccgccagtgcgccgcaccacttcctgtcggtgaccaagtacggccactccgccatcgtcgcgacccggggcaacccggactgccacatcatcctgcgcggcggtcgtgagccgaactacagcgctgcccacgtggacgaggtggtgaaggggctggacaaggccggtctgccgcagaaggtgatgatcgacttcagccacgccaacagcagcaagcagttcaagaaccagatgctggtggccgaggacgtggccggtcagctgcgcgccggcagccgggctgtgttcggcgtcatggtggagagccatctggtggaagggcgtcaggatctggtgaaagggtgtgaactcaccgtcggtcagagcatcacagatgcctgcatcggctgggccgacaccgaaattctgctgcgcaatctggccgatgcggtggccacccgcaacgcaggctga

SEQ ID NO: 242480 - DNA, 328 bp, Unknown
  Bacterial polypeptide expressing nucleotide sequence isolated from the Sargasso Sea
atggaaaacaaaactatcaattgtaatggtatcaaaatatctaataatagttcactaattcttatttcaggtccgtgccagttagaaacagaacagcatgcaatagatatggctggaaaaattaaagaaatcactgataaatttggtattggttttatttataaaacttctttcgataaagcaaatcggactagcttagctgggaaaagaggagctggtttagataaatctttacctgtgtttgataaaattaaaaaggatttaaaaattccagtactaacagatgtgcatagtgaggaacaatgctcattagtatctaaacatgtag

SEQ ID NO: 242481 - DNA, 802 bp, Unknown
  Bacterial polypeptide expressing nucleotide sequence isolated from the Sargasso Sea
atgattactgataaaattgaaaaaaataaatttcttctcattgctggaccatgtgtaatagaaggaaaagatattgcatataatataactgaaagactattagaaataacttctaaattatcaattccatttgttttcaaagggagttatagaaaagctaatagaacccgattagacagttttacaggtattggtgatcatgaagcattaaatattttaggagatatcagttctaaatttaatatccctgttataacagacatccatagttcgaatgaggcagaaatggcagctgaatatgttgatataattcagatacctgcatttctagcaagacaaacagatattcttgttagtgctgcagctactggtaaaacaattaatattaaaaagggtcaattcatgagtgctgaaagtatgaaatatgcagttaataaagtagttgaatctggaaataaaaatgtaatgattactgagagaggaactcaatttggatataatgatttaatagttgacttcaggggtattagtgaattaaaaaaaatagctcccacaatattagatgtaacacattcagttcaaaagactaaccaaacttcaggtgttacaggaggaaacccagagtatatagaatcacttgctagagctggaatagttaatgatgttgatggaattttcttagaaacacatactgatctatcaaaagctaaaagtgatggtactaatatgttggatttaagtaaagtagaagatcttcttaccaatcttttgaccattagagaagctacatctaaattatagc

SEQ ID NO: 242482 - DNA, 258 bp, Unknown
  Bacterial polypeptide expressing nucleotide sequence isolated from the Sargasso Sea
aatggttaagcaaaaaataataaatttgaaaaatataaaaattggaggtccaaatcctgtagtttttatattgggtccatgccaaatagaaaatagagaccattctctaatgatcgctgaaaaaatatcgaatatttgtgaaaaattcagtgctaaatttatattcaaatcaagttatgacaaagctaatagatcatcaattaattcaacaagaggggtaggtctagaagaaggcttgaaaatcttacaagaaatttt

SEQ ID NO: 242483 - DNA, 174 bp, Unknown
  Bacterial polypeptide expressing nucleotide sequence isolated from the Sargasso Sea
tttcagttttgtcaagagcagctgtagccgtaagagtagctggaatttttctagaaactcatgaagaccctgacaacgctcctagtgatggaccaaatatggtaaaagtatcagatttaccttttttattagaaaaattactagaaatagatagaatagttaaaaatatatgag

SEQ ID NO: 242484 - DNA, 274 bp, Unknown
  Bacterial polypeptide expressing nucleotide sequence isolated from the Sargasso Sea
atgcaggaattgggctaccctgtagtgtttgatgctactcatagtgctcaacttcctggaggagatggtaagactaccggagggatgaggtcagtaatcccaacgttggcaaagtctgcagttgccgcaggttgcaatgggatatttatggaggttcatgataatatccaagatgcaaaatctgatgcctatactcaatggccactagaacaattagaaccagtactatcattattaatagaaataaggtctgcagttacagacagaagaccta

SEQ ID NO: 242485 - DNA, 424 bp, Unknown
  Bacterial polypeptide expressing nucleotide sequence isolated from the Sargasso Sea
aatgaaaaatatcattgtaaactgtaaaaatattgaaatttcaaataataataaaatttgtttaattgctgggccatgccaactagaaactgaacaacatgctatggatatggctggaaaaattaaagaaatagcaaaaaaatttaatataggttttatatacaaaacatcttttgataaagctaatagaacaagccacaaaggtaaaaggggagcaggtctagaaaagtctttgcctgtatttgataaaattaaaaaagaattaaaaattccaattttgacagatattcacaatgaagaatcatgttcaattgtagctgatcatgtagatatttttacaataccagcgtttctttgtagacaaacagatctattaatagctgctggaaaaaccaataaaataatcaatgtaaaaaaagggaca

SEQ ID NO: 242486 - DNA, 133 bp, Unknown
  Bacterial polypeptide expressing nucleotide sequence isolated from the Sargasso Sea
tgctggagtttttattgaaactcatcaagatccagataatgcaccatcagatggtccaaatatggtcccattagatgagttagaaaatctgttacatcaattatcagatatagataaattaataaaaaaatag

SEQ ID NO: 242487 - DNA, 145 bp, Unknown
  Bacterial polypeptide expressing nucleotide sequence isolated from the Sargasso Sea
cttcatctttaggatagcaggtttcttcattgaaactcacccaaacccagaaacagcattaagtgatggtcctaatatggtatatttacataaaatgccagaactcttaaacgctataaacaaaataaataaggcggcaaaataa

SEQ ID NO: 242488 - DNA, 647 bp, Unknown
  Bacterial polypeptide expressing nucleotide sequence isolated from the Sargasso Sea
cttgggaacaggcgggaaggtcgctgcagcgggctacactggagttgaaaaaggcggtcatgaggtaccatcaatgccagccggagctgcgcgggaaggccgctctggcgcggctgggggggacagagccagtacccacctcatccgaggggagctcgggggagaacctcaagcttcccgctcggggccagacggcacccttaaaagtaaagaatatcgcgcttccgacgggctatccgaggttgaccagggcctcaacggtttcccccagggtcgcacgggtcttttgcgcacccggtcgtccgatgctgagggacctagcggaagcgaaagagacgcagcgccacgagaaacgctacgaggacccggccttgaagaaccgacaggtcaagatggccctcctagcgcggatgcgcgttggcagtatgctgggagcgacgtcggcttgcgaggagaaagttttagaggcctcagcagcttcctcctcgaatcaggacgatggctccgcagcatcctcttcagtcaaaacaacaacactggaaattatttcgcgtcccttgatgaacgagcgatgggggaactgccgatggaaaccaccgccgcgcgctcagctcagcagtccggaggaggtagcggagatggatcta

SEQ ID NO: 242489 - DNA, 179 bp, Unknown
  Bacterial polypeptide expressing nucleotide sequence isolated from the Sargasso Sea
aaagagaattgttcctcatttagccagagctgcaatgcggtttggagtcggtgcaatatttatagaaactcatgacgatccagataacgctccctcagatggaccaaatatggttccacttaaagaattaaaagctttattaaaaaaattaactgaaattgataaattagttaaataaa

SEQ ID NO: 242490 - DNA, 355 bp, Unknown
  Bacterial polypeptide expressing nucleotide sequence isolated from the Sargasso Sea
aatgaaaaatataactgttaaatgtggaaatatagatatatcaaatgcaaataaattttgcttaattgctggaccatgtcagctagaaaccgaacagcatgctatggatatgtctggaaaaataaaagaaattacagataaattaggtattaattttatttataaaacatcttttgataaggctaataggacaagtttaaaaggaaaaagaggtataggtttagaacaatctctccctatatttgataaaattaaaaaagaagtaaaagttccaatacttactgatatacataatgcagaacaatgttcagaagttgctcgacatgttgatatattgcaaatcccagctttcctt

SEQ ID NO: 242491 - DNA, 299 bp, Unknown
  Bacterial polypeptide expressing nucleotide sequence isolated from the Sargasso Sea
aaatgattttaaaggtatagatattatgaaaaaatatgagtatcctgtaatttttgatgcaactcattctgttcaacaaccaggaggaatgggtgataaaagtggcggtcaaagagaacatatcccctctttatgtaaagctgctatatctattggtgtagctggtttatttttagaaacacataatgacccagacaatgccccaagtgatggaccaaatatgattaatataaaagagttaaaaaatttattaattcaacttaaacaatttgatgatatagcgaaaaaccatgcctaaa

SEQ ID NO: 242492 - DNA, 178 bp, Unknown
  Bacterial polypeptide expressing nucleotide sequence isolated from the Sargasso Sea
tatgtgccagctctatcaaaagctgcggtagcagttggtatatcaggcgtatttatggaaactcacaacgacccggataaagctccttcagatggaccaaatatggtgaaattaagtgatatgaacgatttagtaaaaaaattgattgaaattgacaatttagttaaagaaaaataaa

SEQ ID NO: 242493 - DNA, 415 bp, Unknown
  Bacterial polypeptide expressing nucleotide sequence isolated from the Sargasso Sea
tatgcaaaataaaattataaattgtaatggcattcaaattgctaataacaaaaaaattacattaatagctggtccttgccagctcgaatctgaacaacatgcaatggatatgtcaggtaaaataaaagaaattacatctaaattaaatataggtttcgtatacaaaacgtcttttgacaaggcaaatagaacgagtcttaaaggcaaaagaggagtcggtttggaaaactctttacctgtatttgataaaataaaaaaacaaatggatattccaattttgacagatgttcataatgaaacgcactgtgaattagtttccaaacatgttgatattattcaaataccagcttttctgtgcagacaaacagacttactaatagccgcagctaaaacaaataaaatttatcatggttaa

SEQ ID NO: 242494 - DNA, 328 bp, Unknown
  Bacterial polypeptide expressing nucleotide sequence isolated from the Sargasso Sea
atgcaaatagataactcaaaattacttattatggcgggtccaaatgtaattgaatctgaagatcatactttatatatggcatccgaattaaaaaaactatttgaaaaatttaaaaatattcaatacgtatttaaaactagttttgataaagcaaatagaacttccttcaattcataccgtggtttaggaatggatgaaggattaagaatattaaaaagagtaaaagatgaactaaacttacccataataacagatgtacatgaaccatggcaatgtgaaaaagttgctcaaattgctgatatattacaaatacctgcattcttatgta

SEQ ID NO: 242495 - DNA, 386 bp, Unknown
  Bacterial polypeptide expressing nucleotide sequence isolated from the Sargasso Sea
aatgacaagtattaaagttaattgtgaaaatatagaaatttcaaatgataataagatttgtattatagcaggaccgtgtcaacttgaaaccgaacagcatgcaatggatatggctggtaaaattcaagagataactaaaaaatttgatctaggatttatttacaaaacttcatttgataaagctaacagaacaagtcttaaaggtaaaagaggagccggccttgaagcttcattgccagtctttaataaaataaaaaaagaattaaatgttccaattttaactgacattcataatattgagcaatgttcaattgttgctgatcacgttgatgtgttgcaaattccagcttttttatgcagacaaacagatttattaatagctgctg

SEQ ID NO: 242496 - DNA, 223 bp, Unknown
  Bacterial polypeptide expressing nucleotide sequence isolated from the Sargasso Sea
acctggtggattaggaaataaaagcgggggtaaaagagaatttgtttcaacattagctaaggcttcaattgcagttggtgttgcaggattatttatagaaacacatcaagatcctgataatgctccaagtgacggacctaatatgcttgatataaagaattttgaaaaattaatcataaagcttatagaaattgatttaatagtaaaaaattcaatagaataa

SEQ ID NO: 242497 - DNA, 418 bp, Unknown
  Bacterial polypeptide expressing nucleotide sequence isolated from the Sargasso Sea
aatggaaaataaaataattaattgcaacggaataaaaatatctaataaaaattcattaatattaatcgctggtccatgccaattagaatccgagcaacattcaatggacatggctggaagaataaaagaaataactgataaatataatattggttttatttataaaacttctttcgacaaggcaaatagaacaagtttaaaaggaaaaagaggtgcgggattggataaatctttacctgtttttgacaaaattaaaaaggttttaaaaattccaattttaacagatgttcataatgtagagcaatgttcaataatatctagtcatgtagatgttttacagataccagcatttctttgtagacaaactgatttattaattgctgctgctaaaacaaacaaaattattaatgttaaaaaa

SEQ ID NO: 242498 - DNA, 297 bp, Unknown
  Bacterial polypeptide expressing nucleotide sequence isolated from the Sargasso Sea
aatgttaaataaagttgttaaatttaataattttgagatatcaaataataacaaaatatctctaatttcaggaccttgtcagcttgaaaccgaacagcatgcaatggatatggctggtaaaattaaagaaattgcatcaaaatttgaaattggttttatatataaaacctcatttgacaaagctaacagaactagcttgaaaggaaaaagaggagcaggtttagattcatcgttacctgtatttgacaagattaaaagtgaattaaaaatcccagtattaacagatgtacacaatgt

SEQ ID NO: 242499 - DNA, 157 bp, Unknown
  Bacterial polypeptide expressing nucleotide sequence isolated from the Sargasso Sea
aagagcagcagcagcagttggagtggcagcaatttttttagaaacgcatcaagatcctgataatgctccttcagatggacccaacatggttccattgaacaaattagacgaattagttaatcaaatagtagaaattgataaattaattaaaaaataa

SEQ ID NO: 242500 - DNA, 240 bp, Unknown
  Bacterial polypeptide expressing nucleotide sequence isolated from the Sargasso Sea
ttacacactctctacaaaaacctggaggattgggtgataagacggatggaagaggtcaaaatgttttagatcttgctaagtctgggatggctcttggattggcaggtatttttttggaaactcatcctgatccaaagaatgctttatgcgatggaccatgtgctctacatttagatctaattgaagatttcctaattaagataaaagctatagacgatttagtaaaattatctaattaaa

SEQ ID NO: 242501 - DNA, 362 bp, Unknown
  Bacterial polypeptide expressing nucleotide sequence isolated from the Sargasso Sea
aatgtcgtttccaactagacgcatttcaatcgggtcagtcgatgtgggaaacgacttgccgattgttctaattgcaggtccctgtcagattgaaagtttggaacatactctcatgatcgccgctaaactggtgtcggtctgcgaaaaacagtcgattaagcttatttttaaagcttcattcgataaagctaatagaactagtattactggaaggcgaggcatagggctggaggagggaatgagggttcttcagcgcgtaaaaaaagaatttggctgtcctgtgctgacagatgttcatgaaaaatatcattgcgacatcgtttctgaagtggtcgatgttatacaaattcctgcttttttat

SEQ ID NO: 242502 - DNA, 376 bp, Unknown
  Bacterial polypeptide expressing nucleotide sequence isolated from the Sargasso Sea
aaaaaatgtgaatcagtaggtaataaaaatattattttatgtgaaagaggaaatatttttggatataacaatctagtagtggatattttaaattttcaaattatgaaacaatcaaccaaacctgttttttttgatgttactcattctttgcagcaacctggaacactcgaaaaaagtacaggtggaaggggagaatatgtgttagaactcgcaaaagccggtatctctcaaggaatagcaggtttatttcttgaaacacatccggatccttctaaagcattatgtgatggtccatgtgcacttaaactttcaaagcttgagagttttttaatggaaattttcgagctagattatctgattaaaagaaatagataat

SEQ ID NO: 242503 - DNA, 301 bp, Unknown
  Bacterial polypeptide expressing nucleotide sequence isolated from the Sargasso Sea
atgaataatcataaagtaaaatgttctaattttgagattgctaataacaaaccatttactttaatcgctggaccttgccagcttgagagtgaagagcatgctataaagatttcaagcgaacttaaaaaaattacaagcgaattaggtattaatcttatttacaaaacttcttttgataaagctaatagaacaagtttaaaaggaaaaagaggtttaggtttagaaaaatcacttcccattttcgataaaattagaaaagaagttggtgtcccagttttaaccgacgtccatactaccgaac

SEQ ID NO: 242504 - DNA, 808 bp, Unknown
  Bacterial polypeptide expressing nucleotide sequence isolated from the Sargasso Sea
acctcaatttccaaaaaaaattgtcgccataacctcttctacaggttcggtcattcaggatatgaaaaacgttttatctagaagatatcctattggagaacttttattaattccggtctctgttcaaggtgaaaattcaatcgatgatatatgtgatgcttttaagataactaataatttttctgacatagacgtaataatcttagcacgtggtggtggttctattgaagatttatggtcttttaatgatgagcgtgtagctaaagctatatatgggtccaaacatccggtagtcagtgcaatagggcatgaaaccgattatacaattgctgattatgtggcagattatagagcacctactccatctgtagcagcagaaattatagctccggatatgaagaatgtaaaaaataatattaatgaaaaaattaatactggtaaaaatatattagaaaaaaaactaaacgagaaattttatagattagatttaaatctagaaaaattaaataataattatcctgattttttagaaatgaaaaaaaatatttataacttaatctcaagcatgaattttgtgataagtaacacgattaaatcaaaaaaagaaaaaataacaaatatcaaaaattcaattaacatattaaacccaaagctatcattaaagcgaggttttgccttagttagaaataaaaatggtaaaatcgtaaataaaaccgcaagtatcagcttaggtgaacacttaagttttgaattatctgatggatcagcaattactgaagtaaaggaaattaatcaagatgacaaataa

SEQ ID NO: 242505 - DNA, 212 bp, Unknown
  Bacterial polypeptide expressing nucleotide sequence isolated from the Sargasso Sea
tggaggtaaaggtggctcatcagacgggcaaagcgaatttattattccagtctcaagaggagcagtgggtgttggcattgctggtatattcatcgagactcatccggatccaaagaatgctttaagcgatggaccaaattcactcccactgaataatcttaagccattactcgagcaattattggcaatagatgaaatcgtgaagaaataat

SEQ ID NO: 242506 - DNA, 162 bp, Unknown
  Bacterial polypeptide expressing nucleotide sequence isolated from the Sargasso Sea
aagcaggtatttctgtgggatttgatggtttgtttattgagactcatcccgatccaaaaaatgcaaaaagtgatggtttaaatatgttagatattaatctaattgaagctctacttaaaaaactaacgatgattcgttctacaataaattcttttaactaaa

SEQ ID NO: 242507 - DNA, 335 bp, Unknown
  Bacterial polypeptide expressing nucleotide sequence isolated from the Sargasso Sea
aatgcaagataaaatagttaaatgtaataatttaaatatttcaaactctaagccatttaccttaattgctggaccatgccagcttgaaaatgaaaaacatgctgtagatattgcttatcaacttaaagatattacccaaaaattaggagtcggtctgatttataaaacttctttcgataaagcaaacagaactagtatcaaaggaaaaagaggagctggtctcgaaacatctttaccaatttttgacaagattagaaaagaaattggaatacctgtgctcacagacgttcatactatagaacagtgtaaaatagtttcaagtcatgtagatgttt

SEQ ID NO: 242508 - DNA, 565 bp, Unknown
  Bacterial polypeptide expressing nucleotide sequence isolated from the Sargasso Sea
gaaggcatatggagcagaggtcattttagtatctaaagaacaagatatggagggggctagagatcttgctttaagtatgtctcaaaataacgaaggttatgttcttgatcaattctctaacaaatctaattatctatcacactacgaaactacagggcctgaaatatggaaacaaacaaatcattcggttacacattttatatcagctatgggtacgacaggtacaataactggagtatcaaggttcttaaaagaaagaaatgacaatatagaaattataggtgttcaaccggcagatggttctagaatacctggtattagaagatggaaaaaggaatatactccgaagatatttcaaaatgcaattgttgataaaattatagatattgatcaacaggatgcagaagattctatgacgtcactatcgactcagacaggattgtttgtaggaatgtctgcaggtgcgaacatattcattgcaaaaaaggttgcaactaaagttaaaaactcagtgatcgtaacgattttgtgcgatagaggagatagatatttatctaagctttaa

SEQ ID NO: 242509 - DNA, 133 bp, Unknown
  Bacterial polypeptide expressing nucleotide sequence isolated from the Sargasso Sea
gctgggatttgtcattgaaactcacccagatccagaaaatgctctaagtgatggaccaaattcacttccattggataatctcaaacctctgctagagcaattattggcgatagataaaatcgttaaacaataa

SEQ ID NO: 242510 - DNA, 305 bp, Unknown
  Bacterial polypeptide expressing nucleotide sequence isolated from the Sargasso Sea
tgtaagtgattttagatcaattccaattctaaagtcctatggtttccctgttgtttatgatgcaacgcattcagttcagcaacctggtggtaaaggtgattcatctggcggtcaaagggagtttatttctacattatccaaagctgcagtatcaattggaatagccgcattatttttagaaactcataatgatcctgataatgcaccatccgatggacctaatatggtcccgttaaatgaaatgtataatctaatagaaaatattatagaatttgatatattagcaaaaaaaaataatttttaaa

SEQ ID NO: 242511 - DNA, 376 bp, Unknown
  Bacterial polypeptide expressing nucleotide sequence isolated from the Sargasso Sea
aatgaatagcatacaagtaaattgcggaaatgtagaaatctcaaataataataaaatttgcattattgctggaccttgtcagcttgaaactgaacaacatgcaatggatatggctggcaaaattcaagaaattacaaaaaaatttggacttggttttatttacaaaacttcttttgataaagctaatcgaactagccttaaaggaaaaagaggagctggacttgaagcatctttacctatttttgataaaataaagaaagaattaaacgttcctattttaacagacattcatagtattgatcaatgttcagaagtagctgatcatgttgatatattgcaaattcctgctttctgtgcagacagactgatcttttga

SEQ ID NO: 242512 - DNA, 349 bp, Unknown
  Bacterial polypeptide expressing nucleotide sequence isolated from the Sargasso Sea
atgaaaaatttaactgtaaaatgtggaaacataagcatatcaaactctaataaattttttttgatagctggaccatgccagcttgaatcggagcagcatgctttagacatgtctggaaaaattaaagagattacatcgaaactcaatattggttttatttataaaacgtcttttgataaggcaaacagaacaagcttaaaaggaaaaagaggtataggtttagagcaatcattaccaatatttgataaaattaaaaaagagacaaatattccaatacttactgatattcataatgttgaacaatgttcaatagttgcaaagcatgttgatattttacaaataccagcgt

SEQ ID NO: 242513 - DNA, 871 bp, Unknown
  Bacterial polypeptide expressing nucleotide sequence isolated from the Sargasso Sea
catgtttaaaaaagacttattaaaaaataaaagaattcttatcacgggtggcggcacgggcctgggtaaagaaatggcaattcattttgcgaaacatggagcagttttatacatatgtggacgaagagaaaatgttcttaaagaaacagctgatgaaatttcggagaaatgtagtacgaaagtaaattatcagacactcgacataagagcctcaaaagatgttgatgattatgttcagtcaatattcgaagaaagtccacttgatggacttgttaataatgctgctggaaattttatttcgcccacaaaagatctatctcataaaggttttgatgcgatagcgaatatagtattccatggtactttttatatgacacattctgttggtaaaaggtggatagaatcgtcgtgtaaaggatccataataaacatacttacaacttgggtttggaccggttcaccctatgttgtaccttctgcgatgtctaaatcaggaattaatgctatgactaaatctttagcagctgaatggggtaaatatggtattaaggtaaacggtattgccccaggacccttcccaacgaaaggagcatgggaaaggttaaatcctgaaaataatgatggcgatatgatgagtactgttccgttaggaagagttggtgagatgagtgaacttcaaaatttagccacattcttaatggctgatgggtgtgattatctaacaggacaaacaattggaattgatggtgctcagtatttgacaggtggaggtaccttttctcaattagataaactatctgacgaagattggcaaaatatgagaaaattgataagagatgctaacaataaagataaagctaacagaagttaa

SEQ ID NO: 242514 - DNA, 301 bp, Unknown
  Bacterial polypeptide expressing nucleotide sequence isolated from the Sargasso Sea
agtaaatgattttaaaggtttagatattatgaaaagatatgaatacccagtaatttttgatgcaactcattccgttcaacaaccaggaggtttaggtgataaaagtggcggtcaaagagaacatattccttctttatgtaaagctgctatttctattggtgtagctggtttatttttagaaacacataatgacccagataatgcccctagtgatggaccaaacatgattaatataaaagatttaaaaaatttattaattcaacttaagcaatttgatgatatagcgaaaaatcatgcctaa

SEQ ID NO: 242515 - DNA, 187 bp, Unknown
  Bacterial polypeptide expressing nucleotide sequence isolated from the Sargasso Sea
atgaataaagcagtaaaactgaataattttgaattttctaattacgataaattaaatctaatagctggaccatgtgtccttgaatctcatagtcatgctaaaaaaatggttgaggcgctcttagaaattactacaaaattaaaaatcaattttgtttataagacttcttttgataaggccaaccgta

SEQ ID NO: 242516 - DNA, 164 bp, Unknown
  Bacterial polypeptide expressing nucleotide sequence isolated from the Sargasso Sea
tctatctcgagcagcaacagcggtcggtatagcggcaatttttttagaaacacatcaagatcctgataacgctccatcagatggaccaaacatggttccattaaataaattagaaaatttaatttctcaaattgttgaaattgataatcttgttaaaaaatgag

SEQ ID NO: 242517 - DNA, 490 bp, Unknown
  Bacterial polypeptide expressing nucleotide sequence isolated from the Sargasso Sea
tcctgcttttttatgcagacaactgatttggtagttgaagcagctaagactggaaaaattataaatttaaaaaaaccacagtttatgtcagcaaaagaaatttttcatgtagtaaaaaaatgtgaatcagtgggtaataaaaatattattttatgtgaaagaggaaatatttttggatataacaatctagtagtagatattttaaattttcaaattatgaaagaatcaaccaaacctgttttttttgatgttactcattctttgcagcagcctggaacactagaaaaaagtacagggggaaggggagaatatgtgttagaacttgcaaaagctggcatctctcaaggaatcgcaggcttatttctagaaacacatccagatccttctaaagcattatgtgatggtccatgtgcgcttaaactttcagagttagagagttttttaatggaaattttcgagctagattctctgattaaaagaaatagataat

SEQ ID NO: 242518 - DNA, 367 bp, Unknown
  Bacterial polypeptide expressing nucleotide sequence isolated from the Sargasso Sea
aaatgtaatcattttggtaatgaaaacattttactatgcgaacgaggaagtatttttggttatgacaatttgattgtagattttttagggatagatgagattaaaaaatttgccccaaccattttagatatcacccattcactgcaacttcctggcggcaaaggcaaatctgcagacgggaggtcctctcaggcaaaagtattgggaactgcagctgcagcaattggcctagcaggtttttttattgaggttcatccaaaccctgaaaatgctctttgtgatggagcttcagccacaaggttatctgaatttgaaagtttacttttagagttaaaaaaatttgatgaattatcaaaatccttatgaa

SEQ ID NO: 242519 - DNA, 696 bp, Unknown
  Bacterial polypeptide expressing nucleotide sequence isolated from the Sargasso Sea
catgattcagttcaaagagctatttgataaaaaaaattcatttttactcattgcaggtccatgtgcgattgaaagtgaagaaatagcatttgaaattgctgataagattcataaaatctcacaaaaactagatatcaactttgtttttaagggaagtttcaaaaaagcaaataggagtaaaatagatagttttacaggcattggtgatgaaaaggctttagagattataaaaaaagttggaaatagtttttcaataccgaccactactgacattcatgaagttaaagatgctgagttagctgcaaagcatgtagatattcttcaaatacctgcttttttagcgagacaaacagatttaattgtagcagcggcaagaacctcaaaaatagtcaacataaaaaaaggacaatttatgaatcctacgtcgatgaaatttgcagttgataaggtcaaagattctggtaatgataaagtgttaataacagagaggggaaacatgtttggttatcaggatttagttgttgattttagaggaattcctaaaatgaaagaatatgctccagttattttagatgtaacgcattcacttcagcaaccaaaccaaccatcaggagttaccggtggtcatcctgaactaattgaaacaattgctaaagctggtatcgcatctggtgtagatggactttttattgaaac

SEQ ID NO: 242520 - DNA, 580 bp, Unknown
  Bacterial polypeptide expressing nucleotide sequence isolated from the Sargasso Sea
cgggaattaaaaaagaaattcaatatagaaatcttaacagatgttcatgaatctcatcaacccggggaattggatgttgtcgacatctttcaaatccctgcatttttatgtaggcaaactgacttattaaaagctgcagcccaaaccggcaagccggtgaatgtgaaaaaaggacagttcctatcaccacaggaaatgggaaatgttaaagaaaaattgatttcttttggctgtgatcaaatcatcttgaccgaacgtggtactacctttggctacaataatctggtagtagatttcagatccattccgattctcaaaacgttcggttggccggtagcgattgatgcaacgcacagtgtccagatgcctggaaaacagggaaatcaaagtggtggcgatagatcttttgcgaaatacatgatgcgatgtgggttggtatgcggtgcggatgtggtttttgcagaagtccataatgatcctgataacgcacccagtgacggtcccaatatgcttcaccttgatacattcgaaaactttgtaaaagaaattcggaaatggtttgatgcctcactcgattaaa

SEQ ID NO: 242521 - DNA, 256 bp, Unknown
  Bacterial polypeptide expressing nucleotide sequence isolated from the Sargasso Sea
ggatatccagttgtatttgacggaactcattctgttcaacaacctggtggacaaggtgaaagcagtggcggtcaaagagaatttgttgaatatttatcaagagctgcagtagctgttggagtagcagctatttttttagaaacccatgaggatcctgataatgcaccatctgacggtccgaatatggtaccactaaataaaatggatgaactaattaatcaaattgtagaaatagataatttagttaaaaagtaat

SEQ ID NO: 242522 - DNA, 361 bp, Unknown
  Bacterial polypeptide expressing nucleotide sequence isolated from the Sargasso Sea
tggaatgataatattattctctgtgagagaggatcatcttttggttatgacaatcttattgtggattttcttgggatatcagaacaaaaagcctttaattatccaataattcttgatgttactcattcacttcagcttccaggaggacaaggcaattctgctggaggaagatcacatcaagcggaagatctagctagagcagcaatagccttaaaaatttcaggactatttattgaggttcacccaaacccagataaagcgttatgtgatggaccttcagccacaaaacttgaggattttgaagatatgataacaaaaataaaaaaaatagacgatcttgttaaatcagaaaaattttaat

SEQ ID NO: 242523 - DNA, 517 bp, Unknown
  Bacterial polypeptide expressing nucleotide sequence isolated from the Sargasso Sea
aatgataatagttgatataatacaaatacccgtttttttatgtcgccaaactgatttattattagctgctggccgaactaataaaataattaatgttaaaaaaggacaattcttagctcctcaagacgttaaaaatatttttgaaaaaatagaatcagttaataataataaaattttgattacggaaagaggtactttttttggatacaacaatttggtcaatgattttagaagtttagaaataatgaaacaatttaactatccagtaatttttgatggcactcactctgttcaacaacctggaggattgggagacaaaagtggaggaaagagagagtatgttgcacctttaagcaaagctgcagcttcaataggcgtagcaggaatttttttagaaactcataataatcctgataatgctcctagtgatggtcctaacatgttaaatttgaaagatttaaaaaaattattaattaaattaaaagaatttgataaaattgctaaaacaaatgcctaa

SEQ ID NO: 242524 - DNA, 280 bp, Unknown
  Bacterial polypeptide expressing nucleotide sequence isolated from the Sargasso Sea
aatgactaaaaaagtaaccgttgacaaagttcaatatggtacaggttctctacctttaattgcgggaccttgtgtcattgagtctagagagcattctttgaagatggcagaagctattcgttcgattactgattcattaggaatgcctttcatttataaaagttcatttgataaagctaatcgaactgcaacaaattcgtttagaggtcccaatattgatgaaggattatctattttgtcagaaatcaaaaaagaaattgatgtaccagttttaaactga

SEQ ID NO: 242525 - DNA, 252 bp, Unknown
  Bacterial polypeptide expressing nucleotide sequence isolated from the Sargasso Sea
caatattttttgatggtacccactctgtacaacagcctggtggccttggtgaaaaaagtggtggtcaaagagaatttgttgagtatttatcaagagccgccactgctgttggtatagctggaatttttttagaaacacatcaagatccagataatgcaccttcagatggtccaaacatggtcccattagataagttagaaaatttaatttcacaaatagtcgaaattgatactctaattaaaaaatcataga

SEQ ID NO: 242526 - DNA, 238 bp, Unknown
  Bacterial polypeptide expressing nucleotide sequence isolated from the Sargasso Sea
attcctggcgggctgggtaactcggctgccggtcgaaggggatctatacgtgaaatgggattggcaggcttatctcaaaaaattgcaggtctatttttggaggcacatccagaacccgacaaagccctttgcgacgggcccagtgccctgaagcttaatcagcttgaaccattcctagaacagatgaaggcaattgatgtaatggttaagtcttttaaaacactggatacagaatgaa

SEQ ID NO: 242527 - DNA, 187 bp, Unknown
  Bacterial polypeptide expressing nucleotide sequence isolated from the Sargasso Sea
catggcacagaagatcatcaaggttcgcgacatcgagatcgccaacgacaagcctttcgtgctgttcggcggtatcaacgtgctcgagtcgcgcgacctggccatgcaggcctgcgaggagtacgtacgggtgaccgagaagctcggcattccctacgtgttcaaggccagcttcgacaaggccaac

SEQ ID NO: 242528 - DNA, 304 bp, Unknown
  Bacterial polypeptide expressing nucleotide sequence isolated from the Sargasso Sea
aacactttagtatcggatatgagatcaatacctataatgtctaaaaatggatatcctgtaatttttgacggtactcattcagttcaacagcctggcggtttaggtgaaaaaagtggaggccaaagagaatttgttaaatatttatcaagagcagctacagcggtcggtattgctggaatttttttagaaactcatcaagatcctgataatgctccatctgatggaccaaacatggttcctctaaataaattagaaagtttaatttcacaaatagttgaaatagataatttagtaaaaaaataat

SEQ ID NO: 242529 - DNA, 439 bp, Unknown
  Bacterial polypeptide expressing nucleotide sequence isolated from the Sargasso Sea
aaaacaaataaaattattaatgtaaaaaaaggtcagtttttatcaccgtatgaggttcctaatatttttcaaaaaattgaaagtacaggcaatcaaaacattatgattacagaaagaggaacatcatttggctataataatttaattaatgattttaaatctttagatattatgaaaaactatttatatccagtaatttttgatgcaactcattcagtacaagagccaggtgccatgggagaaaagagtggaggcaaaagagaatttgtttctactttatctaaagcggctgttgcagttggagtttctggtatttttattgagacacataatgatcctgataatgctccaagtgatggtcctaatatgttgcatattgaaaatttagagagtttaatttcaaaattaattgaattagatactgtttcaaaaaaataat

SEQ ID NO: 242530 - DNA, 191 bp, Unknown
  Bacterial polypeptide expressing nucleotide sequence isolated from the Sargasso Sea
cggtgatagaaaattcgttccagctttgtctaaagctgcagtagctgtaggtgtttctggagtttttatggaaactcataatgacccagataacgcaccttctgatgggcccaatatggtaaaattaagcaatatgagtgatttagttaaaaaacttatagaaattgacaacttagttaaagaaaaataaa

SEQ ID NO: 242531 - DNA, 288 bp, Unknown
  Bacterial polypeptide expressing nucleotide sequence isolated from the Sargasso Sea
atatgagatcattacctataatggcaaaaatcggatatccagttgtttttgatggaactcattcagtacaacaacctggtggtttaggtgaaaaaagcggaggacaaagagagttcgtagaatatcttacaagggcagcagttgctgtcggagttgctgcagtatttttagaaactcaccaagatccagataatgctccttcagatggacctaacatgatcccattagataaactagaaaatttattaaaccaaattgtagaaatagataatctagtaaaaaaataat

SEQ ID NO: 242532 - DNA, 224 bp, Unknown
  Bacterial polypeptide expressing nucleotide sequence isolated from the Sargasso Sea
gatgacagcacgtcagattcagctcggcaacatcaccttcgccaacgaccgccgcttcgccttgctcggcggtgtgaacgtcctggaggatctggacttcgccctgcgctgcgctggccattacaagcaggtgtgcgaacgcctgggaatccccctggtgttcaaggcctcttacgacaaggccaatcgttcctcaatccattccttccgtgggccaggactag

SEQ ID NO: 242533 - DNA, 235 bp, Unknown
  Bacterial polypeptide expressing nucleotide sequence isolated from the Sargasso Sea
agaggcagtagtagtggtggccaaagagaatttgttgccccattagcaagagctgctgctgcagttggcatagatggtatttttatggaggtccatcctaatcctgaagaagccttgagtgatggcccaaacatggtacctttaaacaaattagaaggtttaattaaagatattattaatattagaaacgctgtaggagataaggcttgttcttcttcaatcgaaaagatatgaa

SEQ ID NO: 242534 - DNA, 259 bp, Unknown
  Bacterial polypeptide expressing nucleotide sequence isolated from the Sargasso Sea
ttggttttcccaattgtttttgatgcaactcattctgttcaacaaccaggtggaatgggtgaaaaaagtggaggacaaagagagtttgtcccgcatctagctagagctgcaattgccgtgggcgttggagcaatttttattgaaactcacgaagatccagacaatgctccttcagatggtcctaacatggtaccattaaaagaaatgaaaaatttattaaaaaaattaactgaaatagacaatttaattaaaaaataat

SEQ ID NO: 242535 - DNA, 395 bp, Unknown
  Bacterial polypeptide expressing nucleotide sequence isolated from the Sargasso Sea
gccatgggatatgaagcatgtggttgcaaaaatcaatgaggctggcaataacaacatattgttgacagaaaggggtacttcctttggctacaatacgctggtttctgatatgcgggctctgccaattatgggagagttaggttatccaatcatttttgatgcaactcactcagtccagcaacctggtggacttggaaaaagttcaggtgggcaacgcgaatttgttccggcgcttgcgcgtgcggcggcagcagttggcgtaaatggcttgtttatcgagtcacatgagagtcctgatcaggcaccatcagatgggcccaatatgctacccttttctcaaatgcctgaggtgctggatagtgtagtgagagtccatcaggcgatgcaaaactaga

SEQ ID NO: 242536 - DNA, 295 bp, Unknown
  Bacterial polypeptide expressing nucleotide sequence isolated from the Sargasso Sea
atgagcttatttttttttataagggaaatttttctcatgtcaaactcttcttttaaacccactgttattgcaggcccctgtcttgctgaatcttatgaaattatggaagaagtctgtgaaagccttaaaagtttatcagacgaactgggttttcaacttatttttaaagcaagctttgacaaggctaacagaagttctttttcttctttcagagggtatggactagagaaaactcttttttggttttctgagcttaaaagaaaatatcaactggagattctaacagatgttcacg

SEQ ID NO: 242537 - DNA, 214 bp, Unknown
  Bacterial polypeptide expressing nucleotide sequence isolated from the Sargasso Sea
cctggaggcatggggggaaaagagtggaggacaaagagaatttgttccttatttggctcgggctgcaatagcggttggagttggagcaatctttattgaaacacatgaggatccagataatgctccatctgatggccctaatatggtgccattaaatgaagttaaagatttattaaaaaaattaactgaaatagatagtttagttaaaaaataa

SEQ ID NO: 242538 - DNA, 393 bp, Unknown
  Bacterial polypeptide expressing nucleotide sequence isolated from the Sargasso Sea
tatgagtgatattgaagtaaaattaaatagtaatatttcttttggcaatcaccttccattaactttaattgctgggccttgtgttcttgaaagcaagcaacatgctattgatatttcaggatatttaaaagaacttacctctagactaaatattaattttgtttataaaacttcttttgataaagcaaatagaacagacttaactaatttacgcggcattggtctcaatcaatcaattgaaatcttcaaagaaataaaacaagaaatagggtgtccaattttgactgatgttcattcgccggaacagtgtgaaatgcttgaacaagtagttgacattattcagataccagcttttttatgtagacaaacggatcttttggtcaaagctgcttt

SEQ ID NO: 242539 - DNA, 222 bp, Unknown
  Bacterial polypeptide expressing nucleotide sequence isolated from the Sargasso Sea
tatgactgtcaaagtttctaacttgagtatcgacaatggatcaaggttgaccttaatctctggtccttgcgtcattgaatcaaaagacctaattcatgacgtagctggaaggataaaagagatcaccgattctttggagattggttatattttcaaatcatctttcgataaggcaaatcgaacttcaattgatagctttagaggacctggaatggaagaggg

SEQ ID NO: 242540 - DNA, 608 bp, Unknown
  Bacterial polypeptide expressing nucleotide sequence isolated from the Sargasso Sea
agaacgcctctttgctgtgcgcgaggagacggggctccgactcctcaccgacattcatgaaccgcatcaagcggcacccgcggcggaggtggtcgacgttctgcagattcccgcgttcctttgccgacagactgacttactaactgctgccggacagacgggttgcgctgtgaatgtaaagaaggggcaatgggtggcacccgaagagatgggggctgcggtgcataaggtccggaccgcgggtggctctatctgcgctgtcacagagcgaggtaccgcgcacggttacggtgacttggtagtggacatgagatcctttgcgcggcttagaaaggctacaggagccgtggtgctgttcgacgcgactcactcgatacagcgtgccggagcaattggtggggcgaccggaggggatccgcatcacattacagctctcgcccgggcggctgtcgcagctggatgtgatggcatctttttggagacccatccccagccttcagaggcaccctctgacgggactaacatgctcccactacacgaacttcccgatctcgtagaacagatcctcgcagtccgaaccgcgattgaggggagcctcggttcatagc

SEQ ID NO: 242541 - DNA, 316 bp, Unknown
  Bacterial polypeptide expressing nucleotide sequence isolated from the Sargasso Sea
aatgaatacccaaaaaacaatttctgttaatgatatcagtcttagcaatgataactcatttgtgctgattggaggattgaatgtacttgaaactaaagacttgaactttaaagttgcagaaactttcaaggaaattaccagtcgtctccagattccttacattttcaaggcctctttcgacaaagcaaatcgctcttcaatggactcctacaggggccctggaatggaagaaggtctgcgaatacttgaagatataaaacatgcacttgaaataccaatcctgactgatattcacgaaccacagcaggccaaacca

SEQ ID NO: 242542 - DNA, 361 bp, Unknown
  Bacterial polypeptide expressing nucleotide sequence isolated from the Sargasso Sea
atgcaaaaaagtgtagatttaggcaataccgtatttagtaatgaaaagaagttagtcttgattgcaggtccttgtgtacttgaatcatacgaacacgcaaaaatgatgacagaatcattactggaaatagcgtctagattaaaaattgattttgtttacaagacttcctttgataaggccaatagaacaagtatcaattctgaaagaggattaggtatcgatcaatccatagaaatatttaataagttaagaagtgaatatggaatccatatattgactgatattcataatattgatgattgtgataaaattaaagaccatgtagatattttacagatccctgcatttctatgcaggcaga

SEQ ID NO: 242543 - DNA, 404 bp, Unknown
  Bacterial polypeptide expressing nucleotide sequence isolated from the Sargasso Sea
aatggataacaaactagttaaatgtggaaaactaaatatctctaaccaaaatacctttactttaattgcaggaccttgccaattagaaagtgaaaaacatgcattagatatctctaccgaattaaaaaaaattactgaaaaacttggtattggattaatttacaaaacatcctttgataaagctaacaggactagtttaaaaggaaagaggggagcggggttagaaaagtctttgccagtttttgataaaattagaaaagaagtcggaataccagttttaacagatgttcatacagccgaacaatgtacggttgttgcaaaacacgtcgatgttttacagataccagcttttttatgcagacaaacagacttgcttattgctgccgctaaaacgggaaaggtta

SEQ ID NO: 242544 - DNA, 179 bp, Unknown
  Bacterial polypeptide expressing nucleotide sequence isolated from the Sargasso Sea
attggcaggtttgtctcaaaaaattgcaggtctgtttcttgaggcacatccagaccctgacagagcactttgtgacgggcccagtgccctgaggttggatcagcttgaaccattcttggaaaagatgcaggcagttgatgaactggtaaagtcatttgaaacactggatccattataaa

SEQ ID NO: 242545 - DNA, 214 bp, Unknown
  Bacterial polypeptide expressing nucleotide sequence isolated from the Sargasso Sea
ggattaggtgaaaaaagcggtggacaaagagaatttgttgaacacctttcaagagctgctgtagcagtaggagttgcagctttatttatagaaacccatcaagatcctgacaacgctccatctgatggacctaatatgcttcatttaaataatttggaaaatctattatatcaaatagttgaaatagataatttaattaaaaacaatgagtaaa

SEQ ID NO: 242546 - DNA, 499 bp, Unknown
  Bacterial polypeptide expressing nucleotide sequence isolated from the Sargasso Sea
atgttttactatcccataaagattgaaaaaggaaaaaagattacaattattggaggtgtaaatgttttaagtgatattgatgaggcaattgaaataggtttgaaatttaaagaggcttgtcacagaaataagttcccctatgtctttaaggcaagttttgataaggcaaatagaacatcttttgatagctatagaggaccaggatttagtaaaggtttggagatgttaagagaaataaaaaatatattgagagttccaatccttacagacattcatgaaacacatcaagcaagtaaagctgcagaagtttgcgatatgctccaacttcctgcttttttggctcgtcaaactgatcttatacaagctttagctaaaacaggcaaacctataaatataaaaaaacctcaatttatttcaccagatcagattaagtttattgttcaaaagttttcaaaatttggatgtgaagatgtagttatttgtgagagaggtagtatgt

SEQ ID NO: 242547 - DNA, 144 bp, Unknown
  Bacterial polypeptide expressing nucleotide sequence isolated from the Sargasso Sea
ttttagcgccttgggatatgaaaaatgttattgataaaatattgcataatggaaatgatcaaatactattgacagaaagaggtagttcttttggttataatacactagtgtctgatatgcgtgctattccgcaaatgtcttagt

SEQ ID NO: 242548 - DNA, 568 bp, Unknown
  Bacterial polypeptide expressing nucleotide sequence isolated from the Sargasso Sea
tatgcaagctgtaacaatcggtaatgttgcatgtggcggtgatgcgccgctgctgttgattacagggccttgccagatcgaaagcgccgatcatgcactgtattgtgccgaagcgctcgccaaaatggcggccaccgccggcatggggtttgtatataaatcatcttatgacaaggcaaaccgaacatctgccggcgctgcgaggggagttggcatggatagcgggcttgaaattttggccatggttaaagccaagattggtgtgccagtcctcagtgatgttcaccttcctgaacaatgcgctgcggcagcagaagtgctagacattattcaaattccagcctttatgtgtcggcaaactgaccttctcgttgaagcggctaagactggatgtgttatcaatgtaaagaagggacagtttctggcaccatgggatatggaacatgttgcagcaaaaattaccaaggctggtaacgataaactgttgttaaccgagcgcggaacatcattcggctataacacattggtatctgacatgcgtgcctttgcacgatggcgaggtggggca

SEQ ID NO: 242549 - DNA, 271 bp, Unknown
  Bacterial polypeptide expressing nucleotide sequence isolated from the Sargasso Sea
aatgagttcccaaaaaacaatttctgttaatgatatcaatctatgcaatgaaaactcgtttgtgctgattggaggtttgaatgtgatagaaactaaagacttggctttgaaagttgcagaaactttcagcgaaattaccagtcgtctcaagattccttacattttcaaagcctctttcgacaaagcaaaccgctcttcaattgattcatttagaggcccaggaatggaagaaggtctgaggattcttgaagaagtaaaacaagcattttga

SEQ ID NO: 242550 - DNA, 287 bp, Unknown
  Bacterial polypeptide expressing nucleotide sequence isolated from the Sargasso Sea
aatgaataaagtcatattagataagattatatttggcgatagttctataccgttgattggtggtccatgtgttattgaaagtagagaccattgcttaggtatggctgaaaaaattatagaaattactactaaattaaatacgccatttattttcaaaagctcatttgataaagcaaatagaacatctatatcctcttttagaggtaatggtttagatgatggacttaaaatcttagaagagattaaaaaaacatttaaacgttccaataacgacagatattcatctt

SEQ ID NO: 242551 - DNA, 763 bp, Unknown
  Bacterial polypeptide expressing nucleotide sequence isolated from the Sargasso Sea
gtttctattaataagccggtccatggtgcaatttgagggagaagatatagcattaaaaatagccaataaacttgtttcaataacttcaaaattatctataccacttgtttttaagggaagctacagaaaagctaatagaactaggcttgatagtttcactggtattggagacttgaaggcattaaaaattttaaaaaaaattaactctgaatttaatattccggttattacagatatacacggaaaggatgaggctgaatttgctgcagaatttgtagatatacttcaaataccagcttttttagcaagacaaactgacctacttgtaagtgcagcaaaaactggaaaagtagttaatattaagaaaggacaatttatgagtgcagaaagcatgaagtatgcagttgacaaagttaagcagtcaggaaataataatattatgttaactgaaagggggactcagtttggatacaacgatttaatagtagactttagaggaatctctgaattaaagaaattagctcctactatattagatgttacacactctgttcaaagaccaaatcaaagtacaggtataactggaggtagtcccgagcatattgagtctcttgctaaagcaggaatagttaataatgtcgatggaatatttcttgaaacacacactaatccatcagaggcaaaaagtgatgggtcaaatatgctagatattaaaaacctaaataaattattatcaaatctacttcaattaagagaagcatct

SEQ ID NO: 242552 - DNA, 290 bp, Unknown
  Bacterial polypeptide expressing nucleotide sequence isolated from the Sargasso Sea
tatgagatctattcctataatggcaaaagatggttatccagtagtatttgatggaactcactcagttcaacaaccaggcggtctaggagaaaaaagtggaggccaaagagagtttgttgaatatttaacaagagctgctgttgccgtaggtgttgcagctatatttatagaaacacaccaagatcctgacaatgctccttcggatggaccaaatatggttccattaaacaaattagaaaatttaattaatcaagttgttgaaatagataaattaattaaaaaatattaat

SEQ ID NO: 242553 - DNA, 263 bp, Unknown
  Bacterial polypeptide expressing nucleotide sequence isolated from the Sargasso Sea
gatgacagcacgtcagattcagctcgacgacatcaccttcgccaacgaccgccccttcgccttgctcggcggtgtgaatgtcctagaggatttggacttcgccctgcgctgcgctggccattacaagcaggtgtgcgaacgcctgggaatccccctggtgtttcaggcctcttacgacaaggccaatcgctcctcaattcattccttccgtggggcagggctagtggctggtctgcaaatttctgcagcccgtcaagacaccc

SEQ ID NO: 242554 - DNA, 198 bp, Unknown
  Bacterial polypeptide expressing nucleotide sequence isolated from the Sargasso Sea
agaaaaaaagtggaggacaaagagaattcgtaccacacttagccggagcagcgattgcagttggtgttggtgcaatttttatagaaactcatgaagacccagataacgcaccttctgatggaccaaacatggttcctttgaatgaaataaaaaacttattaaaaaaattaactgagatcgacaagttagtaaaataat

SEQ ID NO: 242555 - DNA, 419 bp, Unknown
  Bacterial polypeptide expressing nucleotide sequence isolated from the Sargasso Sea
aatgacaaaccataaagtaaagtgctctaattttgaaatagctaacgataagccatttactttaattgcgggtccatgccaattagagaatgagcaacatgcaattaaaatgtcaacagagcttaaaaaaattacgagtgagcttggaataaacttaatttacaaaacatcttttgacaaagctaataggacaagtcttaaaggcaaaagaggtatgggattagaaaagtctttacctatttttgataaaattagaaaagaagtaggattgcctgttttaacagatattcatacagctgagcaatgctcgattgttgctgatcatgttgatgttttacaaattccagcatttttatgcagacaaactgatttattaatagctgcagcaaaaactggaaaagttattaatgttaaaaaag

SEQ ID NO: 242556 - DNA, 251 bp, Unknown
  Bacterial polypeptide expressing nucleotide sequence isolated from the Sargasso Sea
tttcccaattatttttgatgctacgcactcagttcaacaaccaggggggatgggtgaaaaaagtgggggtcaaagagaatttgttcctcatttagctcgagctgcaattgcagttggagttggtgcaatatttatagaaactcatgaagatccagataatgctccttcagatggaccaaatatggttccacttaatgaattaaaaggtttattaaaaaaattaactgaaatcgataaattagttaaataaa

SEQ ID NO: 242557 - DNA, 313 bp, Unknown
  Bacterial polypeptide expressing nucleotide sequence isolated from the Sargasso Sea
ttttggatacaatacattagtctcagatatgagatcaatacctattatggcaaaaaatggttatccaattgtttttgatggaactcattcagtacaacaaccaggtggtcttggtgaaaaaagtggtggccagagagaattcgttgagtatttatcaagagcagcaactgcagttggaatagcagcaatattcttagaaacccatcaagaccctgacaatgctccttcagatggtcctaatatggttccattagataaattagaaaacttaatttctcaaatagttgaaatagatagtcttgttaaaaaataa

SEQ ID NO: 242558 - DNA, 601 bp, Unknown
  Bacterial polypeptide expressing nucleotide sequence isolated from the Sargasso Sea
attaaaaatactctctgagcttaagcaaaaatataatctgccaattttgactgatattcatgaaccgcatcaagcaaaacctgtttctgaagtatgtgacattattcagattcctgcttttttatgcagacaaactgatttggtagttgaagcagctaagacaggaaaaattataaatttaaaaaaaccacagtttatgtcagcaaaagaaatttttcatgtagtaaaaaaatgtgaatcagtgggtaacaaaaatattattttatgtgaaagaggaaatttttttggatataacaatctagtagtagatattttaaattttcaaattatgaaagaatcaaccaaacctgttttttttgatgtaactcattctttgcagcagcctggaacactagaaaaaagtacaggaggaaggggagaatatgtattagaacttgcaaaagctggcatctctcaaggaattgcaggcttatttctggaaacacatccagatccttctaaagcattatgtgatggtccatgtgcgcttaaactttcagagttagagagttttttaatggaaatttttgagttagattctctgattaaaagaaatagataa

SEQ ID NO: 242559 - DNA, 211 bp, Unknown
  Bacterial polypeptide expressing nucleotide sequence isolated from the Sargasso Sea
cggtggaagaagagatatgttttaagtttagccaaggcaggaatatctcaatcaattgcgggattgtttcttgaagcccatcccaatccagatgatgcaaagtgcgacgggccatgtgctttacctctatcagtcttagaagaatttttaaaacaagtaaaagaattagatgaatttgtaaaaaatcaaaaagatcttgaaataacttaga

SEQ ID NO: 242560 - DNA, 403 bp, Unknown
  Bacterial polypeptide expressing nucleotide sequence isolated from the Sargasso Sea
aatgcctaaatcagtttttttatctaaacagttaatcaaaaatgatactgacagactcactttaatatccggcccatgcttattagaaaatgaaaaattagtcagacaagttgcaaagtctttaattaaatatgcaaaaaaagaaaagtttaatttaatttttaaatgtagctttgataaagctaatagaagttctgaccaaacaattaggaataaaatttcttttgataaatcattagatattttaaaaaaccttaaaaatgatttaaaaatgtctattacatcagatgtacacgagacatcccaagtagataggttggcagaacttttagatgttatacagattccagcgtttttgtgtaggcaaacagacttgataaaatctgctgcacaaaccaaaaag

SEQ ID NO: 242561 - DNA, 490 bp, Unknown
  Bacterial polypeptide expressing nucleotide sequence isolated from the Sargasso Sea
ctgcaaaatcttttaatggaaactaaaatagtcaattgtaacggtatagaaatttcaaacaaaaataaaatttgtttaatagcaggtccttgccaacttgaaactgaacaacatgctttagacatggcaggaaagatcaaagaaattacaataaaatataatattggatttatttataaaacatcatttgataaagctaacagaacaagtttgaagggaataagaggggctggattagaaaattccttacccgtatttgataaaattaaaaaagatataaatgttcccgtacttactgatatacataatgagaaacaatgttctcttgtttcacctcacgtagatgtgcttcagatacctgcttttctttgcagacaaacagatttattaatagcagctgcaaaaactaataaaatcattaacgttaaaaaaggtcaatttcttgctccatgggatatggttaatgtgaccaaaaaaatttctgatagtg

SEQ ID NO: 242562 - DNA, 154 bp, Unknown
  Bacterial polypeptide expressing nucleotide sequence isolated from the Sargasso Sea
atggcgcgcagcaacctgaacgtctcgggcattgagatcgccaacgataagccgtttgtgctgttcggcggcatgaacgtgcttgagtccagggaactggcgtttgaagtggcggaaaagtatgtggatgtctgcactcgtctgggcatcccgt

SEQ ID NO: 242563 - DNA, 406 bp, Unknown
  Bacterial polypeptide expressing nucleotide sequence isolated from the Sargasso Sea
aatggtaaacaaatctgttaaatgtgggaaattgaacatttcaaatacaggtccgtttactttaatagccggaccttgccaactagaaaacgagaagcacgccttggatattgccaaagaattaaaaaaaatcaccgataaccttggtataggtcttatttataaaacttcatttgataaagctaacagaaccagtcttaatggtaaaagaggagtaggtctcgaaaaggccttgcctgtttttgataaaattagaaatcaaatcggcgttccagttttaacggacattcatactgtagatcaatgcgctatagtttctaaacatgtagatgttttgcagatacctgcttttttatgtagacaaacagacttattagttgctgctgctaaaacaggaaagatataa

SEQ ID NO: 242564 - DNA, 223 bp, Unknown
  Bacterial polypeptide expressing nucleotide sequence isolated from the Sargasso Sea
tatgaaaaattttaatatcaagtgtaatgaattagaaatttcaaacgcagagaatatttgtttaatatctggtccttgtcaaattgaatcagaacagcatgcaatagatatagctggtaaaataaatgatatagcaaaaaaaaataaaattaaatttatttttaaaagttcatttgataaagctaataggacaagtttatcgagtcctagaggtcttggatta

SEQ ID NO: 242565 - DNA, 330 bp, Unknown
  Bacterial polypeptide expressing nucleotide sequence isolated from the Sargasso Sea
gatacaagaatttgattgttgatatgcttggtttttcagatatgaaaaaatctcaatatccagtcattttagatgttacacattctcttcagcaacctggtggaagatcaggggcggctgatggtaggcgtgagcaagttacgaacttagcaaaagctggcctatcacagggccttgctggactttttctggaggctcatccaaatcccaatgatgcgctctgcgatggtccttgtgctctgaggctagattgtttacatcctttcttaaatcaaatgaaagagttagattgtttaatcaagtctcaagcgtttatagatactgcttgat

SEQ ID NO: 242566 - DNA, 349 bp, Unknown
  Bacterial polypeptide expressing nucleotide sequence isolated from the Sargasso Sea
aattttagttacgaacgtggcgctagttttggatacaatactttggtttctgatatgatttctattcctataatggcaaaaaatggttacccagtaatttttgatgcaactcattccgtgcagcaaccaggaggcatgggagaaaaaagtggagggcaaagagaatttgtcgagcatttatcaagagcagcttcagcagttggtgttgcaggaatttttattgaaactcaccaagatcctgataatgcaccttcagatggaccaaatatggtacctctaagtaaattggaaaatttattaaatcaaattgttgaaattgatagtttagttaaaaaaaataatgcataaa

SEQ ID NO: 242567 - DNA, 760 bp, Unknown
  Bacterial polypeptide expressing nucleotide sequence isolated from the Sargasso Sea
tttgctcatagctggtccatgtgcaattgaaggtgaagaaatggcatttgaaattgctgaaaaatgtattagaatagcaaaaaaacatagtatacagtacgtttttaagggaagtttcaaaaaagcaaatagaagtaaaatcgatagttttacaggtattggtgatattaaagcattaaaaatcctttcaaaaattggaaatgaattaaaaattcctgttacaacggatgttcatgaagtttccgatattgatgttgctaaggagcatgtagatattattcaaattcctgcatttttagcaagacaaactgacttactagttgctgcagcgaaaagtggtagaattgtaaatatcaaaaaaggtcaattcatggactcaaaaagtatgagttatgcagttgataaagttttacaatcaggaaacaaaagtgtactgatcaccgagagaggcagtatgtttggatatcaggacttagttgttgattttagaaatattcccaaaatgaaagtttatgcgcctgttattcttgatgttacacactcattacaaaaaccgaatcaagaatctggagtcacaggtggacaacctgatcttattgaaaccattgcaaaagcaggcattgtaactggggctgatggtattttcatagaaactcactctgatcctaaatcagcaaaaagcgatggaaaaaacatgctaccaattgaagatctggatgaacttatttccaaacttgtacgaataaaatcatcaatttaa

SEQ ID NO: 242568 - DNA, 334 bp, Unknown
  Bacterial polypeptide expressing nucleotide sequence isolated from the Sargasso Sea
agctttggttataatacgttggtttgtgacatgcgatcattgacacaaatggctgttacaggttgtcctgtagtgtttgatgcaactcactcggtccagcaaccaggatcgctgggtggggcgagtggtggagatagatctttcgtgcctgttcttgccagggcggcaatagcagtgggtgttgctgcactctttgttgaaactcataatgatcccgataatgcccccagtgacggccccaatatgatacggctggatgatatggaatatatgctaagtcaactcaagaagtttgatgaaattagcaaggcaaaccctctggttaatcgatagt

SEQ ID NO: 242569 - DNA, 217 bp, Unknown
  Bacterial polypeptide expressing nucleotide sequence isolated from the Sargasso Sea
tatgactgtcaaagtttctaacttgagtatcgacaatggatcaaggttgaccttgatctctggtccttgcgtcattgaatcaaaagaactaattcatgacgtagctggaaggataaaagagatcaccgattctttggagattggttatattttcaaatcatctttcgataaggcaaatcgaacttcaattgatagctttagaggacctggaatggaa

SEQ ID NO: 242570 - DNA, 809 bp, Unknown
  Bacterial polypeptide expressing nucleotide sequence isolated from the Sargasso Sea
gatggatatcggcaatattaaaataggtctggatcagcccatggtgctcatggcaggaccatgtgtgctagagtcttatgaactcaatttctcagtggccaaaacattaaaaaaaattgccgaggaccatggggttaattttatctttaaatcatcatttgaaaaagccaatcgcagtgccgtttcaagttttactggcttgccatttgctgaagcattagcaacgcttgagcggattaaaacagaattagcggtcccaattgtcaccgatgtgcatgaagtgagccatgttgagcaagtcgctcaagttgcagatgttttgcagattccagccttgttgtgccgacaaaccaagttggtgcaggctgcggtggccaccgggcgggcagtcaatattaaaaaaggccagtttatggcccccagcgagatgatgggggttgtgggcaaagcaaaagctgtggatcctgacgcgcggattatgttgtgtgaacgtggaacattttttggctatcataatttagttagtgatatgcgtagtctggtggttatgcgagaatctggctgtccggtgatttatgatgttggacattctgtccaattacctggggccggccagggagtttctagtgggcaaccacaatttattccaagcctagcgcgggctgccattgcggtcggtatatctggtttgtttgttgaaacacacccacagcccgaccaagcattgagtgatggtggtaattcattggcgcttggtcaagtagacagcctactcaagcagttgggtgcattggaccgattagtcaagt

SEQ ID NO: 242571 - DNA, 404 bp, Unknown
  Bacterial polypeptide expressing nucleotide sequence isolated from the Sargasso Sea
aatgacaaacctgatagtaaaatgctctaactttgagattgcaaataatagaccttttactttaatcgctggaccctgtcagcttgaaagccaggaccacgcaataaatatttcaactaaattaaaagaaattacaagcgaactaggaataaatctaatttataaaacatcatttgataaagcaaatagaactagtttaaaaggtaaaagaggtttgggtttagataaatcccttccaattttcgataaattgagaaaagaagttggagttcctgttttaaccgatgttcatacaattgaacaatgttctgtagtggcaaatcatgtagatgtattacaaattccagcttttttatgtaggcaaacagatttactaattgcagcagcaaaaactggaaaaatta

SEQ ID NO: 242572 - DNA, 553 bp, Unknown
  Bacterial polypeptide expressing nucleotide sequence isolated from the Sargasso Sea
atgtttaaccttaacgaattaattacaaatacaaaatcttttttcttaatagctggtccttgtgctattgaaagtgaagaaatggcttttaaaatatgtgacgaggttaataatattgctaaagaatttgaaataaattttgttttcaaaggaagtttcaaaaaagcaaataggagtagattagatagttttactggaattggagatgaaaaagctttagaaattttaaaaaaagtttctaatgaattttcaataccaactacgactgatattcatgaaatcaaacatgcaaaatatgctgctgattacgttgatattttacaaatacctgcgtttttggctagacaaactgatttaattgttgctgcagccagaactggtaaaattgtaaacataaaaaaaggtcaatttatgagtcccgaggcaatgtcttttgctgttcaaaaagttaaagattctggaaacaataacatacttataactgaaaggggaagtacatttggttaccaagatttagttgttgactttagaggaattccaaaaatgaaaaagt

SEQ ID NO: 242573 - DNA, 322 bp, Unknown
  Bacterial polypeptide expressing nucleotide sequence isolated from the Sargasso Sea
aggcgcaagttttgggtacaatactttggtatcagatatgagagcattacctattatgtcaaaattaggttttccgattgtctttgatgttactcattctgttcaacaacctggcgggatgggggataaaagtggaggtcaaagagaatttactccccatttagctagagctgcgattgctgtaggtgttggagcaatttttatcgaaacacacgaagatccggataatgcgccatcagatggtccaaatatggtgccattaaatgagatgaaaagtttattaaaaaaattatcagaaatagataatttaattaaaaaataa

SEQ ID NO: 242574 - DNA, 304 bp, Unknown
  Bacterial polypeptide expressing nucleotide sequence isolated from the Sargasso Sea
catgaatacggtcaaagtcggctcaattgaaatcgcgaatgacaagccttttgcccttttggcaggtccgtgcgcaatggaaacacgcgatcatgcgatgttcatggcggagaacttgaagcaaatttgtgatgaggtcggaattccccttatttacaagagttctttcgacaaagccaatcgaaccagtctgaatgccggacgcggtatcggtctttccgaagcaatgaaagtgtttcaggaaatcaaagatacttttggcctgccttgcgtgacagatgtacatgaacctcaccaatgtgct

SEQ ID NO: 242575 - DNA, 220 bp, Unknown
  Bacterial polypeptide expressing nucleotide sequence isolated from the Sargasso Sea
agtgcaacaggaggtagaagagaatttgtattaagtctagcaaaggctggaatttctcaatcgattgcaggactttttttagaagctcatccaaatcctgatgatgcaaaatgtgatggtccttgtgctcttccactaaacgtcttagatgactttcttgaacaaattaaaaacttggatgattttattaagaatcaagatgatttagacatcaaataat

SEQ ID NO: 242576 - DNA, 221 bp, Unknown
  Bacterial polypeptide expressing nucleotide sequence isolated from the Sargasso Sea
aaagtctactgatggtagaagagaacatcttttgcacatggcaaaagctgggatttctcaaaagattgctggattatttcttgaagctcatcctgatccagataaagctaaatgtgatggaccatgtgccctgagacttgatcagcttgaatcatttcttcttcaagttaaagaattagataaacttgtaaagtctcaaaaagatttagatcttaaataaa

SEQ ID NO: 242577 - DNA, 198 bp, Unknown
  Bacterial polypeptide expressing nucleotide sequence isolated from the Sargasso Sea
tatgactgtcaaagtttctaacttgagtatcgacaatggatcaaggttgaccttgatctctggtccttgcgtgattgaatcgaaagacttaattcatgacgtagctggaaggataaaagagatcactgatttcttggagattggttatatttttaaatcatctttcgataaggcaaatcggacttcaattgatagctt

SEQ ID NO: 242578 - DNA, 126 bp, Unknown
  Bacterial polypeptide expressing nucleotide sequence isolated from the Sargasso Sea
ggtgtcggacatgcgttcgctcgcgatcatgcgcgagacgagcgcgccggtcgtgttcgatgcgacccactcggtgcaactgccgggcgggcagggcacgaattcgcgctggccgcccgagctcgt

SEQ ID NO: 242579 - DNA, 369 bp, Unknown
  Bacterial polypeptide expressing nucleotide sequence isolated from the Sargasso Sea
gcaaaaatctgcttctttgcgaacgtggcacaagcttcggctacaaaaatttagtggtcgatatgcttggattcaatgtgatgaaaaaatttggttacccactgatatttgacgttactcattctttgcaactccctggaggacatggtaaatcggccgctgggagaagggaatacgtacgtgagctgggattggcaggcttatctcaaaaaattgcaggtctgtttattgaggcccatccagaacctgacaaagctctttgtgatggacagtgcgccctgaggcttgaccagattgaacctttcttaaggcagatgaaggccgttgatgtaatggttaagtcatttgaaacacttgatacgtcatgaa

SEQ ID NO: 242580 - DNA, 601 bp, Unknown
  Bacterial polypeptide expressing nucleotide sequence isolated from the Sargasso Sea
cttgaaaatcttacaagaaatttctgaaaattttgattgtccaactataactgatgttcacgaaccttatcaatgtaaaattgcagcggaagtagtggatattcttcaaattcctgcatatttgtgcagacaaacagatttgctattagcagctggggatacagataagccaattaatgttaaaaaaggtcagtttttatctcctacagatatggcgaaagtagccgaaaaaatatccagtactggaaatgataaaattatgctttgtgaaagaggtacaacatttggctataacacgctagttaatgatttcagagccttggatataatggcagaaacaggttatccagttatttttgacgcaacgcattcggtacaacaacctagcttattaggggataaatctggaggagaaagaaagtttgtcccgactttatcaagggctgcatgtgcaattggggtgagcggtttatttatagaaacccatgaaaaccctgacgaagcgcctagtgacggtgcaaatatgctagatattaatgatttaccaagattaattccaactttattatcctttgataatatggttaaaaacaatatatag

SEQ ID NO: 242581 - DNA, 229 bp, Unknown
  Bacterial polypeptide expressing nucleotide sequence isolated from the Sargasso Sea
tcattctgtacaacaacctggtggtcaaggtgaatcatctggtggacaaagagaattcgttgaatatttatcaagagcagcagttgcagtaggggttgcaggagtttttattgaaacacatcaggatcctgataatgctccatcagatggtcccaatatggttcctttagataaacttgaaaatttattaaaacagttaaccgatattgataatttaattaaaaagtag

SEQ ID NO: 242582 - DNA, 394 bp, Unknown
  Bacterial polypeptide expressing nucleotide sequence isolated from the Sargasso Sea
atgaaaaatcataaagtaaaatgctccaatttcgagatttcaaatgacaaaccatttactctaattgcaggaccttgtcagcttgaaagcgaaaatcacgcattaaaaatttcaaacgaacttagggatattacaaaagagctaggaataaatttaatttacaagacatcgtttgataaagccaacagaactagccttaaaggaaaaaggggtataggtttagataaatctctttctatttttgatagaataagaaaagaggtcggcgttcctgttttaacggacgttcataccgcagatcaatgttctatcgtttcaaatcatgttgacgttttacaaattcccgcttttttatgtagacaaacagatttactaattgcagcagctaaaactg

SEQ ID NO: 242583 - DNA, 175 bp, Unknown
  Bacterial polypeptide expressing nucleotide sequence isolated from the Sargasso Sea
gctggtatgtcgcaatcaatagctggactttttctggaagcacatccaaatcctgatgaggctaaatgtgacggaccttgtgcattacctctctcttatctagatgaatttttaaatcaaataaaagatttggatgattttgttaaaggtcaaaataatttagagatcaaataac

SEQ ID NO: 242584 - DNA, 127 bp, Unknown
  Bacterial polypeptide expressing nucleotide sequence isolated from the Sargasso Sea
cgatccgaaccaggcccgttgcgacggaccaagcgctctgcccctggatcagctggagccattcctcagccaggtgaaagcgatcgacgatctggtgaaatctcaacccatgatcaacatcaactga

SEQ ID NO: 242585 - DNA, 247 bp, Unknown
  Bacterial polypeptide expressing nucleotide sequence isolated from the Sargasso Sea
atgaatacaattaaagtagataaactggaaataaataacgataaaccgttcgtacttattgcaggactaaatgttttagaagatgagaaaacaattgaatctgttattactaaatgtattgaatctacatcaaaacataatattccttttatcttcaaagcatcttatgacaaagctaatagatcctcaattgattcgtacagggggccaggggccaaacaaggtttagaaataaaaaagaattaaa

SEQ ID NO: 242586 - DNA, 802 bp, Unknown
  Bacterial polypeptide expressing nucleotide sequence isolated from the Sargasso Sea
catgattcagttcaaagagctatttgataaaaaaaattcatttttacttattgcaggtccatgtgcgattgaaagtgaagaaatagcatttgaaattgctgaaaaaattcataaaatctcacaaaaactaaatatcaactttgtttttaagggaagttttaaaaaagcaaataggagtaaaatagatagttttacaggtattggtgatgaaaaggctttagagatcataaaaaaagttggaaacagtttttcaatactaacaactactgacattcatgaagttaaagatgctgatatagctgcaaagcatgtagatattcttcaaatacctgcttttttagctagacaaacagatttaattgttgcagcagcaaaaacctcaaaaatagtcaacataaaaaaaggacagtttatgaaccctacttccatgaaatttgcagttgataaggtcaaagattctggtaatgataaagtgttaataacagagaggggaaacatgtttggttatcaggatttagttgttgattttagaggaattcctaaaatgaaagaatatgctccagttattttagatgtaacgcattcacttcagcaaccaaaccaaccatcaggagttaccggtggtcatcctgaactaattgaaacaattgctaaagctggtatcgcatctggtgtagatggactatttattgaaactcatccgtctccgaagaatgctaaaagtgatggcaaaaatatgcttccattggatcaattagagattcttttagttaaactacttaagattaaatctgctatttaa

SEQ ID NO: 242587 - DNA, 757 bp, Unknown
  Bacterial polypeptide expressing nucleotide sequence isolated from the Sargasso Sea
gagtcccttgggcacgccttggacattgcaggaaagttgtgtgaattatcacaagaattagatttcggattaatttataaaacttcctatgataaagctaaccggaccagcttagatagccacagaggaccaggcatagagacagccatacctatattttcagaaataaaaaaacaatgtggttgtccagttttaacagatattcatagcgttgaggatgccaaagcactagcagaagtcacagatgttttgcagatacctgcatttttgtgcaggcagactgatttacttagggctgccggtgaaactggtaaggtaattaatataaaaaaaggccaatttttggcgccctgggatatgggtaatgtagcggagaaagtagaaaaaactggcaataagaatatttttctttgtgagagaggtacaagtttcggttataacaatctagtttcagacatgagatctcttccaatcttaagaaaacttggctatcccgtcatttttgatgctacacattctgttcagcaacctggtggtttaggaagctcttccggtgggcaaagagagtttgcgccagttttggcaaaagcagctgtcgctgttggagttgcaggtgtatttatggaaacacatcaagacccagataacgctcccagcgatggaccaaatatgatcaaaatcacggagatgagagatcttattagtttattacttgaaatcgatattgtgacaaaaagatctatgggggatatgtaaa

SEQ ID NO: 242588 - DNA, 494 bp, Unknown
  Bacterial polypeptide expressing nucleotide sequence isolated from the Sargasso Sea
aatgagtagtattaaagtaaattgtaataaaatagaaatctcaaacgacagtaaaatatgcattattgcgggtccttgtcagcttgaaactgaacaacatgcaatggatatggctggtaaaatacaagatatcactaaaaaatttggtgttggatttatttataaaacatcatttgataaagctaatagaaccagtcttaaaggtaaaagaggagcaggcttagatgcttcgcttccagtttttgataaaattaagaaagaattgaatataccaattttaactgatatccataatattgaacaatgctcaattgttgcaagtcatgtagatgttttacaaataccagcatttttatgtcgtcaaacagatttattagtagctgctgctaaaacaaataaagtcattaatgtaaaaaaaggtcaatttttggcgccttgggatatggttaatgttacaaaaaaaatttcagactctggaaataaaaacattttag

SEQ ID NO: 242589 - DNA, 592 bp, Unknown
  Bacterial polypeptide expressing nucleotide sequence isolated from the Sargasso Sea
aatgacacaaaacattgttgaaatattaaattttaaagtatctaacaaacttcctttatttttaattgctggcccttgttctattgaaagcaaagaacacgcaattaaccatgctggtatgattagagatatatgtaaaaaattaaatataaattttgtttataaatcatcttttgataaagcaaatagaaccagcacaaactcttttaggggagtgggtcttgaaaagggtttaagtattttatctgatgtaaaaaaaagctttaatttaccaatattaactgatgttcatgaaacacatcaatgtaaagatattgaagaaattgtggatattattcaaatacctgcttttttatgtaggcaaaccgatctattaattgctgctgctaatactaataaggtaataaatgttaaaaaaggacaatttttagccccttgggatatgaaaaatgtattagacaagattttaaataatgggaatgatcaaattttacttaccgaaagaggaacgtcatttggttataacaccttagtttctgatatgcgtgcacttccacaaatgtctagttttggatatcccaattatatttga

SEQ ID NO: 242590 - DNA, 724 bp, Unknown
  Bacterial polypeptide expressing nucleotide sequence isolated from the Sargasso Sea
tatggatatggctggaaaaattcgagaaattactaaaaaatttaatcttggtttcgtttataaaacttcttttgataaagcaaatagaaccagtctaaagggaaaaagaggggcagggttagaagcttcactaccagtgttcgataaaataagaaaagaacttaatgtaccgatactaacagatatacacaatattgaacaatgctctatagtaagtggacatgttgatgtaattcaaataccagcatttctatgtagacaaactgatctattaattgctgcagcaaaaaccaataaaattattaatgttaagaaaggtcaatttttagctccttgggatatggtaaacgtaacaaaaaagatttcagattctggaaataaaaatattttagtaaccgaaagaggtgcaagttttggttataatacacttgtatcagatatgagatcactaccaattatggcaaagaatggttacccggttatttttgatgctactcattctgttcagcaaccaggtggactaggagaaaaaagtggtggtcaaagagaattcgttgaacatttagcaagagctgcagttgcagttggggttgcaggagtttttatagaaactcatcaagacccagataatgctccatcggatggaccaaacatgatacctttagacaaattagaaaatttattacaacaacttacagatatagataacttaattaaaaattag

SEQ ID NO: 242591 - DNA, 376 bp, Unknown
  Bacterial polypeptide expressing nucleotide sequence isolated from the Sargasso Sea
aacaaaaaaaatttcagactctggaaataaaaatattttagtcactgaaagaggcgctagttttggttacaatactttagtctcagatatgagagcattacccatcatggcaaaaaatggttatccagttatttttgatgctacccattcagttcaacagccaggtggtcttggtgaaaaaagtggaggacaaagagagtttgtagaacatttatcaagagcagctgttgcagtaggagtagcaggagttttcattgaaacacatcaagaccctgataacgccccctctgatggtccaaatatggttccattaaataaattagagaatctattaaaacaattaactgatatagatagtttaattaaaaataagtga

SEQ ID NO: 242592 - DNA, 397 bp, Unknown
  Bacterial polypeptide expressing nucleotide sequence isolated from the Sargasso Sea
gctccctgggatatggttaatgtaacaaaaaaaatttcagaatcaggtattaaaaaaattttagtaacagagagaggagcaagttttggttataacaccttagtatcagatatgagatcaatacccatcatggcaaagaatggttatccagtaatttttgatgcaactcattcagttcaacaaccaggtggacttggagaaaaaagtggaggtcaaagagaatttgttgaatatttagcaagagctgcagttgctgttggagttgcaggagtgtttattgaaactcatcaggatccagataatgctccatcagatggaccgaatatggtcccattagataaattagaaaatttattaaaacaattaacagatatagataatttaataaaaaattagt

SEQ ID NO: 242593 - DNA, 780 bp, Unknown
  Bacterial polypeptide expressing nucleotide sequence isolated from the Sargasso Sea
tgacaattattgcaggattaaatgtattagaggatgaggatatggctcttgatgtcgctgaaaaactcaaagaaattacaactaagcataatattccttttgttttcaaagcttcttttgataaagccaatagatcatctatcgattcttacagaggtcctggacttgaagctggtaaaaaaatttttgaatctattaaaaaaaatattagtgtaccaataataaccgatattcatgaagagggtcaaattgaggaaatctctcaagtggttgatatattacaaataccagctttcctctgtagacaaactgatctaattagtgcggcatgcaaaactcaacttcctctcaatatcaaaaaaggacaatttttatctccctatcaaatgaagaatataattgaaaaatgtaattcatttggaaatgataatattattctctgtgagagagggtcatcttttggttatgacaatcttattgtggattttcttgggatatcagaacaaaaagcctttaattatccaataattcttgatgttactcattcacttcagcttccaggaggacaaggtaattctgctggaggaagatcacatcaagcggaagatctagctagagcagcaatagccttaaaaatttcaggactatttattgaggttcacccaaacccagataaagcgctatgtgatggaccttcagccacaaaacttgaggattttgaagatatgataacaaaaataaaaaaaatagacgatcttgttaaatcagaaaaattttaat

SEQ ID NO: 242594 - DNA, 697 bp, Unknown
  Bacterial polypeptide expressing nucleotide sequence isolated from the Sargasso Sea
atgggtacccaaaaaacaatttttgttaatgatatcagtctttgcaatgataattcgtttgtgcttattggaggattgaatgtccttgaaagtaaagacttaaacttgaaagttgcagaaactttcaaggaaattaccagtcgtctaaagattccatacatttttaaggcctctttcgacaaagcaaatcgctcttcaacggactcatacaggggccctggaatggaaaaaggtctgcgaatacttgaatatataaaacaggaatttgaaatacctatcctgacagatattcacgaaccgcagcaggccaaacctgcctcagaaatagccgatgttcttcaacttccagcgtttttgtctcgacagactgacttggtttccgcattggcaaatacaaaagctgtaataaatattaaaaaagcacagtttttgtctccggatgaaatgggtaacataataaataaatttgaattcttcggaaacaaaaaactttttctttgcgaacgcggcacaagcttcgggtacaacaatttagtggttgatatgcttggatttaagttaatgaaaaagtttggctatccgttggtatttgacgtgactcattctttgcagattcctggcgggctggggaactccgctgccggtcgaaggggatctatacgtgaaatgggattggcaggcttatctcaaaaattgc

SEQ ID NO: 242595 - DNA, 727 bp, Unknown
  Bacterial polypeptide expressing nucleotide sequence isolated from the Sargasso Sea
aatgagtaatattaaagttaattgtggaaaaatagaaatttcaaataaaaataaaatttgcctcatttctggtccttgtcaacttgagtcggaacagcacgcattggatatggcaggaaaaatcagtgaaattactagtaaatttaaccttggttttgtttataaaacttcatttgataaggctaatagaacgagtttaaaaggaaagagaggtattggtttggatgcctcattaccgatttttgataaaattaaaaaagatttaaacgtaccgatattaacagatgtacataatattgatcaatgttcagtcgttgcaaaacatgtcgacatcttacaaattcctgcctttctatgtagacaaacagatttgttagtcgctgctgcaaaaacaaataaaataattaatgttaaaaaaggacaattcttagcaccgtgggatatggtcaatgtaacaaaaaaaatttcagattcaggtaataataatattttagtaactgaaagaggagcaagttttggttataatactttggtttcagatatgagatcaataccaataatggctaagaacggctatccagtgatttttgatgctacgcactcagttcaacaacctggaggtcttggtgaaaaaagtggaggtcaaagagaatttgtagaacatttatcaagagctgctgtagcagtaggtgtagctggtttatttattgaaacacatcaagatcca

SEQ ID NO: 242596 - DNA, 269 bp, Unknown
  Bacterial polypeptide expressing nucleotide sequence isolated from the Sargasso Sea
tggttacccggtaatttttgatgcaactcattcagttcaacaaccaggtggcatgggtgataaaagtggaggtcaaagagaatttgttgaacatcttgcacgagcagcaatagctgttggggttgcaggtatatttatagaaacacacccagatccagataatgctccttcagatggaccaaacatggttcctttatctcaaatgccaaatttattaaaacaattatcagcaattgataaattagttaaaaatggcaaaaatcaataaa

SEQ ID NO: 242597 - DNA, 721 bp, Unknown
  Bacterial polypeptide expressing nucleotide sequence isolated from the Sargasso Sea
atgaaattaagagattttaaaatagataacacagagccaatggttcttatgggtggtatgaatgtgcttgaatcaagagatttagcaatgaagattgctgaaacatttaaagaaataactcaaagcaaacatattaattacatattcaaaggttcttttgataaagcaaacagaagttcaattagttcatttagaggtccaggaatggacgaaggacttaaaattcttcaagaggtatcaacaacttttgatatacctgttataactgatattcatgaacctcaacaagcagaagcagtaagtgagatatgtgaggtaattcagattccagctttcttggcaaggcaaaccgatttagtaaatgcagctgctaaaactaaatcaataatacagtttaaaaaacctcaatttttatctgctccagaaatgtctaatattgttgaaaaatgcagttctgccgggaatgaaaacataactttatgcgagaggggaaattcttttggttacaataatctcgttgtcgatactttaaattttcaaatattaaaaggattattaaagcctgttatatttgatgtaactcattcacttcaattgcctggaggtctaggaagtgctacaggtggaagaagagaatatcttttaagccttgcaaaagctggaatgtctcaatctatagcaggactatttcttgaagctcatccagatcctgatcaagcaa

SEQ ID NO: 242598 - DNA, 517 bp, Unknown
  Bacterial polypeptide expressing nucleotide sequence isolated from the Sargasso Sea
ttatctgaacacgttgatgttttacaaatacctgcttttttgtgcagacaaacagacttacttatcgctgctgctagaacaaataaaattgttaatgttaaaaaaggtcaatttttagcaccatgggatatgacaaatgtaacagataaaatttcatcatcaggaaacaaaaatattttagttactgaacgtggagcatcgtttggatataatactttagtatccgacatgagatctttacccataatggcaaaaaatggatatccagtaatatacgatgctactcattcggtacaacaaccaggaggacaaggtacatcgagtggtggtcaaagagagtttgtagagtatttggccagagcatctattgccgtaggtgtggctggtatttttattgaaacacatcaggatcctgataatgcaccatcagatggtcctaacatgttaccattaaaagatttagaaaatctcttaaaacaattaatagagattgataatgtagttaagcataactagt

SEQ ID NO: 242599 - DNA, 715 bp, Unknown
  Bacterial polypeptide expressing nucleotide sequence isolated from the Sargasso Sea
aatgataaaaataaatctaaataattttgccatttctaataatttaccttttatattagttgcaggtccatgtgttttagaaaatgaaaagcatactctaaaaattgctgaacaaatttctcaaatatgtaatgaattaaatataaattatatatttaaatctagttttgataaagctaatagatcaagtatacaaagtgaaagaggccttaacctagattctggtttaaaaatttttgaaaaaattaaaaatgaatttgattgtcctatactaactgatgttcataatgaggagcaatgcaatttgttagacaattcagatatagttgacattttacaaatacctgcatttttatgccgacaaactgatcttctgctatctgcaggtaaaacaaaaaaaattataaatgtcaagaaggggcaattcttagcaccaagagatataaaaaatatttttgaaaaaattaaatctgtaaataatgaaaaaataattattactgaaagaggaacgagttttggatataacaatttgatcaatgattttaagggtatagatattatgaagcagtttaaatatcctataatatttgatggcacgcattcagttcaacagcctggtggcttaggtcataaaagtggaggaaatagggagtttatcccatcactttgtaaagcagctgtctcaataggagtagcgggagtttttagagacaca

SEQ ID NO: 242600 - DNA, 739 bp, Unknown
  Bacterial polypeptide expressing nucleotide sequence isolated from the Sargasso Sea
aatgaaagatatttcaataaaagattttcaaataggaaatgatcaagattttaccttgatgggtggaatgaatgttcttgaatcagaagagacagctcttttagtagccgaaaaatttaaagaagttactgataaattagaaataaattggatttttaaagcctcctttgataaagctaatagaagttcaattgaatcctttagaggcccaggtatgaatgaaggactcaaaatactcgaaaaagtctcatcatcatttgatgttcctgtaattaccgatatacatgagccaagccaggctgatcctgtaagtgaagtttgcgaagttattcaaattcctgcatttctgtgcagacaaaccaatctcgtttcagcggctgctaaaacaaagtcagcaattcaatttaagaagccacaatttctttcagcagctgaaatgagaaatgttgttgaaaaatgtaagtctgctggaaatgaaaagattattttatgcgagagaggaaatatttttggttataacaatcttgtagttgatactcttaatttccagataatgaaagaatattctgtaccggttatgtttgatgttactcactcactccaacttcccggaggtcttggaaaatctactgatggtagaagagaatatcttttgcatatggcaaaatctgggatttctcaaaaaattgctggattatttcttgaagctcatccagatccagataaaagccaaatgtga

SEQ ID NO: 242601 - DNA, 424 bp, Unknown
  Bacterial polypeptide expressing nucleotide sequence isolated from the Sargasso Sea
tataaatgtaaaaaaaggtcagtttttagctccatgggacatggttaatgtaacaaaaaaaatttcagactctggtaataaaaatattttggtaaccgaaagaggagctagctttggttacaatactttagtttcagatatgagatctataccaattatggctaagagtggttatccagtaatttttgatgctacacattcagttcaacaaccaggcggccttggtgaaaaaagcggaggtcaaagagaatttgtagaacatttagcaagagcagcagttgcagtaggtgtggcaggagttttcatagaaacacaccaagatcctgataatgccccttctgatggtccaaatatgatcccattaaataagttagagagtttattaaaacaattaactgatattgataatttgattaaaaaataa

SEQ ID NO: 242602 - DNA, 793 bp, Unknown
  Bacterial polypeptide expressing nucleotide sequence isolated from the Sargasso Sea
atgactgtcaaagtttctaacttgagtatcgacaatggatcaaggctgaccttgatctctggtccttgcgtgattgaatcaaaagacctgattcatgacgtagcgggaaggataaaagagatcactgactcattggagattggttatattttcaaatcatctttcgataaggcaaatcgaacttcaattgatagttttagaggacccggaatggaagagggtctagctattctcgagagtgtgagagatcaattgggcgtgcctgttatcacagatgttcatgaagacactcctctagatgaggttgcatcagtggttgatgtgcttcaaacaccggcttttttgtgcagacaaaccaattttataatcaatgtggcatcgcaacaaaaacctgtgaatataaaaaaaggccagttcctttccccttgggaaatggaaaatgtcgttaagaaagcaaaatctaccggcaatgaagatattttggtttgtgagcgcgggtatacatttggctataataatctggtttcagatatgcgttcacttgttgtgttgaaagaaacatcatgccctgtgatttatgacgcaacgcactctcttcagcttcctggtggtaaaggcggctcatcagacgggcaaagtgaatttattattccagtctcaagaggagcagtgggtgttggcattgctggtatattcatcgagactcatccggatccaaagaatgctctaagcgatggaccaaattcactcccactggataatcttaagccattacttgagcaattattggcaa

SEQ ID NO: 242603 - DNA, 574 bp, Unknown
  Bacterial polypeptide expressing nucleotide sequence isolated from the Sargasso Sea
atggataaaactgtaaaatgtggaaaattaaacatttcaaacaaaggtcctttcactcttattgctggtccctgccaacttgaaaatgaaaaacacgccttaacaattgcaaatgaattaaaaaaaattactgaaaagttaggcattggtcttatctataaaacatcttttgataaagctaacagaacaagtttaaatggtaagaggggagcaggattagaaaaatctttacctgtttttgacaaaattaaaaaagaagttgaggtccctgttctaacagacatacatacaattgggcaatgtgaacttgtatcaaagcatgttgatgttttacagataccagcttttttgtgtagacagacagatttactagtggctgctgcaaagactggaaaagttattaatgttaaaaaaggacagtttcttgctccctgggacatgaccaatgtcacaaaaaaaattgaacaatcaggaaataaaaatattttggtcacagagagaggcgcaagtttcggctacaacactttagtatccgatatgagatcattacccattatggcaaagaatggttacc

SEQ ID NO: 242604 - DNA, 677 bp, Unknown
  Bacterial polypeptide expressing nucleotide sequence isolated from the Sargasso Sea
aatgaaaaaaataaatcttaaaaatttttcgatttctaatcatgaaccttttgtattaatatcaggaccatgtgttattgaaaatcaagaacataccataatgatagctgaggaaattaataatatatgtattgatttaggtattaattttatttttaaatctagttttgataaagcaaatagatctagtattgaaagtgaaagaggaaaaacattaaaagaatcattaattatttttgaaaaagttaaagaaaaaatcaattgccctattcttacagatgttcatacagaagagcaatgtatggtattagcaaaatcaaacattattgatatacttcaaataccagcatttttatgcagacaaacagacctattaatagctgcagctaatacagggaaagttattaatgtaaaaaagggccaatttttagcacctgatgatgtaaaaaatatttttaaaaaaatagaatcaacaaataacaataatatattaattactgaaagaggaacttcctttggatataataatttagtaaacgattttagagcattagatataatgaaaaactataaatatccaattatatttgatgccacacattctgttcaagaacctggaggtttaggtgataaaagtggtggaaaaagaaaatttattccttcactttgtaaggctg

SEQ ID NO: 242605 - DNA, 247 bp, Unknown
  Bacterial polypeptide expressing nucleotide sequence isolated from the Sargasso Sea
gtgatttttgatgctacccactcagtacaacaacctggaggacaaggagagtcatctggaggtcaaagagagtttgtggagcatttagcaagagctgcagttgccgttggtgttgcaggagtttttattgaaactcatcaagatccagacaacgcaccatcagatggtcctaacatggtaccattggataaattggaaaatttgttacatcaactatcagatatagataaattaataaaaaaatagt

SEQ ID NO: 242606 - DNA, 446 bp, Unknown
  Bacterial polypeptide expressing nucleotide sequence isolated from the Sargasso Sea
tgcagctaaaacaaataaaattattaatgtaaaaaaaggtcagttcttagcaccgtgggatatggtgaatgtaactaaaaaaatttcagactcaggaaataaaaacatcctagtcacagaaagaggcgcaagttttggatacaatactttagtctctgacatgagatcattacctattatggcaaagaatggttatccagtaattttcgatgcaactcattctgttcaacaaccaggtggtcaaggtgaatcctctggtggtcaaagagaatttgttgaatatttagcaagagctgcagttgcggttggagttgcgggtgtatttattgaaacacatcaagatcctgataatgctccatcagatggaccaaacatggtaccattgaataaattagagaatctattaaaacaattacacgatatagataatctaattaaaaaatagt

SEQ ID NO: 242607 - DNA, 569 bp, Unknown
  Bacterial polypeptide expressing nucleotide sequence isolated from the Sargasso Sea
tgttcctgttttaacagatgttcatacagcagaacaatgttcaatagtttctcaacatgtagatgttttacagatacctgcatttttatgtagacaaactgatttattaattgctgctgctaaaacaggaaaagttattaatgttaaaaaaggacagtttttagctccatgggacatggtaaatgtaacaaaaaaaattgaagattctggaaataaaaatattttagttacagaaagaggagctagttttggttacaatactttagtatctgacatgcggtctttacctattatggcaaaaagtggttatccagtagtttttgatgcaacacattcagttcaacaacctggaggcatgggtgataaaagtggaggccaaagagaatttgtagagtatttagcccgagcagctgttgctgtaggtgttgcggcaattttcatggaaacacatccagatcccgacaatgctccatctgatggtccaaatatggtccctttgtcaaaaatgcctagcttattaaatcaactagttaaaattgataaattaattaaaaatggcaaaaattaaa

SEQ ID NO: 242608 - DNA, 622 bp, Unknown
  Bacterial polypeptide expressing nucleotide sequence isolated from the Sargasso Sea
tgctagaggtgttggtatggatagcgggcttgaaattttggccatggttaaagccaagattggtgtgccagtattgagtgatgtacaccttcctgaacaatgcgcagcggcagctgaagtgttggacgttattcaaatcccagcctttttgtgtcggcaaaccgatcttctcgttgaagcggccaaaactggatgcgctatcaacttaaaaaaggggcagtttctggcgccatgggatatggaacatgttgcaacaaaaattatcaaggctggtaatgataaattgttgctaactgagcgaggaacatcattcggctataatacattagtgtctgatatgcgtgccttaccaacgatggcggcgttgggacacccagtaatttttgatgcgactcattcggtccaacaaccgggtggcctcggagctagctcgggcggccagcgagaatttgtgccagttttggctagggcggctgtggctgttggtgtgcaaggtcttttcatggagtcgcatgaaaacccggatcaggcgccatcagatgggccgaacatggttccactatctgaaatgccggtattgctggatatgttgatgcggattgatcaggcaaggcggggttaa

SEQ ID NO: 242609 - DNA, 769 bp, Unknown
  Bacterial polypeptide expressing nucleotide sequence isolated from the Sargasso Sea
tggtttaaacgtacttgaagaggaaaagaccatcttagaggttatttctagatgcaaacagtctgctaactctcttgatattccatacatttttaaagcatcttacgataaagcaaatagatcttccttcgactcttatagaggtccaggcccaaaaaaaggccttgaaattttatctgagctgaagaaagaatttgatgtcccagttatttcggatattcatactcctgctgaggctgaaatggcatcagaagtactggacattatacaaatacctgcatttctcagtagacaaaccgatttaatcaaggcggcttgcgaaacgtctttacctttgaatattaaaaaaggtcaattcttagccccttcagatatgttgaatatcatagagaaatgtaatcatttcgataatgacaaaattatgatttgcgaacgtggcacttcttttggatataacaatttgattgtagatatgttggggatggtcgaactaaaaaaaactgatgctccaattatcttcgatgttacccattcgttacaaagaccaggaggcttggggaataaagctgatggtcgaggttcaagtgtttttgaattggctcgagctggaatgtcattaggattggcaggtttatttttagaaactcaccccgatcctgcaaaggctttatgtgatggtccttgtgccttaaagctagacgatttggataaatttttgtccgagataaagagtttagatgacttaataaaatcttataaagagaaataa

SEQ ID NO: 242610 - DNA, 778 bp, Unknown
  Bacterial polypeptide expressing nucleotide sequence isolated from the Sargasso Sea
atgaaaaatttaaaagtaaaatgcggaactattgacatatcaaacgctaataaattttgtttgatagctggtccttgccaacttgaaacagaacagcacgcaatggatatgtctggaaaaattaaggaaatcacatcaaaattaggaattaattttatttacaaaacctcttttgataaagcaaatagaacaagcttaagtggtaagagaggaatagggttagaacaatcactaccaatattcgacaaaattagaaaagaaataaatattcctatattgacggatgttcataatattgaacaatgttcaattgtctctgatcacgttgatattttacaaattccagcttttctttgtcgacaaacagatttattaatagcagcagctaagactaaaaaaattattaatgttaaaaaaggtcaatttcttgcgccatgggacatggttaatgttacaaaaaaaatatcagactctggaaataacaatatacttgttacagaaagaggagctagttttggatacaacactttagtatctgacatgagatcattaccaataatggcaaagaatggatatcctgttatttttgatgcgactcactcagttcagcaaccaggaggccagggtacagcaagcggtggacaaagagaatttgttgaacatttatcaagagctgcggtagctgttggtgtagctggagtttttatggaaactcaccaagatccagataacgcgccatcagatggccctaatatgattccattatctaatctgaaag

SEQ ID NO: 242611 - DNA, 781 bp, Unknown
  Bacterial polypeptide expressing nucleotide sequence isolated from the Sargasso Sea
tggaggtctaaatgtcattgaaactaaagagttggctttaaaagttgcagaaactttcactgattttaccagtcgtcttaaaattccttacattttcaaagcctcatttgacaaagcaaaccgctcttcaattgattcatttagagggccaggtatggaagaaggactgcgaatacttgaagatgtaaaaaagacatttaaaatacctatcctgactgatattcacgaacctaatcaggccaagcctgcttcggaagtggccgatgttctccaacttccagcttttctatctcgccagactgacctgatttctgcattggcaaatacaaatgcagtaataaatataaaaaaagcacagtttttgtctccagatgaaatgggaaacataataaataaatttgaattttatgggaacgaaaagctttttctttgtgaacgtggcacaagcttcggctacaaaaatttggtggtagatatgcttggatttaaagtaatgaaggaatttggctaccctttagtatttgacgtgactcactcactacaggttcctggtggtcttggtaattcagcttcaggtcgaagggaatccatacgtgaattgggattggcgggtttatctcaaaaaattgcaggtttatttctggagacacatccagaacccaaaaaagcactttgtgatggtccaagtgccctgaaacttaatcagcttgaaccattcttgaaacagatgaaaagtgtcgatttgcttgttaagtcttttgaaacactggatacaagataa

SEQ ID NO: 242612 - DNA, 469 bp, Unknown
  Bacterial polypeptide expressing nucleotide sequence isolated from the Sargasso Sea
atgataaatatcaaaataaaaaattttgaaatttcaaataactcgccattatttttaattgctggaccttgtgtaatcgaaagtagggatcattctttaaaaattgctgaaaaaataaattcaatttgtgatagtgctaatataaattatgtttttaagtcaagttttgataaggcaaaccgaacaaatctaaaaagtcatagaggtattggttatcaagagtctctaaaaatttttgaagaaataaaaaaaaattatggatgtcctattataacagatgtgcacactgaaaaacaatgcgaagagctatccaaaaatgatattgttgacattttacagattccagcatttttatgtagacaaacagacttgttgattgctgcaggcaaaactaataaaattgtaaatgtaaaaaaaggacagtttttatcaccttatgaaattcctaaatattatgaaaaaattattc

SEQ ID NO: 242613 - DNA, 664 bp, Unknown
  Bacterial polypeptide expressing nucleotide sequence isolated from the Sargasso Sea
atcctttgataaagccaatcgtacaagtattaaatcaaaaagaggaataggtttagaaaaatctttacctatttttgataaaataagaaatgaactaaaagttccgatactaacagatgttcataacgaaaagcagtgtgatattgtttctaaacatgttgatattctacagatccctgcttttttatgcagacaaacagacttattaatctctgccgcaaaaacaaaaaaaattattaatgttaaaaaaggtcaatttctagctccctgggatatgattaatgtcacaaaaaaaatttcagattcaggaaatgaccaaattcttgtgactgaaagaggatcaagctttggatataatgctttagtctctgatatgcgttctttaccaataatggctaagaatggatatccaattgtttttgatgcaactcattcggtccaacaacctggtggacttggtgaaaaaagtggaggacaaagagaatttgttaaatatttatctagagctgctacagcaataggtattgcttctgtttttttagaaactcatcaagatccagataacgctccatctgatggaccaaacatgataccacttagtgaattagaaaatatcattcatgaaatagttcaaattgatgatttgattaaaaacaagaaatga

SEQ ID NO: 242614 - DNA, 456 bp, Unknown
  Bacterial polypeptide expressing nucleotide sequence isolated from the Sargasso Sea
catgactgaagtaagtgtaaataaattaaagataagtaattcaaatccttttactttaattgctgggttgaatgttctggaatcagataaggtaattgaacaagtcataacgcattgcatagaggtaacaaacaaattaagcattccttacatttttaaagcctcatatgacaaggccaatcgttcttccgttgattcttacagaggcccaggtgttgatgaaggtcttagaattctctctaacttgaagaaagaatttaacgtaccaataatctcagatgtacatactgttgaagaggtttccaaagcttcagaagtgctcgacataattcaaatacctgcatttttaagcaggcagacagacttaattaaagaagctgcttctaccaaaattcctatcaatataaaaaaagggcagttcatggcgcctgaggatactaaaaatataattaataa

SEQ ID NO: 242615 - DNA, 557 bp, Unknown
  Bacterial polypeptide expressing nucleotide sequence isolated from the Sargasso Sea
gccttgtggaatatgggattttggactcattgctggtccatgtgtaatagaaagcgaggatcatgctatccacatggctggttctattaaagaaattgttgatggcttgaatataaaaatgatattcaaaagttcttttgataaggccaaccgctcatcaattacttcatttagggggcttggtattgatgagggattaaaaatactagataaagtaaaatcagaagtagatgttccaattttaactgacatccatctacctgaacaagctgaccctgtttcagaagttgtggatataattcagatacctgcatttttatgtagacagacggatcttttaatagctgctgggaaaacaggaaagccagttaatataaaaaaaggacaatttctagcaccctgggatatgaaaaatgtaataacaaagatgaaagaaattcattgtgatgaaatactgattacagatagagggacacaatttggttacaataatcttgttggtgatatgcggtctatcctccataatgcaggaattgggctaccctgtagtgtttgat

SEQ ID NO: 242616 - DNA, 457 bp, Unknown
  Bacterial polypeptide expressing nucleotide sequence isolated from the Sargasso Sea
cctgttaattgcagcagcaaaaacaaataaaattattaatgtaaagaaaggccaatttcttgctccttgggatatggttaatgtaacaaaaaaaatttcagaaagtgggaatgaaaatattttagtcacagagagaggtgctagctttggttataatacattagtatcagatatgagatctattcctattatggcaaaaaatggttatccagttgtatttgatggaactcattcagttcaacagcctggtggtctaggagaaaaaagtgggggacagagagaatttgttgaatatttatcaagggcggctgttgctgtaggtgtagctgcaatttttatagaaactcatcaagatcctgataatgcgccatcagatggtcctaatatggtccctttaaataatttagacgagctaattaatcaaattgtggaaattgataatttagttaaaaaataa

SEQ ID NO: 242617 - DNA, 715 bp, Unknown
  Bacterial polypeptide expressing nucleotide sequence isolated from the Sargasso Sea
aatgataagtaaatccgttaaatgtggaaaattaaatatttcaaacactaacacatttacattaattgctggaccttgccagttagaaaatgagaaacacgctctcgatgttgcttctaaattaaaaaaaataactgatgaacttggaataggcttaatttataaaacctcatttgataaggctaatagaactagtcttaaaggcaaaagaggagctggccttgaaaaatctttaccaatttttgataaaattagaaaagaaattaatgttcctgtattaactgacattcacaccatagatcaatgcaagacagtctctaaacacgttgatgttttgcaaataccagcctttttatgtagacaaacagatttacttgtagctgctgcacaaactggaaaagttataaatgtaaaaaaaggtcaattccttgcgccatgggatatgattaatgttactaaaaaaatagaagactcaggaaataaaaatattttggttactgaaagaggagcaagctttggttataatactttggtatctgatatgagatcattgcctattatggcaaaaaacggttatccggtggtttttgatgcgacacattccgttcaacaacctggtggcatgggggacaagagcggtggtcaaagagaattcgttgaacatctttcacgggcggctattgctgttggagttgcagctatttttatagaaaca

SEQ ID NO: 242618 - DNA, 814 bp, Unknown
  Bacterial polypeptide expressing nucleotide sequence isolated from the Sargasso Sea
aatgaagaaaaaaattatagaaattggaaatttaaaaataggtggaaaccatccccttgtaataatatcaggtccatgccaattggaaagtttgcaacattccagaatggttgtggagaaattatgcgacatatgctttaactctaagttaggtttcattttcaaggcaagttttgataaagcaaaccgctcctctatcaatggcaagcgcggccctggaatcgatgagggcctaacaatacttgataagattaagactgaatttaattgcctcacattaacagatgtacacgatccaaaacaatgttcgccggttagtgaagttgtggatgttttgcaaattcctgctttcttatgcagacagactgacttattaattgcatcaggaaataccggccgaactataaatgtaaaaaagggtcaatttttagcaccttgggatatggaaaatgtcattaaaaagatacagagtacaggtaatgaaaatattttactgtgtgaaagagggaccacttttggttataattcccttgtggtagactttcgcagtttagccattatggctgcaacaggctatcctgttgtatacgatgcgactcactcagttcaagagcccagtaagaatattgaatcaactggtgggcaaagggagtttgtcgagcccctctcaaaagctgcctgcgcgctgggtatatctgcaatttttattgaaactcatcaggacccagccaatgctccgagcgatggaccaaccatggtacctctttctgagatgcaaaacctcatatcccgcttaaagaaattgatgctttaa

SEQ ID NO: 242619 - DNA, 442 bp, Unknown
  Bacterial polypeptide expressing nucleotide sequence isolated from the Sargasso Sea
caatttaagaagccacaatttctttcagcagctgaaatgagaaatgttgttgaaaaatgtaagtctgctggaaatgaaaaagttattttatgcgagagaggaaatatttttggttataacaatcttgtagtcgatactcttaatttccagataatgaaagaatattctgtaccggttatgtttgatgttactcactctctccaacttcccggaggtctaggaaaatctactgatggtagaagagaatatcttttgcatatggcaaaagctgggatttctcaaaagattgctggattatttcttgaagctcatccagatccagataaagccaaatgtgacggaccatgcgcccttagacttgatcagctcgaatcatttcttcttcaagtaaaagaattagataaacttgttaagtctcaaaaagatttagatcttaaataaa

SEQ ID NO: 242620 - DNA, 538 bp, Unknown
  Bacterial polypeptide expressing nucleotide sequence isolated from the Sargasso Sea
gatatattatctgataacaatattatagatgtattgcagatccccgctttcttgtgtcgccaaacagatctattaatatcagcagctaaaacaaataaaattttaaatgtaaaaaaaggtcagtttctagcaccaaatgatgtaaaaaatatttttgaaaaaatttcatcagctaacaataataatattatgataactgaaagaggtacaagctttggttacaataacttagttaatgattttcgaggtattgatattatgaaacaatttcaattccctgtaatttttgatggaactcattctgtacaacaacctggagggttaggtgataaaagtggaggcaaaagacagttcattccttcgttatgtaaagcagcaatttcaataggaatttctggagtttttttagaaactcatgatgatccagacaatgctccaagtgatgggccaaatatgattgatttaaaaaatttaaaaaatttattaattcaattaaaagaatttgattttatagccaaaaaacatgcccaaaattaaa

SEQ ID NO: 242621 - DNA, 445 bp, Unknown
  Bacterial polypeptide expressing nucleotide sequence isolated from the Sargasso Sea
aatgaaaaatatcaaattagctaatttcgaaatttccaacaaaaataattttatcttaattgcaggaccgtgcgtaattgaaaatgaaagtcattctttgatgatgacagaacaaattgcaaaaatatgtcaaaaacttaaaattcattttatcttcaaatctagttttgataaagcaaacagatcaagcataaatagcaaccgaggtgtagatataaaacaagctgaaaaaatatttaataagattaaatcaatatataattgtcctatcttaaccgatgttcataatgaaagtcagtgtgaatttttttcaaattcagaaagtgttgacgttcttcaaataccggcgttcttgtgccgacaaactgatttactgattgcagcagcaaaaacaaaaaaaataataaatgttaaaaaaggtcagtttttatctcctcatgaagtt

SEQ ID NO: 242622 - DNA, 710 bp, Unknown
  Bacterial polypeptide expressing nucleotide sequence isolated from the Sargasso Sea
aatgcaaaatattaaagttaaatgtaacacaattgaaatttcaaattctaacaggttttgtcttatagctgggccatgccaacttgaaactgagcaacatgctttagatatggctggcaaaatacaagaaataactaaaaaatttaatataggttttatttataaaacatcttttgataaggctaacagaactagcttgaagggaaaaagaggagctggtttagacaaatccttaccagtatttgataaaataaaaaaagatttaaaaattcctgttctaactgatattcataatgaagaacaatgtaatatagtttcaaaacatgttgatattttgcaaataccagcctttttatgcagacagaccgatttattaattgcggccgctaaaacaaataaaattattaatgtaaaaaaaggacagtttcttgcaccttgggatatggttaatgtaacaaaaaaaatatctgagtcaggaaataataatattttagtgaccgaaagaggagctagttttggttataacactttagtttctgatatgagatcaatacctataatggcaaaaaatggttacccagtaatttttgatgcaacgcattctgttcagcagcctggtggaatgggagaaaaaagtggtggacaaagagaattcgttgaacatctatcacgtgcagcaattgctgttggtgtggcaggtttatttatcg

SEQ ID NO: 242623 - DNA, 436 bp, Unknown
  Bacterial polypeptide expressing nucleotide sequence isolated from the Sargasso Sea
atggcatctgtggaccataaaaaaattgagattggcggtatgacgctgtcaaatcaaaggcccttcgttcttattgcgggtccatgtcaaattgagagcgaagaccattcatttatgattgcaaaaaagttagaaggaatttgtgcaaaactggagataccctttatatttaaagcttcttttgacaaagccaatagatcaagtgtttcaggaaaaagaggggtcggtcttgaaagaggactggatatacttggaaagattagggagactgtagggtgtcctgttctcacagatgtccacgaacgtgaacaatgcaaacgagtcgcagaggttgctgatgtgattcaaattccagcttttctctgtcggcaaacagacttagttttggaagcgggcagaactggtaaaattgttaatataaaaaagggacagtttt

SEQ ID NO: 242624 - DNA, 700 bp, Unknown
  Bacterial polypeptide expressing nucleotide sequence isolated from the Sargasso Sea
ctgactttaatatctggtccatgcttgttagagaatgaaaaactagtcagaaaagttgcgcaatcactaattaaatatactaaagaagaaaagtttaatttagtattcaaatgtagttttgacaaagctaataggagttctcataaaacaatacgtaataaaatttcctttgatcaatccatagatatattaaaaaatcttaaaaaagacttaaaaatgtctattacttcagatgttcatgagacaacccaagttgataagttggctgaatttcttgatgtaatacaaattcctgcttttttatgccgacaaacagatttaataaaagctgctgcacaaacaaaaaagattgtaaatgtcaaaaaaggacagtttttatcacacaaagaagtttcaaatattataaataaaattgaaaatgaaaataataaaaaaatattaataactgagaggggaaattcatttggatataattatttaattaacgactttaaaggtattcatttaatgaaatcatttggttacccaattatttttgattcaacacacagcgtacaattacctggtggattgggtaaaaaaagtggaggtgccagagagtatgttacaccattatcgaaagctgcttcatctttaagaatagcgggtttcttcattgaaacacacccaaacccagaaatagcattaagtgacggtccaa

SEQ ID NO: 242625 - DNA, 535 bp, Unknown
  Bacterial polypeptide expressing nucleotide sequence isolated from the Sargasso Sea
aatggataaaactgtaaaatgcggaaaattaaacatttcaaacaatggtcctttcactcttattgctggtccctgtcagcttgaaaatgaaaaacacgccttaactattgcaaatgaattaaaaaaaattactgaaaagttaggtattggtcttatttataaaacatcttttgataaagctaacagaacaagcttaaatggtaagaggggagcaggtttagaaaaatctttacctgtttttgacaaaattaaaaaagaagttgaggttcctgttcttacagacatacatacaattgagcaatgtgaacttgtatcaaagcatgttgatgttttacagataccagctttcttatgtagacaaacagatttgctagtagctgctgcaaagactggaaaagttataaatgttaaaaaaggacaatttcttgctccttgggacatgattaatgtcacaaaaaaaattgaacaatcaggaaataaaaatattttggtcacagagagaggtgcaagtttcggctataacactttagtatct

SEQ ID NO: 242626 - DNA, 706 bp, Unknown
  Bacterial polypeptide expressing nucleotide sequence isolated from the Sargasso Sea
aatgggtattaattatatttttaaagggtcttttgacaaagctaacagaagctctattaattcattcagggggccaggtttggatgaaggcctaaaaatattagaggaaatttcaaaaacctatgatattcctgtaataaccgacattcatgagcctaatcaagcaaaatcagtaagtgaaatttgtgaggtcattcaaatacctgctttccttgcaagacaaactgatttggttagagcagctgcaaaaactacgtccataattcaatttaagaaacctcaatttttatcagcccaagagatgtcaaacgtcgttgaaaaatgtgaggcagctggaaataaaaatattactttgtgtgaaagaggtaactcatatggatataacaatttggttgttgataccttaaattttcaaatcttaaaaaaattatcaaaacctgtaatttttgatgtaacacattcacttcaactaccaggaggcttaggaagttcaactggtggtagaagagaatatgttttaagtcttgcaaaagccggtatgtcgcaatcaatagctggactttttcttgaagcacatccaaatcctgatgaggctaaatgtgatggaccttgtgcattacctctctcttatctagatgaatttttaaatcaaataaaagatttggatgattttgttaaaggtcaaaataatttagagatcaaataa

SEQ ID NO: 242627 - DNA, 400 bp, Unknown
  Bacterial polypeptide expressing nucleotide sequence isolated from the Sargasso Sea
gttggacaaattccgcgaatgcggaaacgagaagctgttgctgtgcgagcgaggcaccaacttcggttacgacaacctcgtggtggacatgctggggttcggcgtaatgaagcgaacctgcgatgaccttccgttgatcttcgatgtcacccacgccctgcaatgcagggatccaggtggtgctgcatcaggcggacgccgcacccaggtggtggacctggcccgctcaggcatggcggttggcctggctggcttgttcctggaagcacaccctgacccggcgcaagcccgttgcgatggccccagcgccctacctcttgatcagctggagccgtttctcacccaggtcaaagccatcgatgacctggtgaaaggcatgcaagagcttcgcatcaactga

SEQ ID NO: 242628 - DNA, 563 bp, Unknown
  Bacterial polypeptide expressing nucleotide sequence isolated from the Sargasso Sea
caatgttccgattttaactgatatccataatattgaacaatgctcaattgttgcaagtcatgtagatgttttacaaataccagcatttttatgtcgtcaaacagatttattagtagctgctgctaaaacaaataaagtcattaatgtaaaaaaaggtcaattcttggcgccttgggatatggttaatgttacaaaaaaaatttcagattctggaaataaaaacattttagtcactgaaagaggtgctagttttggttacaatactttagtgtcagatatgagagcattacccataatggcaaaaaatggttacccagttatatttgatgctactcactctgttcaacaaccaggtggtcttggtgaaaaaagtggtggacaaagagagtttgtagaacatttagcaagagcagcagttgcagtgggtgttgcaggagtttttattgaaactcatcaagatcctgataatgccccttccgatggtccaaatatgattccgttaaataaattagaaaatctattacaacaattaacagacatagataatttgattaaaaaataaa

SEQ ID NO: 242629 - DNA, 754 bp, Unknown
  Bacterial polypeptide expressing nucleotide sequence isolated from the Sargasso Sea
tccttgtcaacttgaaaccgagcaacatgctttagacatggcaggtaaaattaaagaaattacaacaaagtataatattggatttatttataaaacttcattcgataaggctaatagaacaagcttgaaaggtaaaagaggagctggtttagaaaactccctccctgtatttgataaaattaaaaaagatattaacgtgcccgttcttactgatatacataatgaggaacaatgttcccaagtatctcatcatgtagatgttcttcagataccagcatttctttgtagacaaacggatttgttaattgctgccgctaaaactaaaaaaattataaatgtgaaaaagggacaattcctggcaccatgggatatggtgaatgtaaccaaaaaaatttctgatagcggtaatgaaaatattttagtaactgaaagaggagctagcttcggttataatacattggtctcagacatgagatctattcccatcatggcaaaaaatggttatccagtagtatttgatggaactcattcagtgcaacaacctggaggtctaggcgaaaaaagtggtggccaaagagaatttgttaagtatttgtcaagagcagcagttgcagtaggcgttgcagctatttttttggaaacacaccaggatcctgataatgctccatcagatggaccaaacatggtccctttagacaaattagacgaaattattaatcaaattgttgaaattgataatttaattaaaaagtaa

SEQ ID NO: 242630 - DNA, 551 bp, Unknown
  Bacterial polypeptide expressing nucleotide sequence isolated from the Sargasso Sea
gatgagttcgattaaagtaaattgtgaaaatatagaaatttcaaacaataataagatttgtattattgcaggtccatgccagttggagactgagcaacatgcaattgatatggctggaaaaataaaggaaattacctcaaaatttggtctaggatttatttataaaacttcatttgataaagctaatagaacaagtttaaaaggtaaaagaggtgcaggattagatgcatcacttcctgtatttgataaaattaaaaaagaattgaatgtacctattttaacagacattcataacgctgaacaatgtgcaattgtttcaaaacacgttgatgttttacaaatcccagcttttttatgtcgacaaacagacttgttaattgccgcagctaaaacaaataaaattattaatgtaaaaaaaggtcagttcttagcaccgtgggatatggtaaatgtaactaaaaaaatttcagactcaggaaataaaaatatcctagttacagaaagaggggcaagctttggttataatactttagtttctgacatgagatctt

SEQ ID NO: 242631 - DNA, 823 bp, Unknown
  Bacterial polypeptide expressing nucleotide sequence isolated from the Sargasso Sea
ggaaaataaaataataaattgtaacggtataaaaatatcaaataagagtaaaatttgtctgattgcaggaccttgccaacttgaaacagagcaacatgctatggacatggctggaaatattagagaaattgcagcaaaatataatattggttttatttataaaacttcttttgataaagctaacagaactagcattaaaggtaaaaggggtgcaggattagaaaaatccttacctgtctttgataaaattaaaaaagagttaaatgttcctattctaacagatatacataatgagcagcaatgttcagttgtagcgactcatgctgatgtgttacagatcccagcatttttgtgtagacaaactgatttattaatagctgctgctaaaactaataaaattattaatgtaaaaaaaggtcagtttttagcaccatgggatatggtaaatgttacaaaaaaaatatccgattcaggtaatgataatattttagtaactgaacgtggagcaagttttggttacaacaccttggtttcagatatgagatcaattcctataatggcaaaaaatggatacccaatagtatttgacgcaacacattcagttcaacaaccaggtggattaggcgagcagagcggaggtcaaagagagttcgtagaatatctatctagagcagctgcagcagttggtgtggccgcaatatttcttgaaactcatcaagaccccgacaacgcaccttcagatggtccgaatatggttccattaaataaattagatagtttagtcaatcaaattgtagaaattgataatttaattaaaaaataa

SEQ ID NO: 242632 - DNA, 424 bp, Unknown
  Bacterial polypeptide expressing nucleotide sequence isolated from the Sargasso Sea
ttccttgctcccgaagaaatggtttacataattgataaattcgaaagctttgataatagaaagttaattctttgtgaaagaggaagcgtttttggctataaaaatttagttgttgatatgctcggattttctgttatgaaaaagtccctttatcccgtaatctttgatgttactcactcactgcaacaaccaggagccggattagggtcggctgatgggcggcgagcccaagtggcggagttggctaaagcaggattgtcacaaggactagctggtcttttcttggagactcacccggacccagataaggcactttgcgatggaccttgtgcgctgaagctagagagcctccatccttttttagatcaaatgaaagatctagatagcctaatcaagtctcaagcgtacatagatactgcgtgat

SEQ ID NO: 242633 - DNA, 817 bp, Unknown
  Bacterial polypeptide expressing nucleotide sequence isolated from the Sargasso Sea
gatgaatgcgattaaagtaaattgtgaaaatatagaaatttcaaacaaaaataagatttgtattattgcaggtccatgccaacttgaaacagagcaacacgcaatggatatggctggaaaaattaaggaaattacctcaaaatttggacttggatttatttacaaaacttcatttgataaagcgaacagaaccagtttaaaaggcaaaaggggagcaggattagatgcatcacttcctgtgtttgataaaattaaaaaggaattgaatattcctattttaacagacattcataatgctgaacaatgtgcagttgtctcaaaacatgttgatgttttacaaatccctgcttttttatgtcgacaaactgatttattaatagctgcagccaaaacaaacaaaatcattaatgttaaaaaaggtcagtttttagcaccatgggatatggttaatgtaactaaaaaaatttcagactcaggaaatgaaaaaatcttagttacagaaagaggagcaagctttggttacaatactttaatttctgacatgagatcattaccaatcatggcaaagaatggttatcctgtaatttttgacgcaacacactcagttcaacaaccaggtggacaaggagagtcttccggtgggcaaagagaatttgtagaatatttagcacgagctgcagtagctgttggtgttgcgggtgtttttattgaaacccaccaagatccagataatgcaccttcagatggacctaacatggtaccattgaataaattagagaatctattaaaacaattacacgatattgataatcttatt

SEQ ID NO: 242634 - DNA, 661 bp, Unknown
  Bacterial polypeptide expressing nucleotide sequence isolated from the Sargasso Sea
aatgagtagtattacagtcaattgtgggaacatagaaatttcaaacgataaaaaaatttgtattattgctggtccatgtcaactcgaaacagaacagcatgcaatggatatggctggaaaaataaaagaaataacttccaaatatggtttaggttttatttataaaacttcttttgataaagctaaccgaacaagtttaaaaggcaagagaggtgctggtttagaagcttcattacctgtatttgataaaattaaaaaagaattaaaagttccaattttgactgatattcataattcagagcaatgttcagtagttgctaatcatgttgatgttttacaaattccagcttttctttgtagacaaactgatcttttaattgctgcagcaaaaacaaacaaaattataaatgttaaaaagggacaatttttagctccttgggacatggtaaatgttacaaaaaaaatatcagactcaggaaatgccaatattcttgttactgaaagaggtgcaagttttggatacaacactttggtttctgatatgagatctttacctattatggctaagaatggttacccagttatttttgatgcaacacattcagtacaacaacccggaggacaaggagagtcctctggaggtcaacgagaattttgttga

SEQ ID NO: 242635 - DNA, 478 bp, Unknown
  Bacterial polypeptide expressing nucleotide sequence isolated from the Sargasso Sea
ttatgcagacaaactgatttattagttgcagctgcaaaaacgaataaaattgtaaatgttaagaaaggacaatttttagctccatgggatatggttaatgtaaccaaaaaaatttctgattcaggaaataaaaatattttagtaacggagagaggtgcaagttttggttataacactcttgtttcagatatgagatccttgccaataatggcaaaaaatggttatccagtaatttttgatgccactcactcagttcaacaaccgggtggacttggtgagaaaagtggaggtcaaagagaatttgtagagtatttagctagagcagctgttgcagttggtgttgctggagtttttattgaaacccatcaagatccagataatgctccttcagatggaccaaatatggttcctttagataagttagaaagtttattaaagcagcttacagatatagataatttaattaaaaataagtgag

SEQ ID NO: 242636 - DNA, 312 bp, Unknown
  Bacterial polypeptide expressing nucleotide sequence isolated from the Sargasso Sea
ttggttataatactcttgtttcagatatgagagctttacctataatggcaaaaaatggttacccagttatttttgatgctactcactctgttcaacagccaggaggattaggggaagaaagtggaggtcaaagggaatttgtagaacacttagcaagagcagctgtagctgtaggtgttgcaggagtatttattgaaactcaccaagaccctgataacgctccctcagatggtcctaatatgatcccattaaataaattagaaaatttactaagacaacttacagacatagataatttaataaaaaattagt

SEQ ID NO: 242637 - DNA, 784 bp, Unknown
  Bacterial polypeptide expressing nucleotide sequence isolated from the Sargasso Sea
aataataaaatttccttaattgcaggaccatgtcagcttgagtctgaacaacatgctctcgatatggcaggtaaaattaaagagatatcaaataaatttaaaattgggtttatttataaaacttcatttgataaagcaaatagaacaagcattaaaggtaaaagaggcgctggtcttgaaaaatctcttcctgtatttgataaaattaaaaaagaattaaatattccaatcttgacggatattcataatgaagaacaatgttctttggttgcaagccatgttgatattcttcaaataccagcttttctatgtagacaaacggatttacttattgctgcagctaaaacacaaaaaattgtaaatgtgaaaaaaggacagttcctagctccttgggacatggtaaatgtaacaaaaaaaatttcagaatcgggaaatgataatattttggttacggagcgtggcgcaagttttggttataatactttagtttctgatatgagagcaataccaataatggcaagaaatggttatccaataatttttgatgccactcattcagtacaacaaccaggtggacaaggtgaaaaaagtggaggccaaagagagtttgttgaatatttggcaagagctgcagttgcagttggagttgctggtgtatttattgaaacacatcaagaccctgacaacgcaccatcagatgggccaaacatggtaccgttaaataaattagaaaatttactcaatcaattacttgaaatagataatttaataaaaaataaatgag

SEQ ID NO: 242638 - DNA, 565 bp, Unknown
  Bacterial polypeptide expressing nucleotide sequence isolated from the Sargasso Sea
atttaatattcctattttaacagacattcatagtattgaccaatgttcagaagtagctgatcatgttgacatattacaaattcctgctttcttatgcagacagactgatcttttgatagctgccgcaaaaacaaataaaattattaatgttaaaaaaggtcaattcttagcaccatgggatatggttaatgttactaaaaaaatttcagattctggaaatacaaatattttagtcaccgaaagaggtgcaagttttggttacaatactttagtttctgacatgaggtctttaccaataatggctaagaatggttatccagtaatttttgatgcaacccattcagtacaacaacctggaggtcaaggtcagtcatcaggaggtcaaagagagtttgtcgagtatttagctagagctgctgttgcagtaggtgttgctggagtttttattgaaactcatcaagatccagataatgcaccatcagatggtcctaacatggtcccattggataagttagaaaatctgttacatcaattatcagatatagataaattaataaaaaaatag

SEQ ID NO: 242639 - DNA, 559 bp, Unknown
  Bacterial polypeptide expressing nucleotide sequence isolated from the Sargasso Sea
catggaaaatagaattgttaaatgtcaggatttaaatatttctaattcaaataaaatttgtttaatagcaggaccatgccaattagaaactgagcaacatgctttggacatggcaggggaaattaaaaatattactgacaaatataaaattggatttatatacaaaacctcatttgataaagccaatagaacaagccttaaaggtaaaagaggagctggattagaaaaatctttaccagtttttgataaaataaaaaatcaaataaaagtccctatccttactgatattcacaatgaagagcaatgctcaattgttgcaccacatgttgacgttttacaaattcctgcattcttatgtcgacaaacagatttgttagttgctgctgcaaaaacaaaaaaaattattaatgtgaaaaagggtcagtttttagctccttgggatatggtaaatgtaacaaaaaaaatttctgactctggaaataataatattcttgtgacagagcgaggggctagttttggatataatactttagtatcagatatgagatcaataccataa

SEQ ID NO: 242640 - DNA, 787 bp, Unknown
  Bacterial polypeptide expressing nucleotide sequence isolated from the Sargasso Sea
atgaaactaagaaactttaatattgataacaatgattctatgactcttatggggggcatgaatgttttagaatctagagacttggctatgaaggttgctgaaaaattcaaagaagctactcaaaaactaaatattaactatatttttaaaggatcgtatgacaaagcaaatagaagttctattaattcatttagaggtccaggtattgaagagggtcttaagattcttcaagaggtttcaaatacttttgatgtccctgtcattacagatatccatgaacccaatcaagccaaacctgtaagtgaaatttgtgaagttattcagatacctgcatttttggctagacagactgatcttgtatgtgcagcggcaaaaacagactcaataattcaattcaaaaaacctcagtttttatcagctccagaaatgttaaatacgatagagaaatgttcagcagctggcaacgataaaataatattatgtgagcgaggaaattcatttggttacaataatttagtcgtcgatactttgaattttcaaatccttaaaaaattatctaagccagtaatatttgacgtgacacattcacttcaattgccaggtggtttaggaagcgcaacaggtggaagaagagaatatgtattaagtctagctaaagctggaatatctcaatcaattgcaggattatttcttgaagctcaccccaatccagatgaagcaaagtgtgatggtccatgcgcactccctttgtcggtcttagaagaatttttaaaacaagtaaaagaat

SEQ ID NO: 242641 - DNA, 665 bp, Unknown
  Bacterial polypeptide expressing nucleotide sequence isolated from the Sargasso Sea
aaagcttagttttgataaagcaaatagaactagtataaaaggtaaaagaggtttaggtttagaggaaagtaaagatatatttttagcactaaagggtgagggctttagtacattaacagatgtacacgagccacaacaatgtgaagaaatggccaagtttgtagatgtattacaaataccagcttttctatgccgacaaacagatttattattagcagctggtaaaacaggccttatgataaacgtaaaaaagggtcagtttttagcaccttgggatatgaaaggtgtcgtagaaaaacttacgtcaacaggtttaccaaaagaaaagataatgttatgtgaaagaggtacattttttggatacaatcagttagttgtagattataggggcctaatacagatgagagagtttggcacacaaatatgtatggacgctactcattgtgtacaacaaccaggtggtaaaggtgatagtagtggtggtaatagagactatgctccatatatggcctatgcctcaacgatatttaaaccagaagctatctttatggaaacacacgaagatcctgataacgctcctagtgatggtcctaatatgattaaactagatgatatggaaaaagtagttaaaaccataaaagcatataatgatgtggccgtataat

SEQ ID NO: 242642 - DNA, 760 bp, Unknown
  Bacterial polypeptide expressing nucleotide sequence isolated from the Sargasso Sea
aactttgaaatatcaaataagaaacaatttattttaattgctggtccttgtgtaattgaaaatgaagatcattctttaatgatcgctgaaaaaattgctgaaagttgtaacaaacataatattaattttatttttaaatcaagttttgataaagcaaatagatcaagtataaagagcaagcgaggtgtttcaataaatgaagctgaaaaaatctttaataaaataaaatctacatttaattgtccaattttaacagatgtgcacaatgaaaatcagtgtgaatttttcaaagaatctgatagtgtagatgtgcttcaaattccagcttttttatgtaggcaaacagatttattagttgctgctgctaaaacaaataaaataatcaatgtcaaaaaaggccaatttttatcaccatttgaagttccaaatatattttcaaaaattgaaagtactgggaataataaaataatgattaccgaaagaggaacttcatttggatacaataatttaattaatgattttaaatctttggatataatgaaatcatttgaatacccagttatttttgatgcaactcactctgttcaagaacctggaggtcttggagaaaaaagtggcggtaaaagagaatttgtaaatacattatcgaaagctgcagcagcaataggagttgcaggtatttttatagaaacacataatgatccagataatgcacctagtgacggaccaaatatgttaaacataaaaaatttagagagtt

SEQ ID NO: 242643 - DNA, 799 bp, Unknown
  Bacterial polypeptide expressing nucleotide sequence isolated from the Sargasso Sea
cggtatagaaatttcaaataaaagtagaatttgtttaatatctggtccatgtcaactagaaacagaacagcatgctatggacattgctggaaaaattaaagatattacatcaaaatttaatattggatttgtttataaaacctcttttgacaaggctaatagaacaagcctcaaaggaaaaagaggcgcaggtttagaaaaatctttgccagtatttgataaaattaaaaaagaattaaatataccggttttaacagatgttcataatgtagaacaatgttctattgttgctccacatgttgatgttttgcaaatcccagcttttttatgcagacaaactgacttgttaatagctgccgctaaaacaaaaaaaattataaatgtaaaaaaaggtcagttccttgcaccatgggatatgacaaatgttacaaaaaaaatatctgaatcaggtaatgataatattttagtcacggaacgtggtgctagttttggatacaacaccttagtatcagatatgagatcaatccctataatggcaaaaaatggatatccaatagtttttgatggaactcattcagtccaacaaccagggggactaggcgaaaaaagcggaggtcaaagagagtttgttgaatatttaactagagctgctgtagcagttggtgtagcagccgtatttttagaaactcatcaagatccagataatgcgccttctgatggaccaaatatggttcctttaaaaaatttagatggtttgattaatcaattagttgaaatagatagtttagtcaaaaaataa

SEQ ID NO: 242644 - DNA, 757 bp, Unknown
  Bacterial polypeptide expressing nucleotide sequence isolated from the Sargasso Sea
atgactgtcaaagtttctaacttgagtatcgacaatggatcaaggttgaccttgatctctggtccttgcgtgattgaatcaagagatctgattcatgacgtagcgggaaggataaaagagatcactgactcattggagattggttatatttttaaatcatctttcgataaggcaaatcgaacttcaattgatagttttagagggcccggaatggaagagggtctagctattctcgagagtgtgagagatcaattgggcgtgcctgttatcacagatgttcatgaagacactcctttggatgaggtcgcatcagtggttgatgtgcttcaaacaccggcttttttgtgcagacaaaccaattttataatcaatgtggcatcgcaacaaaaacctgtgaatataaaaaaaggccagttcctttccccttgggaaatggaaaatgtcgttaagaaagcaaaatctaccggcaatgaagatattttggtttgtgagcgcgggtatacatttggctataataatttggtttcagatatgcgttcacttgttgtgttgaaagaaacatcatgccctgtgatttatgacgcaacgcactctcttcagcttcctggtggtaaaggcggctcatcagacggacaaagtgaatttattattccagtctcaagaggagcagtgggtgttggcattgctggtatattcatcgagactcatccggatccaaagaatgctctaagcgatggaccaaattcactcccactgg

SEQ ID NO: 242645 - DNA, 739 bp, Unknown
  Bacterial polypeptide expressing nucleotide sequence isolated from the Sargasso Sea
aatgaaattaagagactttaaaattgataataacgaaaaaatgaccctcatgggcggcatgaatgttcttgaatcaagagatttggcaatggaagtagcagaaaaatttaagaatgtaactgataaaaatgatattaattatatttttaaaggctcttttgataaagctaacagaagctctattaattcattcagggggcctggtatggatgaaggcctaaaaatattagaggaaatttccaaaacttatgatattcctgtaatcaccgacattcacgagcctaatcaagcaaaatcagtaagtgaaatttgtgaggttattcaaatacctgctttccttgcaagacaaactgatcttgttagcgcagctgcaaaaacttcttccataatacaatttaagaaacctcaatttttatcagctcaagagatgtcaaacgtcgttgaaaaatgtgaagctgctggaaataaaaatattactttgtgtgaaagaggtaactcatatggatacaacaatttggttgttgatactttaaattttcaaattttaaaaaaattatcaaaacctgtaatttttgatgtaacacattcacttcaattaccaggaggcttaggaagttcaactggtggtagaagagaatatgttttaagtcttgcaaaagctggtatgtcgcaatcaatagctggactttttctggaagcacatccaaatcctgatgaggctaaatgtgacggactttgt

SEQ ID NO: 242646 - DNA, 841 bp, Unknown
  Bacterial polypeptide expressing nucleotide sequence isolated from the Sargasso Sea
atgatagatcataaagtagtcaaagtagatgacattgatatagcaaatagtttgccttttactcttatagcaggtccttgtgttgtagaaagtgaagatcatgccttaaagactgctaaaacaattagtaatgtatcaaataaattgggtataaattttgtttataagtcttcttttgataaagctaatagaacttctatgaattcagaaagagggctcggtctagaaaagtctaaagaaatttttaaagaaataaaaaaagttatagggtgtccaataatttctgatgtgcatgaaattaatcaaattgaattgctttctgagtatgttgatattattcagattcctgctttcttatgtagacaaactgatttattgattgaggctgcacaaacaaataaaccaataatggtaaaaaaaggacagttcttagctccttgggatatgaaaaatgtaatagataaattgtcagaaaacggagatggaaaaatattggtttgtgaaagaggagttagttttggatataacactttggtttcagattttagatctattccaattatgaaaaaattcggataccccgtagtttttgatgctactcattcagttcaacaacctggtggaatgggcagtaaatcaggagggcaaagggaatttgtgcccattttagcgagagccgccatatccataggaattgcagcattatttatggaaactcatgatgacccagataatgccccaagtgatggaccaaatatgttgcctttgaaagatttggaaaaattacttaatactctaataaaatttgatgctattgctaaagaaaaaagtcaaagctaaa

SEQ ID NO: 242647 - DNA, 205 bp, Unknown
  Bacterial polypeptide expressing nucleotide sequence isolated from the Sargasso Sea
aaaagtggtggtcaaagagaatttgtagaatatctttcacgtgctgcgatcgcagttggagttgcagctgtttttatggaaacacatccagatcctgataatgcgccatctgatggacctaatatggttccgttgtcaaatatgccaggtcttttaaaacaattatttgaaatagataaattaataaagaatggcaaaaattaaa

SEQ ID NO: 242648 - DNA, 529 bp, Unknown
  Bacterial polypeptide expressing nucleotide sequence isolated from the Sargasso Sea
catgaaacttctggattttaaagtcggtataaaatatccattttttttaatcgctggtccctgcgttgttgagtctgaagcactacaaattgagacagctggttttttgaaagaagtatgtaaaaaacttggtgtaagttttatttttaaatcaagttttgacaaagcaaaccgatcctccgcaaattcttttagaggcctaggaatgcaagacgggttaaaaatattagaaaaagtgaaaaaagaaatcgatgttccactacttactgatgttcataatgcaagtgaaattaatgaggtttcaagtgtggttgatgttttacaaacacctgcttttctatgcagacaaactgattttatctctgctgttgcaaaaagtggcaaaccagttaatttaaagaaaggccagtttttagctccaggtgatatgaaaaatgttgttgacaaagctagaaaagctgcggcggaagcgggcttaaatgataaccagttcatggtttgcgagagaggagctagttttggtacaaca

SEQ ID NO: 242649 - DNA, 498 bp, Unknown
  Bacterial polypeptide expressing nucleotide sequence isolated from the Sargasso Sea
atttgcaatccccagcctttttatgcagacaaactgatttacttattgcagccgctaaaactaataaaataataaatgtcaaaaagggccagtttcttgcaccttgggatatggttaatgttacaaaaaaaatctcagactcaggtaatgataatattttagttactgagcgtggagcaagctttggatacaatacattagtttcagacatgagatcaattccaatcatgattaaaaatggttatcctgttgtttttgatgcaacacattcagttcaacaacccggtggacttggagaaaaaagtggaggccaaagagaattcgtagaatacttagcccgtgccgcatcagcagttggtgtagctgctatatttatggaaacccaccaagatccagataatgccccatcagatggtccaaatatggttcctctaaataaattagagagtcttttaactcaaattatagagatagatagattagttaaaaatttttgat

SEQ ID NO: 242650 - DNA, 727 bp, Unknown
  Bacterial polypeptide expressing nucleotide sequence isolated from the Sargasso Sea
ctccgtagcagagaaatttaaaacattatcagaaaaattaggtttcaattacgtttttaaagcttcattcgataaagcaaatagatcttctcttgattcttttaggggtcctgggctagatgaaggccttaaaagtttagaaaaaattaaaaatgaatttaatttgcctgtaattacagatattcacgaacctgatcaagctgtgccagtttctgaggtttgtgaagttcttcagattccagcctttttgtgcagacaaaccgatttaattgttgcagcagctaagactaaaaaagtgatcaatataaaaaaaccacaattttcttcagcaaaagaaatgtttcatgctgttgataaatgtagtgcggttggaaatgaagatgtaatactttgcgagagaggaaatatttttggctataacaacctagtcgttgatccgttaaattttcaaattttaaaggaaagaggaaatcctgtattttttgatgttacacattctttacagcaacctggaatgttagaaaaaagcactggaggaaggggtcaatatgtttttgaattagctaaagttggcatttcacagaatatagctggactttttctagagactcatccagatccaagcaaagcgaaatgcgatggcccttgtgcacttaaattatctgatttagacattttcatggaaaaaattatttcattagatgaatttgtaaaaaatagtaaatga

SEQ ID NO: 242651 - DNA, 643 bp, Unknown
  Bacterial polypeptide expressing nucleotide sequence isolated from the Sargasso Sea
aatgaatcaaaaaattgttaaatgtaaagactttgagattgctaataataaaaaatttacctttatatctggtccttgccaaatcgaaagtgaagaacatgcaatagatattgcaagttatattaaggaattgaccactcagctagatataaatttcattttcaaatcatcttttgacaaagctaatagaaccagtattacaggcgctcgcggaatcggtctagataaatcattaaaaatttttgataaaattaaaaataaattaaacctaccagtattaactgatgtgcataatcctgaacaatgttcaattttatcagatgtgatcgatataattcaaataccagcatttctttgcagacaaactgatttattagttgcagccgcaaagacaaaaaaaattattaatgttaagaaaggtcaatttttagcaccatgggatatggttaacgttacaaaaaaaatttcaggtagtggaaacgaaaacattttagttacggaaagaggtgttagctttggatataacacattggtttcagatatgagatctttaccagaaatggcaaaaaatggttatccagtagtctttgatgctactcattcagttcaacaaccaggtggaaaaggaaatagtagtggtgga

SEQ ID NO: 242652 - DNA, 517 bp, Unknown
  Bacterial polypeptide expressing nucleotide sequence isolated from the Sargasso Sea
cagctgccggccttcctggccaggcagaccgatctggtgcgggcaatggctgaaacaggcgcggtgatcaacatcaagaagccgcagttcctcagcccggaacagatgcgcaacatcgttgacaaattccgcgaatgcggcaacgagcaactgcttctctgtgagcgcggcaccaacttcggctacgacaacctcgtggtggacatgctcggctttggggtgttgaaacgcacctgcgacgacctgccgctgatctttgatgtcacccatgccctccagtgccgcgaccccggcggtgccgcctccggtggccgtcgctcccaggtggtggatctggccaaagcggggatggctgtgggcctggcgggtctattcctcgaagcccaccccgatccgaaacaggcccgctgcgacgggccaagtgctctgcccctggatcagctggagccattcctcagccaggtgaaagcgatcgacgatctggtgaagtcccagccagccctggagatccgttgag

SEQ ID NO: 242653 - DNA, 553 bp, Unknown
  Bacterial polypeptide expressing nucleotide sequence isolated from the Sargasso Sea
atgaatagtataaaagtaaattgtggaaatatagaaatctcaaataataataaaatttgtattattgctggaccttgtcagcttgaaaccgaacagcatgcgatggatatggttggcagaattcaagaaattacaaaaaaatttggactgggatttatttataaaacctcttttgacaaagctaaccgaactagccttaaaggaaaaaggggagctggaattgaagcatctttacctgtttttgataaaataaaaaaagaatataatgttcctattttaacagacattcacaatattgatcaatgttcagaagtcgctgaccacgttgatatattacaaattcccgcttttctttgcagacagaccgatcttttaatagctgctgctaaaacaaataaaattattaatgttaaaaaaggacaattcttagcaccgtgggatatggttaacgttactaaaaaaatttcagattctggaaatacgaatattttagttacagaaagaggtgcaagttttggttacaatacattagtttctgacatgagatcttgcc

SEQ ID NO: 242654 - DNA, 328 bp, Unknown
  Bacterial polypeptide expressing nucleotide sequence isolated from the Sargasso Sea
atgaaagatcaaattatcaaaattaatgatattgaattagcaaacaacaaaccgtttgttttatttggtggtatgaacgttttagaatcgcgcgacttagccatgcgcattgcagagcattatgtagaagtgacaactaaactaaacataccatatgtgtttaaagcatcatttgataaagctaatcgttcttcaatcaactcgtaccgtggcccaggtatggaagaagggttaaaaatatttgaagaaattaaaaacaccttcaatattcctcttatcactgacgttcacgaaccgcatcaagcggcgccgcttgctgaagtggttg

SEQ ID NO: 242655 - DNA, 340 bp, Unknown
  Bacterial polypeptide expressing nucleotide sequence isolated from the Sargasso Sea
tatcttaattacagaaagaggagcaagttttgggtataatacattagtatctgacatgagatcaattccaattatggcacaaacaggatatcctatagttttcgatgcaacacactcagtccaacaaccgggaggaatgggtgataaaagtgggggtgaaagaaaatttgtttcacacttatctagggcggcagtcgctgttggaattgctgctgtttttattgagacgcatcaagatccagataatgctccttctgatggtccaaatatggttccattgaatgaaatggacggtttggtaaataaattgcttgagattgataaactaattaaaaactaa

SEQ ID NO: 242656 - DNA, 757 bp, Unknown
  Bacterial polypeptide expressing nucleotide sequence isolated from the Sargasso Sea
aatggaaaacaaaataattaattgtaatggtatagaaatttctaataataagagaatttctttaatagcaggaccatgtcagcttgaatccgaacagcacgctatggatatggctggaaaaatcaaagaaattgctaataaatttaaaatcggttttatttataaaacatctttcgataaagcaaacagaacaagcataaaaggaaaaagaggagctggtcttgagaaatcgttaccagtgtttgacaaaataaaaaaagaattaaatgttccaattttaaccgatatccataatgaagaacagtgctcacaagttgctgaacatgtagatgttcttcaaatacctgcttttttatgcagacaaacagatcttttagttgcagcggcaaaaactaaaaaaattataaatgtaaaaaaaggtcagtttcttgctccttgggacatggttaatgtaactaaaaaaatttctgactcaggaaataataatattttagtcaccgaacgtggtgctagttttggatacaacacactagtatcagatatgagatcacttcctataatggctaaaaatggttatccagtaatttttgatgcaacacattctgtacagcaacctggaggaatgggtgaaaaaagcggtggccaaagagaatttgtagaacatttagcaagagcagctgttgcagttggagtagctggagtatttatagaaactcatcaagatcctgacaatgcaccatctgatgggacaaatatg

SEQ ID NO: 242657 - DNA, 649 bp, Unknown
  Bacterial polypeptide expressing nucleotide sequence isolated from the Sargasso Sea
aatgaatagtataaatgtaaattgtggaaatatagaaatctcaaataataataaaatttgcatcattgccggaccttgtcagctcgaaactgaacagcatgcaatggatatggctggcaaaattcaagaaattacaaaaaaatttggacttggctttatttataaaacctcttttgataaagctaaccgaactagcctcaaaggaaaaaggggagctggacttgaagcatccttacctgtttttgacaaaataaaaaaagaatttaatattcctattttaacagacattcatagtattgatcaatgttcagaagtatctgatcacgttgacatattacaaattcctgctttcttatgcagacagactgatcttttgatagctgccgcaaaaacaaataaaattattaatgttaaaaaaggtcaattcttagcaccatgggatatggttaatgttactaaaaaaatttcagattctggaaatacaaatattttagtcaccgaaagaggtgcaagttttggttacaatactttagtttctgacatgaggtctttaccaataatggctaagaatggttatccagtgatttttgatgcaaccattcagtacaacaacctggaggtcaaggagagtcatcaggaggtcaaagag

SEQ ID NO: 242658 - DNA, 661 bp, Unknown
  Bacterial polypeptide expressing nucleotide sequence isolated from the Sargasso Sea
atgcaaaatattaaagttaaatgtaatcaaatagaaatttcaaattctaacagattttgtttaatagcaggaccatgtcagcttgaaacagaacaacatgcattagatatcgcaggtaaaatacaagaaatcacaaaaaaatttaatttaggttttatttataaaacatcctttgataaagccaacagaactagcctaaaaggtaaaaggggagctggtttagaaaaatctttgcccgtatttgataaaataaaaaaagaattaaacatacctgttctaactgatattcataacgaagcacaatgtaaaatagtttcaaatcatgttgatgttttgcaaattccagcctttttgtgtaggcagactgacttactaattgcagctgcaaaaacaaaaaaaattgttaatgttaaaaaaggacaatttctagcaccttgggatatggtcaatgtaacaaaaaaaatatcagattcaggaaataataatattttagtaaccgaaagaggagcaagctttgggtacaatactttggtttctgatatgagatcaatacctataatggcaaaaaatggttacccagtaatttttgatgcaacacattctgttcagcaaccaggtggaatgggagaaaaaaggtggtggacaaaaaagaatttgtaga

SEQ ID NO: 242659 - DNA, 763 bp, Unknown
  Bacterial polypeptide expressing nucleotide sequence isolated from the Sargasso Sea
aatgagtacccaaaaaacaatttttgttaatgatatcagtctttgcaatgacaattcgtttgtgcttattggaggattgaatgtccttgaaactaaagacttaaacttgaaagttgcagaaactttcaaggaaattactagtcgtctaaagattccgtacattttcaaggcctctttcgacaaagcaaatcgctcttcaacggactcatacagggggcctggaatggaagaaggtctgcgaatacttgaagatataaaacaggaatttgaaatacctatcctgactgatattcacgaaccacagcaggccaaacctgcctcagaaatagcggatgttcttcaacttccagcgtttctgtctcgacagactgatttggtttctgcattggcaaatacaaaggctgtaataaatattaaaaaagcacagtttttgtctccggatgaaatgggtaacataataaataaatttgaagtcttcggaaacaaaaaactttttctttgcgaacgcggcacaagcttcgggtacaacaatttagtggttgatatgcttggatttaaattaatgaaaaagtttggctatccgttggtatttgacgtgacccattctttgcagattcctggcggtctagggaactcggctgccgggcgaaggggatctatacgtgaaatgggattggcaggcttatctcaaaaaattgcaggtctatttctggaggcacatccagaacccgacaaagcgctttgcgacggtcccagtgccctg

SEQ ID NO: 242660 - DNA, 596 bp, Unknown
  Bacterial polypeptide expressing nucleotide sequence isolated from the Sargasso Sea
aatgattaaaataaatttaaataatttttccattgcaaataatttaccttttgtattaattgcaggaccatgtgtaattgaaaatgaagagcatactttaatgatggcagaagaaatcaataatatttgttctgaattaaaaataaattttatttttaagtctagttttgataaagctaatagatcaagtattaaaagcaaacgaggagtttcaatagaagatgcactagaaatatttcaacaaattaaatctaaatttaattgtccaattattactgatttacatacagaaagtcagtgcaagcttttatctgaaaaccatgatattgatatattacaaatacctgcttttttatgtcgtcaaactgatttgttacttgctgctggacgaacaaataaaattattaacgttaaaaaaggacaattcttagctccaaatgatgttaaaaatatttttgaaaaaatagaatcagttaataataataaaattttgattacagagagaggtactttttttggatataataatttaattaatgattttagaagtttagagataatgaaacaatttaattatccagtaatttttgatggaa

SEQ ID NO: 242661 - DNA, 466 bp, Unknown
  Bacterial polypeptide expressing nucleotide sequence isolated from the Sargasso Sea
gatgaatagcattacaattaattgtggaaaaatcgagatttcaaataataataaaatctgtattatcgctggaccttgtcagcttgaaacagaacaacatgcaatggatatggctggaaagattaaagaaatcactaaaaaatttaatcttggttttatatataaaacttcttttgataaggcgaatagaaccagtcttaaaggaaaaagaggtgcaggtttagaggcctcactaccagtatttgataaaataaaaaaagaattcaatataccattacttactgacatacataatattgaacaatgctctatagtaagtaatcatgttgacatacttcaaataccagcctttctctgcagacaaactgatttattaattgcagcagcaaaaactaataaaattattaatgttaagaaaggtcaatttttagctccgtgggacccatggttaatgtcacgaaaaaaa

SEQ ID NO: 242662 - DNA, 676 bp, Unknown
  Bacterial polypeptide expressing nucleotide sequence isolated from the Sargasso Sea
ttttatttataaaacttcttttgataaggctaacagaactagcattaaaggaaaaagaggcgcaggacttgaaaaatcattaccagtatttgataaaattaaaaaagatttagatataccaatattaacggatattcataatgaagaacaatgtactgtattagcaaaacatgtagacgtattacaaataccagcttttttatgtagacaaactgatttacttattgctgcggctaaaacaaaaaaaattataaatgtaaaaaaaggtcagttccttgccccatgggatatggttaatgtgactaaaaaaatttcagattctggtaatagcaatattttagtaacagaacgtggtgctagttttggatacaatacattggtttctgatatgagatctattccaataatgtcaaaaaatggttatccagtaatttttgatgcaacacattcagtacagcaaccaggtggaatgggtgaaaaaagtgggggccaaagagaatttgttgagcatctagcaagagcagcagttgcagttggagtagcaggagtatttattgaaacacatcaagatccagataatgcaccatcagatggtcccaatatggttcctttaaataaattggaaaatttaattaataaacttttggaaattgataatcttattaaaaatagatga

SEQ ID NO: 242663 - DNA, 415 bp, Unknown
  Bacterial polypeptide expressing nucleotide sequence isolated from the Sargasso Sea
tgtaaaaaaaggccaatttttagcaccctgggatatgaaaaacgtggtagataaattgaaagaatatcaatgcaaaaaaataatgctcacagatagaggagcacaatttggttataacaatttaattgcagatatgcgatcaatcccaattatgcaggactttggttatccagttatttttgatgctactcatagtgctcagcttccgggaggagatgggttgacatcttcaggaatgcgcgcaatgatacccacgcttgctaaatcagcagtagccgctggctgtgatggaatttttatggaggttcataatgatataaataatgcaaagtcagatgccgctactcagtggtcattatcggagcttgaacatttactaattaaacttaaacatattcgtgaggccataatttga

SEQ ID NO: 242664 - DNA, 353 bp, Unknown
  Bacterial polypeptide expressing nucleotide sequence isolated from the Sargasso Sea
cggcaatgaagatattttggtttgtgagcgcgggtatacatttggctacaataatctggtttcagacatgcgttcacttgttgtgttgaaagaaacatcatgccctgtgatttatgacgcaacgcactctcttcagcttcctggaggtaaaggcggctcatcagacgggcaaagtgaatttattattccagtctcaagaggagcagtgggtgttggcattgctggtatattcatcgagactcatccggatccaaagaatgctcttagcgatggaccaaattcactcccactcgataatcttaagccattacttgagcaattattggcaatagatgaaatcgtgaagaaataat

SEQ ID NO: 242665 - DNA, 712 bp, Unknown
  Bacterial polypeptide expressing nucleotide sequence isolated from the Sargasso Sea
aggtaaaattcaagaaattacaaaaaaatttggacttggatttatttataaaacttcatttgataaggctaatagaacaagcttaaaaggaaaaagaggtgcaggtcttgaggcatcattaccggtttttgataaaattagaaaagaattaaatgttccaattttaacagatattcacaattctgaacaatgttctgtagtggcaaatcatgttgacgtacttcagattccagctttcttgtgcagacaaacagacttattaatagctgcagcgaaaacaaataaaattattaatgttaaaaaaggtcagttcttagcaccatgggatatggttaatgtaactaaaaaaatttcagattcaggaaataaaaacattctagttacagaaagaggagcaagctttggttataacactttagtatccgacatgagatcattaccaattatggcaaagaatggttatcctgtaatttttgatgcaacacattcagttcaacaaccaggtggacaaggagtgtcttccggtggtgaaagggaatttgtagaatatttagcaagagctgcagtagctgttggtgttgctggagtgtttattgaaactcatcaagatccagacaatgccccatctgacggtcctaacatggtaccattgaataaattagagaatctattaaaacaattacacgatattgataatctaattaaaaaatag

SEQ ID NO: 242666 - DNA, 766 bp, Unknown
  Bacterial polypeptide expressing nucleotide sequence isolated from the Sargasso Sea
attgcaggcccatgtcagcttgaaactgagcaacatgcaatggatatggcaggtaaaatacaagatattactaagaaatttggagtaggatttatctataaaacttcatttgataaagcgaatagaacaagtcttaaaggcaaaagaggagctggactagatacctcccttccaatttttgataaaataaagaaagaacttaacgttccaattttaacagacatacataatatcgagcaatgttccattgttgcaaaacatgtagatgttttacaaatacctgcttttttatgtcgtcaaacagatttattagtagctgcagctaaaacaaataaaatcatcaacgttaaaaaaggtcaattcttagccccatgggatatggtcaatgtaacaaaaaaaatttcagactctggtaataaaaatattttagttactgaaagaggtgctagttttggttacaatactttagtctcagacatgagagcattacccatcatggcaaaaaatggttacccagtaatttttgatgctacccattcagttcaacagccaggtggtcttggtgaaaaaagcgggggacagagagagtttgtagagcatttagcaagagcagctgttgcagttggggtagcaggagttttcattgaaacacatcaagatcctgataacgctccttccgatggtccaaatatggttcctatagataaattagaaagtctattaaaacaattaactgatatagatagtttgattaaaaataagtgag

SEQ ID NO: 242667 - DNA, 427 bp, Unknown
  Bacterial polypeptide expressing nucleotide sequence isolated from the Sargasso Sea
taaaataattaacgttaaaaaaggtcaattcttagctccttgggatatgattaatgtaataaaaaaaattacggagtccggtaacaaaaatattttaattacagaaaggggagctagttttggatataatactcttgtttcggatatgagagctttgcctataatggctagatttggttttcccgttgtttttgatgcaactcactctgtacaacaacctggtggaatgggagaaaaaagtggtggacaaagagagttcgttccttatttagctcaagcagctgttgccgtcggagtaagtgcaattttcatggaaacacacgaagatcctgataacgcaccatcagatggtccaaatatggttccacttaacgaagttaaagctttgttaaaaaaacttactgaaattgataagattgtaaaatag

SEQ ID NO: 242668 - DNA, 654 bp, Unknown
  Bacterial polypeptide expressing nucleotide sequence isolated from the Sargasso Sea
gtaaaattgaagagatatgtagtgaacaaggaataaactttatttataaatcatcatttgataaagctaatagaacttctttaaactcttctagaggaccaggtatttatgaagccatttcaatttttaatgaaattaaagaaaaaataggctgtcctattattacagatgtacatgaaaaagatcaaatttctttaatttctgaagtagtagacgttatacagattcctgcttttttatgtagacaaacagatttactagttgaagctgcaaaatctaatctaccggttatggttaaaaaaggtcagttccttgctccttgggatatgaagaatgttactgataaattagaaaaaaatggtgatggaggagtaatgatatgtgaaagaggagtaagttttggctataatactctagtatcagattttagagctatccctatattaaaaaatttaggtcatcctatagtttttgatgcaacacactctgttcaacaacctggaggtttaggagataaatctagtggacaaagggaatttgtacctactttggctacagcggctgctgctataggtgtagctgcgatatttatggaaactcatgaagatcctgataatgctcctagtgatggccctaatatgtggccgaattaat

SEQ ID NO: 242669 - DNA, 554 bp, Unknown
  Bacterial polypeptide expressing nucleotide sequence isolated from the Sargasso Sea
tttaacagatattcataatgaaaatcaatgttcaattgttgcacctcatgtagatgttttacaaattccagcattcctttgtagacaaacagatctgttagttgctgctgcaaaaactaaaaaagttattaatgttaaaaaaggtcaatttttagctccatgggacatggtcaacgttacaaaaaaaatatctgaaagcggtaatgaaaaaattcttgtaactgaaagaggagcaagctttggatacaacacgcttgtatctgatatgagatcaatacctataatggcaaaaaatggttatccaatagtttttgatggaacacattctgtacaacaacctggtggtcaaggtgacaaaagtggagggcaaagagaatttgttgaatatttatcaagagctgctgttgctgttggaatagctgcaatttttttagaaactcaccaggatcctgataacgctccatcagatggaccaaacatggtcccactagataaattagatggtttaataaaccaaattgtagaaatagataatttgattaaaaaaaattaat

SEQ ID NO: 242670 - DNA, 471 bp, Unknown
  Bacterial polypeptide expressing nucleotide sequence isolated from the Sargasso Sea
gtcgacaaacgaattttattttaaaagttgtggcacagaatattcccgtgaatataaagaaggggcaatttttatctccttgggatatggaaaatgttgtgaataaggctaagtcacagggtaatgagaacatattagtttgtgagagaggttacagttttgggtataacaatttagtttcagatatgagatctcttgtcattatgaaagaaacacaatgtccagttatttttgatgccacgcattcacttcaactaccaggtgggaagggtagttcatcggatgggcaaagagaatacataaaccccttagcaagagctgcaaccgcagtcggtatagcaggaatttttatagagactcaccctgatcctgataaggctctcagtgatggaccaaattcattgccattggatgagcttaagcctttaatggaaaagttagtaaaaattgataacttagttaaaacataac

SEQ ID NO: 242671 - DNA, 634 bp, Unknown
  Bacterial polypeptide expressing nucleotide sequence isolated from the Sargasso Sea
tatgaatactatctcaattggtaatgtaaaatttcaaaatgggtccttacctttgattgcggggccttgtgtgattgagtctagagatcacagtcttaaaatggcagaacagattcaaaaaattacaaacgcattaagcattccgttaatttttaaaagttcttttgataaggccaatagatcatctattggttcatttcgtggtcctaatagattagacgaaggtttatcaattcttgctgatgtaaaaaaagaattgggaattcctgtccttacagatattcatttacctgatcaatgcggcgtggttgcagaggtttgtgatgttcttcaaattccagctttcttatgcaggcaaactgatctcttgttggcagctggtaaaacaggaaaaacaatcaatattaaaaaaggtcaatttttagcacctggtaaaatgaagtataccgcagaaaaaatagaatctactggaaataaaaacattattttaacagaaaggggaacctcatttggatatagcttagtatcagatatgacatcaatacctgttatgaggaaaactggctatcctgttatttttgatgcaactcactctgctcaattaccaagtgataagaatataacgggaggacaa

SEQ ID NO: 242672 - DNA, 704 bp, Unknown
  Bacterial polypeptide expressing nucleotide sequence isolated from the Sargasso Sea
taaagaaaatacaaaaaattttggacttggatttatttacaaaacgtcgttgataaaggcgaatagaacaagcttaaaaggaaaaagaggtgcaggtctggaagcctcattaccagtttttgataaaattaaaaaagaattaaatgttccaatattgacagatattcataatgctgagcaatgttctatagttgcaaatcatattgatatacttcaaataccagcttttctatgcaggcaaacagacttattaatagctgcagcaaaaacaaacaaaattattaatgttaaaaagggtcaatttttagcaccatgggacatggttaatgttaccaaaaaaatttcagattctggaaataaaaatatactagtaactgaaagaggtgcaagctttggttataatactttagtttcggatatgagatctttgccaatcatggctaagaatggttatccagttatctttgatgcaactcattcagttcaacaaccaggtggtcaaggagagtcttctggtggagaaagagaatttgttgagtatttagcaagagcggcagttgctgttggtgttgctggagtatttattgaaactcatcaagatcctgataatgcaccttcagatggacccaacatggttccattgaataaattagagagtttattaaaacaattaagcgatatagataatctaattaaaaagtagt

SEQ ID NO: 242673 - DNA, 661 bp, Unknown
  Bacterial polypeptide expressing nucleotide sequence isolated from the Sargasso Sea
acctcttttgacaaagctaatagaacaagccttaaaggaaaaaggggaatgggattagaaaaatctttacctatctttgataaaattagaaaagaagttggtgttccagttttaacagatgttcatacagccgaacaatgttcgatcgtttccaaatatgtggatgttttacaaatacctgcatttttatgtcgccaaacagatttactcattgcagctgctaaaacaggaaaaattattaatgttaagaaaggtcaatttttagctccatgggatatggctaatgtcataaaaaaaattgaagagtcaggaaataaaaatattttaataacagagagaggcgcaagttttggatacaatactttagtatcagacatgagagcgttacctattatgtcaaaattcggttttccgattgtctttgatgctacacattccgttcaacaacccggaggaatgggtgaaaaaagtggaggacaaagagaattcgttccacatttagctagagctgcaattgctgttggtgttggagcaatttttatggaaactcaccaagatccagataacgccccatcagatggtccaaatatggtgccgttaagtgaaatgaaaagtttattaaaaaaattaactgaaatagataatttaattaaaaaataat

SEQ ID NO: 242674 - DNA, 417 bp, Unknown
  Bacterial polypeptide expressing nucleotide sequence isolated from the Sargasso Sea
tatgaaagaaaaagagattgaatttgcaaatatcaaattatccaatagcaaacctttcgttttatttggtggcttaaacgtcttagaaacaaaaagtcttggactacaagtggcagaaacatttaaaaatgtttgtgaggctctagatattcaattagtctttaaggcttcttttgataaggcgaaccgttcatcagttgcttcgtttcgtggcccaggactggacgaaggactcagatggttggacgatataaaaaaacaatgcgatgtaccaatcattaccgatgttcatgaggttgttcaggtaaagccagtcgcggaagtcgctgatgtaattcagttgcccgcctttttgtcacgtcaaactgatttaatttgtgcgatggcagcaacggacaaggttataaatataaagaa

SEQ ID NO: 242675 - DNA, 691 bp, Unknown
  Bacterial polypeptide expressing nucleotide sequence isolated from the Sargasso Sea
tcaaaatttaacctttggatttatttacaaaacttcatttgataaagcgaacagaaccagtttaaaaggtaaaaggggagcaggattagatgtatcacttcctgtatttgataaaattaaaaaggaattgaatgttcctattttaacagacattcataatgctgaacaatgtgaaatggtttcaaaacacgttgatgttttacaaatcccagcttttctatgtcgacaaacagacttgttaattgctgcagctaaaacaaataaaattattaatgtaaaaaaaggtcagttcttagcaccgtgggatatggttaatgtaactaaaaaaatttcagactcaggaaataaaaacatcctagttacagaaaggggagcaagttttggatacaacacattagtctctgacatgagatcactacctataatggcaaaaaatggttatccagttattttcgatgccactcattctgttcaacaaccaggtggtcaaggagaatcttctggtggtcaaagagaatttgttgaatatttagcaagagccgcagttgcagttggagttgctggtgtatttattgaaacgcaccaagatcccgacaatgcaccttcagatggaccaaacatggtaccattgaataaattagagaatctattaaaacaattacacgatatagataatctaattaaaaaatag

SEQ ID NO: 242676 - DNA, 491 bp, Unknown
  Bacterial polypeptide expressing nucleotide sequence isolated from the Sargasso Sea
aattccagctttcttatgtagacaaacagatttattaatcgctgctgccaaaacaaataaaataattaatgtaaaaaagggacaatttttagctccgtgggacatggttaatgttacaaaaaaaatttcagactctggtaacgacaatattttggtaacagagcgtggagcaagctttggatataatactttagtatcggacatgagatcaattccaatcatgattaaaaatggatatccagttgtatttgatgcaacacattctgttcagcaaccaggtggtcttggagaaaaaagtggaggacaaagagagtttgtggaatatttagctagagctgcaacagctgttggtgtagctgctatatttatggaaacacatcaagatcctgacaatgctccatcagatggaccaaacatggtccctttaaataaactagaaagtcttttaaaccaaattatagaaatagataaattagttaaaaacttttaat

SEQ ID NO: 242677 - DNA, 459 bp, Unknown
  Bacterial polypeptide expressing nucleotide sequence isolated from the Sargasso Sea
aatggaacacaaaacaattaattgtaatggtatagaaatttccaataataagaaaatttcattaattgctggaccatgccaacttgaatcagagcagcacgcaatggatatggctggtaaaataagggaaatagctagtaaatttaagattggttttatttacaaaacatcttttgacaaagcaaacagaactagcattaaaggaaaaagaggagctggtattgataagtcattaccagtgtttgacaaaataaaaaaagaattaaacgttcctattttaaccgacattcataatgaagaacaatgtgctatagtttctaaacatgtagacattttacaaataccagcttttttatgtagacaaacagatttattaattgctgcagcaaagacaaaaaaaattataaatgttaaaaaaggtcaatttcttgcaccatgggacatggtcaatgttactaa

SEQ ID NO: 242678 - DNA, 757 bp, Unknown
  Bacterial polypeptide expressing nucleotide sequence isolated from the Sargasso Sea
ccacttgaaaacgaaaaacacgccttaacgattgcaaatgatttaaaaaaaattactgaaaagttaggcattggacttatctataaaacctcttttgataaagctaacagaacaagtttaaatggtaagaggggagcaggattggaaaaatctttacctgtttttgacaaaattaaaaaagaagttggaattccagttcttacagacattcattcaatcgaacaatgtgatgtagtatcaaaacatgttgatgttttacagattccagctttcttatgtagacaaacagatttactagtggctgctgcaaagactggaaaagttattaatgttaaaaaaggacagtttcttgctccctgggacatgaccaatgtcacaaaaaaaattgaacaatcaggaaataaaaatattttggttacagagaggggtgcaagttttggctacaacactttggtatcagacatgagatcattacctataatggcaaagattggttacccagttgtttttgatgcaacgcattcagttcaacagccgggcggtatgggagaaaaaagtggaggtcaaagagaatttgtagaacatttatctcgagcagcaatagcagttggggtagcagcagtttttatggaaactcatgaagacccagacaatgctccatctgacggacctaacatggttccattatcgcaaatgccaaaacttttaaaacaactagtcgagatagataatcttataaagaatggcaaaaattaaa

SEQ ID NO: 242679 - DNA, 461 bp, Unknown
  Bacterial polypeptide expressing nucleotide sequence isolated from the Sargasso Sea
agatcttttaattgcagctgctaaaactaataagattattaatgttaaaaaaggacaatttttagctccatgggatatggtaaacgtaacaaaaaaaatttcagactcaggaaataaaaatatattagtaactgaaagaggtgcaagttttggatacaatactcttgtctctgatatgagatctttaccaatcatggccaaaaatggttatccagttatttttgatgctactcattcggtccaacaacctggaggtcttggagaaaaaagtggtggtcaaagggaatttgtagaatatttagcaagagctgctgtagccgttggtgttgctggtgtatttattgaaacacatcaagacccagataatgcaccatcggatggaccaaacatggttccattaaataaattagaaaatttactaaagcaacttacagatattgataatttaataaaaaattagt

SEQ ID NO: 242680 - DNA, 526 bp, Unknown
  Bacterial polypeptide expressing nucleotide sequence isolated from the Sargasso Sea
attgtcagataatgatgtaatcgatgttttacaaataccagcattcttatgtcgccaaacagatttattactatctgcagcaaaaacaaataaaattataaatgtcaaaaaaggtcaatttctagccccaaatgatgtttcaaatatttttgaaaaaatacaatcagaaaataacaataaaattatgataactgagagaggtacaagttttggttataataatttggtaaatgattttagaggtatcgatattatgaagcaatttaaatttccagtaatttttgatgctacacactctgtacaacagcctggaggattaggtgataaaagtggtggtaaaagagaatttattccttctttatgtaaagcagcagtatcaattggtattgcaggaatttttcttgaaactcatgatgatcctgacaatgctccaagtgatggacctaatatgataaatattaatgatttaaataatttattagtgcaattaaaagagtttgaccttatagcaaaaaaatatgcctga

SEQ ID NO: 242681 - DNA, 651 bp, Unknown
  Bacterial polypeptide expressing nucleotide sequence isolated from the Sargasso Sea
ataaagcaaatagaactagtctaaaaggaaaaagaggagccggactagattcatctctaccagtttttgataagataaaaaaagagttaaaaattcctgtattaactgatgtacataatgttgaccaatgttcaattgtatccgagcatgtagatgtattgcaaatcccagcctttctatgtaggcaaacagatttattaattgcagcagctaaaactaataaaattataaatgtaaaaaaaggacaatttttagctccatgggatatggcgaatgttacaaaaaaaatctctgaatctggaaatgacaatatacttgttactgagagaggtgctagttttggatacaacacattagtttcagatatgaggtcgatacccataatggcaaaaaatggatatccaattatttttgatgcaactcattcagttcaacaaccaggaggacttggtgaaaaaagtggtggtcaaagagagtttgtagaacatctatcaagagcagcaactgcagtaggcatagcagcaatttttttagaaacacatcaggacccagataatgccccctctgatgggccaaatatggttccattaaataagttagaaaatttaatttatcaaatagttgaaatcgataatcttgtaaaaaaataac

SEQ ID NO: 242682 - DNA, 463 bp, Unknown
  Bacterial polypeptide expressing nucleotide sequence isolated from the Sargasso Sea
atgagcattttaaaaattaaaaactttacgataggaaacaatgagccaatggtgcttatgggtggagtaaatgttttagagtcagaatcagttgtaatggcagtcgccgaacaattcgcaaaagttacatcaagtttaaatattaattggatttttaaggggtcctttgataaagcaaaccgaagttctatttcttcttttaggggcccaggacttgatgagggcttaaaaatgcttgaaaaagtaaaatcagagtttgatgctcctgttcttactgatattcatgagccttctcaggcagatccagtttcaaaaatttgtgacattattcagataccagcatttttgtgcagacaaactgatttggtgattgccgcggcgaaaactaagaaaattatccaattcaaaaaacctcaattcctttctgcccctgagatgaagaatgtcatcgagaagtgcaatc

SEQ ID NO: 242683 - DNA, 461 bp, Unknown
  Bacterial polypeptide expressing nucleotide sequence isolated from the Sargasso Sea
aaccaatttattaaaatcagcagccgaaactgataagcctgtaaacgtaaaaaaaggacaatttttagcaccttgggatatgaaaaatgtagtacaaaaattagaagaatttggatgtaaaaagattttgcttacggatagaggaacacagtttggttataacaatcttgtggcagacatgaggtctatcccgattatgaaggattttggccatcctgttgttttcgatgctactcatagtgcccagttgccaggagcaaatggtttaacttcatcaggcatgcgtggaatgatacctactctagcaagggcagcagtaggtgcaggttgtgatggggtttttatggaggtgcataatgatgtgaagtctgcaaaatcagatgctgcgacacaatggcctctatcagaacttgaaccgttattattaaaattaaaaattatttgggatgcttcaaggtgaa

SEQ ID NO: 242684 - DNA, 693 bp, Unknown
  Bacterial polypeptide expressing nucleotide sequence isolated from the Sargasso Sea
ccaattagaaacagaacaacatgctatggatatggctgggaaaattaaagaaattgcaacaaaatataaaattggtttaatttacaaaacttcatttgacaaagctaatagaacaagcattaaaggaaaaagaggagctggtttaggtaattctttgcctgtatttgataaaattaaaaaggaattaaatattccagttctaacaaatattcataatgaagaacaatgttctgtagttgcacctcatgtagatgttttgcagataccagcatttttatgtaggcaaactgatttactaatagctgcagcaaaaacaaacaaaattataaatgttaaaaaaggtcaattcctagctccatgggacatggttaatgtaacaaaaaaaatttcagattcaggaaatgaaaatattttagtaactgaacgtggtgcaagttttggttataatactttggtatctgatatgagatcaattcctataatggcaaaaaatggttatccaattgtatttgatgcaacgcattcagttcaacagcctggaggccaaggagaaaaaagtggtggacaacgagaatttgtagaacatttatcaagagcagctgtagccgtcggtgtagctgctatttttttagaaactcatcaagatcctgataacgctccttcagatggtcccaatatggttccgttaaataa

SEQ ID NO: 242685 - DNA, 361 bp, Unknown
  Bacterial polypeptide expressing nucleotide sequence isolated from the Sargasso Sea
aatgaataaaatagatttaaataatttttccattgcaaataatttaccttttgtattaattgcagggccatgtgtaattgaaaatgaaggccatactttaatgatggcggaagaaattaataatatatgttcagaattaaagattaattttattttcaaatcgagttttgacaaagctaatagatcaagtattaaaagtaaccgaggagtatcattggaagatgcattaaaaatatttaataaaattaaatctaaaattaattgtccaattattactgatttgcatacagaaaggcagtgccaaattttaacagaaaatcaagatatagatatattacaaataccagcatttttatgtcgt

SEQ ID NO: 242686 - DNA, 667 bp, Unknown
  Bacterial polypeptide expressing nucleotide sequence isolated from the Sargasso Sea
catgaataaagttaaattacataattttagtatatcaaataatttaccatttgttttaatagtggggccgtgtgttattgaagatgaaaaacatagtttgtttatggcagaaaaaataaacaatatatgtgaagatttaaaaattaattatatttataaatcaagttttgataaagccaatagatctagcatatctagttccagaggtattggattaaaagaggcaattaagatttttaaaaaaattaaaaataattttaactgccctattataactgatgtacataacgaatatcaatgtgaatttctaacaaatgaagattccattgatgtaattcaaataccagcttttttatgtaggcaaactgatcttttaatagctgcaggcagatcagacaaagttttaaatgttaaaaaaggtcaatttttgtcacctcatgatgtaaaaaatatttttaaaaaaatcgaaagtacaaataataacaaaatattgattacagaaaggggcacttcatttggatataataatcttgtaagtgattttaagggtattgagataatgaaaaaatttaattatccaatcatttttgacgccacccattctgttcaagaacctggaggtctaggaagtaagagtgggggaaaagagagtttatatctcctttag

SEQ ID NO: 242687 - DNA, 463 bp, Unknown
  Bacterial polypeptide expressing nucleotide sequence isolated from the Sargasso Sea
atgaaagatattttaataaaagattttaaaataggaaatgatcaagatttgaccttgatgggtggaatgaatgttcttgaatcagaagagacagctcttttagtagccgaaaagtttaaagaagttactgataaattagaaataaattggatttttaaagcctcctttgataaagccaatagaagttcaattgaatcctttagaggtccaggtatggatgagggactcaaaatacttgaaaaagtctcatcagcatttgatgttcctgtaattaccgatatacatgagccaagccaggctaatcctgtaagtgaagtttgcgaagttattcaaattcctgcatttctatgcagacaaaccgatcttgtttcagcagctgcaaaaacaaagtcagctattcaatttaagaagccacaatttctttcagcagctgaaatgaaaaatgtgttgaaaaatgtaagtc

SEQ ID NO: 242688 - DNA, 618 bp, Unknown
  Bacterial polypeptide expressing nucleotide sequence isolated from the Sargasso Sea
caggtgtcgatgaaggtcttagtattctctctaacttaaaaaaagaattcaaggtgccaataatttcagatgtgcatacagttgaagaggtttccagggcttcagaagttctcgatataattcaaatacctgcatttttaagtaggcagactgacttaattaaagaagctgcttctaccaaaacccctatcaatataaaaaaagggcagttcatggctcctgaagacactaagaacataatcaataaatgtgaacattttgggaataaacaaatcatgatttgtgaaagaggaagctcttttggatataacaatttagtagttgatatgttgggaatggttcaattaaaggaatctaattaccctgttatttttgacgttacgcattctttacaaagaccaggaggtttgggagataggactgatggtaggggctcaaaagtattagacctagccagggcaggaatggctcttggtttggcaggactttttttagaaactcaccctgatcctgaaaaggctttgtgcgatggtccttgtgctttaaaaatagattcacttgaagacttcctagtgcaaataaaagccatagatgatttagtaaaatcgtttaattaaa

SEQ ID NO: 242689 - DNA, 493 bp, Unknown
  Bacterial polypeptide expressing nucleotide sequence isolated from the Sargasso Sea
atgaaaagcattactgtaaattgtaataatattgaaatttcaaacaataaaagaatttgtttaattgctggaccttgccagctagaaactgaacagcatgctatggatatggctggaaagattaaagaaattacctcaaaatttaatattggctttatttataaaacatcttttgacaaagctaatagaactagtcttaagggaaaaaggggagcgggtcttgataaatctttacctgtttttgataagataaaaaaagagttaaaagtacctattttaactgacattcataatatagaccaatgttcagtagtagcaggacatgtagatattttacaaattccagcatttctttgcaggcaaactgatttattaattgcggcagcaaaaacaaataaaattattaatgtaaaaaagggtcagttcttagcaccatggaatatggtaaatgtaactaaaaaaatttctgactctggaaataataatatttagt

SEQ ID NO: 242690 - DNA, 634 bp, Unknown
  Bacterial polypeptide expressing nucleotide sequence isolated from the Sargasso Sea
atgaacgctcatactatttcggttgccggcattccggtagccaaccatttaccctttgtgctgtttggtggcatgaatgtgcttgaatcacgcgatctggcaatgcggattgccgaacactatgtggaagtcaccggcaagctgggtattccttatgtgtttaaagcctcgtttgataaagctaaccgctcgtctgtgcactcgtatcgtggcccaggccttgatgaaggcttaaaaatatttgaagaaattaaacgtacctttaaggtgccactgattaccgacgtgcatgagccgtatcaggctgcaccggtggcggaagtagtagatgtgatccaactgccggcgtttttagcccgccaaactgatttagtggtggccatggcaaaaaccggtgctgtgattaacgtgaagaagccgcagtttttagcaccacatgaaatgcgccacattattaccaagttcaaagaagccggtaacgaacaagtactgttgtgtgagcgcggcagctgctttggctataacaatttagtggttgatatgctgggcatggatgaaatgaagcagtacggcccggtgatctttgatgcgactcatgcgctgcaaaagccgggtgggcgtgaaagctctgccg

SEQ ID NO: 242691 - DNA, 760 bp, Unknown
  Bacterial polypeptide expressing nucleotide sequence isolated from the Sargasso Sea
catgccagcgcgtcgggttgagcttgggccgatcaccttctccaatgaccagccctttgccctgttgggcggcgtgaacgtcctggaggacctggacttcgccctgcgcagtgcggcgcattacaaagatgtttgccagcgcctgaagattcccctggtcttcaaggcttcgtatgacaaagccaaccgatcatcggtgtattccttccgcggtcctggcctcaaggacggtctcgcgatcctccaagccgttaaggatcgccatgggattccggtgattaccgatgtccacagcccagaggaggcggtggccgctgccaaggtggcagacatcatccagctacccgcattcctggcacgtcaaaccgatctcgttcgggcgatggccgaaacaggatctgtgatcaacattaagaagccgcagttcctcagcccggaacagatgcgcaacatcgtggagaagttccgcgaatgtggcaacgagcagctgctgatctgcgaacgcggcagcaattacggttacgacaatctcgttgtggacatgctcggttttggcgtcatgaaacgtagctgtgatgatctgccgttgatctttgatgtcacacacgccttgcagtgccgtgatccaggcggcgctgcctccagcggccgtcgctcccaggtcgtggacctggccagagctggaatggccatcggtctggcgggtttattcctcgaagcgcatcccaacccagaccaagcccgctgcgatgaccgagcg

SEQ ID NO: 242692 - DNA, 221 bp, Unknown
  Bacterial polypeptide expressing nucleotide sequence isolated from the Sargasso Sea
aggaggcatgggagataaaagtggaggacaaagagaatttgtagaatatcttgcgcgagcagctattgccgtaggtgttgcagcagtttttatggaaacacatcctgatcctgacaacgcaccatcagatggaccaaacatggttccattatcagaaatgcctaaactattaaatcaactcgttgaaattgataaattaataaaaaatggcaaaaattaaa

SEQ ID NO: 242693 - DNA, 795 bp, Unknown
  Bacterial polypeptide expressing nucleotide sequence isolated from the Sargasso Sea
tagaaatttcaaacaataataagatttgtattattgcaggtccatgccaacttgagacagagcaacatgcaatggatatggctggaaaaattaaggaaatttcctcgaaatttgggcttggatttatttataaaacttcatttgataaagcaaatagaacaagtttaaaaggcaaaaggggagcgggattagatgcatcacttcccatatttgataaaattaaaaaggaattgaatgttcctattttaacagacatacataatgctgaacaatgtgaaattgtttcaagacatgttgatgttttacaaattccagcttttttatgtcggcaaacagacttattaattgctgcagctaaaacaaataaaattattaatgtaaaaaaaggtcagttcttagctccgtgggatatggtaaatgtaacaaagaaaatttcagactcaggaaataaaaatattctagtaactgaaagaggtgcaagttttggttataacactttagtttctgacatgaggtctttaccaataatggctaagaacggttatccagtaatttttgatgcgactcattcagttcaacaacctggtggacaaggagagtcttcgggcggtcaaagagaatttgtagaatatttagcaagagctgctgtggctgttggtgttgctggagtatttattgaaactcatcaagatccagataaagcaccttcagatggtcctaacatggtaccattgaataaattagaaaatctattaaaacaattactcgatatagataatctaattaaaaaatagt

SEQ ID NO: 242694 - DNA, 516 bp, Unknown
  Bacterial polypeptide expressing nucleotide sequence isolated from the Sargasso Sea
tatgaatacaattacaattggtaatgtaaaatacgaaagtggatcctttccattgattgccggtccatgcgttattgaatcaagagatcatatattaatgatggctgagcagattcaaaaaattactagcaccatgaatattccattaatatttaaaagctcttttgataaagctaatcgttcagcaatagattcttttagagggcctgataatctagatacaggactgtcaatattaaatgacgtcaaaaccgaacttggaattccggtattaacagatgttcatcttcctgatcagtgtaaggcagtagctgaggtttctgatgttttacaaattccggcttttctatgtaggcagactgatttattaattgcggcaggaaaaactggaaaagcaataaatataaaaaaggggcaattccttgcgcctggcaaaatgaaacatgttgcagaaaaagttgaatcaacaggtaataaaaatattttactaactgaaagaggaacctcttttggata

SEQ ID NO: 242695 - DNA, 451 bp, Unknown
  Bacterial polypeptide expressing nucleotide sequence isolated from the Sargasso Sea
gctgtgataaatataaaaaaagcacagtttttatctccggaagaaatgggtaacataataaataaatttgaagtttccggaaacaataagctgattctttgcgaacgtggtacaagcttcggctacaacaatttagtggtcgatatgcttggttttaaagtgatgaaaaagtttggctatccactggtatttgacgtgactcattctctgcagatccctggcggactaggcaactcagcagcaggtcgaagggaatccatacttgaattgggattggcaggcttgtctcaaaaaattgcaggtctgttcctggaagcgcatccggaccctgacaaagcactttgcgacgggcctagcgccttgaggctggatcaacttgaaccattcttggaacagatgaaggcagttgatgaactggtaaagtcttttgaaagactgtctacagcataaa

SEQ ID NO: 242696 - DNA, 556 bp, Unknown
  Bacterial polypeptide expressing nucleotide sequence isolated from the Sargasso Sea
actgatattcacaattgaggaacaatgttcaattgttgccccacatgttgacgttttacaaattcccgcattcttatgtcgacaaacagatttattagtagctgctgcaaaaacaaaaaaaattatcaatgtaaaaaagggtcagtttttagctccatgggatatggtaaatgtaacaaaaaaaatatctgaatcagggaataataatattcttgtaacagagagaggggctagttttggatataatactttagtaacggatatgagatcaatacccataatggcaaaaaatggttatccgattgtttttgatgccactcactcagttcagcaaccaggtggtcaaggggataaaagtggcggacaaagagaatttgttgaacatttatctagagcagctgttgcagttggtgttgctgctatttttatagaaacacatcaagatcctgataacgctccttctgatgggccaaatatggttccacttaataaattagataatcttataaatcagatagtagaaatagataatttaataaaaaaaaataatgtctaa

SEQ ID NO: 242697 - DNA, 568 bp, Unknown
  Bacterial polypeptide expressing nucleotide sequence isolated from the Sargasso Sea
gctgcaaaatcatataatggaaaataaattagttaattgtaacggtatagaaatctctaataaaaataaaatttgtttaatagctggaccttgtcagttagaaactgaacagcatgccatggatatggccggtaaaattaaagaaatcgcatcaaagtataaaattggtttaatttataagacttcttttgataaagctaatagaacaagcattaaaggtaagagaggtgctggtttagaaaattctttaccagtatttgataaaattaaaaaggatttgaatattccagttctaacagatgtacataatgaaaaacaatgcggagttgttgcgccccatgtagatgttttgcagataccagcatttttatgtaggcaaactgatttattaatagcagcagcaaaaactaataaagttataaatgttaaaaaaggacaatttttagctccatgggatatggttaatgttacaaaaaaaatttcagattcaggcaatgataatattttagttaccgaacgtggagcgagttttggttataacactttagtatcagatatgagatcaatt

SEQ ID NO: 242698 - DNA, 520 bp, Unknown
  Bacterial polypeptide expressing nucleotide sequence isolated from the Sargasso Sea
gtgttcggtagttgctaatcacgttgatgttttacaaatcccagcatttctttgccgacaaacagatttattaattgctgctgctaaaactggaaaaattattaatgtaaaaaaaggacagtttctagcaccttgggatatggtgaatgttattaaaaaaattgaagagtcaggaaataaaaatattttaatcacggaaagaggagcaagttttggttataatactcttgtatctgacatgagagctttgccaataatgtcaagatttggttttccaattgtttttgatgctacgcactcagttcaacagccaggtggcatgggtgaaaaaagtggaggacaaagagagtttgttccttatttagcccgagctgcaatagctgtaggagttggagcaatttttatggaaacacatgaagatcctgacaatgcgccatcagatggtccaaatatggtgccattaaatgaagtaaaagcattattaaaaaaattaactgaaatagataagttagttaaataa

SEQ ID NO: 242699 - DNA, 735 bp, Unknown
  Bacterial polypeptide expressing nucleotide sequence isolated from the Sargasso Sea
gttgatgatgacagcacgtcaaatccagctcggcgacatcaccttcgccaatgaccgcccctttgcgctcctcggcggcgtgaatgtgctcgaggatctggacttcgccctgcgctgcgcgggccactacaagcaggtctgtgaacgcctgggcatcccgctggtgttcaaggcgtcctacgacaaggccaaccgctcatcgattcactccttccgcggccctggcctgaaggacggcctgggcatcctccaagcggtcaaggacacccacggcatcccggtgatcacggatgtccacagccctgaggaggccgctgctgccgccaaggtggccgacatcattcagctgcctgccttcctcgcccgccagaccgatctggttcgcgccatggcggaaaccggggcggtgatcaacatcaagaagccgcagttcctcagcccggaacagatgcgcaacatcgtcgataagttccgcgaatgcggcaacgagcagctgctgatctgcgaacgcggcaccaacttcggttacgacaacctggtggtggacatgctcggcttcggggtgatgaagcgcacctgtgatgagttgccgctgatctttgatgtgacccatgctctccagtgccgcgacccgggtggtgccgcctccggtggccggcgctcccaggtggtggatctggccaaatccggtatggccgtaggcttggccggtctgttcctcgaagcccatccgga

SEQ ID NO: 242700 - DNA, 706 bp, Unknown
  Bacterial polypeptide expressing nucleotide sequence isolated from the Sargasso Sea
gcaatggatatggcaggaaaaatcaaggaaattactgcaaaatttgatcttggatttatctacaaaacctcatttgataaggctaatagaacaagtttaaaaggtaaaagaggagcaggtctagaagcatcattacctgtgtttgataaaattaaaaaagaattaaatgtaccaattttaactgatatccataatgctgaacaatgtgaaatagtttctaaacatgtagatgttttacaaataccggcgtttctttgcagacaaacagatttattaattgctgcagcaaaaacaaacaagattataaatgttaaaaagggtcagtttttagccccatgggatatggtaaatgttacaaaaaaaatttcagacagtggaaataaaaatatcttagtcacagaaagaggtgcaagctttggttataacactttagtctcagatatgagatctttacctattatggctaagaatggctacccagttatatttgatgcaacccattctgtacaacaaccaggaggtcttggtgaaaaaagtggtggtcaaagagaatttgtagaatatttagcaagagctgctgtcgcagttggagttgcaggcgtgtttatagaaactcatcaagatcctgataatgctccatctgatggacctaatatggtaccgttagataaattagaaaatttattaaaacaactttcagatattg

SEQ ID NO: 242701 - DNA, 319 bp, Unknown
  Bacterial polypeptide expressing nucleotide sequence isolated from the Sargasso Sea
tgctagttttggttacaatactttagtctcagatatgagagcattacccataatggcaaaaaatggttacccagtaatttttgatgcaacccattcagttcaacagccaggtggtcttggtgaaaaaagtgggggacagagagagtttgtagaacatttagcaagagcagctgttgcagtaggagtagcaggagttttcattgaaacacatcaagatcctgacaatgctccttctgatggtccaaatatggttcctttagataaattagaaagtctattaaaacaattaactgatatagatagtttaatcaaaaattag

SEQ ID NO: 242702 - DNA, 586 bp, Unknown
  Bacterial polypeptide expressing nucleotide sequence isolated from the Sargasso Sea
atgagtaacatagagctcactgatcgtacaatcgaactaaataatctgaaaatctcaaataagtacccattaacacttatttctggtccatgccagctagaaagcctcgagcatgctatgatgatcgcagaaaaattactagaaatctgtgaccgtaatgatatcaaccttgttttcaaatcgtcttttgataaggccaaccgcacttcacatttatcaaagcgaggtattggcattgaggaaggtctaaaaatttttcaaaaattgagaaatagcctgaatatatgcacattaacggatgtgcacacaaccgaacaatgcgagcttgtagcaaaagaagtcgatattcttcaaatacccgcttttctatgccgacaaacggatttaatcatcgcagctagtaaaacgaataaacccgtcaatataaaaaaggggcaatttctatcccctgctgagatgcagcaggtggctgcaaaattcatatctgccggcaacgaaaatttactcctttgtgaacgaggcactacctttggctacaatgatttggtttgcgacatgcgttccctagaggtccttagacaaagtg

SEQ ID NO: 242703 - DNA, 535 bp, Unknown
  Bacterial polypeptide expressing nucleotide sequence isolated from the Sargasso Sea
atgagattaagaaattttaatataggcaattcagaaacattgactctaatgggaggtatgaatgtgctagagtcaagagacttggctatgcatgttgcagaaaaatttaaggagtcttgtgaaaaatataatattaattatatcttcaagggatcatttgataaggcaaacagaagctctataaattcatttagaggacctggattggatgaggggttaaaaatacttcacgaagtttcaaactcatttgatgtcccagtaattacagatattcacgaagctgatcaagcaaaaccagtaagtgaggtttgtgaggttgtccaaattcctgcttttttagcaagacaaactgatctagtttctgctgctgctaaaacaagttcaataattcaatttaagaaaccgcagtttctttcagcacctgagatggaaaatgttgtagagaaatgtatctcagcagggaatgaaaatattattctttgcgaaaggggcaatacatttggatacaataatttggttgtagatacattgaatt

SEQ ID NO: 242704 - DNA, 630 bp, Unknown
  Bacterial polypeptide expressing nucleotide sequence isolated from the Sargasso Sea
gagtggaagaaggtctgcggatacttgaagaggtaaaacaagcatttgaaataccgatcctgacagatattcacgaacatcagcaggccgaacctgccgcagaagtagccgatgtacttcaactgccggcgtttctgtcacgccaaactgatctggtttctgcattggcaaaaacaaaggctgtgataaatataaaaaaagcacagtttttatctccggaagaaatgggtaacatagtaaagaaattcgaagtttacgggaacaaaaagctgattctttgcgaacgcggtacaagcttcggctacaacaatttagtggtcgatatgcttggttttaaagtgatgaaaaaatttggctatccgctggcatttgacgtgactcattctttgcagatccctggcggaatgggcaactcagctgcgggacgaagtgactccatacttgaactgggattggcaggcttatctcaaaaaattgcaggtctgtttctggaagcacatccagaccctgacaaagcactttgcgacgggcccagcgccctgaggctggatcagcttgaacctttcttggaacagatgaaggcagttgatgaactggtaaagtcgcttgaaacactggacacagcataaa

SEQ ID NO: 242705 - DNA, 600 bp, Unknown
  Bacterial polypeptide expressing nucleotide sequence isolated from the Sargasso Sea
catggaaaataagatagttaattgtaacggaatagaaatatcaaacaaaaacagaatttgtttaatagcaggaccgtgccaacttgaaactgaacaacatgcaattgatatcgcaggcaagattaaagaaattgcaagcaaatatagtattggatttatttataaaacatcttttgataaagctaacagaacaagtcttcaaggtaaacgcggtgctggattagaaaaatctttgccagtatttgataaaattaaaaaagatttaaatataccagttctaacagacatacataatgaagaacaatgtactttagttgctccccatgtagacgttctacagataccagcatttttatgtagacagacggatttattaattgctgcagcaaaaacaaataaaattattaatgttaaaaagggtcaatttcttgcaccatgggatatgattaatgtaacaaaaaaaatttatgactcaggaaatcaaaacattttattaacagaaagaggtgctagctttggttataatacgttggtatcagatatgagatcaatacctataatggcaaaaattggataccctgtagtatttgatggcacaca

SEQ ID NO: 242706 - DNA, 614 bp, Unknown
  Bacterial polypeptide expressing nucleotide sequence isolated from the Sargasso Sea
catgttaatcaataatatttttagaagtgaaaatttagatattattgctggtccttgtgtcattgaaagtgaagatcatgcactctttatgtcagaaaagttgaacagcatatgcaaaaaattaaaagttaaccttgtgtataaaagttcttttgataaggcaaatagaacttctcaagaatcttttagaggcttagggattcaagatggattatctattcttcgcaaagtaaagaataatattggcgttttagttttgacagatattcacgaaccaatgcaagcagatatggtttccgaaattgttgatattattcaaattcctgcgtttctatgtcgtcagaccgatttacttaaagcagcagctggaacaggtaagattgttaacattaaaaaaggtcagtttttagccccatgggatatgaaaaatgtagttaaaaagttagaaagttttggttgtaaaagaatacttttaactgatagaggaacacaatttggttataataatttaattgcagacatgaggtcgattcctttgatgaaagactatggttatccagttatatttgattgcactcatagtgtacagttgcctggaggtaatggaacctttt

SEQ ID NO: 242707 - DNA, 367 bp, Unknown
  Bacterial polypeptide expressing nucleotide sequence isolated from the Sargasso Sea
aaaaatatcggactctggtaacgaaaatattttagtaactgaacgaggagcaagttttggctacaacactttagtttcggatatgagatcaattcctataatggcaaagaatggttatcctatagtatttgatgcaacccactcagtacaacaacctggtggtttaggagagcagagcggtggccaaagagagtttgttgaatatctatcaagagcagctgcagctgtaggtgtagcagcaatatttcttgaaacacaccaagaccctgataatgcaccttcagatggaccaaatatggttccgttaaataaattagatagtttaattaatcaaatagtagagatagataaattaattaaaaaataa

SEQ ID NO: 242708 - DNA, 724 bp, Unknown
  Bacterial polypeptide expressing nucleotide sequence isolated from the Sargasso Sea
aatggatatggctggtaaaattcaagaaattacaaaaaaatttggacttggatttatttacaaaacttcttttgacaaggcgaacagaacaagtttaaaaggaaaaagaggtgcgggtctagatgcatcattaccagtttttgataaaattaaaaaagaattaaatgttccaattttaactgatattcataacgcagaacaatgttctttagttgccaatcatgttgatgttttacaaattccagcttttttatgcagacaaacagatctattaatatctgcagctaaaacaaaaaaaattattaatgttaaaaagggtcagttcttagcgccatgggacatggttaatgtaactaaaaaaatctcagactcgggaaataaaaatattttagtaacagagagaggtgctagttttggttacaatactttagtttcagatatgagatctttgccaatcatggctaaaaatggttacccagttatttttgatgcaactcactcagtccaacaaccaggtggacaaggggagtcatccggcggacaaagagaatttgtagaatatttagcaagagcttcagtagcagtaggtgttgctggagtgtttattgaaacacaccaagatcctgacaacgctccttcagatggacccaatatggtaccattgaataaattagagaatctattaaaacaattaaacgatatagataatctaattaaaaaatag

SEQ ID NO: 242709 - DNA, 754 bp, Unknown
  Bacterial polypeptide expressing nucleotide sequence isolated from the Sargasso Sea
gccctgccaactagaatccgaacaacatgctatggatatggcgggtaaaattaaagaaatttctaataaatttaaaattggttttatttataaaacatctttcgataaagctaatagaactagcattaaaggaaaaagaggggcgggcttagaaaaatcattaccagtatttgataagataaaaaaagatctaaacgttcctattttaactgatattcacaatgcggaacaatgttctgttgttgcaaaccatgtagatgttcttcaaatacctgcttttctatgtagacaaacagatttacttgttgctgcagctaaaacaaaaaaaattataaatgttaagaaaggtcaattccttgcaccttgggacatggtaaatgtaactaaaaaaatttcagactctggaaataataatattttagttacagaacgaggggcaagttttggatacaatacattagtttctgatatgaggtctatacctataatggcaaagagcggttatccagtaatttttgatgcaacacattcagttcaacaaccaggtggaatgggagaaaaaagtggtggccaaagagaatttgtagagtatttagcgcgtgctgctgtagcagtaggagtagcgggagtatttattgaaacacatcaagatcctgacaatgctccttcagatggacctaatatggttcctttaaataaattagaaaatttgattaatcaactttttgaaattgataatcttgtaaaaaaataa

SEQ ID NO: 242710 - DNA, 683 bp, Unknown
  Bacterial polypeptide expressing nucleotide sequence isolated from the Sargasso Sea
tcattttatcttcaaatctagttttgataaagcaaacagatcaagcataaatagtaatcgaggtgtagatataaatcaagctgaaaaaatatttaataagattaaatcaatatataattgtcctatcttaaccgatgttcataatgaaagtcagtgtgagtttttttcaaattcagaaagcgttgatgttcttcaaataccagcgttcctctgccgacaaactgatttactgattgcagcagctaaaacaaaaaaaattgtaaatgttaaaaaagggcagtttttatctcctcatgaagttccaaatatatttaataaaattgaaagtgctggcaattataatattatgattactgaaagaggtacatcatttggttataataatttaattaatgattttaaatcattagatattatgaaaaattttcaataccccgttatttttgatgctacacattctgtgcaggagcctggaggtatgggagaaaaaagtggaggcaagagagagtttgtttctactttagctaaagctgctgttgcagttggagttgctggaatttttattgaaacacataatgatcctgacaatgcacctagtgatggtccaaatatgttgcagattgaaaacctcgaaagtttaatttcgaaattgattgagttagatactgtttcaaaaaaataat

SEQ ID NO: 242711 - DNA, 669 bp, Unknown
  Bacterial polypeptide expressing nucleotide sequence isolated from the Sargasso Sea
aatcttcatttgataaagcaaacagaacgtctatatcttctgaaaggggaattggaattgatgatggtcttgaaatattatctagagttaagaaagaatttgatttaaccactattacagatattcatgatgcatctcaatgtcataaagtatcctgtgttgttgatattttacaaatcccagcctttttatgtaggcaaacggatttattagttgctgcagctaaaacagattgcgttttaaatgttaaaaagggtcaatttttggctccatgggatatgcatcaagttgtaaaaaaaataaaaagttcaggtaataataaggttttagttactgaaagaggagtttcatttggttataataccttaatttctgatatgcgagctatacctgaattaaaaaaatcaaattgccctgtaatttttgatgccacgcatagcgttcaacaacctggtggaaaaggtaatagctctggtggagaaagaaaatatgtatctattctttctagagctgctattgcagttggtgtggctggtatatttatggagacacataaagatccagatagcgcaccttcagatggcccaaatatgatacctctagatgagctcagcaaccttttaaaattattaaagaattttgatatcttatcaaaatcaaatatttgaa

SEQ ID NO: 242712 - DNA, 471 bp, Unknown
  Bacterial polypeptide expressing nucleotide sequence isolated from the Sargasso Sea
aatgaaaaatcacatagtcaaatgctcaaatattgaaatttcaaataaaaaaccttttaccttgattgctggcccatgccaacttgaaagtgaggcgcatgcaattaaaatttcaacagaattaaaaaaaataacaaatgaactaggtattaatctaatttataaaacttcttttgataaagctaatagaacaagcttaaagggtaaaagaggaataggcttagaaaaatctcttcctatttttgataaaataaaaaaagaggttggtatacctgtgttgacagacgtccatacagctgaacaatgttcaattgtagccaaacacatcgatgttttacagataccggcttttttgtgcaggcagacagatttactaatagcagcagctaaaacaggtaaagtaattaatattaaaaaagggcaattcttagcaccctgggatatggcaaatgtaattaaaaagattgagga

SEQ ID NO: 242713 - DNA, 757 bp, Unknown
  Bacterial polypeptide expressing nucleotide sequence isolated from the Sargasso Sea
atgttaaataaagtagttaaatgtaataattttgagatatcaaataataaaaaaatatctcttatttcaggaccttgtcagcttgaaactgaacagcatgcaatggatatggcaggtaaaattaaagaaattgcatcgaaatttgaaattggttttatatataaaacctcatttgacaaagctaatagaactagcctgaaaggaaaaagaggcgcaggtctagattcatcattacctgtattcgataagattaaaaaagaattaaatatcccagtattaacagatgtacataatgttgaacaatgttctattgtatctaagcatgttgatgtattgcaaatacccgcattcttatgtcgccagacagatttattagttgctgctgccaaaactaataaagttattaatgttaaaaaaggccaatttttagctccatgggatatgacaaatgttacaaaaaaaatttcagaatcaggtaatgataatattcttgttacagaaagaggtgcaagctttggttacaatacactcgtttctgatatgagatctatacctataatggcaaaaaacggttatccaattgtatttgatggaacccattccgtccaacaacctggtggacttggcgaaaaaagtggaggacaaagagaatttgttgaatacttatcaagagctgctactgcagttggtatagcagcaatttttttagaaactcatcaagagccagataatgcaccatccgatggccccaacatgg

SEQ ID NO: 242714 - DNA, 789 bp, Unknown
  Bacterial polypeptide expressing nucleotide sequence isolated from the Sargasso Sea
ttgctaacgataagccattcaccttgattgcaggtccttgccaattagagagcgagcctcatgcaataaaaatttctactgaattaaaaaaaattacttctgatctgggaataaatctaatttataaaacttcttttgataaagctaacagaacaagcctaaaaggaaaaagaggaataggcttagaaaaatctttacctatatttgataaaatcagaaaagaagttggggttcctgttttaacagatatccatactgctgaacaatgttcggctgtatctaaacatgtggatgttttgcaaataccggcgtttttatgtcgtcaaacagatttgcttattgctgcagcaaaaacaggaaaaataataaatgttaagaaaggtcaatttttagctccatgggatatggctaatgtaattaaaaaaatagaagagtcaggaaacaaaaatattttaataacagaaagaggagcaagttttggatacaatactttagtatctgacatgagagctttacccattatgtcgaagtttggttttccaattgtttatgatgctacgcattctgttcaacaacctggaggaatgggagaaaaaagtggaggacaaagagaatttgttccctatttggctagagctgcaattgctgtaggtgttggagcaatttttatggaaacacatgaagatccagataatgcgccatcagatgggccaaatatggtgccattaaatgaagttaaagatttattaaaaaaattaactgaaatagataatttaattaagaaataat

SEQ ID NO: 242715 - DNA, 436 bp, Unknown
  Bacterial polypeptide expressing nucleotide sequence isolated from the Sargasso Sea
aacaaaaaaaattataaatgttaaaaaaggtcaattcttagcaccatgggatatggttaatgttacaaagaaaatttcagattcaggaaataataacattcttgtaactgaaagaggtgcaagctttggatacaatacattggtttctgatatgaggtctttacccataatggctaaaaatggttatccagttatttttgacgcaacacattctgttcaacaacctggcggacaaggtgaaaaaagtggaggtcaaagagaatttgttgaacatttatcaagagcagcagttgcagtcggagttgcaggtatatttatggaaactcatcaagatcctgacaatgcgccatcagatggccctaatatgattccattatctaatcttgaaaagttattaaaacaattaatagaaatagataacataataaaaaaataa

SEQ ID NO: 242716 - DNA, 472 bp, Unknown
  Bacterial polypeptide expressing nucleotide sequence isolated from the Sargasso Sea
aatgaaaaataaaaaaataataaaattgaaggatataaatataggaggatcttatcctgtagtttttattttaggaccatgtcagatagagagtcgagatcattcattaatgatggcagaaaaaatctctaaaatttgttttgaattcaatgccaactttatatttaaatcaagttttgataaagcaaatagatcttctattcgagcaaaaagaggtgtgggtttagaagaaggtcttaaaatattacaagaggtgtctaataattttggttgtccagtgttgacggacgttcatgaggctactcaatgtaaaattttagcagaagttgtcgatattattcaaattcctgcatttttatcaagacaaactgatttattattagcggcaggagaaacacaaaagcctgtcaatattaaaaaaggccaatttctttcaccaaatggacatgatgaaagttgcagagaaagttca

SEQ ID NO: 242717 - DNA, 552 bp, Unknown
  Bacterial polypeptide expressing nucleotide sequence isolated from the Sargasso Sea
aatggcaagtaaatcagtcaaatgtggaagattgaatatttcaaatacaggccggtttactttaattgctggaccctgccaattggaaaatgaaaagcacgcattagatattgctactgaattaaaaaaaattactgatgaattgggtgttggatttatttataaaacatcctttgataaagctaacagaactagtttaaacggtaagagaggtgctggtctcgaaaaatctttaccagtttttgataaaattagaaaagatgttggtgtaccagtattgactgatgtacataccattgagcaatgtaaagttgtttctaaacacgcagatgttttacagataccagcttttctgtgtagacaaactgatttattgattgctgctgctaaaacaggaaaagttataaatgtaaagaagggtcaattcttggctccgtgggatatggttaatgtaacaaaaaaaattgaagactcgggcaataaaaatattttagttacagagcgtggcgcgagcttcggttataacactttagtttccgatatgaggtcgtt

SEQ ID NO: 242718 - DNA, 555 bp, Unknown
  Bacterial polypeptide expressing nucleotide sequence isolated from the Sargasso Sea
ctgatgttcatactgttgaacaatgtaatattgtttcaaaacacgcggatgttttgcagatacctgcttttctgtgtagacaaactgatttattgattgcagccgctaaaacaggaaaagttataaatgtaaaaaaaggtcaattcttagctccttgggatatggttaatgttacaaaaaaaattgaagactcaggtaacaaaaatattttagttacagagcgaggagcaagttttggttacaacactctagtttctgacatgagatctttacctatcatggctaagaacggctacccagtcgtttttgatgcaacacattcagttcaacaaccaggaggaatgggtgacaaaagtggaggtcagagagaatttgtagaatatctttctcgagcagcaatcgctgtaggcgttgcagctatttttattgaaacacatcctgatccagacaaagcaccatccgatggtccaaatatggttcccttatctaagatgtcaggtcttttaaagcaattggttgaaatcgacaatttaataaagaatggcaaaaattaaa

SEQ ID NO: 242719 - DNA, 598 bp, Unknown
  Bacterial polypeptide expressing nucleotide sequence isolated from the Sargasso Sea
ttcgcttccagtttttgataaaattaagaaagaattaaatataccaattttaactgatatccataatattgaacaatgttcaattgttgcaagtcacgtagatgttttacaaatacctgcatttttatgtcgtcaaacagatttattagtagctgctgctaaaacaaataaagtcattaatgtaaaaaaaggtcaattcttagcgccatgggatatggttaatgtaacaaaaaaaatttcagactctggaaataaaaacattttagttactgaaagaggcgctagttttggttacaatactttagtgtcagatatgagagcattacccataatggcaaaaaatggttacccagttatatttgatgctactcactctgttcaacaaccaggtggtcttggtgaaaaaagtggtggacaaagagagtttgtagaacatttagcaagagcagcagttgcagttggtgttgcaggagtttttattgaaactcaccaagatcctgataatgccccttctgatggtccaaatatgattccgttaaataaattagaaagtctattagaacaattaactgacatagataatttgattaaaaaataa

SEQ ID NO: 242720 - DNA, 673 bp, Unknown
  Bacterial polypeptide expressing nucleotide sequence isolated from the Sargasso Sea
aatgactagacaagttaagattaacaatttttcaattgcaaacaacttacctcttatattaattgctggtccatgccagttagaaaatagagaacatgcaatttatattgcagaaaacataaaaaaaatatgtgataagttaaaaattaattttgtttataaaacttcttttgataaagccaatagaaccagccacctttctcgaagaggattaggtctagaaaaatctcttaaaatatttgaagaaattagggaaaaaataaaaataccaattttaacagatgtgcattcagttgaacaatgtgaactattaaaaaattcaattgatattattcagatacctgcatttttgtgcagacaaacagatcttttgcaatcagctgcaaaaactaatttagtgattaatattaaaaaaggccaatttcttgctccctgggatgtttcaaatattttaggcaaagttgaagattttaataaaaatattttacttactgaacgaggtgtatcatttggttataacactttagtttcagatatgcgttcaatttcaattatgaaaaaagaaaaatatccagttatatttgatgccacacactctgtacagcagcctggtggcaaaggaaataaaagcggaggacaaagagaatttatatatgatttatccaaagccccg

SEQ ID NO: 242721 - DNA, 476 bp, Unknown
  Bacterial polypeptide expressing nucleotide sequence isolated from the Sargasso Sea
acaaactgatctaattagtgcggcatgtaaaactcaacttcctctcaatatcaaaaaaggacaatttttatctccctatcaaatgaaaaatataattgaaaaatgtaattcatttggaaatgataatattatcctctgtgagagaggatcatcttttggttatgacaatcttattgtggactttcttgggatatcagaacaaaaagcctttaattatccaataattcttgatgttactcattctcttcagcttccaggaggacaaggcaattctgctggaggaagatcacatcaagcggaagatctagctagagcagcaatagccttaaaaatttcagggctatttattgaggttcatccaaacccagataaagcgttatgtgatggaccttcagccacaaaacttgaggattttgaagatatgataaaaaaaataaaaaaaatagacgatcttgttaaatcagaaaaattttaat

SEQ ID NO: 242722 - DNA, 583 bp, Unknown
  Bacterial polypeptide expressing nucleotide sequence isolated from the Sargasso Sea
aatgaaaactataaaagtaggtaacttggaggtgggcaatgataagccttttgtacttattgcaggcttaaatgttctagaggatgatgaaaccattaaagatgttattgaggaatgtataaggctaaccaaaaaatataacataccttatatctttaaggcttcgtatgataaggctaatcgatcttcaatagattcttatcgaggccctggtgttgaaaaaggtttaaaaaaattagtagagttgaaaaaagattataaagtgcctcttatttcagatatacacaatccaggagaggctgaattagcttcaaatgttttagacataatccagataccagcattcttaagcagacaaacagatttgatcgaagctgcctgtgctacctccctccccataaatataaaaaagggtcaatttcttgctccatcagacatgaataatatattaagaaaatgcagtcattttcaaaacaaaaacataatgatttgcgaacgtgggacatcttttggatacaataatttagttgttgatatgttaggaatggttgaacttaaaaataactctcctgtaatttttgat

SEQ ID NO: 242723 - DNA, 523 bp, Unknown
  Bacterial polypeptide expressing nucleotide sequence isolated from the Sargasso Sea
atggaaaataaaattataaattgtaatggaattaaaatatcaaataaaaatccattaacattaattgctggaccctgccagctggaaagtgagcaacattcaatggatatggcgggaaaaataaaagaaataactgataaatttaaaattggttttatttataaaacgtcttttgataaggcaaacagaacaagtttaacctctaaaagaggtgctggattagaaaaatccttaccagtgtttgacaaaataaaaaaagatttaaaaatacctgtattaactgatattcatagcattgaacaatgttctataatatctaaacacgtggatattttacaaattccagcatttctctgcagacaaacagatctcttaattgctgcagcaaaaacaaataaaattataaatgttaaaaaaggacaatttttggcaccgtgggatatggagaatgtaacaaaaaaaatttctgagtctggtaacaataatattcttgttaccgagagaggtgcaagttttggttata

SEQ ID NO: 242724 - DNA, 678 bp, Unknown
  Bacterial polypeptide expressing nucleotide sequence isolated from the Sargasso Sea
catttgataaagctaatcgaagttcaatctcatcatatagagggccgggattggaagaaggattaaacatattgaaagaggtttctgatgagtttgacgttccagtaattacagatatccatgaacctgatcaagctgaaccggtaagtgagatttgtgaggttatccaaattccagcttttctagcaagacagactgatcttgttaatgctgcagcaatcactaaatcaattattcaatttaaaaagcctcagtttttatcagcacctgaaatgaaaaatgttgttgaaaaatgtaccgccgctggaaactcaaacataatactttgtgagcgtggcaattcgtatggatataataatttagtagtggatactcttaattttcaaatattaaaaaaattcatgacgccagtaatttttgatgtaacccattcacttcagcttcctggtgggctaggaggttcaactgatggaagaagggagtatgttctaagtctagctaaagctggtatttctcaatcaattgctggactctttcttgaggctcatccaaatccagatgaagcaaaatgtgatggaccatgtgcgctgccattatcaatacttgaggaattcttgactcaaatcaaagagttggatgattttattaaacaacaagaaaatttagatatttcctgat

SEQ ID NO: 242725 - DNA, 298 bp, Unknown
  Bacterial polypeptide expressing nucleotide sequence isolated from the Sargasso Sea
tctgattgcggggccttgtgtgtgggaaggatattcgcatgcagaagcaattgcagaaaaattactgactgtttgcggaaagcatgatgttaatttcatttacaaaaccagttttgataaggcaaacagaagcagtttaaagggctttcggggggcagaaaatgcaattgaaggatttcgggaattaaaaaagaaattcaatctggaaatcttaacggatgttcatgaatctcatcaacccggggaattggatgttgtcgacatctttcaaatccctgcatttttatgtaggcaaact

SEQ ID NO: 242726 - DNA, 532 bp, Unknown
  Bacterial polypeptide expressing nucleotide sequence isolated from the Sargasso Sea
aatgagcaatattaaagtaaattgtggaaaaattgaaatatctaacgataataaaatttgtttaatagcaggaccttgtcagcttgaaaccgagcaacatgccatagatattgcaggaaaaattcaagaaataacaaaaaaatttaatattggatttatttacaaaacttcatttgataaagctaatagaactagtcttaaaggaaaacgaggagctggattagaggcttcactaccagtttttgataaaattaaaaaggaactaagcattccaattttaactgatattcataataccgatcaatgctcaatcgttgcaaatcatgttgatgtacttcaaataccagcgtttttatgtagacaaactgatttactagttgctgcagcaaaaactaataaaattattaatgttaaaaagggccagtttcttgctccatgggatatggtaaatgtaacaaaaaaaatttcagattcgggaaatcaaaatatattagtaactgagagaggtgcaagctttggtacaacactttag

SEQ ID NO: 242727 - DNA, 319 bp, Unknown
  Bacterial polypeptide expressing nucleotide sequence isolated from the Sargasso Sea
tacaattctctagtttcagatatgcgatctataccaataatggctaaaaatggttatcctgtagtttttgatgcaacacattcagttcagcaacctggcggcatgggtgataagagcggaggacaaagagagtttgttgaacatcttgcaagagcagctgtagctgttggggtagctgctgtatttatagaaactcatcctgatccagataatgcaccatcggatggtcccaatatggttccattatcaaaaatgccaaatttattaaaacaattagtcgaaattgacaaattgattaaaaatgtcaaaaatcagtaat

SEQ ID NO: 242728 - DNA, 767 bp, Unknown
  Bacterial polypeptide expressing nucleotide sequence isolated from the Sargasso Sea
ctggatctctggtccttgcgtgattgaatcgaaagacttaattcatgacgtagctggaaggataaaagagatcactgattctttggagattggttatatttttaaatcatctttcgataaggcaaatcgaacttcaattgatagctttagaggacccggaatggaagaaggtctagctattctcgagagtgtgagagatcaattgggcgtgcctgttatcacagatgttcatgaagacactcctttggatgaggttgcatcagtggttgatgtgcttcaaacaccggcttttttgtgcagacaaaccaattttataatcaatgtggcatcacaacaaaaacctgtgaatataaaaaaaggccagttcctttccccttgggaaatggaaaatgtcgttaagaaagcaaaatctaccgataatgaagatattttagtttgtgagcgcggctacacatttggctacaataatctggtttcagatatgcgttcacttgttgtgctgaaagaaacctcatgccccgtgatttatgacgcaacgcactctcttcagcttcccggaggtaaaggaggctcatctgacgggcaaagtgaatttattgttccagtctcaagaggagcagtgggtgttggcattgctggtatattcatcgagactcatccagacccaaagaatgctctaagcgatgggccaaattcactcccactggataatcttaagccattacttgagcaattactggcaatagatgaaatcgtgaagaaataat

SEQ ID NO: 242729 - DNA, 520 bp, Unknown
  Bacterial polypeptide expressing nucleotide sequence isolated from the Sargasso Sea
tatgactaatgaagattccattgacattattcaaatacctgcgtttttatgtaggcaaacagatcttttaatagctgcaggtaaatcggataaaattataaatgttaaaaaaggtcaatttttgtcacctcatgatataaaaaatatttataaaaaaatagaaagcactaacaatactaaaataatgattacagaaagaggcaccacatttggatataataatctagttagtgattttaaaggcatcgaaataatgaaacaatataattatccagtaatttttgatgctacacattctgttcaagaacctggaggattaggaaatagaagtggtggaaaaagagagtttataccctctttagccaaggctgctatagctgttggtgtcgctggtttattcattgagactcatcaagatccagataatgcacccagtgatgggccaaatatgcttgatataaaaaatttggaaacacttataaaaaaattaatgttaatagatcaaatttctaaatcataa

SEQ ID NO: 242730 - DNA, 264 bp, Unknown
  Bacterial polypeptide expressing nucleotide sequence isolated from the Sargasso Sea
caaaaaatggttatccagtaatttttgatgctacacattctgtacaacaaccaggtggacttggagaacaaagtggaggacaaagagaatttgtagaatatttagcaagagcagctgtagcagttggtgtagctggagtatttatagaaacacatcaagatcctgataacgctccatcagacggtcctaatatggtgccattaaataaattagaaaatttacttaaacaactttctgaaatcgataatttgataaaaaaataaa

SEQ ID NO: 242731 - DNA, 570 bp, Unknown
  Bacterial polypeptide expressing nucleotide sequence isolated from the Sargasso Sea
attgagctcaataaaaataggtaaactagagatttcaaataatggccctttagtttttatagcaggcccatgcgcaatggagtctaggtcacatgcattatcaatggctcacagtttaaagaaaatatcaaccgaacttgatgtaggacttatatttaaaagctcttttgataaagcaaatagaacgagtattaaatcaaaaagaggtgttggtttagatgactcattggatatatttgcgacaatcaaagaagaaactgatctaccaatattaactgatgtgcatgaacctgagcagtgtgatattgttaaagattatgtcgatgttttgcaaatacctgctttccttgcaagacaaacagacttaatcttagctgctgcaaatacacagaagcctgtgaacattaaaaaatctcaatttatgtcaccatgggacataaaatactcagcagaaaaaatactttctcagtccaatgccaatatactgttaacggaaagagggtatagttttggttataacaatctagttgtagattttcgatctatcgaaatcatgaaaaaacttgattt

SEQ ID NO: 242732 - DNA, 823 bp, Unknown
  Bacterial polypeptide expressing nucleotide sequence isolated from the Sargasso Sea
atggaaaataaaatagttaattgtaacggtatacaaatttcaaacaaaaataaaatttgtttaatatctggtccttgtcagcttgagaccgagcaacatgctttggacatggcaggtaaaattaaagaaattacaacaaagtataatatcggttttatttataaaacttcatttgataaggctaacagaacaagcttgaaaggcaaaagaggagctggtttagaaaactccctgcctgtatttgataaaatcaaaaaagatattaacgtaccagttcttactgatatacataatgaagaacaatgttccctagtttctcatcacgtagatgttcttcaaataccagcgtttctttgtagacaaacagatttattaattgctgctgctaaaaccaataaaattattaatgtgaaaaagggccaattcctagcaccatgggatatggtgaatgtaaccaaaaaaatttctgatagcggtaatgaaaatattttagtgaccgaaagaggagcaagctttggttataatacattggtctcagatatgagatctattcccatcatggcaaaaaatggttatccagtagtgtttgacggaactcattcagtacaacaacctggcggtctaggtgaaaaaagtggtggtcaaagagaattcgttgaatatttgtcaagagcagcagttgcagtcggcgtcgcagctatttttttggaaacacatcaggatcccgataatgctccatcagatggtccaaatatggtccctttagacaaattagacgagctaattaatcaaattgtagaaattgataatttagttaaaaagt

SEQ ID NO: 242733 - DNA, 493 bp, Unknown
  Bacterial polypeptide expressing nucleotide sequence isolated from the Sargasso Sea
gatacccgcatttttatctcgtcagactgatcttattgttgccgctgctaaaactggcaaagccattaatattaaaaagggtcaatttctggctccttgggacatgaggaatgtcttacaaaaagcagttgagagtggtaatcaaaatttattggtatgtgagcggggaacgtctttcggttacaatacattgatttctgatatgcgttctttagcgacgatggaaaagttcggttatccggtagtttttgatgcaacacactcggttcaacagcctgggggtaaaggaacttctagtggtggacaaagagaatttgttgcagttttagctcgtgcggctgtagcaataggggtagcagcagtttttattgaaacacatcaagaaccagacattgctcccagtgatggacctaatatggttcccctttcagagatgaaaggtttgctgaaggtccttatgtcatttgataagttggcaaaacaaaacaaataa

SEQ ID NO: 242734 - DNA, 570 bp, Unknown
  Bacterial polypeptide expressing nucleotide sequence isolated from the Sargasso Sea
aatgataaatcataaagtaaaatgtaataattttgaaatagggaataacaaacctttcactttaatagctggcccatgtcagcttgaaagcgagacacacgcaataaagatatctaccgaattaaaaaaaattactaatgacttaggtatcaatcttatttataaaacatcttttgataaagccaacagaacaagtctaaaaggaaaaagaggtttgggattagaaaaatctttacctatttttgacaaattaagaaaagaagtgggtgtgccagttttgactgacgtccacacaactgagcaatgttcaatagtagcaaaacatgtagatgttttacaaattccagcatttttatgtagacaaactgatctgttaatagctgcagcaaaaacagaaaaaataattaatgttaaaaaaggacaatttttagctccctgggatatggccaatgttataaaaaaaatagaagactcagggaataaaaatattctaataacggagagaggagctagttttggatataatactcttatttcagatatgagagctataccaataatgtcgaaatt

SEQ ID NO: 242735 - DNA, 460 bp, Unknown
  Bacterial polypeptide expressing nucleotide sequence isolated from the Sargasso Sea
gacttgttaattgctgcagctaaaacaaataaaattattaatgtaaaaaaaggtcagttcttagcaccgtgggatatggttaatgtaactaaaaaaatttcagagtctggaaatgataaaatattagtaactgaaagaggtgcaagctttggttacaacactttagtttctgacatgagatctttacctattatggcaaagaatggttatccagtaatttttgatgcaactcattctgttcaacaaccaggtggccaaggagaatcctctggtggtcaaagagaatttgttgaatatttatcaagagctgcagttgcggttggagttgctggtgtatttattgaaacgcatcaagatcctgataatgctccatcagatggaccaaacatggtaccattgaataaattagagaatctattaaaacaattatacgatatcgataatctaattaaaaaatagt

SEQ ID NO: 242736 - DNA, 556 bp, Unknown
  Bacterial polypeptide expressing nucleotide sequence isolated from the Sargasso Sea
atgagtgctattaaagtaaattgtgaaaatatagaaatttctaacaacaataagatttgtattatagcaggtccttgtcagctagagacagagcaacatgcaatggatatggcaggaaaaattaaggaaattacttcaaaatttggccttggatttatttacaaaacttcatttgataaggctaatagaacaagcttaaaaggtaaaaggggagcagggttagatgcatcacttcctgtttttgataaaattaaaaaggaattgaatgttcctattttaacagacattcataatgctgaacaatgtgcaattgtttcaaaacatgttgatgttttacaaattccagcttttttatgtcgtcaaactgatttattaattgctgctgctaaaacaaataaaatcattaatgtaaaaaaaggtcagttcttagcaccgtgggatatggttaatgtaactaaaaaaatctcagagtctggaaatgataaaatattagtaactgaaagaggtgcaagctttggttacaacactttagtttctgacatgagatctttaccta

SEQ ID NO: 242737 - DNA, 338 bp, Unknown
  Bacterial polypeptide expressing nucleotide sequence isolated from the Sargasso Sea
tcttacagaaagaggagcaagttttggatataacactttagtttcagacatgagatcaatacccataatggcaaaaaacggttatccaattatttttgatgcgacacactcagtgcaacaacccggaggcatgggagaaaaaagcggcggacaaagagaatttgttgaatatcttgcacgtgcagctgttgcagttggtgtggccggggtatttattgaaacacatcctgatcctgacaatgctccgtctgatggacctaacatggttccgttatcaaaaatggaaaatttactaaagcaattaattgaaattgataatttaattaagaatgcctaaa

SEQ ID NO: 242738 - DNA, 652 bp, Unknown
  Bacterial polypeptide expressing nucleotide sequence isolated from the Sargasso Sea
tgataaggctaacagaacaagcttgaaaggcaaaagaggagctggtttagaaaactctctgcctgtatttgataaaatcaaaaaagaaattaacgtaccggttcttactgatatacataatgaagaacaatgttccctagtttctcatcacgtagatgttcttcaaataccagcgtttctttgtagacaaacagatttattaattgctgctgctaaaaccaataaaattattaatgttaaaaagggtcaattcctagcaccatgggatatggtgaacgtaaccaaaaaaatttctgatagtggtaatgaaaatattttagtgaccgaaaggggggccagctttggttataatacattggtctcagatatgaggtctattcccatcatggcaaaaaatggatatccagtagtgtttgatggaactcattcagtgcaacaacctggtggcctaggtgaaaaaagtggcggtcaaagagaatttgttgaatatttatcaagagcagcagttgcagtcggcgttgcagctatttttttggaaacacatcaggaccccgataatgctccatcagatggtccaaatatggtccctttagacaaattagacgagctaattaatcaaattgttgaaatagataatttagttaaaaagtaa

SEQ ID NO: 242739 - DNA, 781 bp, Unknown
  Bacterial polypeptide expressing nucleotide sequence isolated from the Sargasso Sea
atgataaataaagaagttaattgtaacggtataaaaatatctaatgctaataaaatagttttgatatctggaccctgtcaacttgaaacagaacaacacgctatggatatggcaggaaaaattaaagaaattgcattaaaatttaaaataggattcatttacaaaacatcatttgataaagcaaatagaactagcttaaaaggtaagaggggtgctggactagattcatcattgccagtatttgataagattaaaaaagatttaaacattccagttttaaccgatgtgcacaatattgagcaatgttctattgtatctaatcacgttgatgtattacaaatccctgcgtttctatgccgccaaacggatctattagtagctgcagcaaaaactaataaaattattaatgtaaaaaaaggacagttcttggcaccatgggatatggtcaatgttactaaaaaaatatctgattcaggaaatgaaaatattttagtaactgagagaggtgcaagttttggatacaatacattagtatcagatatgagatcaataccaataatgtctaaaaatggatacccagtaatttttgatggtactcactcagtacagcaaccaggtggattgggagaaaaaagtggagggcaaagagaatttgtagaatatttatcaagagccgctgccgcagttggaattgcaggaatttttttagaaacccatcaagatcctgataatgcaccttccgatggtccaaatatggttccactaaataaattagaaagtt

SEQ ID NO: 242740 - DNA, 754 bp, Unknown
  Bacterial polypeptide expressing nucleotide sequence isolated from the Sargasso Sea
gagaatgaaaaacatgctttagaagttgcttctgaattaaaaaatattactcaaaaactaggtataggtttgatttacaaaacttccttcgataaggctaatagaacaagtttaaaaggaaaaagaggagcaggccttgaaaaatctcttcccgtatttgataaaattagaaaggaattaaatatagcagttctaaccgatgttcataatgctgaacaatgcgaaattgtatctaaacatgtagatgttctacaaatacctgcttttctatgtagacaaactgatttattgatagctgcagcaaaaactggaaaaattataaatgtaaaaaaaggtcaatttttagcaccttgggatatggttaatgtaacaagaaaattagaagaatctggaaataaaaatattttaattacagaaagaggtgctagttttggttacaacactttagtatctgacatgagatctttgccaataatggcaaagagtggttaccctgtagtctttgatgcaacacactcagttcaacaacctggtggaatgggtgataagagtggaggacaaagagaatttgtggaatatcttgcacgagcggcgattgctgtcggtgtagcagctatatttatggaaactcatcctgatccagataaagcaccttcagatggtcctaacatggttccgttagcaaaaatgccaagtctattaaaacaattagtagaaattgataaattgataaaaaatgtcaaaaataactaat

SEQ ID NO: 242741 - DNA, 687 bp, Unknown
  Bacterial polypeptide expressing nucleotide sequence isolated from the Sargasso Sea
tatgaacaaagaagttaattgcaacggtataaaaatatccaacattaataaaatagttttgatatctggaccatgtcagcttgaaaccgaacaacatgcaatggatatggctggaaaaattaaagaaattgcaactaaatttaatataggttttatttataaaacatcatttgataaggcaaatagaactagcttaaaaggtaaaagaggcgctggtttagataattctttacctgtctttgacaaaattagaaaagatttagaagttcctgtattaacagatgttcataacgcagaacaatgctctatagtatctgaccatgttgatgtattacaaattcctgcatttctttgtcgtcaaacagatcttttaattgctgcagcaaaaactaaaaaaattgtaaatgtaaaaaaaggccaatttctagcaccttgggacatggtaaatgttactaaaaaaatatctgattcaggaaatgaaaatattttagtaacagaaagaggagcaagttttggatataacactttagtatctgatatgaggtcaataccaataatgtcaaaaaatggataccctgtaatttttgatggcacacattcagtccagcaacctggtggattaggagaaaagagtggaggccaaagagaatttgtagaatatttatcaagagcggcaacagcagttgg

SEQ ID NO: 242742 - DNA, 547 bp, Unknown
  Bacterial polypeptide expressing nucleotide sequence isolated from the Sargasso Sea
caagctgcgccagttgctgaggtagctgacatcattcagcttccagcatttctaagtcgtcagactgatttagttgaagcaatggcgaaaactcaagccatcatcaatattaaaaaagcacaatttttagctccacatgaaatgcgtcatatcttgcataaatgtttagaggctggaaatgacaagcttatcctttgtgaacgtggctcagcatttggttataacaacttagttgttgatatgctcggcttcgatatcatgaaagaaatgaatgttcctgtattctttgatgtgactcatgcattacaaacaccaggtggtcgtgctgattcagcaggtggtcgtcgttctcaaattacgactttagcccgtgctggtatggcgactggacttgctggtttgttcttagaagcacatccagatcctgaaaaagcgaaatgtgatgggccttgtgctttacgtttatcacagcttgagcctttcttggcacaattaaaagaattggatactttagttaaaggattcaaaaagttagacactcattgat

SEQ ID NO: 242743 - DNA, 568 bp, Unknown
  Bacterial polypeptide expressing nucleotide sequence isolated from the Sargasso Sea
aatggcacagaagataattgatctgaaagatataaaaataggcaatgaacttcctatgaccctcatcgctggaccttgccagctagagacagaaggacatgcagttatgattgcgtcaaatctagcgaaaatatgtgatgaggaaaaaatcaactttgtttttaagggatcttttgacaaagcaaacagaacatcagttactgggaccagaggaattgggctttcaagaggcttacaaatattaagtgcagtcaaagaaaaaattggttgtgcagtccttacggacattcataacccagaacaatgtaaggaagtttctgatatagtggatattctccaaatacctgcatttctatgtcgtcaaactgacatcattttggcggcctcgaagaccaataaagttattaatattaagaaagggcaattcttagcaccttgggatatggaaaaggtactagagaaagcattatcaactggaaaccaaaaaataatgttgtgtgaacgcggttcatcttttggatacaatacattggtaacagactttagaagtttaccaataagaaaaata

SEQ ID NO: 242744 - DNA, 318 bp, Unknown
  Bacterial polypeptide expressing nucleotide sequence isolated from the Sargasso Sea
attgaaagaagtaaaaataggtaacgttatatttagcgataagcatcttggcataattgctgggccttgtgtgattgaggaccgagatcattccttaaggatggctaatgaaataaagaagatatctgatgatattgaaatccctattatctttaaaagttcatttgacaaagccaacagaacatctataaagtcatttagaggccctggcatagatgagggtataaaaatcttatccgatgtaaaagtcgagacagggttaccagttataacagatattcacaatgctgatcaggcgaaggtagtagctgaagtggt

SEQ ID NO: 242745 - DNA, 715 bp, Unknown
  Bacterial polypeptide expressing nucleotide sequence isolated from the Sargasso Sea
aaatgggctgaacagattcaaaaagttacaaatgcattaagcattccattaatttttaagagttcttttgataaggcgaataggtcatctattggatcatttcgtggtccagataaattagacgaaggtttatcaattcttgctgatgtaaaaagagaattgggaatacctgtgcttacagatgtccatttacctgaccagtgtagctcagttgctgaggtttgtgatgttcttcaaattcctgcttttttatgtagacaaactgatctcttactagcagctgggacaacaggaaagacagtcaatattaaaaaaggtcaatttttagctccgggtaaaatgaagcatgccgccgaaaaaattgaatctactggaaataaaaatattattttaactgaaagaggaacttctttcggatatagtctcgtatctgatatgacatccatacctgttatgagtcaaactggctaccctgtcatttttgatgcaactcattctgctcaattgccaggtgataagaatataacaggaggacagcgggaaatgataccaactctagctaaagcagcagttgctgctggatgtaatggcgtatttatggaggttcacgataatccaaaaaatgcaaaatcagatgcctcaactcaatggcctattgacaaacttaaaaatattctccagactttactgaaagtttatgaggcagttaactaat

SEQ ID NO: 242746 - DNA, 580 bp, Unknown
  Bacterial polypeptide expressing nucleotide sequence isolated from the Sargasso Sea
atgagaaaggtaaaaataaaaaaagacttttttttttctaattcagaggaaataaaatttatacttggtccatgtcaaattgaaagtaggtctcatgcatttaatatttgttcagaaatagatattttatcgaaaaaattagactttaaatatgtttataaaagttctttcgacaaggctaatagaactagtcataagagtaagagaggagttggattaaaaaaaggattagatattctagcagaggttggcgagaagtttggttgtgcagttacaactgacgttcacgatgctcaacaaattgaaaaagttaaggagtatgttgatataatacaaatacctgcatttctttgtaggcaaactgatttattaattgaggcaggtaaatcaaaacttccaattaatgtaaaaaaaggacagtttctttcaccgtgggatatggaaaatgtagtaaataaaatattttcaactggaaataaaaaaattttattaaccgaaagaggtacctcttttggatataataatttagtttcagatatgagatctttggtaataatgaaaaaaactaaattaccaatta

SEQ ID NO: 242747 - DNA, 646 bp, Unknown
  Bacterial polypeptide expressing nucleotide sequence isolated from the Sargasso Sea
atgcaaaatgcaattgatatatttgggattggcaatgataaaccattgacagtcatcgcaggcccttgtgtggttgagagtgaaaaagtggtatttgaatgtgctgaggaacttaagcgtatttctgatgacctcggtgttaatgtcatatttaaagcgtctttagataaagccaatcgaaccagtgatacaggctttagaggggttggttttgaaaaagccttgtctattttagccaaagtgaaaagtcgttatggattgccagtcattacagatgttcatcattgtgaaatgattcaagatgttgctgaagtggttgattttcttcaaataccggcttttttatgtcggcagactgatttgattcgtgctgcttgtcagacaggtttgcctgtgaatatcaaaaaaggtcagtttttagcgcccggagatatgcgctttgttttagaaaaagctctgaatacaggcaataaaaatatattgttgtgtgaacgtggtacgacttttggttatcataatttagtggttgattttcgtgggctgtctcagatgcgttcttttggttatcctgtggtatttgatgcaacacattctgtgcagttgccagggggcggtgatggaaaatcaagtggtcaacgagaatatg

SEQ ID NO: 242748 - DNA, 586 bp, Unknown
  Bacterial polypeptide expressing nucleotide sequence isolated from the Sargasso Sea
tttgataagattaaaaaagatttaaatgtgcctgtgttaactgatgtacacaatattgaacaatgcactattgtgtcaaatcatgttgatgtattacaaattccagcatttctatgtcgccaaacagacttactagtagctgctgcaaaaactaagaaaattattaatgtaaagaaagggcaatttttagctccttgggatatggttaatgttactaaaaaaatatctgattcaggtaatgaaaatattttggtaacagaaagaggcgcaagttttggatataacactttagtttcagatatgagatcaataccaataatgtcaaaaaatggatatccagtaatatttgacggcactcactcagtccagcagccgggaggattaggagaaaaaagtggaggacaaagagaatttgtagaatatctatctcgagcagctgcagcagttggaattgctggaatttttttagaaacacaccaagacccagataatgctccttcagacggaccaaatatggttcctctaaataaattagaaagtttgatttctcaaattgtcgaaatagatactttagtaaaaaaataat

SEQ ID NO: 242749 - DNA, 493 bp, Unknown
  Bacterial polypeptide expressing nucleotide sequence isolated from the Sargasso Sea
atgttaaataaaactctcaaaatagcgaatatttgtatgagcaatgatttaccaatagtcctcatcgccggaccctgccaaatagaaagtctcaatcattctcgtgaaatagccgaaaacctgagtaatttagggcaaaaactaaattttgatctcatttttaaaggtagttttgataaagcaaatagaacatcaataaaatcagaacgaggtgttggaatagaagaaggtttaactattctcgataaaatcaagtcagaatttaattgtcctgttctaactgatgttcacgaaccagaacagtgtaatcaagcaagtgaagtcgtagatgtaattcaaataccagcgtttctttgtcgtcaaacaaatttacttatcgccgctagtaaaactggaaaagctctaaatgtaaaaaaaggtcaattccttgcaccgaatgatatgaaatacattgtagagaaagatatcacagtgttggaaatgacaatataat

SEQ ID NO: 242750 - DNA, 433 bp, Unknown
  Bacterial polypeptide expressing nucleotide sequence isolated from the Sargasso Sea
gggaaaattattaatgtcaaaaaaggtcagtttttagctccttgggatatggctaatgtgataaaaaaaattgaagactctggaaataaaaaaattttaattacagaaagaggtgcaacctttggatataataccttagtatcagacatgagatcattgcctattatgtcaaaatttggttttccaattgtttttgatgcaactcattctgttcaacaaccaggtggaatgggtgaaaaaagtggaggacaacgagagtttgtcccacatctagctagagctgcaattgccgtgggcgttggagcaatttttatagaaactcacgaagatccagacaatgctccttcagatggccctaacatggtgccattaaaagaaatgaaaaatttattaaaaaaattaactgaaatagataatttaattaaacaataat

SEQ ID NO: 242751 - DNA, 610 bp, Unknown
  Bacterial polypeptide expressing nucleotide sequence isolated from the Sargasso Sea
atgacacaaaacattgttaaaatatttaattttaaagtatctaataatgatcccttttttttaattgctggcccatgttcaattgaaagtaaagatcatgctattaatcatgctggtatgattaaggaaatttgtaacaaattaaatataaattttgtttataaatcatcttttgataaagcaaataggtctagtaaaaagtcttcgaggggggtaggtattgaaaagggtttaagtattttgtttgatgtcaaaaaaaccttcaaagtgccaatcttaactgatgttcacgaaacacatcaatgtaaagatgttggagaaatagtagatattattcaaatacctgcttttttatgtagacaaaccgacttattaattgctgcggctaaaacaaaaaaagttgtaaatgttaaaaaaggacaatttttagccccttgggacatgaagaatgtattggataaaattttggaaaatggaaataatcaaattttactcactgaaagaggtacatcttttggttataatacactagtatctgatatgcgtgctattccacaaatgtctagttttgggtatccaattgtttttgatgcaacgcattctgttcagc

SEQ ID NO: 242752 - DNA, 434 bp, Unknown
  Bacterial polypeptide expressing nucleotide sequence isolated from the Sargasso Sea
taagattataaatgttaaaaagggacaatttttagctccttgggatatggtgaatgttacaaaaaaaatttcagactctggtaataataatattcttgtcacagaaagaggagctagttttggatataatactttagtttctgatatgagatctttaccaatcatggctaagaatggttatccagtcatatttgatgcaacacattcagttcaacaaccaggaggccaaggtgaatcctctggtggtcaaagagaatttgttgaatatttagcaagagctgctgtagccgttggtgtcgctggagtatttattgaaacacatcaagatccggataatgctccgtcagacggtcccaacatggttcctcttaacaaattagaaaatctattaaaacagcttagtgatatagacagtttgataaaaaaattgtgag

SEQ ID NO: 242753 - DNA, 634 bp, Unknown
  Bacterial polypeptide expressing nucleotide sequence isolated from the Sargasso Sea
cttgaaaggaaaaagaggtgttggtcttgaaaaatcacttccaatttttgataaaataaaaaaagagattaatgtccctatattaaccgatatccataattcagaacaatgttctcttgttgcacaacatgttgacattttacaaataccagcttttctttgtcgtcaaacagatttgttaatttcagccgcgaatacaaaaaaaattataaatgtaaaaaaaggtcagttcttagctccatgggatatgaaaaatgtaacaaaaaaaatctcagagtccggaaataataatattctagttacagaaagaggtgcaagctttggatacaatacattagtttcagatatgagatctttacctataatggcaaaagatggatatccggttatatttgatgccactcattctgttcagcaacctggtggccaaggtgaatcaagtggaggacaaagagaatttgttgaatatttagctagagctgcaactgctgtaggtgttgcaggaatatttatggaaactcatcaagacccagacaatgcgccatcagatggccctaatatgattccaatatctaaacttgaaaatttattaaaacagttagttgaaattgataaaactataaaaaacaattag

SEQ ID NO: 242754 - DNA, 468 bp, Unknown
  Bacterial polypeptide expressing nucleotide sequence isolated from the Sargasso Sea
catgctccttttatcaaaagagataaataaccaagattcaagaatatttgttatcgctggtccttgcgtcattgagtctgaaggactcatttttgaaatggctgattttctaaaacggttatcggagaagcttggtgtgtttcttatcttcaagagttcattcgacaaagctaaccggtcgtccatcgacagctttagagggccagggttacatgaaggcctggaaattctagcgaaggtgaaatcccaatttgagctccctgtgcttacggatgtgcatgaagatacccccgttgatgaagtggccagtgtggttgacgttcttcaaactccggcgtttttgtgcagacaaacaaacttcataacaaaggtttgttcccaaggcatcccggtgaatataaagaaaggacaatttttggctccgtcagaaatgaagaatgttgtaaagaaagcaagtgtgtgcggaaa

SEQ ID NO: 242755 - DNA, 823 bp, Unknown
  Bacterial polypeptide expressing nucleotide sequence isolated from the Sargasso Sea
gatgaaaaatcataaagtaaaatgtaataattttgaaattggaaatgataaacctttcactttgatagccggcccatgtcagcttgaaagcgagacacatgcaatgaaaatttctactgaattaaaaaaaattacaagtggcttgggtattaatcttatttataagacatcttttgataaagccaatagaacaagtttaaaaggaaaaagaggtttaggattagataaatctttacctattttcgacaaactaagaaaagaagtaggtgtgccagttttaactgatatccacacaactgagcaatgttcagttgtagcaaatcatgtagatgttttacaaattcctgcatttttatgtagacaaactgatctgttaatagctgcagcaaaaacgggaaaaataattaatgttaaaaagggacaattcttagccccctgggatatggcaaatgttataaaaaagatagaagattcaggaaataaaaatattctcataacagagagaggagcaagttttggatataacacacttgtttcagatatgagagccttacccataatgtcgaaatttggttttccaattatttttgatgcaacgcattcagttcaacaaccgggggggatgggtgaaaaaagtggaggtcaaagagaatttgttcctcatttagccagagctgcaattgcagttggagttggtgcaatatttatagaaactcatgacgatccagataatgctccatcagatggacctaatatggtcccacttaatgaattaaaaggtttgttaaaaaaattaactgaaatcgataaattagttaaataa

SEQ ID NO: 242756 - DNA, 646 bp, Unknown
  Bacterial polypeptide expressing nucleotide sequence isolated from the Sargasso Sea
aatgtctaaaaaagttactttaggtaaaatcaatataaaaaatgataatgaaaaactattacttatttcgggcccatgtttattagaaagtgaaaaattagtaagacaagtagcaactaaattaattaaacattctactaaaaataattttaattttgtttttaaatgcagttttgataaagctaataggagctctgataagaccattagaagtaaagtttcaattgagaggtcaattgatattttaaaaaatttaaaaaaggatttaaaaattcctattacttctgatgttcacgaaacaaatcagatcgataaactagagtctttattagacattatacaaataccagcttttctatgtagacaaacagatctaatcagagtcgctgcacaaacaaaaaaaattgtaaatgtaaaaaaaggtcaatttttatcacatcaagaaattgaaaatattattttaaagattgaaaaccaaaataataaaaaaattcttattactgaaagaggcaattcttttggttataactacttgattaatgattttaaaggtgttcatttcatgaagcattttggatatcctataatttttgatagtacccacagtgttcaattacccggtgggatgggtataaagagtgggggt

SEQ ID NO: 242757 - DNA, 751 bp, Unknown
  Bacterial polypeptide expressing nucleotide sequence isolated from the Sargasso Sea
gctgcaaaatcttttaatggaaaataaaacagttaattgtaacggtatagaaatttcaaataagaataaaatttgtcttatttctggaccttgtcaacttgaaaccgagcaacatgctttggacatggcaggcaaaattaaagaaatagtgacaaagtataatattggatttatttataaaacttcatttgataaggctaatagaacaagcttgaaaggcaaaagaggagctggtttagaaaactccctgccagtatttgataaaatcaaaaaagatattaatgtacccgttcttaccgatatacataatgaagaacaatgttccctagtttctccacacgtagatatacttcaaattccagcttttctatgtagacaaacagatttattaattgctgctgctaaaaccaataaaatcataaatgtgaaaaagggtcaattcctagcaccatgggatatgttgaatgtaaccaaaaaaatttctgatagtggtaatgaaaatattttagtgaccgaaagaggagctagttttggttataatacattggtctcagatatgagatctatccccatcatggcaaaaaatggttatccagtagtattcgatggaactcattcagtgcaacaacctggtggtctaggagaaaaaagtggtggtcaaagagaatttgttgagtatttgtcaagagctgcagttgcagtaggcgttgcagctatttttttggaacacatcaggaccctgataatgctc

SEQ ID NO: 242758 - DNA, 763 bp, Unknown
  Bacterial polypeptide expressing nucleotide sequence isolated from the Sargasso Sea
ttaaatgtattagaggatgaggatatggcccttgatgtcgctgaaaaactcaaagaaattacaactaagcataatattccttttgttttcaaagcttcctttgataaagctaatcgatcatctatcgactcttacagaggtcccggaattgaagttggtaaaaaaatttttgaatctattaaaaaaaatattaatgtaccaataataaccgatattcatgaggagggtcaaattgaggaaatctctcaagtggttgatatactgcaaataccagctttcctctgtagacaaactgatctaattagtgcggcatgtaaaactcaacttcctctcaatatcaagaaaggacaatttttatctccctatcaaatgaaaaatataattgaaaaatgtaattcatttggaaatgataatattatcctctgtgagagaggatcatcttttggttatgacaatcttattgtggactttcttgggatatcagaacaaaaagcctttaattatccaataattcttgatgttactcattctcttcagcttccaggaggacaaggcaattctgctggaggaagatcatatcaagcggaagatctagctagagcagcaatagccttaaaaatttcaggactatttattgaggttcacccaaacccagataaagcgttatgtgatggaccttcagccacaaaacttgaggattttgaagatatgataacaaaaataaaaaaaatagacgatcttgttaaatcagaaaaattttaat

SEQ ID NO: 242759 - DNA, 385 bp, Unknown
  Bacterial polypeptide expressing nucleotide sequence isolated from the Sargasso Sea
gtatgcggcaacgagcaactgcttctctgtgagcgcggtaccaacttcggttacgacaacctcgtggtggacatgctcggcttcggagtgatgaaacgcacttgcgacggactgccgctgatcttcgatgtcacccatgccctccagtgccgcgaccctggcggtgctgcctccggtggacgtcgctcccaggtggtggatctggcgaaggcgggtatggccgtcggcctggcgggtctgttcctcgaagcccaccccgatccgaaccaggcccgttgcgacggaccaagcgctctgcccctggatcagctggagccattcctcagccaggtgaaagcgatcgacgatctggtgaagtcccagcccgcactggagatccgttgag

SEQ ID NO: 242760 - DNA, 520 bp, Unknown
  Bacterial polypeptide expressing nucleotide sequence isolated from the Sargasso Sea
ctctattgtttctccgcatgtagatgtgcttcaaattcctgcatttctttgtagacagactgatttgttaattgcagcagctaaaacaaataaaatcattaatataaagaaaggtcagtttcttgctccatgggatatggttaatgtcacaaaaaaaatttcagatagtggaaatgaaaatattttagttacggagagaggggctagttttggatataatacattggtctcagatatgaggtctattcctataatggcaaagaatggttatccagttgtatttgatggaacccattcagttcaacaacctggaggtttaggtgaaaaaagtggaggtcaaagagaatttgttgaatacttatctagagcagccgttgcagttggagtagcagcaatttttttggaaacacatcaagaccctgataatgcaccatcagacggtccaaatatggtacctttggataaattagacgagctaattaatcaaattgtggaaattgataatttagttaaaaagtaa

SEQ ID NO: 242761 - DNA, 800 bp, Unknown
  Bacterial polypeptide expressing nucleotide sequence isolated from the Sargasso Sea
tatttctaactcaaataaaatttgtttgatagcaggaccttgccaactagaaactgagcaacatgctttagatatggcaggggaaattaaaaatattacagacaaatataatattggatttatatataaaacatcatttgataaagctaatagaacaagtcttaaaggtaaaagaggagctggattagaaaaatccttaccagtttttgacaaaataaaaaatcaaataaaagttcccgtccttaccgatattcacaatgaggagcaatgttcaattgttgcacctcatgtagatattttgcaaattcctgcattcttatgccgacaaacagatttattagttgccgctgcaaaaacaaaaaaaattattaatgtgaaaaaggggcagtttttagctccatgggacatggtaaatgtaacaaaaaaaatatctgactctggaaataataatattcttgtaacggagcgaggggctagttttggatataacactttagtaacagatatgagatcaatacccataatggcaaaaaatggttatccaattgtttttgatgccactcattcagttcagcaaccaggtggtcaaggtgataaaagtggtggacaaagagaatttgttcaatatttatccagagcagctgttgcagtgggtattgctgcaattttcatagaaacacatgaggatcctgataatgctccatctgacggcccaaatatggttccacttaatcaattagataatcttattaatcagatagtagcaatagataatctaattaaaaaaaataatgtctaaa

SEQ ID NO: 242762 - DNA, 659 bp, Unknown
  Bacterial polypeptide expressing nucleotide sequence isolated from the Sargasso Sea
cgataaagcaaacagaacttcattatcttcgcatagaggtgttggaatagacgaaggtcttgaaattttattaaaagttaaacaagaattcaatttaactaccattacagatatccataatgaaaaccaatgcaaaatggcatctaaagttgtagacatattacaaattccagcatttctatgtaggcaaacagatttacttattgctgctgctaaaacacatcgtgtagtaaatataaaaaagggtcaatttctagcaccttgggacattcaccaagttgtaaataaaataaaaaactctggaaataataaagtgctagttactgagagaggtgtttcctttggttataatactttagtttcagatatgagggctttgcctgagttaaaaaaaacaaattgcccagtaatatttgatgcaactcatagtgttcaacagcctggtggcaaaggtatatcttcaggtggccagagagaatttgtctctgttttatcaagggctgctatagctgtaggggttgctggtttgttcattgaaactcataaagaccctgaaaatgctccatctgatggtccaaatatggtaccattaaaagagttagaaaatcttcttaaaatcttaaaggatttagataaaatttcaaaacaacatatttagg

SEQ ID NO: 242763 - DNA, 658 bp, Unknown
  Bacterial polypeptide expressing nucleotide sequence isolated from the Sargasso Sea
cgattcttccttccgcggccctggcctgaaggacggcctgggcatcctccatttggtcaaggacacccacgggatcccggtcatcactgacgtgcactgccctgaagaagcaggggccgccgccaaggtcgccgacatcatccaactgcctgctttcctggcccgtcagaccgacctggtccgcgccatggcggaaaccggggcggtgatcaacatcaagaagccgcagttcctcagccctgaacagatgcgcaacatcgtcgacaagttccgcgaatgcggcaacgagcagctgctgatctgcgaacgcggcaccaacttcggctacgacaacctggtggtggacatgctcggcttcggggtgatgaagcgcacctgtgatgagctgccgctgatctttgatgtgacccatgcccttcagtgccgcgacccgggtggtgcctcctccagcgggcggcgctcccaggtggtggatctggccaagtccggcatggccgtcggcctggccggtctgttcctggaagctcacccggagccgaaccaggcccgctgcgacggaccgagcgctctaccgctggatcagctggagccgttcctcagccaggtcaaagccattgacgatctggtgaagtcccagcccgtcctggagatcgcttga

SEQ ID NO: 242764 - DNA, 808 bp, Unknown
  Bacterial polypeptide expressing nucleotide sequence isolated from the Sargasso Sea
aatgattacccaaaaaacaatttttgttaatgatatcagtctttgcaatgataattcgtttgtgcttattggaggattgaatgtccttgaaactaaagacttaaacttgaaagttgcagaaactttcaaggaaattaccagtcgtctaaagattccgtacattttcaaggcctctttcgacaaagcaaatcgctcttcaacggactcatacaggggccctggaatggaagaaggtctgcgaatacttgaagatataaaacaggaatttgaaatacctatcctgactgatattcacgaaccacagcaggccaaacctgccgcagaaatagctgatgttcttcaacttccagcgtttctgtctcgacagactgatttggtttctgcattggcaaatacaaaggctgttataaatattaaaaaagcccagtttttgtctccggaagaaatgggtaacataataaataaatttgaagtcttcggaaacaaaaaactttttctttgtgaacgcggcacaagcttcgggtacaacaatttagtggttgatatgcttggatttaaattaatgaaaaagtttggctatccgttggtatttgacgtaacccattctctgcagattcctggcgggctggggaaatccgctgccggtcgaaggggatctatacgtgaaatgggattggcaggcttatctcaaaaaattgcaggtctatttctggaggcacatccagaacctgacaaagcgctttgcgacgggcccagtgccctgaaaactaatcagcttgaacccattcctggaacagatgaaggcaat

SEQ ID NO: 242765 - DNA, 382 bp, Unknown
  Bacterial polypeptide expressing nucleotide sequence isolated from the Sargasso Sea
ggttaatgttacaaaaaaaatttcagattcaggaaatgaaaatattttagtaacagagcgtggtgcaagttttggttataacactttagtatcagatatgagatcaattcctataatggcacaaaatggttatccaatagtatttgatgcaacacattctgttcaacaacctggaggtcaaggagaaaaaagtggaggacaaagagaatttgtagaatatttatcaagagctgctgttgcggtaggtgttgcagctatatttcttgagacacaccaagatccagacaatgctccctcagatggaccaaatatggttccattaaataaattagacgagttgattaatcaaattgtggaaattgataatttaattaaaaagtaa

SEQ ID NO: 242766 - DNA, 556 bp, Unknown
  Bacterial polypeptide expressing nucleotide sequence isolated from the Sargasso Sea
tccgattttgacagatattcacaacattgagcaatgttctatttttgcaaatcacgttgatgtacttcagattccagcttttttgtgcagacaaacagatttattagtagctgcagcaaaaactaaaaaaataatcaatgttaagaaaggtcagttcttagctccatgggatatggtcaatgtaacaaaaaaaatttctgactcaggcaataaaaatattttagttacagaaagaggagcaagttttggatataattctttagtttctgatatgaggtcactaccgataatggcaaagaatgggtacccggttatttttgatgccactcactcagttcaacaaccaggcggacttggtgaaaaaagtggaggccaaagagagtttgtggagtatttggctagagcagctgttgcagtcggggttgctggtgtttttattgaaacacatcaagatccagacaatgctccatcggatggaccaaacatggttcctctagataagttagaaaatttattaaaacaacttacagatatagataatttaattaaaaattag

SEQ ID NO: 242767 - DNA, 724 bp, Unknown
  Bacterial polypeptide expressing nucleotide sequence isolated from the Sargasso Sea
atgagtaatataaaggtaaattgtaataaaatagagatctctaacgataataaaatatgtattattgcaggcccatgtcagcttgagactgagcaacatgcgatggatatggcaggaaaaatacaagatattaccaagaaatttggtgtaggatttatttataaaacttcatttgataaagcgaatagaacaagtcttaaaggcaaaagaggagctggattagatacttcccttccaatttttgataaaataaaaaaagaactcaatgtcccaattttaacagacatacataatatcgagcaatgttcaattgttgcagaacatgtagacgttttacaaatacctgcttttttatgtcgccaaaccgatcttttagtagctgcagctaaaacaaataaaatcattaacgttaaaaaaggtcaattcttagcgccatgggatatggtcaatgtaacaaaaaaaatttcagactccggtaataaaaatattctagtcactgaaagaggtgctagttttggttacaatactttagtctcagatatgagagcattacccatcatggcaaaaaatggttacccagtaatttttgatgcaacccattcagttcaacagccaggtggtcttggtgaaaaaagtggtggacagagagagtttgtagaacatttagcaagagcagctgttgcagtaggggtagcaggagttttcattgaaacacatcaagatc

SEQ ID NO: 242768 - DNA, 750 bp, Unknown
  Bacterial polypeptide expressing nucleotide sequence isolated from the Sargasso Sea
tctggcgggacccaacgttattgaatcgcgtgaacatgctcttcggatggctcatgcgatcaacaccatcgcctccagcctcagcctgacatatgtgttcaaggcttcctttgacaaggccaaccgcacctcacgagtttcctatcgtggacccgggcttgaggcagggcttcgcattctcgaagatgtcaagaagcttgtcggcgtgcccatcatcaccgacatccacgagccgtcccaggcagccacggtcgccgaagtggccgatatattgcagattccggcattcctgtgccgccagacggatctcattgtggccgcagcggagacgcaggccgtactgcacgtcaaaaagggccaatggtgcgacacctcggtcatggatgctgccgcggataaggcccgcgccgcgggcaaccgccagttcatcgcctgcgagcgcgggactcagtttggctacggcgacttagtggtggacccgcgcaacctgcactggttgcgctctgagaccggcctggttaccgccgatgtgacgcattcgctgcagcagccgggcggccggatcggcgacgccggtgagcgctccgcgggcggtctgcggccgctaatccctactgtggcgcgagcggcatgcgcggtgggcgtggacgggctattcatggaggtgcacgacgacccggccaattcgttgtgcgacgcaccgacgcagtggccgctgcgccatctccggccgctgctcgaggaatgcgc

SEQ ID NO: 242769 - DNA, 766 bp, Unknown
  Bacterial polypeptide expressing nucleotide sequence isolated from the Sargasso Sea
catgcttaattttaaatttaataacgactcaccattgaagattattgcagggccttgtcaaatagaatcagaagaacatgctatgatgatggcggatataattaatggcatttgtaatgatgtaggcatgcgttgggtgtacaaatcaagttttgacaaagctaatagatcctcgataaaaggcaagcgtggtgttggactaaaacgtggtctgcagatacttgagaaaataggaaagtcatttgatgtgcctttactaactgatgtgcatgagcctgaccagtgtggcgtggttggagaagtggttgatataatacagattcctgctttcctttgtaggcaaacggatctaattacagctgccgcacaaactaacaaaataataaatgttaaaaaaggacagtttatttcatacactgatgtggacaatatcaaaattaaagtcaatgaagcatggaatgatcaatttatgatcaccgaaagaggtacaatgtttggttataacaatcttgttgttgatataaaaggatttccatatatgaaaaaattgtgtcctgtaatatttgatggtacacattctgtgcaacaaccaggaggacatggcacatcatccggtggagataggagtatggttgctcctctatgcctgtcggcggttgcccaaggcattgctggagtatttcttgaagtacatgatgatccagataatgcgccatcagatggccctaatatgctaaccccagatcagttccggaaattaatcaca

SEQ ID NO: 242770 - DNA, 468 bp, Unknown
  Bacterial polypeptide expressing nucleotide sequence isolated from the Sargasso Sea
aatgaaaaatcataaagtaaaatgttctaattttgaaattgccaatgataaactatttactttaattgctggcccttgccagttagaaaacgaagcccatgcaatgaatatttcaactgagcttaaaaaaattacttctgatcttggaataaatttaatttataaaacttcttttgataaagctaatagaacgagtcttaaaggcaaaagagggatgggattagaaaagtctttacctatctttgataaaataagaaaagaggtgggtgttccagttttaacagacgttcatacagctgagcagtgttcaatcgtttctgatcatgtcgatgttttacaaatacctgcatttttatgtcgtcaaacagatttacttattgctgcagcgaaaacaggaaaaattattaacgttaagaaaggtcaatttttagctccatgggatatggctaatgtcataaaaaaaattga

SEQ ID NO: 242771 - DNA, 397 bp, Unknown
  Bacterial polypeptide expressing nucleotide sequence isolated from the Sargasso Sea
ccatgggatatggttaacgtaactaaaaaaatttctgactcaggaaatgataatattttagtaacagaacgtggagcaagttttggatataatactttagtatctgacatgagatctattccgattatgattaaaaatggatatccagttgttttcgatgcaacacattctgttcaacaacctggcggcttgggagaaaaaagtggaggacaaagagaatttgtagaatatttagcgcgcgcagcatcagctgttggtgttgcagcaatctttattgagacgcatcaagatcctgacaatgcaccttcggatggccccaatatggttccattaaataaattaaaggatcttttaactcaaataattgaaattgataaattagtaaaaaacttttaat

SEQ ID NO: 242772 - DNA, 739 bp, Unknown
  Bacterial polypeptide expressing nucleotide sequence isolated from the Sargasso Sea
gttgcagaaaaatttaaattaatatcagataagcttgagattaattatatttttaaaggttcatttgataaggctaatagaagctctgtttcctctttcagaggtccaggtatggatgagggtcttaaattacttcaagaagtttcaacagaatttaatgttcctgtagttactgatattcatgaaccagatcaagctaagccagtaagtgaagtatgtgaagttgttcaaataccagcttttttagcaaggcaaactgacttagtggttgctgcagcaaaaacaaatgctattttgcagtttaaaaaaccacagtttttatctgcacccgagatgaaaaacattacagaaaaatgtgaatcagctggtaacagtaaaattacactgtgtgagaggggtaactcttttggatataacaatttagttgtagatactcttaattttcaaattcttaagaatcttggtaagccagcaatttttgatgttacgcattcacttcaacttcctggaggtcttggtaatgctgctgggggaagaagggaatatctattaagtttggctaaagctggtatttctcagggaatagcaggtctatttttagaagcacatccagatcctgataaagctaaatgtgatggcccttgtgctcttcgtcttgatatgttggaaccttttttgcagcaaattaaagatctagatgtttttgtaaaaaaccaagaaaatttagatattttttagt

SEQ ID NO: 242773 - DNA, 527 bp, Unknown
  Bacterial polypeptide expressing nucleotide sequence isolated from the Sargasso Sea
tatgaaattaagaaattttaaaatagacaatacggaaccaatggttcttatgggtggaatgaatgttcttgaatcaagagatttagcaatgcaaattgcagaaacctttagagaaataacacagaaaaaaaatattaattacatatttaaaggttcttttgataaagcaaatagaagctcaattaattcatatagaggtccaggtatagaagacgggcttaaaatacttgaagagatatctaacacttttgatataccagttattactgatattcatgaaccagatcaggcaaagccagtaagtgaaatatgtgaagttgttcaaattccagcttttttagcaagacaaactgacttaataaaagctgctgctaaaactaaatcaataatacaatttaaaaaaccacagtttttatctgcatctgagatgggtaatgttgttgaaaaatgtagcttagctggaaatgaaaatatcactctttgcgaaagaggaaattcatatggttataataatttagttgttgata

SEQ ID NO: 242774 - DNA, 616 bp, Unknown
  Bacterial polypeptide expressing nucleotide sequence isolated from the Sargasso Sea
aatgtcgatagatataggtaaatctaaaaatctaacattgatatctggtccttgtgcgattgaatctgagaattcaactttatcaattgcagagtatatatgtggaataaccgagaatttgccaatatcatatatctttaaggcatcatttgataaagctaatcgttcatcaattgactcaaatagaggtgttggtattgaagaaggcttgaggattttagaaaaggttaaaaatacttttgatatccctgtcttaactgatgtccatgaagatacccctgttgatgaagtagctgatgtagttgatgtgttgcaaacgccagcatttttatgcagacaaaccaattttataacgaaagtatcatcaactatgaaacccgttaatataaaaaaaggtcagttcttatcaccaaaagaaatgatcaatgttgttaaaaaagctaaatccacaggaaataaagatatatatgtatgtgaaagaggcgtttcatttggttataataacctggtctcagatatgagatctttagaaatacttagagaaactggttgcccagttatttatgatgcatcgcattctgttcaaaaacctggtgctttaccgcatcagtctggg

SEQ ID NO: 242775 - DNA, 508 bp, Unknown
  Bacterial polypeptide expressing nucleotide sequence isolated from the Sargasso Sea
gttttagacataatccagataccagcatttttaagtagacaaacagatttgattgaagctgcatgcgctacctccttacccataaatataaaaaagggtcaatttcttgctccgtcagacatgaataatatactaaaaaaatgtagtcattttcaaaatgaaaatataatgatttgcgaacgcggaacctcttttggatacaataatttagttgttgatatgttaggaatggttgaacttaaaaataattctccagtaatttttgatgttactcattctttacaaaaaccaggcggtttaggtgataaagcggacggaagaggatctagcgttttagacttagcaagagcaggtatgtcccttggtctggctggattattccttgaagtgcatcctgatccaacgaaagctttatgtgatggaccatgtgccttgcctttacaaaaacttgatcaattcctgaataaagtcaagaacttagacgatttaatcaaggaatttaaataag

SEQ ID NO: 242776 - DNA, 331 bp, Unknown
  Bacterial polypeptide expressing nucleotide sequence isolated from the Sargasso Sea
aatgaaattatccaagcaagtcaatattggtgattttgtaattggtggagactctcttcctgttctgattgcagggccatgtgtaatagaaaataaagaagtaacactcaaatgtgctgaagttttgaaaaagatatcagagcaattaagtattaatacaatttttaaatcatcttttgataaggcaaatcgaagttcttcaacttcatttagaggacctggattagaggatggattagcaattttgtcagatgtgaaacaaaaaactggattgccaattctatctgatgttcattctgtttttgatattgaaaattcaaaagaaattctt

SEQ ID NO: 242777 - DNA, 772 bp, Unknown
  Bacterial polypeptide expressing nucleotide sequence isolated from the Sargasso Sea
aatggaaaataaaatagttaattgtaacggtataaaaatttcaaacaaaaataaaatttgtttaatagctggtccttgtcaacttgaaaccgagcaacatgctttggatatggcaggtaaaattaaagaaatcacaacaaagtataatattggatttatttataaaacttcatttgataaggctaatagaacaagcttgaaaggcaaaagaggagctggtttagaaaattccctacctgtatttgataaaatcaaaaaagatattaacgtacccgttcttactgatatacataatgtagagcaatgttccctagtttctaatcacgtagatattcttcaaataccagcattcctttgcagacaaacagatttattaattgctgctgctaaaaccgataaaattattaatgtaaaaaaaggtcaattccttgcaccatgggatatggtgaatgtaaccaaaaaaatttctgatagtggtaatgaaaatattttagtgaccgaaagaggagctagctttggctataatacattagtctcagatatgaggtctattcccatcatggcaaaaaatggttatccagtagtatttgatggaactcattcagtgcaacaacctggtggtctaggtgaaaaaagcggtggtcaaagagagtttattgggtatttgtcgagagcagcagttgcagtaggcgttgcagctatttttttggaaacacatcaggaccctgataatgctccatcagatggtccaaacatggtccctttagattaa

SEQ ID NO: 242778 - DNA, 409 bp, Unknown
  Bacterial polypeptide expressing nucleotide sequence isolated from the Sargasso Sea
tttttaattgcaggaccatgttctattgaatcaaaagatcatgcaattaatcatgcaggagtaataaatgaaatttgcaaaaaactaaaaattaattttgtttataaatcatcatttgacaaagccaatagatcaagcaaatactctgaaagaggtatcggtatagaaaaaggcttaaatattttatcagatgtaaataaagaatttaatattccaactcttactgatgttcacgaaagctatcaatgcaaagaagttgcaaaagttgtcgatattattcaaatacctgcttttttatgcaggcaaactgacttattaaccgccgctgctgagacacaaaaaattataaatataaaaaaagggcaatttttagcgccttgggatatgaaaaatgtgataaataaagttt

SEQ ID NO: 242779 - DNA, 752 bp, Unknown
  Bacterial polypeptide expressing nucleotide sequence isolated from the Sargasso Sea
ttgtcagcttgaaacagagcaacatgctatggatatgtctggtaaaataaaagagattactaaaaatcttggtattaattttatttataaaacttcatttgataaagctaacagaacaagtttaaaaggtaaaagaggtataggtttggaacaatcgttaccgatttttgataaaattaaaaaaataaataaagttcctatacttactgatgtacacaactcagatcaatgttctgtagtagcagatcatgttgatattttacaaatcccagcttttctttgtcgacaaacagatttattaattgcagcagcaaaaacaaaaaaaattatcaatgtaaaaaaaggtcaatttttagcaccatgggacatggtcaatgttacaaaaaaaatttctgactctggaaataacaatatacttgtaacggaaagaggtgcgagttttggttataatgctttggtttcagatatgagatctctgccaataatggccaagaatggttatccagttatttttgatgcaacacattctgtacaacaacctggtggactaggagagtcgagtggtggacaaagagaatttatagagtatttatcaagagctgcagttgcagtgggtgtagccggagtttttatggaaactcatcaagatccagacaatgcgccatcagatggccctaatatgattccattatctaatctcgaaaacttattaaaacaattaatagaaattgataacgttataaaaaaataat

SEQ ID NO: 242780 - DNA, 707 bp, Unknown
  Bacterial polypeptide expressing nucleotide sequence isolated from the Sargasso Sea
aatgggcgtggcggtttcgacccggcaactttggaggaagctcagcaacggtaaatccctgtttctcatcgcaggcccctgcgtgattgaaagcgaggcgttatgcctgagggtggcgcgttccttgcgcaaaacctgcgagcggctaggggtaacctatatttttaaggccagctatgataaggcgaaccggacttccggtaaaagtcgccgggggccgggattggaaaaggggctgcaaattttgaaaaccgtccgcgaaaaagtgaatgtgccggtattgacggatattcatgacgaagcgcaggcacgcgctgcagcggaggtggtggacgtgatccagattccggcgtttctctgtcgccaaacagatttgatcgaggtggccgcgcgcacctcggtgattgtaaatttgaaaaaaggccaattcctttcgccacaggaaatggggcaagtggtgaagaaggccgaagcggctggagggaagatgttgtttgtaaccgaccgcgggacgaccttcggctacaacaatctggtgtctgacatgcgttccatgccgatcatgcgggagtttggctggccggtggttttcgatgccacgcattcggtgcagatgcccggtggtgacggcgataagtccagcgggaatggagagtatgcgcccgtcctggcacgcgccgcagtggcggctggggcgaatggtgttt

SEQ ID NO: 242781 - DNA, 342 bp, Unknown
  Bacterial polypeptide expressing nucleotide sequence isolated from the Sargasso Sea
aaaatattttgattacagaaagaggagcaagttttggctataatactcttgtttcagatttaagagcattacctattatggctaaatacggtttcccaattgtttttgatgccactcattctgttcaacaaccaggaggaatgggtgaaaaaagtggtggacaaagagaatttgttccttatttagctcgtgcagccatagctgtaggagtaagtgcagtttttatggaaactcatgaagacccagataatgctccgtccgatggtcctaatatggttccattaagtgagataaaatctttattaaaaaaacttaccgaaatagacagaatagtaaaataaa

SEQ ID NO: 242782 - DNA, 760 bp, Unknown
  Bacterial polypeptide expressing nucleotide sequence isolated from the Sargasso Sea
atgaaactaagaaactttgatatcgataactctgaacctatgatattaatgggtggtatgaatgttcttgaatcaagagatttagcaatgaatgttgctgaaaaatttaaggaagttactgataaaaacgatataggatatatttttaaaggatcatttgataaagcaaacagaagttctataggttcatttagaggacctggcattgacgagggattaaaaatacttcaagagatttcaaatacctttgatattcctgtcataactgatatacatgaacctgaacaagctataccagtaagtgaaatatgtgaagttattcaaatacctgcctttttagccagacaaacagatcttgtaagagcggctgcacaaacaaaatcaattattcaatttaaaaaacctcagtttttatctgctcaggaaatggccaatgttgttgaaaagtgtgaatcagctggtaataagaatattaccttatgtgagagaggaaattcatttggctataataatttggttgttgacactttaaatttccaaatcttaaaaaaatttcttaagccagttatctttgatgtaactcattcccttcagcttccgggaggtctaggaacctcgactgatggaaggagggagtttgttttaagtcttgcaaaagctggaatgtcgcaatcaatagcaggtcttttcttagaagctcatccaaatcctgatgaagcaaagtgtgatggtccttgtgcacttccccttatcatgtcta

SEQ ID NO: 242783 - DNA, 268 bp, Unknown
  Bacterial polypeptide expressing nucleotide sequence isolated from the Sargasso Sea
atgattaatatcaatctaaaaaaattttctatctcaaataattttccatttgtattaatagccggtccgtgtgtaatagaaaatgaaagccactccttaatgattgcagaagaactaaataaaatatgcaatgatgttggaattaatttaatttttaaatctagttttgataaggcaaatagatcaagtattaatagtgatagaggtattaagctcgatgacgcattaaaaatctttgaaaaaattaaaactaattttaatttaccaa

SEQ ID NO: 242784 - DNA, 506 bp, Unknown
  Bacterial polypeptide expressing nucleotide sequence isolated from the Sargasso Sea
aatgaaaaatcataaagtaaaatgctcaaattttgatatcgctaacaatgagccattcactttaattgctggaccttgccaacttgaaagtgaggcacatgcaattaagatatctactgaattaaaaaagattactggagaactaggtattaatcttatttataaaacttcttttgataaagctaataggactagtttaaaaggtaaaagaggtttaggtttagataaatcattaccaatatttgataaaattagaaatgaggttggattaccagttttaactgatgtccatacatcagaacaatgcactattgttgctgaacatgtagacgttttacaaattcctgcattcttatgtagacaaactgacttactaatagcagccgctaaaacaggtaagattataaatgtaaagaaaggtcaatttttagcaccgtgggatatggcaaacgtaattaaaaagattgaagactctggcaataaaaatattttaattacagaaagag

SEQ ID NO: 242785 - DNA, 748 bp, Unknown
  Bacterial polypeptide expressing nucleotide sequence isolated from the Sargasso Sea
catggacatcaacataggcaatgacaagcctttctttctgattgcaggaccttgtcaaatagaatcgcaagaacacgcatataaaatggctagtgaacttacagagatcactaacaaactagacattccgttcatttacaaaagcagttttgacaaagcaaatagaaccagttattttggtaaacgtggagcaggactagaacgtggcatggaaatatttgattatctcaaagaaaaaattcctggattatacattatcacagatgtacacgaaaaagaacaatgctcaattgttgctccacacgtggacgcactgcaaatacctgcgttcctatgcagacaaacagacctattgattgaagcaggcagacaaggtgtttggcttaatgttaaaaaaggacagtttcttgcaccatgggatatgcaaaatgttgcagataaaatttcttatgcaacaaataacgaaatgattatgttatgtgaaagaggaactagttttggttacaatactcttataaacgatatgagaggattacacgaaatgaaaaagacaggttatcctgttgttatagatgctacacacagttgtcaacaaccaggtggacaaggtaccagttcaggtggcaacagagaacacatacctgtaattgcacaggcggctgttgctgttggtgttgctggtgtgtttatggaagtacatgatgatcctgacaatgccgcaagtgatgggccaaacaatttacattta

SEQ ID NO: 242786 - DNA, 244 bp, Unknown
  Bacterial polypeptide expressing nucleotide sequence isolated from the Sargasso Sea
tctgcacgccgtgaccccggcgaggccgcctccggagggcgtcgtgaccaggtgctcaagttggccaaggcgggggcagcggtgggcattgcaggcctgtttttggaagcccacccgaatccggatgaagccctctgcgatggccccagtgcattgccgctggcgcagctgcagccctttctcgagcaggtcaaagcggtggatgcactggtcaaatctcaacctgaactgaccatccaatgag

SEQ ID NO: 242787 - DNA, 780 bp, Unknown
  Bacterial polypeptide expressing nucleotide sequence isolated from the Sargasso Sea
ttttaattgcaggaccatgtgtaattgaaaacgaaaaaacaactcttttaattgcagaggaaattaataaaatttgcaatgatcttaatataaattatatttttaaatctagttttgataaagctaatcgctcaagtataaaaagtttacgaggtgtttcattaagtgatggtttaaaaattctaagtaaaataaaaaaagaatataattgtcctatcattactgatgttcacacagaacaacaatgtgaaatattaaacgataacaatgttatagatgtactacagatacctgcttttttatgtcgtcaaacagacttattaatatcagctggtaaaacaaataaaattgtgaatgtaaaaaaaggacaatttcttgcgccatcagatgttcaaaatatttttgaaaaaataaaatcagtcaataacaataaaattatgataactgaaagaggaactagttttggttataataacctcgtcaatgatttcagaggacttgatataatgaaaaagtttcaatacccagtaattttcgatggcacacattctgttcagcaacctggggggcttggtgataaaagcggaggtaaaagagaatttataccatctttgtgtaaagcggcagttgcgattggtgtagcaggtatttttcttgaaactcatcctgatcctgacaacgcaccaagcgatggtcctaatatgattcatttacaggacctaaaaaaattactattacaattaaaagaatatgatctcataacaaaaaaaaatgcctaaa

SEQ ID NO: 242788 - DNA, 565 bp, Unknown
  Bacterial polypeptide expressing nucleotide sequence isolated from the Sargasso Sea
gattcattatattttcaatcttcttttgataaggcaaatcgaacttcaattcacagtttccgaggtccaggaatggaagagggtttgtctattcttgagagcgtcagagatcaattgggcatacccgtgatcacagatgttcatgaggacactccgttggatgaggtcgcatcggtggttgatgtgcttcagaccccagcttttttatgcagacagaccaattttattatcaatgttgcctcacaacaaaaaccagtgaatattaaaaaaggtcaatttctctctccttgggatatggagaatgtcgtgaagaaagcaaagtctactggtaatgatgatattttggtatgtgagcgtggctatacatttggctacaataatcttgtatcagatatgcgttcacttgttatcctaaaagaaacatcatgcccagtgatttatgatgccactcactcactccaacttcctggtggaaagggtcaatcatcagatgggcaaagtgaatttatcattccagtctccagaggtgcggtcggtgttggtattgctgggatttgtcattgaa

SEQ ID NO: 242789 - DNA, 589 bp, Unknown
  Bacterial polypeptide expressing nucleotide sequence isolated from the Sargasso Sea
aatgttaaatagaatagttaaatgtaataattttgagatatctaataataaaaaaatatctctaatatctggaccttgtcaacttgaaactgaacaacatgctatggatatggcaggaaaagttaaggagattgcagcaaaatttgatattggatttatatataaaacttcatttgataaagcaaacagaactagtcttaaaggtaaaagaggtgcaggaatagatgtttcattacctgtatttgatagaattagaaaagatttaaatgttcctgttttaactgatgtacataatgtagagcaatgttctattgtatcaaagcatgttgacgtattacaaataccagcatttttatgtagacaaacagatttgttagttgctgctgctaaaacgaaaaaaattattaatgttaaaaaaggacagtttttagcaccatgggacatggtgaatgtaacaaaaaaaatttctgagtctgggaatgaaaatattcttgtaactgaaagaggagcaagttttggttataacactttagtttccgatatgagatcaatacctatcatggctaaaaatggttacccaatagtttcg

SEQ ID NO: 242790 - DNA, 261 bp, Unknown
  Bacterial polypeptide expressing nucleotide sequence isolated from the Sargasso Sea
agaatggatatccagtaatttttgatgcaacacattctgtacaacaacccggaggacaaggagagtctagtggaggacagagagaatttgttgaacatttatccagagctgctgttgcagttggagtggctggaatttttatggagactcatcaagatcctgataatgcgccatcagatggcccaaatatgattccattatctagtctagaaaatttattaaaacaattaatagaaatagataaaattataaaaaaataat

SEQ ID NO: 242791 - DNA, 565 bp, Unknown
  Bacterial polypeptide expressing nucleotide sequence isolated from the Sargasso Sea
aatgagtttatcccctaaaacaattagacctattgctgtgggcccctatttgataggaaatcaaaatcccctaacactcattggtggaccttgtgttattgagtcagaacaaaaagcaatgggtatcgcagaacaattaaaacgtatcaccacagattcaggggtgccatttatattcaaagcatcttacgataaagccaaccggacctccataaagtcttatcgggggcccggccttggaaacgggttaaagatattacaaaaaattaaaactcaactggatctaccaatcctttctgatgtgcataaagaagaagagatagaacctgcagcagaagttcttgatattttgcagatccctgcatttctttgccgtcaaaccgatctaatagttaaagcagcacaaacaggtaaacctattaatgtgaagaaaggccaattcctagcaccatgggatatgaaaaatgtagtttttaaacttgaggaaagcggtaataataacattttactcacagagcgaggtgctactttcggttacaacaatcttgttgttgatatgcgctca

SEQ ID NO: 242792 - DNA, 799 bp, Unknown
  Bacterial polypeptide expressing nucleotide sequence isolated from the Sargasso Sea
atgaataattttaaagttaattgtcaaaatatagaaatttcaaacgataataagatatgtattatcgctggaccttgtcagttagaaaccgagcaacatgccatggatatggctggaaaaataaaagaaattacaaaaaaatttggtcttgattttatttataaaacttcttttgacaaagctaatcgaacaagccttaaaggaaaaagaggagcggggcttgacacttcactgccagtatttgataaaattaaaaaagaattgaatattccaattttaactgacattcataatatcgatcaatgttcaattgttgctgatcatgtcgatgtattacaaattccagcatttttatgtagacagacagatttactaatcgcagctgcaaaaactaataaaattataaatgtaaaaaaaggtcaatttttagctccatgggatatggttaatgtcactaagaaaatttcagactctggcaacaaaaatattttagtaactgaaagaggtgcaagttttggatataatactttagtatccgatatgagatctttgccgatcatggccaaaaatggttatccagtaatttttgatgctacacattctgttcaacaaccaggaggtcaaggacagtcatctggtggacaaagagaatttgttgaatatttagcaagagcagctgttgctgtaggtgttgccggtgttttcattgaaactcatcaagatccagataacgctccttctgatggccctaacatgattccattagataaattagaacatttattaaaacagttaactg

SEQ ID NO: 242793 - DNA, 621 bp, Unknown
  Bacterial polypeptide expressing nucleotide sequence isolated from the Sargasso Sea
tgaaggagggcctaaggatgttagaaaaagttaaatctcagtttcatgttccagtaattacagacattcacgagccatctcaagcagaacaagtggccgaagttgctgatgtaattcagattccagcatttttatgcaggcaaactgacctagttgttgctgcagctaaaacaaaaaaaattattcagttcaaaaaacctcaatttttgtcagccaccgagatgaaaaacgttattgaaaaatgctcacaagctggaaatagtaagattattctttgcgagagaggaaattcttttgggtacaacaatttgatagttgatatgattaattttcaaattatgaaagaacttgacgtgccagttatatttgatgcaacccattctcttcaacttccgggaggccttggacatgctgcggacggcagaagagaatatttgctgccattagctagagctggattgagtcaatgtatcgctggactctttattgaagctcacccagatcctgacaatgcaaaatgtgatggtccatgtgcaatttcttccgacgaaatccccaaagttgtctctcaactggcagatcttgatgactttatcaaaaatcaagttagagctaattaat

SEQ ID NO: 242794 - DNA, 302 bp, Unknown
  Bacterial polypeptide expressing nucleotide sequence isolated from the Sargasso Sea
aatgaaaaatattaaattagctaattttgaaatttccaacaaaaataattttatcttaattgcaggaccgtgcgtaattgaaaatgaaagtcattctttgatgatgacagaacaaattgcaaaaatatgtcaaaaacttaaaattcattttatcttcaaatctagttttgataaagcaaacagatcaagcataaatagcaacagaggtgtagatataaatcaagctgaaaaaatatttaataagattaaatcaatatataattgtcctattttaacggatgttcataatgaaagtcagtgtg

SEQ ID NO: 242795 - DNA, 685 bp, Unknown
  Bacterial polypeptide expressing nucleotide sequence isolated from the Sargasso Sea
atgaagttaagagactttaaaattgataataacgaaaaaatgaccctcatgggcggtatgaatgttcttgaatcaagagatttggcaatggaagtggctgaaaaatttaagaatgtaactgataaaaatgatattaattatatttttaaaggctcttttgacaaagctaacaggagctctattaattcattcagggggccaggtttggatgaaggactaaaaatattagaggaaatttcaaaaacttatgatattcctgtaatcactgacattcatgagcctaatcaagcaaaatcagtaagtgaaatttgtgaggttattcaaatacctgctttccttgcaagacaaaccgatctagttagtgcagctgcaaaaacttcttccataattcaatttaagaaacctcaatttttatcagctcaagagatgtcaaatgtcgttgaaaaatgtgaagcagctggaaataaaaatattactttgtgtgaaagaggtaactcatatggatacaacaatttggttgttgatactttaaattttcaaattttaaaaaaattatcaaaacctgtaatttttgatgtaacacattcacttcaattaccaggaggcttaggaagttcaactggtggtagaagagaatatgttttaagtcttgcaaaagcttggtatgtcgcaatcaatagctgga

SEQ ID NO: 242796 - DNA, 310 bp, Unknown
  Bacterial polypeptide expressing nucleotide sequence isolated from the Sargasso Sea
ttggatacacactttagtctctgacatgagatcattacctataatggcaaagaatggttatccagtaattttcgatgccactcattctgttcaacaaccaggtggccaaggagaatcctctggtggtcaaagagaatttgttgaatatttagcaagagctgcagttgcagttggagttgctggtgtatttattgaaacgcatcaagatcctgacaatgcaccttcagatggaccaaacatggtaccattgaataaattagagaatctattaaaacaattacacgatatagataatctaattaaaaaatag

SEQ ID NO: 242797 - DNA, 712 bp, Unknown
  Bacterial polypeptide expressing nucleotide sequence isolated from the Sargasso Sea
aaagaaataacacaaaaacttaatattggattaatttacaaaacatcatttgataaagctaacagaacaagtttaaaaggtaaaagaggagcggggcttgataaatctttgcctatatttgataaaataagaaaggatttagaaataccagttttaactgatgtacataatattgaacaatgtgaaatagtttctaaacatgttgatatattacaaattccagcttttttatgtcgacaaacagacttgttagtagctgcaagcaaaactggaaagattataaatgttaaaaaaggtcaattcctagcgccgtgggacatggttaatgttacaaagaaaattgaagattcaggaaataaaaatattttagtgacagagagaggtgcaagttttggttataatactttagtttcagacatgagatctatacctataatggcaaaaaacggttatcccgtagtttttgatgcgacacactctgtccagcaaccgggaggaatgggagacaagagtggaggacaaagagaatttgtcgaacatcttgcgcgagcagctattgctgtaggtgttgctgcaatttttatggaaacacacccggacccagacaacgcaccgtccgatggccctaacatggttccattatcaaaaatgccagatttacttaaacaattagtcgaaattgataaattggtaaagaatggcaaaaattaat

SEQ ID NO: 242798 - DNA, 703 bp, Unknown
  Bacterial polypeptide expressing nucleotide sequence isolated from the Sargasso Sea
aaagtaaattgtgaaaatatagaaatttcaaacaactttaagatttgtattattgcaggtccatgccaacttgagactgagcaacatgcactagatatggctggaaaaattaaggaaattacctcaaaatttggacttggatttatttacaaaacttcatttgataaagcgaatagaacaagtttaaaaggaaaaaggggagcaggattagatgcatcacttcctgtatttgataaaattaaaaaggaattaaatgttcctattttaacagacattcataatgcagaacaatgtgaagttgtttcaaaacatgtcgatgttttacaaattccagcttttttatgtcgacaaacagacctgttaattgctgcagctaaaacaaataaaattattaatgttaaaaaaggtcagttcttagcaccgtgggatatggttaatgtaactaaaaaaatttcagagtctggaaatgataaaatattagtaactgaaagaggtgcaagttttggatacaacactttagtctctgatatgagatcattacctattatggcaaagaatggttatccagtaattttcgatgcaactcattctgttcaacaaccaggtggccaaggacaatcctctggtggtcaaagagaatttgttgaatatttagcaagagctgcagttgcagttggagttgcaggtgtatttattgaaacgc

SEQ ID NO: 242799 - DNA, 823 bp, Unknown
  Bacterial polypeptide expressing nucleotide sequence isolated from the Sargasso Sea
gctgtgcggattcaatgtcggcctggaccagcgtttcttcttgatcgcgggtacctgctccatcgaaggcctggagatgtcgctcgacgtcgcgggccagctcaaggaagcctgtgcaccgctgggcatcccgctgatctacaaaggctcctttgacaaggccaaccgctcctccggcaccagcaaacgtggtgtggggctggaagccggcctgaagatactggacgaagtgcgccgccagctgcagctgcccatcctgaccgatgtgcacgacacctcgcacgtggccgaggtggccagcgtggtggatgtgctgcaaacgcctgcctttctgtgccgccagacggatttcatccgcgccgtggcgcaaagcggcaagccggtcaacatcaagaagggccagttcctcgcgccctgggacatgaagaacgtcattgacaaggcccgatcggcagcagccgaggtcgggctgtcagaagaccggttcctggcctgcgagcgcggcgtgagctttggctacaacaacctcgtggcagacatgaccagcctggccgagatgcgcaactctggcgcccccgtggtgttcgacgtgacccactcggtgcaaaagcccggcggcctgggcgccgtgagcggtggcgcgcgcgacatggtgcccgtgctggcgcgtgccggtgtggccgtgggcgtggcgggcctcttcatggaaacccacccccgccccgccgaggcctggtcggacggccccaacgccgtgccgctcaagcacatgaaggcgctgctggagaccttggtggcgctcgatgacgttcaccaagaaaaa

SEQ ID NO: 242800 - DNA, 640 bp, Unknown
  Bacterial polypeptide expressing nucleotide sequence isolated from the Sargasso Sea
atgaaagatatttcaataaaagattttcaaataggaaatgatcaagattttaccttgatgggtggaatgaatgttcttgaatcagaagagacagctcttttagtagccgaaaaatttaaagaagttactgataaattagaaataaattggatttttaaagcctcctttgataaagctaatagaagttcaattgaatcctttagaggcccaggtatgaatgaaggactcaaaatactcgaaaaagtctcatcatcatttgatgttcctgtaattaccgatatacatgagccaagccaggctgatcctgtaagtgaagtttgcgaagttattcaaattcctgcatttctgtgcagacaaaccaatctcgtttcagcggctgctaaaacaaagtcagcaattcaatttaagaagccacaatttctttcagcagctgaaatgagaaatgttgttgaaaaatgtaagtctgctggaaatgaaaagattattttatgcgagagaggaaatatttttggttataacaatcttgtagttgatactcttaatttccagataatgaaagaatattctgtaccggttatgtttgatgtaactcactcactccaacttcccggaggtctggaaaatctactgatggtagaag

SEQ ID NO: 242801 - DNA, 526 bp, Unknown
  Bacterial polypeptide expressing nucleotide sequence isolated from the Sargasso Sea
aatgaaaaatagtaaaataaattgtaatgatatagtattttctaatgatgtagatttttgtcttatatctggtccgtgccagattgagtccgaaaaccatgccttagatattgcaggaaaattaaaagagataacaattaaaaataacgtaaaattcgtctttaaaagctcttttgataaagctaatcgaactagtataaattctaaacgtgggttaggattagaaaaatcattaaaaatttttgagaaaattaaaaaagaacttaatttaaatattcttactgatgttcatactagtgaacaatgctctttagttgcaaaatacgtagatataatacaaatccctgcttttttatgtagacaaactgatttattagtatcggctgcaaaaactaataaagtaataaatataaaaaaaggtcaattcttggccccctgggacatcgttaatgtaataaataaagtaacagaatctggaaataaaaatattcttttgacagagagaggtacatcatttggttataac

SEQ ID NO: 242802 - DNA, 576 bp, Unknown
  Bacterial polypeptide expressing nucleotide sequence isolated from the Sargasso Sea
aaaaagaattaaatgttccgattttaaccgatgtccacaatgaaaagcattgtgaagttgtgtccaggcatgttgatattttacagattccagctttcttatgcagacaaacagatttattaatcgcagcagctaaaacaaataaaattattaatgttaaaaaaggacaatttttagctccatgggatatggttaatgttacaaaaaaaatttcagactcaggaaatgataatattttggtaactgaacgtggtgcaagttttggatataatactcttgtatcagatatgagatcaattccaatcatggttaaaaatggatatccagttgtatttgatgcaactcattctgttcaacagccaggaggtcttggagagaaaagtggtgggcaaagagagtttgttgaatatctagctcgagcagcatctgcagtaggtgtagcagcaatatttatggaaacacatcaagaccctgataatgctccttcagatggaccaaatatggttcctttgaataaattagagagtctattaaaccaaattatagaaatagataagttagttaaaaacttttaat

SEQ ID NO: 242803 - DNA, 643 bp, Unknown
  Bacterial polypeptide expressing nucleotide sequence isolated from the Sargasso Sea
atgcatctctgcggatatgaagtaactgatagcagccaattttttttaattgcgggcccatgcgttctggagtcggaagcgctggctatggagagttcgtcctatcttaaagcagtttgtgatgatcttagaatccctttgatctttaaatcttccttcgataaagctaatcgaagctctcatgaaagtttccgaggcctaggaatcgaaaagggattgagaatattggagaaagtgaaagtggaggtgggtgtccataccttgactgatgttcatgaagatactcctctagacgaagttaaggatgtagtttctgttttgcagactcccgccttcctatgtcgtcagactaattatatccaacgagttgctggtaccggtttaccagttaacataaaaaagggtcagttccttgcgccctcagatatgaaaaatgttgttgaaaaagcgagagcagttgggaaccccaatattctagtttgtgagagaggagttagttttggatacaataatttagtttctgacatgcgagctctaccaattttgagagaaacagggtgtccagttgtttttgatgcaactcatagtgtgcaatttccgggtggcaggggtagctcttccggcggcgatagagaaatggtgc

SEQ ID NO: 242804 - DNA, 841 bp, Unknown
  Bacterial polypeptide expressing nucleotide sequence isolated from the Sargasso Sea
ataatatttatgaaattacgaaactttgaaattgaaaataataagccacttactttgatgggaggaatgaatgtgcttgaatcaagagatttggctatgcaagttgcagagaattttaaaaaagttactgataaattgaatattaattatatttttaaagcttcatttgacaaggctaatcgaagttcaatttcttcatttagaggacctggattggaagaaggactaaatatattgaaagaagtttctgatgggtttgacgttccagtaattacagatattcatgaacctgatcaagctttaccggtaagtgagatttgtgaggttatccaaattccagcttttcttgcaagacaaactgatcttgttaatgctgcagcaaaaactaaatcaattattcaatttaaaaagcctcagtttttatcagcacctgaaatgaaaaatgttgttgaaaaatgtgccgctgcaggaaactcaaacataatactctgtgagcgtggtaattcgttcggatataataatctagtagtagataccttaaattttcaaatattaaaaaaattaatgacgcctgtagtttttgatgtaacccattcacttcagcttcctggtgggctcgggggctcaactgatggaagaagggagtatgttctaagtctagctaaagcaggtatctctcaatcaattgctggactctttcttgaggctcatccaaatccagatgaagcaaaatgtgatggaccatgcgcgctgccattatcaatgcttgaggaattcttgactcaaataaaagagttagataattttattaaacaacaagaatatttaaatatttcctgat

SEQ ID NO: 242805 - DNA, 550 bp, Unknown
  Bacterial polypeptide expressing nucleotide sequence isolated from the Sargasso Sea
tatgaaagaaaaagagattgaattcgcaaacatcaggttatctaatagcaaacctttcgttttatttggtggattaaacgtcttagaaacaaaaagtcttggactacaagtagcagaaacatttaaaaatgtttgtgaggctctagatattcaattagtctttaaggcttcctttgacaaggcgaatcgttcttcagttacttcgtatcgtggcccaggactggatgaaggacttagatggttggatgatataaaacaacaatgcgatgtaccaatcattaccgatgttcatgaggttgttcaagtaaagccagtcgcggaagtagctgatgtaattcagctgcctgcctttttgtcacgtcaaactgatttaatttgtgcgatggcagcaacggataaggttattaatataaagaaagcgcaattcctcgcgccggaagaaatggcttacattatcgagaaatttgaaagtttggataataagaagttaattctttgtgaaagaggcagtatttttggatacaagaatttgattgttgatatgcttggt

SEQ ID NO: 242806 - DNA, 607 bp, Unknown
  Bacterial polypeptide expressing nucleotide sequence isolated from the Sargasso Sea
acttcaagaagtctcaaactcgtttgatgttccagtaattacagatattcatgaagttgatcaagcaaaaccagtaagtgaagtttgtgaggttattcaaattcctgcttttttagcaagacaaactgatctagtttctgctgctgcaaaaacaaattcaataatccaatttaaaaaaccacagtttctttcagcacctgagatggtaaatgttgtagagaaatgcaacgcggcaggcaataaaaatattattctttgcgaaaggggtaatacatttggatataataatttggttgttgacacattgaattttcaaatcttaaaaaaaatagggactccagtaatttttgatgtaactcattcacttcagttacccggaggtctaggaagtgcaacaggaggcagaagagaatttgtattaagtttagcaaaggctggaatctctcaatcgattgcaggactttttttagaagctcatccatatcctgatgatgcaaaatgtgacggcccttgtgctcttccattaaacgtcttagatgattttcttgaacaaattaaaaacttggatgattttgttaagaatcaagatgatttagacattgaataa

SEQ ID NO: 242807 - DNA, 490 bp, Unknown
  Bacterial polypeptide expressing nucleotide sequence isolated from the Sargasso Sea
agacttagttgttgctatggcaaaaacaggtgcgattatcaatgttaaaaagccgcaatttttagcaccacatgaaatgcgccacatcattactaaatttaatgaggctggtaataataatattgcactttgtgagcgtggctctagctttgggtataataacctggttgttgatatgttaggtatggatgacatgaaggcaatggcaccagttatatttgatgcaacgcatgcgctgcaacgcccaggtggtcgtgcagattcagctgatgggcgtcgagctcaagcggcagagttagccagaagtggaatggctttggggatcgctggtttatttatagaagcacatccaaaccctaatgaagcaaagtgtgatggaccatgtgcattagccctaagcaaattagaaggctatctatcgcaaatgaaagcggtagatgatttggttaagagttttgcgccgttagataccagtgctagcgacttataa

SEQ ID NO: 242808 - DNA, 562 bp, Unknown
  Bacterial polypeptide expressing nucleotide sequence isolated from the Sargasso Sea
tatgaatacaattacaattggaaacgttaaatacgaaagcggatcgtttccattgattgccggtccatgcgttattgaatcaagagatcatatattaatgatggcagagcagattcaaaaaattactagcaccatgaatattccattaatatttaaaagctcttttgataaagctaatcgttcagcaatagattcttttagaggacctgataatttagatacaggactgtcaatattaaatgacgtcaaaaccgaacttggaattccggtattaacagatgttcatcttcctgatcagtgtaaggcagtagctgaggtttctgatgttttacaaattccggcttttctatgtaggcagactgatttattaattgcagcaggaaaaactggaaaagcaataaatataaaaaaagggcaattccttgcgcctggcaaaatgaaatatgttgcagaaaaagttgaatcaactggtaataaaaatattttactaacagaaagaggaagctcttttgggtatagtttagtttcggatatgacatctataccagttatgcaaaatgta

SEQ ID NO: 242809 - DNA, 813 bp, Unknown
  Bacterial polypeptide expressing nucleotide sequence isolated from the Sargasso Sea
tttgaaaataaaaaatatcaaagttggtttgggcgatcctttttttttgattgctggtccgtgcgttatcgaatcccgaggaattgtattggagattgcgaatcaactaaaaatgatcacggattatgcgaacgtcccgttcattttcaaggcttcatttgataaagccaataggacctcgggggaatcttttagggggctaggtatggagcaaggtctgaagatacttgaggaagttaaaaatacctttggttgtccagttttgaccgatgtccataacatagatcatatcggagaggtagccagcgttgtagacgtactccaaacgccagcatttctttgcagacaaacggattttatacaaaaagtagcctctgctggaaagcccgttaatattaagaaaggtcagtttttggctcctagtgaaatgaagtttgttgtagaaaaagctttaaactcaagtagggaaaaaaacattatggtttgtgagcgaggtagttcatttggatacaataatcttgtatcggatatgagatcgttggttattatgagagaaacgcaatgcccggtggtattcgatgctacccattccgttcaattgccaggaggttcggggaaatcgagtggaggacaaagggagtttgttccgccactagctcgagctgctgtttcagtgggggtttctggaatattcatggagacccaccccaatccaagcgaagcattgtctgatggaccgaattcttggcccttggatcaaatgggagaattactcaagaaattaaaggcgcttgatgttattgtaaaaggaag

SEQ ID NO: 242810 - DNA, 478 bp, Unknown
  Bacterial polypeptide expressing nucleotide sequence isolated from the Sargasso Sea
atttttatgcagacaaacagatttattaattgctgcagctaaaactaataaaattattaatgttaagaagggacaatttcttgcaccatgggatatggttaatgtaacaaaaaaaatttctgattcaggaaatgaaaatatattagttacagagagaggcgcaagtttcggatataatacattagtatcagacatgagatcaatacccataatgtcaaaaaatggatatccagtcgtatttgatggtacacactcagtccaacaacctggaggactaggagaaaagagtgggggtcaaagagaatttgttgaatatttatctagagctgctgctgcagtaggagttgcagcaatttttttagaaactcatcaagatcctgataatgctccatcagatggtccaaatatggttcctttaaataaattagatgttttaataaatcaaattgtagaaatagacaatttagttaaaaaataa

SEQ ID NO: 242811 - DNA, 703 bp, Unknown
  Bacterial polypeptide expressing nucleotide sequence isolated from the Sargasso Sea
aaagtttgctttaagaataatgtgaaacttattttcaaagcgagctacgataaagctaaccgttcatcgataggatctgctagagggataggaatagaagaaggattacgaattcttcaggatgtctccaaagcatttgactgtcctattattacagatgtccacgaaccttctcattgtgaaattgtatcagaagtcgttgatatattgcaaataccagctttcctttgtcgccagaccgatcttttaatagcggcaggaaagactggtaggccagttaatgtcaagaaaggtcaatttctggcaccccaagacatgtggaatgtggctgagaaaattgttagcacaggcaacaaaaatattatgctctgtgaaaggggcacaagttttggttataacacgttaataaatgatttccgtggtatagaaattatggcagaaactggttatcctgttatttttgacgcaacacattctgtacaaaaaccaagtaatctaggaaatgcttctggtggggaaaggaagtttgtgtatggtcttgctcgagctgcttgtgccgtgggtgtgagcgggctattcattgaaacccaccaggatcctgataatgccccctccgatggtcaaaatatgatccctattgatcaaatggatattcttgttccgtctctaaaggcttttgatgcactccgaaaaaatctttagt

SEQ ID NO: 242812 - DNA, 823 bp, Unknown
  Bacterial polypeptide expressing nucleotide sequence isolated from the Sargasso Sea
tatgaagataaataatataaatatcggtaatgagttacccttcgtattaattgcaggtccatgtgcaatagaaaatcttgatagtgcactatttcatgctgaaaaaattaaaaatatatgttttgatctgaatatacctttaatttataaatcttcatttgataaagcaaacagaacgtccatatcttctgaaagaggaattgggattgatgatggtctcgaaatattatctaaagttaagaaagaatttaatttaacaatcatcacggatatccatgatgcatcacaatgtcaacaagtatcttctgttgttgatattttacaaatcccagcctttttatgtaggcaaactgatttattagttgctgcggctaaaacagattgcgttgtaaatgttaaaaaaggtcaatttttagctccatgggatatgcatcaagttgtaaaaaaaataaaaaattcaggaaataataaggttttagttactgaaagaggagtttcatttggttataataccttagtttctgatatgagagctttacctgaactaaaaaaatcaaactgtcctgtaatttttgacgctactcatagcgttcaacaacctggtggaaaaggtaatagctctggtggagaaagaaattatgtatctgttctttctagagctgctattgcagtgggtgttgctggtatatttatggagacacataaagacccagatagcgcaccttcggatggcccaaatatgatacctttagatgagcttagcaatctattaaagttgttgaagaattttgatgacttatcaaaatctaatattaaattatag

SEQ ID NO: 242813 - DNA, 737 bp, Unknown
  Bacterial polypeptide expressing nucleotide sequence isolated from the Sargasso Sea
aagtgaggaacatgcaataaaaatttctactgaactaaaaaagataacaggggagttaggaataaatttaatttataaaacatcatttgataaagctaatagaaccagtttgaaaggtaaacggggattaggtttaaataaatctttgccaatttttgataaattaaggaaagatgttggtgtcccggtgttaacagatattcattcggtcgatcagtgttcagtaatatcaaatcacgttgatgttttacaaattccagcatttttatgtagacaaacagatttattagttgctgctgctaaaactggtaaaattataaatgtgaaaaaaggacaatttctcgctccatgggatatggctaatgttattagaaaaattgaagactccggaaataaaaatattttaattactgagagaggagcgagctttggttataacactcttgtttctgacatgagagctttgccaataatgtcaaaattcggtttccctattgtatttgatgctacgcattcagttcaacaaccaggaggaatgggagaaaaaagtggaggtcaaagggaatttgtcccatacttagctcgcgcagccatagctgtaggtgtaggtgcaattttcatggagacccatgaagatccagataatgcgccatcagatggtccgaacatggttccacttaatgaagtaaaaaatttattaaaacaattaacggaaattgataaattagtaaaataat

SEQ ID NO: 242814 - DNA, 805 bp, Unknown
  Bacterial polypeptide expressing nucleotide sequence isolated from the Sargasso Sea
aatgggtataaaaatatctaataaaaacgcattaacattaattgcaggaccatgccaattagaatctgagcaacattcaatggatatggctggaaaaataaaagaaatagctaataaatttggtataggttttatttataaaacttctttcgataaggccaatagaacaagtttaaaaggtaaaaggggtgctggattagaaaaatctttgcctgtttttgataaaattaaaaaagatttaaaaattccggttttaacagacatacataatgaggaacaatgctctttaatatcaaatcatgtggatgttttgcaaataccagcatttctttgcagacaaactgatttattaattgctgctgcaaaaacaaataaaattattaatgtaaaaaaaggtcaatttttagcaccatgggatatggcaaatgttacaaaaaaaatttcagactctggtaacaataatattttagttactgagagaggtgcaagttttggttacaatacgctcgtatcagacatgagatcattgccaataatgtctaagttaggttatcctgttatatttgatgcaacacattccgtacaacaaccaggaggaatgggtgacaagagtggcggccaaagagaatttgtagaatatttatctagagcagcagttgcagtaggggtagcaggtgtttttattgaaacacatcaagatcctgataacgcaccttctgatggtccaaatatgttacctattaataagttagaacaattattaaatcaattatttgaaatagataagcttgttaaaagtaaatga

SEQ ID NO: 242815 - DNA, 628 bp, Unknown
  Bacterial polypeptide expressing nucleotide sequence isolated from the Sargasso Sea
gaccgcggaataggaatagatgaatcaattaaaatttttgataaactgaaaagtgaatattcactaaaaattttaacagatgttcacagcccgagtgactgtgataaaataaaaaaacatgtagacattctccaaattcctgcctttttatgcagacaaacagatttacttatatctgcagctgctactggaaaaattattaatgttaaaaagggtcaatttttagctccacatgacatgtttaatgtagcaaataaaattattgaatctggaaataaacaattattattgactgaacgaggcgcttcttttggatacaataaccttgtttcagatatgagatctctagaaattatgaaacaagaaattttatatcctgttatttttgatgctactcactcagttcaagctcctggagggaaaggaacttcaagcggaggagatagaaaatttgttcctgttcttgctaaggcagcggttagcacaggaattgcaggagtttttatggaaactcacaatgatccagataacgcaccttctgacggccctaatatggtccctgttgatgaattggaaaaattactatacaaactaattcaaattgacagtatagttaaagaaaattaat

SEQ ID NO: 242816 - DNA, 508 bp, Unknown
  Bacterial polypeptide expressing nucleotide sequence isolated from the Sargasso Sea
gttgccggccttcctctcgcggcagaccgatctggtggtggccatggccaaaaccggcgcggtgatcaacatcaagaaggcgcagttcctcgctccgcaggaaatgaagcacatcctgaccaagtgtgaagaggccggtaatgatcagttgattctttgcgagcgcggcagctccttcggttacaacaacctggtggtggacatgctcggcttcggcatcatgaagcagttcgagtacccggtgtttttcgacgtgacccacgccctgcagatgccgggtggccgcgccgattcggccggtggccgccgcgcccaggtcaccgacctggccaaggccggcatgagccagggcctggccggtctgttcctcgaagctcatccggatccggaaaacgccaagtgcgatggtccatgcgccttgcgcctgaacaagctggagccgttcctcactcagctcaagcagctggatgacctgatcaagagttttccgccaatcgagactgcctga

SEQ ID NO: 242817 - DNA, 835 bp, Unknown
  Bacterial polypeptide expressing nucleotide sequence isolated from the Sargasso Sea
atggaaaatagaattgttaagtgtcaggatataaatatatctaacttaaataaaatttgtttaatagcaggaccttgtcaattagaaactgagcaacatgctttagatatggcaggggaaattaaaaatattactgacaaatataatattggatttatatacaaaacatcatttgataaagctaatcgtacaagccttaaaggtaaaagaggagctggattagagaaatctttaccagtttttgacaaaataaaaaaacaaataaaagttcctgtgctaaccgatattcataccgaggagcaatgtttaattgttgcaccgcacatagatgttttgcaaatccctgcatttttatgtcgacaaacagatttattggttgctgctgcaaaaacaaaaaaaattattaatgtaaaaaagggacagtttttagctccatgggatatgataaatgtaacaaaaaaaatatcggagtcagggaataataatattcttgtaacagagagaggggctagttttggatataacactttagtaacagatatgagatcaatacctataatggcaaaaaatggttatccaattgtttttgatgcaactcattcagttcagcaaccaggtggtcaaggtgataaaagtggtggacaaagagaatttgttgaacatttatctcgagcagctgtcgcagttggtgtagctgcaatttttatagaaacacatcaggatcctgataatgctccttctgatggaccaaatatggtcccacttaaaaaattagataatcttgtaaatcagatagttgaaatagataatctaataaaaaaaataaatgtctaaa

SEQ ID NO: 242818 - DNA, 277 bp, Unknown
  Bacterial polypeptide expressing nucleotide sequence isolated from the Sargasso Sea
cgaatacccagtgttcttcgacgtgacccacgcgctgcaaatgcccggtggtcgctcggactccgctggcgggcgacgtgcccaggtgacggacctggccaaggcgggcatgagccagtccctggcgggcctgttccttgaagctcacccggacccggacaacgccaaatgtgatggcccatgcgccctgcgcctggacaagctggagccattcctggcccaactcaagcagttggacgagctggtcaagagttttccgacggtagagaccgcgtaa

SEQ ID NO: 242819 - DNA, 826 bp, Unknown
  Bacterial polypeptide expressing nucleotide sequence isolated from the Sargasso Sea
aatgaaaactatcaaaataggagattttgaaatatctaataaaaagaatttaatcttaatagctggtccatgtgtaatagagagtgaaagtcactctttgattatggctgaaaaaattgctactgtttgtcaaaaactaaaaattaattttgtttataagtctagttttgataaggctaacagatcaagtataaatagcaatagaggtatagaaataaatcaagctgaaaaaatatttgataaaattaaatctacttttaattgccctattttaactgatatccacaacgaaagtcagtgtgaatttttatcaaaatcagaaagtgttgatgttcttcaaataccagctttcttatgtcgacaaactgacttattaatttcagcggcaaaaacaaataaaattatcaatgtaaaaaaaggtcagtttttatcaccatatgagattccaaatatttttaaaaaaattgaaagtgcaggcaaccacaatgttatgattacagaaagaggtacatcatttggctataataacttaatcaacgattttaaatctttagatattatgaaaaactatttatatccggtcatttttgatgcaactcactctgtacaagaaccaggtggaatgggagaaaagagtggaggtaaaagagaatttgtttctactttatctaaagctgctgttgctgtgggagttgcaggtatttttattgaaacacataatgatcctgataatgctccaagtgatggtcccaatatgttacatattgaaaacttagagagtttaatttcaaaattaattgaattagatactgtttcaaaaaaataa

SEQ ID NO: 242820 - DNA, 838 bp, Unknown
  Bacterial polypeptide expressing nucleotide sequence isolated from the Sargasso Sea
aatgattaaaatagacttaaataatttctccattgcaaataatttaccttttgtattaattgcaggaccgtgtgtaattgaaaatgaagaccatactttaatgatggcggaagaaattaataatatatgttctgaattaaagatcaattttatttttaaatcgagttttgataaagctaatagatcaagtattaaaagtaaaagaggagtctcaataaaagatgcattagaaatatttaaaaaaattaaatctaaagttaattgcccaattatcactgatttacatactgaaatacaatgcaaaatgttatcagaaaatcatgatatagatatattgcaaatacctgctttcttatgtcgtcaaactgatttattaattgctgctggtcaaactaataaaattattaatgttaaaaagggacaatttttagctccaaatgatgttcaaaatatttttgaaaaaatagaatcagttaataataataaaattttaattacagaaagaggtactttttttggatataataatctaattaatgattttagaagtttagaaataatgaaaaaatttaaatatccagtaatttttgatggaactcattctgttcagcaacctggtggtctaggtgacaagagtggaggaaaaagagaatatgttgctcctttatgtaaagctgcagtctctataggagttgctggcatttttttagaaacccatgatgatcctgatagcgctcctagtgatggccctaatatgttaaatcttaaagatttaaaaaaattattaattgaattaaaagaatttgacataattgcaaaaaaaaatgccaaaaattaa

SEQ ID NO: 242821 - DNA, 595 bp, Unknown
  Bacterial polypeptide expressing nucleotide sequence isolated from the Sargasso Sea
aaatatttatagtttaagaagtgaatatggaattcatatattgactgatattcatagtgttgatgattgtgatcaaattaaagaccatgtagatattttacagatccctgcatttctatgcagacagactgatcttttgatagccgcagcaaaaactaataaagtagtaaatataaaaaaaggacaatttctcgcgccaatggacatggttaatgtggcaaaaaaagtcagtgatagcggaaataataaaatattattaactgagcgtggtgtttcgtttggttataatactctcgtttcagatatgaaatcattgcaagtaatgaaagaggaaatcggttttccagtcgtgtttgatgcgacacattcagttcaaagtccaggtggtaaaggtgatagaagtgggggagataggaaatatgtacctactttagcaaaagcagcagtcgccgttggggtatcttcagtatttatggaaactcacgataatccagatgttgctccttcagatggaccaaatatggtaaaactagaagaattagagaaattagtttctaaacttattcaaattgacaatttagttaaagaaaactaa

SEQ ID NO: 242822 - DNA, 787 bp, Unknown
  Bacterial polypeptide expressing nucleotide sequence isolated from the Sargasso Sea
atgacccttatggggggagtaaatgttttagaatctgactcagtagtaatgaatgttgctgaaaaatttgcagaatcaactcaagatctcaatatcaattggatttttaagggttcatatgacaaagcgaatagaagctcaatttcgtctttccgagggccaggaattgaagaaggcttaagaatgctagaaaaagttaaatctgagttcaatgttcctgtaattaccgatatccatgaaccatctcaagctgaacaagtggctgaggtaagtgatgtaatccagatcccagcatttttatgcagacaaactgatctagttattgcagcagcaaaaacaaataaaattattcagttcaaaaaaccgcaattcttatctgcaattgagatgaaaaatgttattgaaaaatgcatgcaagctggaaacaaaaaggtcattctatgtgaaagaggcaattcttttgggtacaacaatttaatagtagatatgattaattttcaaattatgaaagaactcgaagtgccagttatatttgatgcaactcattcactgcaacttccaggaggtcttggacatgctgcaggcggaagaagagaatatttattgccattggcaaaagcaggcttaagtcaatgtattgctgggctttttattgaagctcatccagatcctgataatgcaaaatgcgatggtccatgtgcaatctcttctgatgaaatctctaaagttctaaatcaacttgtagccttggatgaatttattaaaaatcaattcagagctgattaat

SEQ ID NO: 242823 - DNA, 826 bp, Unknown
  Bacterial polypeptide expressing nucleotide sequence isolated from the Sargasso Sea
attgagctcaataaaaataggtaaactagaaatatcaaacaatgcccctttagtttttatagcaggtccatgtgcaatcgagtccaaggcacattcattatcaatggcgcacaatttaaagaaaatatcaactgaacttggagtagggcttatatttaaaagctcttttgataaagcaaatagaacgagtgtaaaatcaaaaagaggtgttggtttagatgcttcattggatatatttgcagcaatcaaagaagaaactgatctaccaatattaacagatgtgcatgaacctgagcagtgtaatattgttaaagactatgtcgatgttttacaaatacctgctttccttgcaagacaaacagacttaattttagctgctgcaaatactcagaagcctgtgaatattaaaaaatctcaatttatgtcaccgtgggatataaaatactcagcagaaaaaatactttctcaatccaatactaatatatgcctaacagaaagagggtatagttttggttacaacaatctagttgtagattttcgctctatcgaagttatgaaaaaacttgattttccaataatttttgatgctacgcattcagtccaattaccgggtggtggagagagtagtgggggtcaaaaggaatttatagaggcattatcaactgcagctgtgtcaatcggtgtctcagctgtattcgctgaagttcataataacccacctgcagccatatcagatggagataatcagcttaacttagacgaattccatttgctcgcgaaaaaattaatacaatttgatatgatagcaaaaaatttcaagagttaa

SEQ ID NO: 242824 - DNA, 814 bp, Unknown
  Bacterial polypeptide expressing nucleotide sequence isolated from the Sargasso Sea
atgaaaaaaattacgatcaatgatatttgttttggaggagattccttaggtttgattttgggtccttgtgtcatagagagtagggatcattcattgatgatggctgaggcaatttgccagattgcaaatcgaactgggtttaaaacaatttttaaaagttctattgataaagcaaatcgatcttctatttcttcatttagggggttgggttttgatgagagcctatcaatactcgaggaggtaaaaaaagaaataggttgctcgataattactgatattcatgaacctgcacaagctgcattagttgcagaagtggttgatgttattcaaatacctgcatttttatgtcgccaaactgatttgcttgtttctgcaggaaaaacaggtaaaactgtgaatgtaaaaaaaggacaatttttagcgccttgggatatgaaaaatgtagtagataaattgcaagaatctcaatgcgacaatataatccttacagatcgcgggactcaatttggttataacaatttagttgcagatatgcgctccattccgattatgcagaattttggatacccagttgttttcgatgcaactcatagtgcgcaacttccaggagggaatggtctgacatcatcaggtaatcgtgatatgatacctaccctagctaaatctgcagttgctgctggatgtgatggactttttatggaagtacatgataatgttgattctgcaaagtcagatgctaaaacgcaatggccattattagagttagagcctttattattagaattaaaatctattcacgaggctattaattgaa

SEQ ID NO: 242825 - DNA, 757 bp, Unknown
  Bacterial polypeptide expressing nucleotide sequence isolated from the Sargasso Sea
aaatgttttagaagatgagaaaacaattgaatctgttattactaaatgtattgaatctacatcaaaacataatattccttttatcttcaaagcatcttatgacaaagctaatagatcctcaattgattcgtataggggtccaggggccaaacaaggcttaggaatattgagagaactcaagcaggatttcggcgtacctgtgatctcggatattcatactccacttgaagctgaactggcttctgatgttttagatattattcaaatacctgcttttttaagccgacaaactgacttgatagaggctgcttgtcaaacttctcttcctttaaacatcaagaaaggacaatttctagccccatctgatatgttaaatattttaaaaaaatgcagctattttaataatgataaagtgatgatctgtgagcgaggcacatcatttggttacaataatttggttgttgatatgttaggggtaaatgagttgaagaaaactcaacaacctgtaatttttgatgttactcactcgttgcagaggccaggtggtttaggtgataaggcagatggcagaggatccaatgtattagaattagcaagatcaggtatgtctttggggttggcaggattatttttagaaacacatcctaatcctgagaaggctttgtgtgatggtccttgtgcgcttaagctagatgatcttgatgattttttatatcaaatcaagttgttagacgatttaattaaatcttttgtatag

SEQ ID NO: 242826 - DNA, 826 bp, Unknown
  Bacterial polypeptide expressing nucleotide sequence isolated from the Sargasso Sea
atgaaaaatatttcagtaaattgtgatggaataaaaatttcaaataaggaaaagatatgtttaatcgcaggaccttgtcaacttgagaacgagcagcatgctcttgatatggcaggaaaaatatcagaaatttccaaaaaatataatataggttttatttacaaaacttcttttgataaagctaacagaactagtcttaaaagtaaaagaggcgctggtttagaaaaatctttaccaatatttgataaaattaaaaaacaaattaatgttccaattctaactgacatccacaattcagaacaatgttctattgttgcaaatcatgttgatgtccttcaaattccagcttttttatgcagacaaactgatttattagtagctgccgccaaaacaaataaagttattaatgttaaaaaaggtcaatttcttgctccgtgggatatgtcaaatgtagtgaagaaaatatcagatacaggaaatagcaatatcttaataacagaaagaggagcgagttttggttataacacattagtgtctgatatgagatcaataccaataatggcacaaacaggatatcctatagttttcgatgcaacccactcagtccaacaaccgggaggaatgggcgataaaagtgggggtgaaagaaaatttgtttcacacttatctcgggcagcagtcgctgtcggaatagctgctgtttttattgaaacgcatcaagatccagataatgctccttctgatggtccaaatatggttccattgaatgaaatggacagtttggtaaataaattgcttgagattgataaactaattaaaaactaag

SEQ ID NO: 242827 - DNA, 751 bp, Unknown
  Bacterial polypeptide expressing nucleotide sequence isolated from the Sargasso Sea
cagcttgaatccgaacagcatgcaatggatatggctggtaaaattaaagaaattgcatcgaaatttggaattggttttatatataaaacttcatttgataaagctaacagaactagcttgaaaggaaaaagaggagcaggtttagattcatcgttacctgtatttgacaagattaaaaatgaattaaaaattccagtattaacagatgtacacaatgttgaacaatgttctattgtatctaagcatgttgatgtattgcaaatacccgcattcttatgtcgccagacagatttattagttgctgctgccaaaactaataaaattattaatgttaaaaaaggacaatttttagctccatgggatatgataaatgttacaaaaaaaatttcagaatcaggtaatgaaaatattcttgttacagaaagaggtgcaagctttggttacaatacactagtttctgatatgagatccatacctataatggcaaaaaatggttatccaattgtatttgatggaactcattccgtccaacaacctggcggacttggcgaaaaaagtggaggacaaagagaatttgttgaatacttatcaagagctgctactgcagttggtatagcagcaatttttttagaaactcatcaagatccagataatgcaccatccgatggccccaacatggttccactagataagttagaaagtttaatatcacaaatagttgaaatagataatttagttaaaaataaatgag

SEQ ID NO: 242828 - DNA, 784 bp, Unknown
  Bacterial polypeptide expressing nucleotide sequence isolated from the Sargasso Sea
atgggaggcatgaatgtccttgagtcaagagacctggctatgcatgttgcagaaaaatttaaggagtcttctgaaaaatataatattaattacatcttcaagggatcatttgataaagctaatagaagttctataaattcatttagaggacctggattggatgaggggttaaaaatacttcaagaagtttcaaactcatttgatgttccagtaattactgacattcatgaagttgatcaagcaaaaccagtaagtgaagtttgtgaggttgtccaaattcctgcttttttagcaagacaaactgatctagtttctgctgctgcaaaaacaaattcaattatccaatttaaaaaaccacagtttctttcagcacctgaaatggaaaatgttgtagagaaatgtatctcagcagggaatgaaaatattattctttgcgaaaggggcaatacatttggatacaataatttggttgtagatacattgaattttcaaatcttaaaaaaaataggtacccctgtaatttttgatgtaactcattcacttcagttacccggaggtctaggaagtgcaacaggaggtagaagagaatttgtattaagtctagcgaaggctggaatttctcaatcgattgcaggactttttttagaagctcatccaaatcctgatgatgcaaaatgtgatggtccttgtgctcttccactaaacgtcttagatgactttcttgaacaaattaaaaacttggatgattttgttaagaatcaagatgatttagacatcaaataat

SEQ ID NO: 242829 - DNA, 773 bp, Unknown
  Bacterial polypeptide expressing nucleotide sequence isolated from the Sargasso Sea
aatgattaatattaatttaaaagattattctttctcaaataattctcaatttattttaattgctggtccatgcgtaatagaaaacgaaagtcactcactgatgattgcagaagagctaagtaagatatgcgatgatgttggtattaatttaatttttaaatctagctttgataaggcaaatcgatcaagtattaaaagtgatagaggtataaaactcgatgacgcattaaaaatctttgaaaaaattaaaactaattttaatttaccaattttaacagatgttcataatgaagagcaatgtaatcaattaaaaaaagatagtattatcgatattattcaaattcctgcgtttctatgccgtcaaacagatttattattagctgcaggtaatacaaataaaattattaatgtaaaaaaaggtcaatttttatcaccaaatgatgtaaaaaatattttcacaaagatagaaactacaaataataaaaacataatgatcactgaaagaggaacatcttttggttacaatacacttgttaatgattttagaggtttagatatcatgaaaaaatataagtatcctgtaatttttgatgcaactcattctgtgcaacaaccaggaggcttgggtgataaaagtggtggtcaaagagaacatatcccttctttatgcaaagctgctatatctattggtgtagctggtttatttttagaaacacataatgatccggataatgctcctagtgatgggccaaacatgatttatataaaagatt

SEQ ID NO: 242830 - DNA, 784 bp, Unknown
  Bacterial polypeptide expressing nucleotide sequence isolated from the Sargasso Sea
atgggtggtatgaatgttcttgaatcaagagatttagctatggaagttgcagaaaaatttaaagaatcaactaataatcttaatatcaactatatatttaaaggttcctttgataaggcaaacagaagttcaattagttcttatagaggtccgggcttagaagaagggcttaaaattttagaagaagtatctaatacttttgatgttccggttattactgacatccacgaaccacttcaggctcaatcagtaagtgaaatatgtgaagttgttcaaataccagcttttctagcaagacagactgatcttgtaagcgccgcagcaaaaacaaaatcaataattcagttcaagaaacctcagttcttatcagctcaagagatgtcaaatgttgttgaaaagtgtatagctgctggtaatgaaaatattaccttatgtgaaaggggaaattcctttggatataataatctcgtggttgacacattaaactttcagattcttaagaaactttcaaaacctgtaatttttgatgttactcactcacttcagcttcctggaggtcttggtactgtaacaggaggaagaagagaatatgttttaagtcttgctaaagcaggaatatctcaatctatagcaggattatttctagaggcacatccaaatcccgatgaagcgaaatgcgatggtccatgtgctttacctctttcttcgcttaatgatttccttaaacaaattaaagatttagatgactttataaaagatcaaaaggatatagagatctcataac

SEQ ID NO: 242831 - DNA, 766 bp, Unknown
  Bacterial polypeptide expressing nucleotide sequence isolated from the Sargasso Sea
ctgatcgcaggcccttgtgtgatcgaatcaaaagacctgattcacgatgttgccggatcaataaaagagatcacagaatcattggggattcattatattttcaaatcttcttttgataaggcaaatcgaacttcaattgatagctttagaggtccaggaatggaagagggcttgtctattcttgagagcgtcagagatcaattgggtatacctgtgatcacagatgttcatgaggacactcctttggatgaggtcgcatcggtggttgatgtgcttcagacccctgcttttttatgcagacagaccaattttattatcaatgttgcctcacaacaaaaaccagtgaatattaaaaaaggtcaatttctctctccttgggatatggagaatgtcgtcaagaaagcaaaatcaactggcaatgatgacatcttggtatgtgaacgtggttatacatttggttacaacaatcttgtatcagacatgcgttcactcgttatcctaaaagaaacatcatgcccagtgatttatgatgccactcactcactccagcttcctggtggaaagggtcaatcatcagatggacaaagtgaattcatcattccagtctctagaggtgcggttggtgttggtattgctgggatttttattgaaactcatccagatccagaaaatgctctaagtgacggaccaaattctcttccattggataatctcaaacctttgctagagcaattattggcgatagataaaattgttaagcaataat

SEQ ID NO: 242832 - DNA, 841 bp, Unknown
  Bacterial polypeptide expressing nucleotide sequence isolated from the Sargasso Sea
aatgagtaaaagtaataaagatgttaaaattaaagattttgttgtaagtaataataataaatttactttaattgcagggccttgtctgattgaaaacagagagcatgctctaaaaacagctgatttaatatcaaatatttgcaattctctagggttaaactttatatataaatcttcatttgataaggctaatagaacatctttaaaatcctctagaggtcctggaatccatgattcattagaaatatttagtgaaataaaaaacaaaataggttgtccagtaattactgatgtccatgaaaaagaacaaatatctctactgtctgaagtattagatgtaatacaaataccagcatttttatgtaggcagacagatctgctaattgagtctgcaaaatcaaatcttccaattatggttaaaaaaggtcaatttttagcaccatgggatatgaaaaatgtagtagaaaagatatcccaaaatggaagtggtggagtaatgatttgtgaaagaggagtaagttttggttataatactttagtatctgatttcagatcaattcctattttaaaagaaatgggatatcctgtagtttttgatgccacccattctgttcaacagcctggtggtttaggagataaatcaagtggacaaagagaatttgtacctacgcttgctaaggctgctaccgctataggagtggcagcattatttatggaaacacatgaagatccagataatgcacctagcgatggtcctaatatgtggccattggataaacttaaaaatttacttaaaattttaattaatcatgatgaaattgccaaagaattaaataattaa

SEQ ID NO: 242833 - DNA, 788 bp, Unknown
  Bacterial polypeptide expressing nucleotide sequence isolated from the Sargasso Sea
tcttatgggtggtatgaatgttcttgaatcaagggatttagcaatgaagattgctgaaaaatttaaagaaataactcaaaacaaacatattaattacatattcaaaggttcttttgataaagcaaacagaagttcaattagttcatttagaggtccaggaatggacgaaggacttaaaattcttcaagaggtatcaacaacttttgatatacctgttataactgatatacatgaacctcaacaagcagaagcagtaagtgagatatgtgaggtaattcagattccagctttcttggcaaggcaaactgatttagtaaatgcagctgctaaaactaaatcaataatacagtttaaaaaacctcaatttttatctgctcctgaaatgtctaatatcgttgaaaaatgcagttctgccgggaatgaaaacataactttatgcgagaggggaaattcttttggttacaataatctcgttgttgatactttaaattttcaaatattaaaaggattattaaagcctgttatatttgatgtaactcattcacttcaattgcctggaggtctaggaagtgctacaggtggaagaagagaatatcttttaagccttgcaaaagctggaatgtctcaatctatagcaggactatttcttgaagctcatccagatcctgatcaagcaaaatgtgacggtccatgcgctttacccctttcagttttagatgaatttcttacccaaattaaagatttggatgattttgttaaagaccaaaatgatttagagatcagttaat

SEQ ID NO: 242834 - DNA, 823 bp, Unknown
  Bacterial polypeptide expressing nucleotide sequence isolated from the Sargasso Sea
atgaataaagtaaagctagataaaattatttttggagatgccgctatacctttcattggcggtccatgtgtgattgaaagcagagatcattgtttcggcattgctgaaaaaataactgaaattacatctaagctaaatatcccatttattttcaagagctctttcgataaggctaacaggacatctatttcatcatttcgaggagatgggctagatgttggtttaaggattttagaagaaataaaaaataactttaatattccggttactacagatattcatttacccgaacacgccaatgcagtgagcgatgtagtagatatcattcaaattccagcatttctctgtaggcaaactgatttattagttgaagctgctaaaactggtaaggtagtgaatgttaagaaaggacaatttttatctccttataaagtagaaaatatcattaaaaaactagaagaaagtggcaataaaaatattctaataacagaaagaggaaatacttttggctttgatagtttagttactgacctaaaatcgattcctataatgcaagcatttggttatcctgttatttttgatgccactcatagtgcacaaatacctggaaatcatgaatcaaaaacaggtggtaataggcaatttattccaacccaaacatttgctgctgtttcatcgggtgcagatggcattttcatggaagttcatgacgatgtcgataatgcattaagcgatgctagtacacaatggccaattgataaattagaaaatatattaacatctattattgctttcagaaaaacatacttagaacatggataaa

SEQ ID NO: 242835 - DNA, 763 bp, Unknown
  Bacterial polypeptide expressing nucleotide sequence isolated from the Sargasso Sea
ttgattgcgggtccttgtgttattgaaagcttagaccatgccctttttatggctgaatcattaaaaaaggtctcagatcaagccggaattaatatgatatataaaagctcatttgataaagcaaaccgttcatccatttcatcttttcgtggtcttgggattgaagagggattatctatcctccaaaaagttaaatcagagactggcttgccagtcattactgatatccacgaaccaattcaagcttcagctatctctgaagttgctgatgttattcaaattcctgcatttttgtgtaggcagacagacctcttatcagcggcagctaagactggaaaagttgttaatgtgaaaaaaggccaatttcttgcgccctgggatatgattaatgttgttacaaaattagaagaaagccattgttctaatattttacttacagaccgtggaacgcaatttggctataataatttaatagcagatatgcgctcaatcccaataatgcaagagctaggatatccaattatttttgatgctacccacagtgctcaattgcccgggggtggtggcaagaccactgcaggcatgcgcgagatggttccaaccctagcaaaaacggcagtagctgcggggtgtgatggcgtatttatggaagtgcatgataatgtcgaaaaagcaatgtcagacgcaacaacacaatggcctcttgataatctattgaaacttctcttacaattaaaagctatccgagagagtcttacttgaa

SEQ ID NO: 242836 - DNA, 781 bp, Unknown
  Bacterial polypeptide expressing nucleotide sequence isolated from the Sargasso Sea
tatgacaattatagcaggattaaatgtattagaagatgagaatatggctcttaaggttgctgaacaacttaaagaaatagcaattaagcataatattccttttatttttaaagcttcttttgataaagcaaatagatcatctattgagtcttatagaggccctggacttaaaagcggtataaaaatttttaagtccattaaaaagcatcttgatttaccaataataactgacattcatgaaaagggtcagattgaagaaatcgcacaagtagtcgatatattgcagatacctgcttttctttgtagacaaacagaccttataagtgcggcatgtaaaactcaattaccacttaatattaagaaaggacaatttttgtctccttatcaaatgaaaaatataattgataaatgttattcatttggaaatgataatattattctttgtgaaagaggttcatcttttgggtatgataatcttatcgtagattttcttggaatatctgaacaaaagactttcaattttccaattattcttgatgtaacgcactcccttcaattaccaggaggacaaggtaattcagctggaggaagatctcatcaggcagaagatcttgccagagctgcgattgcccttaaaatatcaggattattcattgaagttcaccctaatccagatgaagcactttgtgatggaccttcagctacaagacttgaagattttgaagatatgattgtaaaagtaaaattgattgatgatcttgttaaatcagaaaaattttaa

SEQ ID NO: 242837 - DNA, 826 bp, Unknown
  Bacterial polypeptide expressing nucleotide sequence isolated from the Sargasso Sea
aatgaaaaatattacagtaaattgtgatggagtaaaaatttcaaatcaagaaaagatatgtttaattgcgggaccttgtcaacttgagaacgagcagcatgctcttgatatggcaggaaaaatatcagaaatttctaaaaaatataatataggttttatttacaaaacatcttttgacaaagctaacagaactagtcttaaaagcaaaagaggtgttggtttagaaaaatctttaccaatatttgataaaattaaaaaacaaataaatgttccagttctaactgacattcacaatgcagaacaatgttctattgttgcggatcatgttgatgtccttcaaattccagcttttttatgcagacaaactgacttgttagtagctgccgctaaaacaaacaaggttattaatgtaaaaaaaggtcaatttcttgccccgtgggatatgtcaaatgtagtaaagaaaatatcagatacaggaaatagcaatatcttaattacggaaagaggagcgagttttggttataatacattagtgtctgacatgagatcaataccaataatggcacaaacaggatatcctatagttttcgatgcaacccactcagtccaacaaccaggaggaatgggtgataaaagtgggggtgaaagaaaatttgtttcacacttatctagggcggcagtcgctgttggaatagctgctgtttttattgaaacgcatcaagatccagataatgctccttctgatggtccaaatatggttccattaaatgaaatggacagtttggtaaataaattgcttgagattgataaactaattaaaaactaa

SEQ ID NO: 242838 - DNA, 835 bp, Unknown
  Bacterial polypeptide expressing nucleotide sequence isolated from the Sargasso Sea
aatgataaataaaattgtaaaattaaaaaattttgaaatttctaataataaaaaaatatcattaatctcaggaccatgccaacttgaaacagagcagcatgctagggatatggcaggtaagattaaggagatagcaaaaaagcttgatattggttttatttataagacttcatttgataaagctaatcgaacaagtcttaaaggaaagagaggtgctggtctcgaaacctctttgcctgtatttgatagaataagaaaagaactagatattccagtattgactgatgttcacaatatcgatcaatgctcagtagtttctgatcatgtagacattattcaaatacccgcttttttatgtagacagacagatttattaattgctgccgctaaaacaaataaaattattaatgtaaagaaaggtcagtttttagctccttgggatatggttaacgtaacaaaaaaaatatcagactcgggaaatgaaaatatacttgtaactgaaagaggcgcaagctttggttataataccttagtttcagatatgaggtctatacctataatgtcaaaaaatggatatcctgttatatttgatggaactcattccgtacaacaacctggtggtcttggagaaaaaagtggtggtcaaagagaatttgttgaatatttatcaagagcagcaactgctgtaggaattgcaggaatttttttagaaacgcatcaagatccagataatgctccatcagacggacctaatatggttccattaaaaaatctagaaaatttagtttctcaaatagttgaaatagataaccttattaaaaaaaataatggctaa

SEQ ID NO: 242839 - DNA, 850 bp, Unknown
  Bacterial polypeptide expressing nucleotide sequence isolated from the Sargasso Sea
atgagtaataaaatcataaacctaggttcaatcgagatcgctaacgataaacctttcgtgttgtttggtggcatgaatgtgcttgagtctcgcgatctcgctatgtcgattgctgaaacctatgccgaagtgacgcaaaaactgggtattccctatgttttcaaggcgtcgttcgacaaggctaaccgctcttctgttaactcttaccgtggtcctggcatggaagaaggcttaaagatttttgaagaaatcaaaaagactttcaatctgccattaatcaccgatgtgcatgagacttaccaatgtgcgcctgtcgctgaagtggttgatattattcagttgcctgctttcttagcgcgccaaacagacctcgtagtcgccatggcgaaaacgggcgctattatcaacgtgaaaaagccgcagtttttagcaccacacgaaatgcgccatatcatcactaagtttaacgaagccggtaacgacgagattatcctgtgtgaacgtggttcgtgcttcggttacaacaacctagtagtcgatatgctgggtatggacgagatgaagcaatccggttatccggtgattttcgacgctacccacgcattacaacgtcctggtggtcgtgccgattcggcgggcggccgtcgtgctcaagcgactgaattagcccgtagtggcatggcgttaggcttagcgggtctgtttattgaggctcacccagatccagataacgctaagtgtgatggcccatgtgcgctgccactgcatcagttagaaaactatctgaagcagatgaaggctattgatgatttagtgaaatccttcgacccgatagataccagcaagtaag

SEQ ID NO: 242840 - DNA, 826 bp, Unknown
  Bacterial polypeptide expressing nucleotide sequence isolated from the Sargasso Sea
atgcctagatcagtttttttatctaaacagttaatcaaaaatgatactgacagacttacattaatatccggcccatgcctattagaaaatgaaaagttggttagacaagttgcaaagtctttaattaattatgcaaaaaaagaaaagtttaatttaatatttaaatgtagttttgataaagctaacagaagttctgaccaaacaattcgaaataaaatttcttttgataaatcattagatatattaaaaaatcttaaaaatgatttaaaaatttccataacttcagatgtacatgagacttcccaagtagataagttagctgaacttttagatgtaatacagattccagcttttttatgtagacaaactgacttgataaaatctgctgctcaaacaaaaaagattgtaaatgttaagaagggacaatttttatctcataaagaagtttctaatattattaaaaaaattgaaaacgaaaataataaaaaaatacttataactgaaagaggaaattcatttggttacaattacttaataaatgattttaaaggtattcattttatgaaagaatttggatacccaattatttttgactcaactcatagcgtacaacttccaggtggattgggaaaaaaaagtgggggtgctagagagtatgtagttcctttatctaaagccgcttcttcattgagaatagcaggtttttttattgagacacacccaaacccggaaaaagcattaagtgatggccctaatatgatttatttacataaaatgccaaaacttttaaatactattaataaaataaacaaggcggcaaaataaa

SEQ ID NO: 242841 - DNA, 847 bp, Unknown
  Bacterial polypeptide expressing nucleotide sequence isolated from the Sargasso Sea
atgaatgtatcgattacgccggacgtcacggtcggcaacgggttgccgttcgtgctcttcggcggcctcaacgtgctcgagagcgtcgagttcacgctctacgtctgcagccggtatgtggaagtcacgcgccgcctcggcatcccgctggtgttcaaggcctcgttcgacaaggcgaaccgctcgtcgatccactcgtatcgcggcgtcggattcgacgaggggctcaggatcttcgaggagatcaagtcgcggttcggcgtacctgtgatcacggacgtgcacgaggtgtggcaggccgaaccggcctcgcgcgtcgtggacgtgctgcaggtgccggcgttcctcgcgcgccagacggatctcgtcgtcgcgatcgcgcggaccggcaacgccgtcaacatcaagaagccgcagttcatgagcccgacgcagatcgagcacgtcgtctcgaagtgtcgtgaagccggcaacgacaaggtgatcctgtgcgagcgcggggcgtccttcggctacgacaatctcgtcgtggacatgctggggttccgccagatgcgcgacgcgacgggcgactgcccggtgatcttcgatgtcacgcacagcctccagacgcgcgatccgcacggcgccgcatcgggcggccggcggcggcaggtgctcgatctcgcgcgcgccgggatggcggtcgggctggccggcctgttcctcgaagcgcatccggagccggaccacgcgcgctgcgacggcccgagcgcgctgccgctcgcgcaactcgacgcgttcctgcagcaggtcaaggcagtggatgatctggtcaagcggcttccgctgctcgatatccggtgag

SEQ ID NO: 242842 - DNA, 682 bp, Unknown
  Bacterial polypeptide expressing nucleotide sequence isolated from the Sargasso Sea
tggacttggatttatttataaaacttcctttgataaagcgaatagaacaagtttaaaaggtacaagaggtgcaggtcttgaagcttcattaccagtttttgacaaaattaaaaaagaattaaatattccaattttaactgatattcataacgctgatcaatgttctgttgtagctgatcatgtagatgttttacaaataccagcttttttatgtaggcaaactgacctgttaatagctgcagcaaaaacaaataaaattattaatgttaaaaagggtcagttcttggcaccatgggatatggtcaatgttactaaaaaaatttcagactctggaaataaaaaaattttagtcactgagagaggtgctagttttggttataatactttagtttcagatatgaggtcattgccaataatggccaagaatagctatccagttatttttgatgcaactcattcagttcaacaaccaggtggtcaaggagaatcttcaggtggacaaagagaatttgtagaatatttggctagagcggctgtagccgttggagttgctggagtatttattgaaactcatcaagatcctgacaatgcaccttcagatggacctaacatggtaccattgaataaattagagaatctattaaaacaattacacgatatagataatcttattaaagaatag

SEQ ID NO: 242843 - DNA, 826 bp, Unknown
  Bacterial polypeptide expressing nucleotide sequence isolated from the Sargasso Sea
aatgaatagcataaaagtatattgtggaaatatagaaatttcaaataataataaaatttgtattattgctggaccttgtcagcttgaaactgaacaacatgcaatggatatggctggcaaaattcaagaaattacaaaaaaatttggacttggctttatttacaaaacttcttttgacaaagctaatcgaactagtcttaaaggaaaaagaggagctggacttgaagcatctttacctgtttttgataaaataaaaaaagaatttaatgttcctattttgacagacattcataatattgatcaatgttcagaagtatctgatcacgttgacatattacaaattcctgcttttttatgcagacagactgatcttttgatagctgctgctaaaacaaataaaattattaatgtaaaaaaaggacagttcttagcaccatgggatatggttaatgttactaaaaaaatttcagattctggaaatacaaatattttagtcactgaaagaggcgcaagttttggttacaatactttagtttctgacatgaggtctttacctataatggctaagaatggttatccagtgatttttgatgcaacccattcagtacaacaacctggaggacaaggagagtcgtctggaggtcaaagagagtttgtcgagtatttagctagagctgctgttgctgtaggtgttgctggagtttttattgaaactcatcatgatccagataatgcaccatcagatggtcctaacatggtcccattggataagttagaaaatctgctaaatcaattatcagatatagataaattaataaaaaaatag

SEQ ID NO: 242844 - DNA, 838 bp, Unknown
  Bacterial polypeptide expressing nucleotide sequence isolated from the Sargasso Sea
atgagtatcccgttcaccttgatcgctgggccctgcgttctggaaagccctgagttggcctttgagctggcagtaaagctcaaggccatgagtgaccgccttggcattcgctacctctttaaaaccagctttgataaggccaatcgcagctcaggggccagttttcgtggtcccggcctggagcagggcctgcaggtgctcgcccagctgaagcaagagctgggtttgcaggtgcttaccgatattcatgagagccatcaggccgccgtggtgggtcaggtggttgatgtcttgcagattcctgcctttctttgccgccagaccgacctcttgctcgccgctgctgccgcggttcaagacccaacagcggcggttacagcagtgaatgtcaaaaaaggacaattcctcgccccttgggacatggctcaggtggtcaccaagttgcgtgcagctggtttgcagggagacgagcagctctggctcactgagcggggaaccagctttggctacaacacgttggtggtggatatgcgcagccttccgcagttacgccagcaaggttgcccagtgatttttgatgccacccattcggtgcaacagcctggtggccgcggcaacagcaccggtggacagcgcgagttcgtcgctccgttggcgcgtgcagccatggccgtgggggtggatggcctgtttatcgagacccaccccgaccccgatcaggccctcagcgatggacccaacatggtgccgttgcatcgcctcgaaccattgcttgaacagctcttggcgattcgtgctgcagccatcgggcagccggaagcggtgagcgtcttgtgag

SEQ ID NO: 242845 - DNA, 667 bp, Unknown
  Bacterial polypeptide expressing nucleotide sequence isolated from the Sargasso Sea
aatgaaactaagaaactttgatattgataactctgaacctatgatactaatggggggtatgaatgttcttgaatcaagagatttagcaatgaacgttgctgaaaaatttaaggaaattactgataaaaacgctataggatatatctttaaaggatcatttgataaggcaaatagaagttctataaattcatttagaggacctggcatggatgagggattaaaaatacttcaagagatttcaaatacctttgatgttcctgtcataactgatatacacgaacctgagcaagctttaccagtaagtgaaatatgtgaagttattcaaatacctgcctttttagctagacaaacagatcttgtaaatgctgctgcacaaacaaaatcgattattcaatttaaaaaaccacagttcttatctgctcaggagatggctaatgttgttgaaaagtgtgaatcagctggtaacaataatatcaccttatgtgagagaggaaattcatatggctataataatttggttgttgacactttaaattttcaaatcttaaaaaaaatttcaaagccagttatttttgacgtaactcattctcttcagcttccaggaggcctaggaacctctactgatggtagaagggagtttgttttaagtcttgcaaaagctggaatg

SEQ ID NO: 242846 - DNA, 769 bp, Unknown
  Bacterial polypeptide expressing nucleotide sequence isolated from the Sargasso Sea
atgaaacaaattgaacttaacaatttctctataagtaacgataaagaattaacaattattgggggaatgaatgttctagaatcacattctcttgcgatgcaggttgctgaacactttaaaaaagttacagaaaaattaaacctaaaatgggttttcaaagcatcatttgataaagcaaataggagttctattgactcatttcgtggtttaggatttgaggagggtttaaagattttagaggatatttcttcaacatttgatgtgccagtgctcacagatattcacgagaaagatcaagcaaaaccagttagtgaaatttgtgaaattattcaaatccctgctttcctctgtcggcagactgatcttattgaggcagcagcaaaaacaaataaaattatacaatttaaaaaacctcaatttctctctgctccggatatgaggaatgttgtaacaaaatgttatggatttggaaatgaaaaagtcttgttatgcgagcgagggaatatttttggttataacaatttagtggtagatatgttgaactttgacattatgaaatcttttgatgttcctgtagtctttgatgttacacattctcttcaaatgccaggtggtttaggcaaatctactgcaggaagacgtgaatatcttctgcaactagctcgtgcaggaatttcacaaaaaatagcagggctctttctggaaacacatccaaatcctgatgaagctaaatgtgatggacccatgtgcattacagctctctcttctg

SEQ ID NO: 242847 - DNA, 832 bp, Unknown
  Bacterial polypeptide expressing nucleotide sequence isolated from the Sargasso Sea
aatgaaattaagagactttaaaattgataatgacgaaaaaatgacccttatgggcggtatgaatgttcttgaatcaagagatttggcaatggaagtagctgaaaaatttaagaatgtatctgataaaaatggtattaattatatttttaaaggctcttttgacaaagctaacaggagctctattaattcatttagggggccaggtttggatgaaggcctaaaaatattagaggaaatttcaaaaacctatgatattcctgtaatcaccgacattcatgagcctaatcaagcaaaatcagtaagtgaaatttgtgaggttattcaaatacctgctttccttgcaagacaaactgatctagttagcgcagctgcaaaaacttcttctataattcaatttaagaaacctcaatttttatcagctcaagagatgtcaaacgtcgttgaaaaatgtgaggcagctggaaataaaaatattactttgtgtgaaagaggtaactcatatggatataacaatttggttgttgataccttaaattttcaaattttaaaaaaattatcaaaacctgtaatttttgatgtaacgcattcgctccaattaccaggaggcttaggaagttcaactggtggtagaagagaatatgttttaagtcttgcaaaggctggtatgtcgcaatcaatagctggactttttctggaagcacatccaaatcctgatgaggctaaatgcgatggaccttgtgcattacctctctcttatctagatgaatttttaaatcaaattaaagatttggatgattttgttaaaggtcaaaataatttagagatcaaataa

SEQ ID NO: 242848 - DNA, 832 bp, Unknown
  Bacterial polypeptide expressing nucleotide sequence isolated from the Sargasso Sea
atgaaccaaaagataataaaatgctcagattttgaaataggaaataatagaaaaatagttcttatttcaggtccttgccaaatggaaagtgaagatcatgctgttgaaatggcttataaaattaaagaaattacaattaaactaaatataaatctaatatacaaaacatcttttgataaagccaatagaactagtattggaggtaaaagaggacttggtttagaaaaatctttaaaagtattcgataaaataaagaacgaagttaaattaccaactttgacagatgtacatagttctgatcaatgttcagttatatcagatgtaattgatgtgattcaaatacctgcctttttatgtagacagacagatttattaattgctgcagcaaaaactggaaaaataataaatgtaaaaaaaggccagtttcttgcaccgtgggacatggttaatgttacaaaaaaaattttagaatctggaaacgataaaattcttgttactgagagaggcgcaagttttggatataacacattggtatcggacatgaggtcaattccaattatggctgaccaaggttttccagttgtgtttgatgctacacattctgttcaacaacctggtggaaaaggtagtagtagtggtgggcaaagagagtttattgaacatttaagtaaagctgcaaccgcagttggcatagcagcattatttattgagacacataatgaccctgataatgcaccttcagatggtcctaacatgttacaaatagataaacttgaaaacttacttaataaaattattaaaatagataatttaacaaaaacagatgagtaaa

SEQ ID NO: 242849 - DNA, 826 bp, Unknown
  Bacterial polypeptide expressing nucleotide sequence isolated from the Sargasso Sea
aatgaaaaatttaactgtaaaatgtggaagtatagacatatcaaactctaacaaattttgtttaatagctgggccatgtcagcttgaatctgaacaacatgctatggatatgtctggtaaaattaaagaaattacatcaaaacttaacattggttttatttataaaacgtctttcgataaagctaatagaacaagcttaactggaaaaagaggtataggtttagaacaatcattaccaatatttgataaaattaaaaaagaaataaatattcaaatacttacagatattcataacgctgaacaatgttcagttgtcgctaagcatgttgatatattgcagataccagcttttctttgtaggcaaacagatttattaatagcagcagctaaaacaaaaaaaattattaatgtaaaaaaaggtcaatttttggcaccatgggatatggttaacgttacaaagaaaatttcagagtcaggcaataataatattcttgtaacagaaagaggcgcaagttttggatacaacacattggtgtctgatatgaggtctttacccataatggctaaaaatggttacccagttatttttgacgcaacgcattccgttcagcaacctggcggacaaggtgaaaaaagtggaggtcaaagagaatttgtagaacatttatcaagagcagcagtggcagtcggtgttgcgggtatatttatggaaactcaccaagatcctgacaatgcgccatcagatggcccaaatatgattccattatctaatcttgaaaatttattaaaacaattaatagaaatagataacgtaataaaaaaataa

SEQ ID NO: 242850 - DNA, 826 bp, Unknown
  Bacterial polypeptide expressing nucleotide sequence isolated from the Sargasso Sea
gatgaaaagtattactgtaaattgtaacaacattgaaatttcaaataacaaaaaaatttgcttaattgcaggaccttgtcagttagaaactgaacaacatgccatggatatggcaggaaaaattaaagaaattacatcaaaatttaatattggttttatttacaaaacctcttttgataaagctaacagaactagcctcaagggacaaagaggggcaggccttgataaatctttacctgtttttgataaaattaaaaaagaattaaaagtacctattttaactgatattcataatatagatcaatgttcagttgtagcaggacacgtagacattttacaaattccagcatttctttgtaggcaaactgatttattaattgctgcagcaaaaactaataaaattataaatgtaaaaaaaggtcagtttttagcaccatgggacatggtaaatgtaactaaaaaaatttctgactcaggaaacaataatattttagtcacagaaagaggagcaagttttggatacaatacattggtgtctgatatgcgctcattacctataatggcaaaaaatggttatcctgtcatttttgatgcaacgcattctgtccaacaaccgggcggacttggagaaaaaagtggaggacaaagagaatttgtacaatatctagcacgagctgcagtcgcagttggtgttgctggagtttttattgaaacacatcaagacccagacaatgctccgtcagatggtcccaatatggttccattagataaattagaaaatttgctaaaacaaatttctgaaatagataatttgataaaaaattaa

SEQ ID NO: 242851 - DNA, 826 bp, Unknown
  Bacterial polypeptide expressing nucleotide sequence isolated from the Sargasso Sea
atggaaaataaaatagttaattgtaacggaatagaaatatcaaataaaaataaaatttgtctgatagcaggtccatgccagctagaaaccgagcagcatgctatggatatggcgggaaaaattaaagaaattgcatcaaaatatagtattggattaatttataaaacttcttttgataaggctaacagaactagcatcaaaggtaaaagaggagctggattagaaaaatcattacctgtgtttgataaaattaaaaaggatttgaatattccaattttaacagacattcataacgagcaacaatgtgaaattgtagcacctcatgttgatgtattacagataccagcttttttatgtagacaaactgatttgctgatagctgcagcaaaaacaaataaaattataaatgtaaaaaaaggacaatttttagcaccatgggatatggttaatgttacaaagaaaatttcagagtcaggaaatgaaaatattttagtaacagagcggggcgccagttttggatacaatactttggtatcagatatgagatcaattcctataatggcaaaaaatggatatccaattgtatttgatgcaacccattcagtacaacaacccggaggccaaggagaacaaagtggcggtcaaagagaatttgttgaatacttatcaagagcagctgtagcagttggtgtagctgcaatttttttagaaacccatcaagatcctgataatgcaccttccgatggtccaaatatggttccattaaataaattggatagcttaattaatcaaatagtagagattgataaattaattaaaatataaa

SEQ ID NO: 242852 - DNA, 632 bp, Unknown
  Bacterial polypeptide expressing nucleotide sequence isolated from the Sargasso Sea
atcatttagaggagatggtttagatgctggattaaagattttagaagaaataaaaaataactttaacattccggtcactacagatattcatctacctgaacatgccaatgcagttagcgatgttatagatattattcaaattccagcatttctttgtaggcaaactgatttattagttgcagcagcgcaaactggcaaagtagtgaacgttaaaaaaggacaatttctatctccttataaagtagaaaatatcattaataaactagaagaaagtggtaataaaaatatcttactaacagagagaggtaatactttcggttttgatagtttagttacagatttaaaatcgattcctataatgcagtcatttggttatcctgttatttttgatgccacgcatagtgcacaaatacctggaaatcatgaatcaaaaacaggtggaaatagacaatttattccttcccaaacatttgctgctgtttcatcaggtgcaaatggaatatttatggaagtgcatgatgatgtagataatgcactaagcgatgctagcacacaatggcctgttgataaacttgaaaaaatattaacatctatcattgcttttagagaaacatatttaagtcatggataga

SEQ ID NO: 242853 - DNA, 598 bp, Unknown
  Bacterial polypeptide expressing nucleotide sequence isolated from the Sargasso Sea
atgattaatattaatctaaaaaatttttctatctcaaataattctccatttgttttaattgcaggtccttgcgtaatagaaaatgaaagtcactcattgatgattgcagaagagcttaaaaaaatatgtgatgatgttgatattaatttaatttttaaatctagttttgataaagctaatcgatcaagtattaaaagtgatagaggtattaaacttgataatgctctaaaaatctttgaaaaaattaaaactaattttaatttaccattactaactgatgtgcataatgagcatcaatgtaatgaattaaatcaagatagtattatcgatattcttcaaatacctgcttttctatgccgtcaaacagatttattattagctgcaggtaatacaaataaaattattaatgttaaaaaaggtcaatttttatcacccactgatgtaaaaaatatttttaccaagatagaaactacaaataataaaaacatcatgataactgaaagaggaacatcttttggttacaacacactagtaaatgattataaaggtttagatattatgaaaagatatgaatatcctgtagtttttgatgcaacac

SEQ ID NO: 242854 - DNA, 551 bp, Unknown
  Bacterial polypeptide expressing nucleotide sequence isolated from the Sargasso Sea
tatgaaattaagaaatttttacatagataatacaaaaacaatgactctaatgggaggaatgaatgttttagaatctagagatcttgccatgcatgttgctgaaaattttaaaaaggcttcagaaaaatataatataaattatatatttaaaggttcctttgacaaggcaaatagaagttctataaattcatttagaggacctggtcttgaggaaggtttaaaaatattacaagaagtatctagttcttttgatattcctgtcataacagacattcatgaattagaacaagctcagccagtaagtgaggtttgtgaggttatccagattcctgcttttctagccagacagactgacttagtctctgcagccgcaaaaacaaactcaataatacaatttaaaaaaccacagtttctctcagcaccagagatgaaaaatgttgtagagaaatgtatatcagctggtaacaaaaacattattctatgtgaaagaggtaattcatttggatataataatcttgtcgtagatacgttaaattttcaaatactaaaaa

SEQ ID NO: 242855 - DNA, 454 bp, Unknown
  Bacterial polypeptide expressing nucleotide sequence isolated from the Sargasso Sea
atgaaagatatttcaataaaaggttttcaaataggaaatgaccaagatttgaccttgatgggtggaatgaatgttcttgaatcagaagagaccgctctcctagtagctgaaaaatttaaagaagttactgaaaagttaaatataaattggatttttaaagcctcctttgacaaggctaacagaagttcaattgattcttttagaggcccaggtatggatgaaggactgaaaatacttgataaagtctcatcagcatttgatgttcctataattaccgatatacatgaaccaagccaagctaaagctgtaagtgaagtttgtgaggttattcaaattcctgcgttcttatgtagacaaactgatcttgtttgtgcagctgcagaaacaagatcagccattcaatttaagaagccacaatttctttcagcagctgaaatgaaaaatgttgttgaaa

SEQ ID NO: 242856 - DNA, 376 bp, Unknown
  Bacterial polypeptide expressing nucleotide sequence isolated from the Sargasso Sea
atgaaacaaagtaaaataaatctagtatcgaaagattacttaactctaatctctggtccatgtgctattgaatctgaaaaaatggcacttgatacagctgaattcttaaaaacgataactgataagctaggtatcaattttatatataaatcatcttttgataaagccaatcgctcatctgttaattcaaaaagaggtgttggcatcgatatgggattaaaaatacttgaaaaagtaaagaatgatctagatgttcctgtgctaactgatgttcatgaatataccccttttgatgaagttgctgatgttgtagatgtcttacaaacgccagcatttttgtgcagacagactgattttatattaaaagtttgttcta

SEQ ID NO: 242857 - DNA, 826 bp, Unknown
  Bacterial polypeptide expressing nucleotide sequence isolated from the Sargasso Sea
atgagtagcattaaagtaaattgtggaaaaatagatatttcgaacaatgataagatttgtataatttctggaccttgccagcttgaaagtgaacaacatgcaatggatatggcaggaaaaatcaaggaaattacttcaaaatttggtcttggatttatttacaaaacttcatttgataaagcgaacagaacaagcttaaaaggcaaaaggggagctggattagaagcttcattgcctgtatttgataagattaaaaaagaattaaatgtccctattctaacagacattcataattctgagcaatgtgcaatcgtttcaaaacatgttgatgttttacaaatcccggcttttttatgtagacaaacagacttgttaattgctgcagctaaaacaaataaaattattaatgtaaaaaaaggtcaatttcttgcaccatgggatatggttaatgtaacaaagaaaatttcagaatctggaaatgacaaaatattagtcactgaaagaggtgcaagttttggatacaacactttagtttccgacatgaggtcgttaccaataatggctaagaatggttatccagtaatttttgatgcaacacactcagtgcaacaaccaggtggtcttggagaaaaaagtggtggtcaaagagagtttgttgaatatttagcaagagctgcagttgcagttggagttgcaggagtttttattgaaactcatcaagatccagacaatgctccatctgatggaccgaatatggtaccattaaataaattagaaaatttattaaaacaattaaacgatatagataatcttattaaaaattaag

SEQ ID NO: 242858 - DNA, 475 bp, Unknown
  Bacterial polypeptide expressing nucleotide sequence isolated from the Sargasso Sea
tctgtgcagacagactgatcttttgatagctgctgctaaaacaaataaaattattaatgtaaaaaaaggacagttcttagcaccatgggatatggttaatgttactaaaaaaatttcagattctggaaatacaaatattttagtcaccgagagaggtgcaagttttggttacaatactttagtttctgacatgaggtctttaccaataatggcaaagaatggttatccagtgatttttgatgcaacccattcggtacaacaacctggaggacaaggagagtcgtctggaggtcaaagagagtttgtggagtatttagctagagccgctgttgctgtaggtgttgctggagtttttattgaaactcatcaagatccagataatgcaccatcagatggtcctaacatggtcccattggataagttagaaaatctgttacatcaattatcagatatagataaattaataaaaaaatag

SEQ ID NO: 242859 - DNA, 850 bp, Unknown
  Bacterial polypeptide expressing nucleotide sequence isolated from the Sargasso Sea
atgagtaataaaatcataaagttaggttcaatcgaaattgcaaacgataaaccttttgtgctattcggtggcatgaatgtgcttgagtctcgcgatctcgcgatgtcgattgctgaaacctatgccgaagtgactcaaaaactagggatcccctatgttttcaaggcatcgttcgataaggctaatcgctcttctgtcaactcttaccgtggtccaggcatggaagaaggcttaaagatttttgaagaaatcaaaaagaccttcaatctgccactcattaccgatgtgcatgagccttaccaatgtgcgcctgtagctgaagtggttgatattattcaattaccagctttcttagcgcgccaaacagaccttgttgtcgcgatggcgaaaacgggcgctatcatcaacgtgaaaaagccgcagtttttagctccccacgaaatgcgccatatcatcactaagtttaatgaagcgggtaatgatgaaattatcctgtgtgaacgtggttcatgcttcggttacaacaacctagtagtagatatgctgggtatggacgagatgaagcaatcgggttatccggtgattttcgacgccacccacgcattgcaacgcccaggtggccgtgctgattcagcgggaggccgtcgtgctcaggcgactgaattagcccgtagtggcatggcattaggcttagcaggtctgtttatcgaagctcacccagatccagataacgctaagtgtgatggtccatgtgcgttacctttgcaccagttagaaaattatctgaagcagatgaaagcgatggatgatttagtcaaatccttcgagccaattgataccagcaagtaaa

SEQ ID NO: 242860 - DNA, 334 bp, Unknown
  Bacterial polypeptide expressing nucleotide sequence isolated from the Sargasso Sea
aaatgagagaggagcaagctttggatataacacgttggtatctgatatgaggtcaatacctataatggcaaaaaatggttatccaatagtttttgacggaacacattctgtacaacaacctggtggacagggtgataaaagtggaggacagagagaatttgttgaatatttatcaagagctgccgttgctgttggaatagctgcaatctttttagaaacccaccaagatccagataatgctccatcagatgggccaaacatggtgccactagataaattagatagtttaataaaccaaattgtagaaatagataatttgattaaaaaaaattaa

SEQ ID NO: 242861 - DNA, 556 bp, Unknown
  Bacterial polypeptide expressing nucleotide sequence isolated from the Sargasso Sea
atgaagctgggcgatttcgaaatcgggctcgacaagccgtttttcctgatcgcaggcacctgtgttgtcgaatcggagcaaatgacgatcgatacggcaggccagctgaaagaaatctgcgcgaaactgaacattccgttcatctacaaatcgtcatacgacaaagccaaccgcagcagcggcaagtcgtttcgcggtctgggcatggacgaaggtttgcgcattctgtcggaagtgaagcgtcagcttggtctgccggtgctgacggatgtgcacgcggagcatgagatcgagcaagttgcgtcggtggtcgacgttctgcaaacgcctgctttcctgtgccgtcaaactgacttcattcaggcttgtgcgcgttcgggcaaaccggtcaacatcaagaaaggccagtttctcgcaccgcacgacatgacgaatgtgatcgacaaggcgcgcgatgcggcgcgtgaagcggggctttcggaagaccgcttcatggcgtgcgagcgcggcgtgtcgttcggttataacaacctggtttcggacatgcgatcgcttg

SEQ ID NO: 242862 - DNA, 826 bp, Unknown
  Bacterial polypeptide expressing nucleotide sequence isolated from the Sargasso Sea
tatgactgaagtaagtgtaaataaattaaagattagtaattcaaaccctttcactttgattgctggcttgaatgtcttggaatcagataaagtaattgaacaagtgatcactcactgtatagcggtgacaaagaaattaaatattccttatatttttaaagcttcatacgacaaagccaatcgctcttctgttgattcttatagaggccctggtgtcgatgaaggtctgaatattctctccgacttaaaaaaagaatttaaggtaccaataatctcggatgttcataatattgaagaggtttctaaggcttcagaagtacttgatgtcatccaaatacctgcatttttaagcaggcaaactgatttaattagagaagctgcctcttctaacatcccgttaaatataaaaaaagggcagttcatggccccagaagatactaataatatcattaataaatgcgaacattttggtaataatcaaatcatgatttgtgaaagaggaagttcttttggatataacaatctagtagttgatatgctaggaatgactcaattgaaggaatctagttatcctattatttttgacgttactcattctttgcaaagacctggcggtttgggagatagaactgatggcaggggttctaaggcattagacctagcaaggtctggaatggctcttggtttggcaggcctttttttagaaactcatcctgatccaaagaatgctttatgtgatggtccttgtgcattaaaaatagatttacttgaagactttttagtgcagataaaagctatagatgacttagtaaaatcatttttataa

SEQ ID NO: 242863 - DNA, 826 bp, Unknown
  Bacterial polypeptide expressing nucleotide sequence isolated from the Sargasso Sea
gatgagtgcgattaaagtaaattgtgaaaatatagaaatttcaaacaataataagatttgtattattgcaggtccatgccaactcgagactgagcaacatgcactcgatatggctggaaaaattaaggaaattacctcaaaatttggccttggatttatttacaaaacttcatttgataaagcgaacagaacaagcttaaaaggtgaaaggggagcaggattagatgcatcacttcctgtatttgataaaattaaaaaggaattaaatgttcctattttaacagacattcataatctagaacaatgtgaaattgtttcaaagcatgtcgatgttttacaaattccagcttttttatgtcgacaaacagacctgttaattgctgcagctaaaacaaataaaattattaatgttaaaaaaggtcagttcttagcaccatgggatatggttaatgtaactaaaaaaatttcagaatctggaaatgataaaatattagtaactgaaagaggtgcaagttttggatataatactttagtttctgacatgagatcattacctataatggcaaagaatggttatccagttatttttgatgccactcactctgttcagcaaccaggtggacaaggagaatcctctggtggtcaaagagaatttgttgaatatttagcaagagcagctgttgcggttggagttgctggtgtatttattgaaacgcatcaagatccagacaatgctccatctgatggaccaaacatggtaccattgaataaattagagaatctattaaaacaattacacgatatagataatctaattaaaaaatag

SEQ ID NO: 242864 - DNA, 697 bp, Unknown
  Bacterial polypeptide expressing nucleotide sequence isolated from the Sargasso Sea
aatgaaagaaattaaaataaaagaaataaatttatccaataactcacccatgacaattattgcaggattaaatgtattagagaatgaggatatggctcttgatgtcgctgaaaaactcaaagaaattacaactaagcataatattccttttgttttcaaagcttcttttgataaagccaatagatcatctatcgattcttacagaggtcctgggcttgaagctggtaaaaaaatttttgaatctattaaaaaaaatattagtgtaccaataataaccgatattcatgaagagggtcaaattgaggaaatctctcaagtggttgatatattgcaaataccagctttcctctgtagacaaactgatctaattagtgcggcatgcaaaactcaacttcctctcaatatcaaaaaaggacaatttttatctccctatcaaatgaagaatataattgaaaaatgtaattcatttggaaatgacaatattattctctgtgagagaggatcatcttttggttatgacaatcttattgtggattttcttgggatatcagaacaaaaagcctttaattatccaataattcttgatgttactcattcacttcagcttccaggaggacaaggcaattctgctggaggaagatcacatcaagcggaagatctagctagagcagcaatagccttaaaaatttcaggacta

SEQ ID NO: 242865 - DNA, 826 bp, Unknown
  Bacterial polypeptide expressing nucleotide sequence isolated from the Sargasso Sea
atggaaaacaaaataattaattgtaatggtatagaaatttctaataataagagaatttctttaatagcaggaccatgtcagcttgaatccgagcagcatgctatggatatggctggaaaaatcaaagaaattgctgataaatttaaaatcggttttatttataaaacatctttcgataaagcaaacagaacaagcataaaaggaaaaagaggagccggtcttgataaatcgttaccagtatttgacaaaataaaaaaagaattaaatgttccaattttaaccgatatccataatgaagaacagtgttcacaagttgctaaacatgtagatgttcttcaaatacctgcttttttatgcagacaaacagatctcttagttgcagcagcaaaaactaaaaaaattataaatgtaaaaaaaggtcagtttcttgctccttgggatatggttaatgtaactaaaaaaatttctgactcaggaaataataatattttagtcactgagcgtggtgctagttttggatacaacacattagtatctgatatgagatcacttcctataatggctaagaatggatatccagtaatttttgatgcaacacattctgtgcaacaacctggtggaatgggtgaaaaaagcggtggtcaaagagaatttgtagagcatttagcaagagcagctgttgctgttggagtagctggagtatttatagaaactcatcaagatcctaacaatgcaccatctgatgggccgaatatggttccattaaataaattagaaaatttagttaatcagctttttgaaattgataatttagttaaaaaataaa

SEQ ID NO: 242866 - DNA, 625 bp, Unknown
  Bacterial polypeptide expressing nucleotide sequence isolated from the Sargasso Sea
aatggaaaataaaatagttaattgtaacggtatagaaatttcaaataagaataaaatttgtcttatttctggaccttgccaactagaaacagaacaacatgctttggacattgcaggtaaaattaaagaaatcacaacaaagtacaatattggatttatttataaaacttcatttgataaggctaatagaacaagcttgaaaggcaaaagaggagctggtttagaaaactctctgcctgtatttgataaaatcaaaaaagaaattaacgtgcctgttttaactgatatacataatgaagaacaatgttccctagtttctaaacacgtagatgttattcagataccagcatttctttgtaggcaaacagatttattaattgctgctgctaaaaccaataaaattattaatgtaaaaaaaggtcaattcctagcaccatgggatatggtgaatgtaacaaaaaaaatttcagacagtgggaataaaaatattttagtcacagaaagaggtgctagctttggttataatacattggtctcagatatgagatctattcccatcatggcaaaaaatggttatccagtggtattcgatggaactcattcagtgcaacaacctggtgtctag

SEQ ID NO: 242867 - DNA, 505 bp, Unknown
  Bacterial polypeptide expressing nucleotide sequence isolated from the Sargasso Sea
aatgacaaaccataaagtaaagtgctctaattttgaaatagcaaacgataagccatttactttaattgcaggaccctgccaattagagaatgagcaacacgcaatcaaaatgtcaacagaacttaaaaaaattacaagcgaacttggaataaatttaatttacaaaacatcttttgataaagccaatagaactagtcttaaaggtaaaaggggaatgggattagaaaagtctttacctatttttgataaaattagaaaagaagtaggtgtacctgttttaacagatgtacatacagctgagcagtgttctattgttgctgatcatgttgatgttttacaaattccagcatttttgtgcagacaaactgatttattaatagctgcagccaaaactggaaaaataattaatgttaaaaaaggtcaattcttagcaccatgggatatggcaaatgtaattaagaagattgaagactcaggaaataaaaatattttaataacagaaaga

SEQ ID NO: 242868 - DNA, 460 bp, Unknown
  Bacterial polypeptide expressing nucleotide sequence isolated from the Sargasso Sea
atggaaaataaattagttaattgtaacggtatagaaatttctaataaaaataaaatttgtttaattgccggaccttgtcagttagaaactgagcagcatgccatggatatggccggtaaaattaaagaaatcgcatcaaagtatgaaattggtttaatttataagacttcttttgataaagccaatagaacaagcattaaaggtaagagaggagctggtttagaaaattctttaccagtatttgataaaattaaaaaggatttgaatatcccagttttaacagatgtacataatgaaaaacaatgcgcagttgttgcgccccatgtagatgttttgcagataccagcatttttatgtaggcaaactgatttattaatagcagcagcaaaaactaataaagttataaatgttaaaaaaggtcaatttttagctccatgggatatggttaatgttacaaaaa

SEQ ID NO: 242869 - DNA, 814 bp, Unknown
  Bacterial polypeptide expressing nucleotide sequence isolated from the Sargasso Sea
attgaaagaagtaaaaataggtaacgttatatttagcgataagcatctcggcataattgctgggccttgtgtgattgaggaccgagatcactcgttgaggatggctaatgaaataaagaagatatctgatgatattgaaatccctattatctttaaaagttcatttgacaaagccaacagaacatctataaagtcatttagaggccctggcatagatgaggggataaaaatattatccgatgtaaaagtcgagacagggttaccagttataacagatattcacaatgctgatcaggcgaaggtagtagctgaagtggttgatgttattcaaataccagcttttttaagcagacagaccgatatcttaattgcggcatcaaatactggaaagccagtaaacatcaaaaaaggtcaatttttagcgccatgggatgtagagcatattgtgcaaaaaattgaagaaacagggcataataatattttgttaactgatagagggacccagtttgggtataataatctggtggctgatatgagggcaatcccgcttatgaaaaaatatggatatcccgttgtgtttgacgcaacccatagtgcgcaactgcccggagctagcggtggacactcctcaggaatgagagatatgatacctaccttggcaaggtcagcggttgctgctggaagctcgggagtttttatggaggttcatgacaaagtggattcagcaaaatcagatgccgcaacccagtggccactaagccaattaaaagatcttctaattgatttaatcaatattcataatgtggttagttga

SEQ ID NO: 242870 - DNA, 823 bp, Unknown
  Bacterial polypeptide expressing nucleotide sequence isolated from the Sargasso Sea
atgaataaagtcatattagataaagttacatttggtgataattctataccattgattggtggtccatgtgttattgaaagtagagatcattgtttgagaatggctgaaaaaattactgaaattactacaaaattaaatattccatttatcttcaaaagctcatttgataaagcaaatagaacatctatatcatcttttagaggaaatggtttagatgatggacttaaaattctagaggagattaaaagaacatttaatattccaataacaacagatatacatcttcctgagcatgcacaggcagttagtgaagttgttgatattattcaaatcccagcatttctttgtagacaaactgatttattaattgcagctgctaaaactggtaaagtagtaaatgttaaaaaaggacaatttttatctccctataaggttgaaaatatcattaataaattagaagaaaatggtaataataatatcttaattacagagagaggaaataccttcggctttgatagcttagttactgatttaagatcaatcccaattatgaaaaaatttggttatccagttgtatttgatgcaacacatagtgctcaaattcctggaaatcatgaaaataatactggcgggaatagagagtatatcccatcacaaacttttgcagcagtatcagctggagcagatggaatttttatggaagtgcatgataacgtagatagtgcattaagtgatgcgagtactcaatggcccatagaaaaattagaaaatactcttcagtctattcttgcttttagaaaaacatatttaaatcatggataaa

SEQ ID NO: 242871 - DNA, 223 bp, Unknown
  Bacterial polypeptide expressing nucleotide sequence isolated from the Sargasso Sea
aatgattaatattaatctaaataatttttcgatatcaaataatttaccatttgttttaattgcaggcccatgtgttattgaaaatgaaaaacactctatgatgattgcagagagcttatctaaaatatgcaatgaaattagtataaacttaatatttaaatcaagttttgataaagctaaccgatcaagtataaatagtcaaagaggtgtcaatctcaatgag

SEQ ID NO: 242872 - DNA, 418 bp, Unknown
  Bacterial polypeptide expressing nucleotide sequence isolated from the Sargasso Sea
atgattaaactaaataactttaaaattggaaattctgagagactaactatttttggaggtgtaaatgtaattgaatcaaaagaactaatttttgaagttgcggaagcattcataaaaaattcttcaaaattaaagtttaattttgtgttcaaagcctcttttgataaagctaacagatcttcactagattcctataggggtcctggtttagaagatggattaaaaatcctctctgaactaaagcaaaaatataatctgccaattttgactgatattcatgaaccgcatcaagcaaaacctgtttctgaagtatgtgacattattcagattcctgcttttttatgcagacaaactgatttggtagttgaagcagctaagactggaaaaattataaatttaaaaaaaccaccagtttagt

SEQ ID NO: 242873 - DNA, 829 bp, Unknown
  Bacterial polypeptide expressing nucleotide sequence isolated from the Sargasso Sea
atgagtaatattcaaattaatgattttgagattggtaatactttacctctaacaataataggtggagttaacgtacttgaatctgatcaattatgctcagaagttgcaaatacttttgtcgatctatcaaaaaaacattcatttaactttatatttaaaggatcatttgataaggcaaatcgatcttcgtataaatcttttcgtggtccaggcctcacaaaagggctacatatgcttgaaaagataaaaaatgattttgatgttcctgttatcaccgacatccatgaaccaaatcaagcaaatcaggttgcgcaagtttgcgatattattcagatacctgcatttttgtgtcgtcagacagatcttatccaagctgcagcagaaacaaggaaaccacttcatatcaagaagccacaattcttaagtgctactgatatgagaaatgttgtagaaaaatgcttttcattcgataacaaaaatattttactttgtgagcgtggcaacatttttggatacaacaatctagtcgtcgatatgttaaattttcaaacactgaaatcttataacctaccagttatttttgatgtaactcattcattacaaatcccagggggattaggtatttcaacaggaggtaggagagaattatttcttccattagcaaaatcaggcgttgcccaaaaaattgcaggtttgtttattgaaactcacactaatccagatgatgcaaaatgtgatggaccttctgcaatcaacataaatgatttggatagatacataaaagaaattgtgaatttagacaagcttatcaaggctcaggaagattagt

SEQ ID NO: 242874 - DNA, 799 bp, Unknown
  Bacterial polypeptide expressing nucleotide sequence isolated from the Sargasso Sea
atgataaatattggaaagacaaaaaatttgacattaatttcaggaccatgcgcgattgaatctgaagatttatgtatcaagattgctgaacatatgtgcgaaataactgatcctttacccatttcatatatatttaaagcatcatttgataaagctaacagatcttctattaattctaatagaggaatagggatagaaaaaggactgaaaatacttgatagaattaaaactgattttaaaatacctgttctgaccgatgttcatgaagacacacctattaatgaagttgcagattgcgttgacatacttcaaacgcccgcttttctttgtagacaaacaaattttattctaaaagtctcatcagctatgaagccagttaatattaaaaagggtcaatttctatcgccacttgaaatgattaatgtcgttgaaaaggcaaaatctacaggtaataaagatatttttgtttgtgagagaggtgttagttttgggtacaataatctggtgtctgatatgagatctctggtgttacttagagagactaaatgtcctgtaatctatgatgcatcacattctgttcaatatcctggtaaagatataacttcatctggtggtggcagtgaattcattccaagtctagctaaagcagccacagcagtaggtgttgatgctttgtttatagagactcatcctaatccggccatagccctgagcgatggtaaaaatagtcttaatttaaataatatgaaatctcttttagaatcagttgttaatattaatgatatagttaagagataga

SEQ ID NO: 242875 - DNA, 678 bp, Unknown
  Bacterial polypeptide expressing nucleotide sequence isolated from the Sargasso Sea
tctataaaacatcttttgataaagctaacagaacaagtttaaatggtaagagaggagcaggattagaaaaatctttacctgtttttgacaaaattaaaaaagaatttggaattccagttcttacagacattcattcaatcgaacaatgcgatgtagtatcaaaacatgttgatgttttacagattccagctttcttatgtagacaaacagatttactagtggctgctgcaaagactggaaaagttattaatgttaaaaaagggcagtttcttgctccctgggacatgaccaatgtcacaaaaaaaattgaacaatcaggaaataaaaatattttggttacagagagaggcgcaagttttggctacaacactttagtatccgacatgagatcattacctatcatggcaaagattggttacccagttgtttttgatgcaactcattcagttcaacagccgggcggtatgggagaaaaaagtggaggtcaaagagaatttgtagaacatttatctcgagcagcaatagcagttggggtagcagcagtttttatggaaactcatgaagacccagacaatgctccatctgacggacctaacatggttccattatcgcaaatgccaaaacttttaaaacaattagtcgagatagataatcttataaagaatggcaaaaattaaa

SEQ ID NO: 242876 - DNA, 817 bp, Unknown
  Bacterial polypeptide expressing nucleotide sequence isolated from the Sargasso Sea
atgaaaaatattttcaaaattaatggggtggaatttggcgggaaacagctaccaattatagctggtccttgtgttattgagagcagagatcatatcttatatatggctgaaaaaattaaggctattactgataaaaataaattaccattaatttttaaatcatcttttgataagggtaatcgttcatctcattcctcttttcgaggacctgggattgattctggtcttagaattttagaagatgtgaaagaagcatttaatattcctgtcacaacagatatacataatgcatcacaagcaaaacttgtatctgaaattattgatattatacaaatccctgctttcctttgtaggcaaagcgatattatcaatgctgctgtaaaaactggaaagataataaatgttaaaaaaggacagtttatggcaccatgggatgcaaataacatagttgaaaaagtagctgatggtaatggagaaaaattattacttactgaaagagggtcttccttcggttataatagcttagtctcagatatgacttcaattccaattatgcagggttttggtgtcccagtaatatttgatgctacacatagcgttcaacgtcctggtggccttggtaaaactactggaggagcaagagaatttattcccactttagcaaaatgtgctgtggcggcaggttgtaatggtatattcatggaggtacatgataatccagataatgcaaaatcagatgctgctagtcaatggccattaaacaaacttgatactgttttaaatagcttaaaagacattaaagaagtaataaactaga

SEQ ID NO: 242877 - DNA, 652 bp, Unknown
  Bacterial polypeptide expressing nucleotide sequence isolated from the Sargasso Sea
atgaaattaagagactttaaaattgataataacgaaaaaatgaccctcatgggcggtatgaatgttcttgaatcaagagatttggcaatggaagtggctgaaaaatttaagaatgtaactgataaaaatgatattaattatatttttaaaggctcttttgataaagctaacagaagctctatcaattcatacagggggcctggtttggatgaaggcctaaaaatattagaggaaatttcaaaaacttatgatattcctgtaatcaccgacgttcacgagcctaatcaagcaaaatcagtaagtgaaatttgtgaggttattcaaatacctgctttcctagcaagacaaaccgatctagttagcgcagctgcaaaaacttcttccataatacaatttaagaaacctcaatttttatctgctcaagagatgtcaaacgtcgttgaaaaatgtgaggctgctggaaataaaaatattactttgtgtgaaagaggtaactcatatggatataacaatttggttgttgataccttaaattttcaaattttaaaaaaattatcaaagcctgtaatttttgatgtaacacattcacttcaattaccaggaggcttaggaagttcaactggtggtagaagagaatatgttttaagtcttg

SEQ ID NO: 242878 - DNA, 841 bp, Unknown
  Bacterial polypeptide expressing nucleotide sequence isolated from the Sargasso Sea
catgaatgcattaaatcttagaaatttcgagattagtaataataaaactatgagcctcatgggaggagttaatgtattagaatctagagatctttgcatggaggtaggagaaaaatttaaatctatttcagacgatttaaaaattaactatatatttaagggttcttttgataaagcaaatagaagctctattgactcttttagaggtccaggactagatgagggattgaagattttagaggaaatatctaaagaattcgatatcccaactatcacagatattcatgaaccagaccaagctaaacctgttggtgaaatttgtgaaattattcaaattcctgcattcttggcaagacaaactgatctcgtaattgctgcagctaaaactggaaacattcttcaatttaaaaagccacaatttctatctgctccagaaatgaaaaatataattaagaaatgcgagtcagctggaaatagtaaaataactctttgcgaaagaggcagttcttttggatataacaatttggttgttgatactctaaattttcaaattttaaaaaatttaaataaaccagttatatttgatgttacgcattcgcttcaacttcctgggggccaaggtaattctgcaggcggaaggagagaataccttttaagtcttgcaaaagctgggttatctcaaggaatcgctggattatttttggaggcccatcctgatcccgataaagctaaatgcgatggtccctgtgccttaaaattagaaatgctaaagccatttcttacacagcttaaagaattagatgattttattaaaaatcaagatgcgcttgagatctcataa

SEQ ID NO: 242879 - DNA, 850 bp, Unknown
  Bacterial polypeptide expressing nucleotide sequence isolated from the Sargasso Sea
gatgagtaataaaatcataaacctaggttcaatcgagatcgctaacgataaacctttcgtgttgtttggtggcatgaatgtgcttgagtctcgcgatctcgctatgtcgattgctgaaacctatgccgaagtgacgcaaaaactgggtattccctatgttttcaaggcgtcgttcgataaggccaaccgctcttctgttaactcttaccgtggtcctggcatggaagaaggcttaaagatttttgaagaaatcaaaaagactttcaatctgccattgatcaccgatgtgcatgagacttaccaatgtgcgcctgtcgctgaagtggttgatattattcagctacctgctttcttagcgcgccaaacagacctcgttgtcgccatggcgaaaacgggcgctatcatcaacgtgaaaaagccgcagtttttagcgccacacgaaatgcgccatatcatcactaagtttaacgaagcgggtaacgatgagattatcctgtgtgaacgtggttcgtgcttcggttacaacaacctagtagttgatatgcttggcatggatgagatgaagcaatccggttatccggtgattttcgatgccacccacgcattacaacgtcctggtggtcgtgccgactcggcgggtggccgtcgtgctcaagcgactgaattagcccgtagtggcatggcgttaggcttagcgggtctgtttattgaggctcacccagatccagataacgctaagtgtgatggcccatgtgcgctgccactgcatcagttagaaaactatctgaagcagatgaaggcgattgatgatttggtcaaatccttcgacccaattgataccagcaaataa

SEQ ID NO: 242880 - DNA, 597 bp, Unknown
  Bacterial polypeptide expressing nucleotide sequence isolated from the Sargasso Sea
ccttacctgtttttgacaaaataaaaaaagaatttaacattcctattttaacagacattcataatattgatcaatgttcagaagtagctgatcatgttgacatattacaaattcctgctttcttatgcagacagactgatcttttgatagctgctgctaaaacaaataaaattattaatgttaaaaaaggtcaattcttagcaccatgggatatggttaatgttactaaaaaaatttcagattctggaaatacaaatattttagtcaccgagagaggcgcaagttttggttacaatactttagtttctgacatgaggtctttaccaataatggctaagaatggttatccagtgatttttgatgcaacccattcagtacaacaacctggaggtcaaggtgagtcatcaggaggtcaaagagagtttgtcgagtatttagctagagctgctgttgcagtaggtgttgctggagtttttattgaaactcatcaagatccagataatgcaccatcagatggtcctaacatggtcccattggataagttagaaaatctgttacatcaattatcagatatagataaattaataaaaaaatagt

SEQ ID NO: 242881 - DNA, 572 bp, Unknown
  Bacterial polypeptide expressing nucleotide sequence isolated from the Sargasso Sea
tataactgatattcacgaacctcagcaagcacaagcagtaagtgagatatgtgaagttgttcagattccagccttcttggcaagacaaaccgatttagtaaatgcagctgctaaaactaaatcaataatacagtttaaaaaacctcaatttttatctgctcctgagatgtctaatattgttgaaaaatgcagttctgctgggaatgaaaatataaccttatgtgagaggggaaattcttttggttacaataatctcgttgtggatactttaaactttcaaatattaaaaggattattaaagcctgttatatttgatgtaactcattcacttcaactgcctggaggtcttggaagtgctacaggcggaagaagagaatatcttttaagccttgccaaagcaggaatttctcaatctatagcaggattatttcttgaagcgcacccagatcctgatcaagcaaaatgtgatggaccatgtgctttaccactttcagttttagaagaattccttacccagattaaagacttggatgattttattaaagatcagaatgatttaaagataagttaat

SEQ ID NO: 242882 - DNA, 814 bp, Unknown
  Bacterial polypeptide expressing nucleotide sequence isolated from the Sargasso Sea
aatgaaaataaataatacacaaatagcaaacgataaaagattaactatttttggcggcgttaatgtcatcgaatcagatgatcttttatttaacgtagccgaaaaatttaaatctgctgcagaaaaatataaatttaattatgtttttaaagcctcatttgataaggcaaatagatcttctgtagattcatttagaggtcctggattagatgaagggctcgaaagcttaagaaaggtaaaagaagaatttaaaattcctttaataacagacatacatgaaccaaatcaggctgaagctgtagcagaagtttgtgatgttattcaaattccagcttttctttgtcgacaaactgatttaattgttgcagcagcaaaaacgaaaaaaattattaatattaagaaaccacagttctcatctgcaaaagaaatgtttcatgcagtaagtaaatgcgaacaagctggtaatccagatataattctctgtgagcgaggaaatatttttggctataacaatttggtagtcgatacactaaattttcagattttgaaagaatcaggaaaaccggttttctttgatgtgacccattctcttcaacaacctggcatgctagaaaaaagcacaggaggtagagggcaatatgttttcgatttggcaaaagctggagtctcacaaaatattgcaggcctatttattgagactcatccagaccctgcaaatgcaatgtgtgatggtccatgtgcacttgatttatcagacctggataattttatgcataagataatgctgcttgatgatcttgttaagagcaattaa

SEQ ID NO: 242883 - DNA, 826 bp, Unknown
  Bacterial polypeptide expressing nucleotide sequence isolated from the Sargasso Sea
aatgaaaaatatcaaattatctaattttgaaatttccaacaaaagtaattttattttaattgcagggccgtgcgtaattgaaaatgaaaatcattctttgatgatgacagaacaaattgcaaaaatatgtcaaaaactaaaaattcattttatcttcaaatctagttttgataaagcaaacagatcaagcataaatagtaatcgaggtgtagatataaatcaagctgaaaaaatatttaataagattaaatcaatatataattgtcctatcttaaccgatgttcataatgaaagtcagtgtgagtttttttcaaattcagaaagcgttgatgttcttcaaataccagcgttcctctgccgacaaactgatttactgattgcagcagctaaaacaaaaaaaattgtaaatgttaaaaaagggcagtttttatctcctcatgaagttccaaatatatttaataaaattgaaagtgctggcaattataatattatgattactgaaagaggtacatcatttggttataataatttaattaatgattttaaatcattagatattatgaaaaattttcaataccccgttatttttgatgctacacattctgtgcaggagcctggaggtatgggagaaaaaagtggaggcaagagagagtttgtttctactttagctaaagctgctgttgcagttggagttgctggaatttttattgaaacacataatgatcctgacaatgcacctagtgatggtccaaatatgttgcagattgaaaacctcgaaagtttaatttcgaaattgattgagttagatactgtttcaaaaaaataa

SEQ ID NO: 242884 - DNA, 595 bp, Unknown
  Bacterial polypeptide expressing nucleotide sequence isolated from the Sargasso Sea
ccttcctgtttttgataaaatcagaaaagaattaagtgtaccagtcttaactgatgtgcataatgttgaacaatgttcgattgtttctaaacatgttgatgttttgcaaataccagcattcttatgtaggcaaacagatttattgttagcagctgcaaaaactaataaaattataaatgttaaaaaaggacaatttttagcaccatgggatatggtaaatgtaactaaaaaattatctgattctggaaatgaaaatattcttgttacagaaagaggtgctagctttggatacaatacactagtttcagatatgagatcaatccctataatggcaaaaaatggttacccaattatttttgatggaactcattcagttcagcaaccaggtggacttggtgaaaaaagtggaggtcaaagagaatttgttgaatatttatcaagagcagctactgctgtaggtatagcgggaatatttctagaaactcatcaagatcctgataatgctccatcagatggtccaaatatggttccactggacaatttagagaatttaatttcacaaatagttgaaatagacaatcttataaaaaaataa

SEQ ID NO: 242885 - DNA, 841 bp, Unknown
  Bacterial polypeptide expressing nucleotide sequence isolated from the Sargasso Sea
aatgaaagatatttcaataaaagattttcaaataggaaatgatcaagattttaccttaatgggtggaatgaatgttcttgaatcagaagagacggctcttttagtagccgaaaaatttaaagaagttactgataaattaaaaataaattggatttttaaagcctcctttgataaagcaaatagaagttcaattgaatcctttagaggtccaggtatggatgaagggctcaaaatacttgaaaaagtctcatcagcatttgatgttcctataattaccgatatacatgaaccaagccaggctaatcctgtaagtgaagtttgcgaagttattcaaattcctgcatttctgtgtagacaaaccgatcttgtttcagcagctgcaaaaacaagttcagctattcaatttaagaagccacaatttctttcagcagctgaaatgaaaaatgttgttgaaaaatgtaagtctgctggaaatgaaaaaattattttatgcgagagaggaaatatttttggttataacaatcttgtagttgatactcttaatttccaaataatgaaaggatactctgttccagttatgtttgatgttactcattcactccaactacccggaggattgggaaaatctactgatggtagaagagaatatcttttgcatatggcaaaagctggaatttctcaaaagattgctggattgtttcttgaagctcatcctaatccagataaagccaaatgtgacggaccatgcgctcttagacttgatcagcttgaatcatttcttcttcaagtaaaagaattagataaacttgtaaagtctcaaaaagatttagatcttaaataa

SEQ ID NO: 242886 - DNA, 826 bp, Unknown
  Bacterial polypeptide expressing nucleotide sequence isolated from the Sargasso Sea
atggaaaataaaatagttaattgtaacggtatagaaatttcaaacaaaaataaaatttgtttaatagctggaccttgtcaacttgaaactgagcaacatgctttggatatggcaggcaaaattaaagaaatagtgacaaagtataatattggatttatttataaaacttcatttgataaggcaaacagaactagtcttaaaggtaaaagaggagctggtttagaaaactccttgcctgtatttgataaaatcaaaaaagatattaaagtacccgttcttaccgatatacataatgaagaacaatgttccctagtttctaatcacgtagatgttcttcaaataccagcattcctttgtaggcaaacagatttattaattgctgctgctaaaaccaataaaatcattaatgtgaaaaagggtcaatttctagcaccgtgggatatggtgaatgtaaccaaaaaaatttctgatagtggtaatgaaaatattttagtgaccgaaagaggagctagctttggttataatacgttagtctcagatatgagatctattcccatcatggcaaaaaatggttatccagtagtatttgatggaactcattcagtgcaacaacctggtggtctaggtgaaaaaagtggtggtcaaagagaatttgttgagtatttgtctagagcagctgttgcagtaggagttgcagctatttttttggaaacgcatcaagaccctgataatgctccatcagatggtccaaacatggtccctttagacaaattagacgagctaattaatcaaatagtagaaattgataatttagttaaaaaataat

SEQ ID NO: 242887 - DNA, 835 bp, Unknown
  Bacterial polypeptide expressing nucleotide sequence isolated from the Sargasso Sea
aatgataaacaaaattgtaaaatgtaataatttcgagatttctaataataaaaaaatatctttaatctcaggtccttgccaactggaaacagaacaacatgctatggatatggcaggaaaaataagtgatattgcaaaaaaatttgatattggttttgtctataaaacttcttttgataaagctaaccgtacaagcttaaaaggtaaaagaggagcaggtttagaaacttcgttgcctatatttgataaaataagaaaagaattagatatacccgttcttactgatgtgcacaatattgagcaatgctctatagtatcaaaacatgtagatataattcaaattccggcatttctttgtagacaaacagacttattagttgctgctgccaaaacaaataaaattataaatgttaaaaaaggtcagttcttagctccatgggatatggtcaatgtaacaaaaaaaatatcagactctggtaatgaaaatatccttgttactgagagaggtgcaagctttggatataatactttagtttctgatatgagatctatacctataatgtctaaaaatggctatccagttatttttgatgggacacattctgttcaacaacccggaggcctgggtgaaaaaagtggtggacaaagagaatttgttgaatatttatcaagagcagctaccgctgtgggtatagcaggaatctttttagaaacacaccaagatcctgacaatgcaccatcagatggaccaaacatggttcctttaaaaaatcttgaacttttaatttctcaaattgttgaaatagacagtcttataaaaaaaaataatggctaa

SEQ ID NO: 242888 - DNA, 841 bp, Unknown
  Bacterial polypeptide expressing nucleotide sequence isolated from the Sargasso Sea
aatgaaagatatttcaataaaagattttcaaataggaaatgataaagatttgaccctgattggtggaatgaatgttcttgaatcagaagagacagctcttttagtagccgaaaaatttaaagaagtaactgaaaaattagaaataaattggatttttaaagcctccttcgataaagctaatagaagttcaattgaatcctttagaggcccaggcatggatgaaggactcaaaatacttgaaaaagtttcatcatcatttgacgttcctgtaattactgatatacatgagccaagccaggctaattctgtaagtgaagtttgcgaagttattcaaattcctgcattcctatgtagacaaaccgatttggttttagcggctgctaaaacaaattcagcaattcaatttaagaagccacaatttctttcagcagctgagatgaaaaatgttgttgaaaaatgtaagtctgctgggaatgaaaaagttatcttatgcgagagaggaaatatttttggttataacaatcttgtagtcgatactcttaatttccagataatgaaagaatattttgtgccggtcatttttgatgttactcactcactacaacttcccggaggcttaggaaaatccactgatggtagaagagaataccttttgcatatggcaaaagctggaatctctcaaaagattgctggattatttcttgaagctcatccagatccagataaagccaaatgtgacggaccatgtgccctaagacttgatcagctcgaatcatttcttcttcaagtaaaagaattagataaacttgttaagtctcaaaaagatttaaatcttaaataa

SEQ ID NO: 242889 - DNA, 814 bp, Unknown
  Bacterial polypeptide expressing nucleotide sequence isolated from the Sargasso Sea
atgaaaataaataatttaccaatagcaaatgatcaaagattaactgtttttggtggcgttaatgtcattgaatcagatgatcttctttttcgcgtagctgaagaatttaaatctatcgctgaaaaatataaatttagttatgtcttcaaggcttcatttgataaagcaaatagatcttctgcagactcatttagaggccctgggctagaagaaggtcttgaaagcttaaggaaagtgaaagaaaaatttgatgttcctctaataacagacattcacgaaccagatcaagctgaagctgtagcagaagtttgtgatgtcattcagattccagcttttctttgtcgacaaactgacttaattattgcagcagcaaaaaccaaaaaaattattaatatcaagaaaccacaattttcatctgctaaagaaatgtttcatgcagtaagtaaatgtgagaaagctggcaattcagatgtaattttatgtgagagaggaaatatttttggctacaacaatttggtagtcgatacattaaattttcaaattctaaaagattcaggtaaacctgttttctttgacgtaacacattctcttcagcagcctggcatgctagaaaaaagtacaggaggtagaggacaatatgtgtttgatttagcaaaagctggagtctcacaaaatattgccggcctatttattgagacacatcctgatcctgcaagtgcgatgtgtgacggcccttgtgctcttaatttatcagaactagataattttatgcacaagatattgctgcttgatgatcttgttaagagcaaataaa

SEQ ID NO: 242890 - DNA, 829 bp, Unknown
  Bacterial polypeptide expressing nucleotide sequence isolated from the Sargasso Sea
atggttcaaattactgaggttcaattaaataatcgaaaaatatccaacatggatcctgccatcgttatagctgggatgaacgtaattgaatcagaggagctttgtatctctgtcgcaggagagctgaaaaatatttgcgaaagaaataatgtcgatttcatattcaaggcttcttatgataaagctaaccgatcttcaatagattcctttcgagggccaggaattgatcaaggcttaaaaattttaaaaacagtaaaggatgaatttaatgttcctataatttctgacattcatgagccttcacaagcggaaacagcagcagaagttctcgatgtcattcaaatcccggcttttttgtccagacaaactgacttaattaaggctgcatgtgaaacagaaaaggtgataaacgtaaaaaaagctcaattcctatcgcctgcgcaaatgatgaacattattgaaaaatgtaatcattttggtaatgaaaatattttgctatgcgaacgaggaagtatttttggttatgataatttgattgtagattttttagggatagatgagattaaaaaaattgccccaaccattttagacatcacccattcactgcagcttcctggtggcaaaggcaaatccgcagatgggaggtcctcccaggcaaaagctttgggaactgcagctgcagccataggcctagcaggtttttttattgaggttcatccgatccctgaaaatgctctttgtgatggagcttcagccacgaggttatctgaatttgaaagtttacttttagaattaaaaaaatttgatgaactatcaaagtccttatgaa

SEQ ID NO: 242891 - DNA, 835 bp, Unknown
  Bacterial polypeptide expressing nucleotide sequence isolated from the Sargasso Sea
catggaaaatagaattgttaaatgtcaggatttaaatatttctaactcaaataaaatttgtttaattgctggaccttgccaattagaaactgagcaacacgctttagatatggcaggggaaattaaaaaaattactgacaaatataatattggatttatatataaaacgtcatttgataaagctaatcgaacaagtcttagaggtaaaagaggagctggattagaaaaatccttaccagtttttgataaaataaaaaatgaaataaaagttcctgtccttacagatattcataacgtagagcaatgttcaattgttgctccacacatagatattttacaaattccagcttttttatgtcgtcaaacagatttattagttgctgctgcaaaaacaaataaaattattaatgtgaaaaaaggtcaatttttagctccatgggatatggagaatgtgacaaaaaaaatatctgaatccggaaataataatattcttttgacagagagaggagcaagttttggatacaatactttagtatctgatatgagatcaatacctataatggcgaaaaatggttatcctattatttttgatgcaactcattcagttcagcaacctggcggccaaggcaataaaagtggtggacaaagagaatttgttgaacatttatctcgagcagctgttgcagttggtgttgctgcaatttttatagaaacgcatcaagacccagataatgctccctctgatggtccaaatatggttccattaaataaattagacaatcttataaatcagattgttgaaatagataatctaataaaaaaaaaaaatgtctaa

SEQ ID NO: 242892 - DNA, 757 bp, Unknown
  Bacterial polypeptide expressing nucleotide sequence isolated from the Sargasso Sea
tctgattgcggggccctgtgtgtgggaaggatattctcatgcagaagcaattgcagaaaaattactggctgtctgcggaaagcatgatgttaatttcatttacaaaaccagttttgataaggcaaaccgcagcagtttaaagggctttcggggggcagaaaatgcaattgaaggatttcgggaattaaaaaagaaattcaatctggaaatcttaacggatgttcatgaatctcatcaacccggagaattggatgttgtcgacatctttcaaatccctgcatttttatgtaggcaaactgacttgttgaaagctgcagcccaaaccggcaagccggtgaatgtgaaaaaaggacagttcctctcaccacaggaaatgggaaatgttaaagaaaaattgatttcttttggctgtgatcaaatcatcttgaccgaacgtggtactacctttggctacaataatctggtagtagatttcagatccattccgattctcaaaacgtttggttggccggtagcgattgatgcaacgcacagtgtccagatgcctggaaaacagggagatcaaagtggcggcgatagatcttttgcgaaatacatgatgcgatgcgggatggtatgcggtgcagatgtggtttttgcagaagtccataatgatcctgataacgcacccagtgacggccccaatatgcttcaccttgatacattcgaaaactttgtgaaagaaattcggaaatggtttgatgcctcacctgaataa

SEQ ID NO: 242893 - DNA, 835 bp, Unknown
  Bacterial polypeptide expressing nucleotide sequence isolated from the Sargasso Sea
catggaaaatagaattgttaagtgtcaggatttaaatatatctaactcaaataaaatttgtttaatagcaggaccctgccaattagaaactgagcaacatgcgctagatatggcaggagaaataaaaaaaattgcagacaaatataatattggattaatttataaaacttcctttgataaagctaatagaacaagccttgatggaaaaagaggagcgggattagaaaattcgttaccagtttttgataaaataaaaaaacaaataaaaattcctgtccttacagatattcataatgtagaacagtgtgtaattgttgcccctcatgtagatgttttacaaatacccgcttttttgtgtagacaaacagacttattaattgctgccgcaaaaacaaaaaaaatcattaatgtaaaaaagggtcagttcttggctccatgggatatggttaatgtaacaaaaaaaatatcagactcaggaaataataatattctagtaacagagagaggagctagttttggatataacactttagtgtctgacatgagatcaattcctataatggcaaagaatggttatccaattgtttttgatgccactcactcagttcaacaaccaggaggtcaaggtaataaaagtggtggacaaagagaatttgtcgaacatttatcaagagctgctgttgcagttggtgttgctgcaatttttatagaaacacatcaagatcctgataatgccccctctgatggtccaaatatggttccacttaaagaattagataatcttataagtcagatagttcaaatagataatctagtaaaaaaaaataatgtctaa

SEQ ID NO: 242894 - DNA, 283 bp, Unknown
  Bacterial polypeptide expressing nucleotide sequence isolated from the Sargasso Sea
atgagagctttgccaataatgtctaaatttggtttcccaattgtttttgatgctacacactcagtacagcaaccagggggtatgggagaaaaaagcggcggtcaaagagaatttgttccttttttagctcgtgcagcaatagctgttggtgttgcagcaatttttatggaaacacacgaagatccagacaacgcgccatcagatggtccaaatatggtgccattaaatgaagtaaaaacattattaaaaaaattaactgaaatagataaattagttaaataaa

SEQ ID NO: 242895 - DNA, 847 bp, Unknown
  Bacterial polypeptide expressing nucleotide sequence isolated from the Sargasso Sea
catgaatatcgatatcgcaccgggcgtgacgctcggcaacacgctgccgttcgtacttttcggcggcctgaatgtactcgaaagcctcgatttcacgctggacgtgtgtgagaaatatgtcgaagtcacgcacaagctgaacgtgccgttcgtcttcaaggcctcgttcgacaaggcgaaccgctcatcgatgcattcttatcgcggggttgggctggatgaagggctcgagatactgagcgcggtgaagcagcgattcggcgttccggtcattacggacgtgcacgaagtcgcgcaggcccgcccggttgccgacgttgcggacgtgctccaggtgccggcgtttcttgcccggcaaacggatctggtggtggcgattgcgagcacgggtaagccggtcaacgtgaagaagccgcagttcatgagtcccgcgcagatcaaacacgtcgtagcgaaatgcaacgaggccggcaatcgccaggtgatcctatgtgagcgcggcagctcgtttggctacgacaacctcgtcgtggatatgctggggttccgcgagatgcgcgacgcgagcgacaactgcccggtgatattcgacgtcacgcacagtctgcaacgccgcgatcccgcgagcgaagcgtccggcggccgtcgccgccaggtggtcgacctcgctcgcgccgggatggcagtcgggctggccggactctttctggaagctcacccggaccctgatcgtgcgcgctgcgatggcccgagcgcgttgccgcttcatctgctcgaagctttcctatcgcagatcaaggcgattgacgatctggtgaaaagccaaccggtgctggatatccaatga

SEQ ID NO: 242896 - DNA, 832 bp, Unknown
  Bacterial polypeptide expressing nucleotide sequence isolated from the Sargasso Sea
tatgaaattaagaaactttgaaattggaaatagtaaatctcttactttgatgggcggaatgaatgtacttgaatctagagatttggctatgcaagttgcagaagattttaaaaaagttactgataaattgaatattaattatatttttaaagcttcatttgataaagctaaccgaagttcaatcgcatcatatagagggccgggattggaagaaggactaaacatattgaaagaggtctcttatgagtttgatgttcctgtaattacagatatccatgaacctgatcaagctgaaccagtaagtgagatttgtgaggttatccaaattccagcttttctagcaagacagaccgatcttgttaatgcggcagcaagcactaaatcaattattcaatttaaaaagcctcagtttttatcagcacctgaaatgaaaaatgttgttgaaaaatgtgtcgctgctggaaactcaaacattatactttgtgagcgcggcaattcgtatggatacaataatttagtagtggatactcttaatttccaaatattaaaaaaattaatgacgccagtaatctttgatgtaactcattcacttcagcttcctggtggactaggaggctcaactgatggaagaagggagtatgttctgagtctagctaaagctggtatttctcaatcaattgctggactctttcttgaggctcatccaaatccagatgaagcaaaatgtgatggaccatgtgcgctaccattatcaatgcttgaggaattcttgactcaaatcaaagacttagatgattttattaaacaacaagaaaatttagatatttcctga

SEQ ID NO: 242897 - DNA, 826 bp, Unknown
  Bacterial polypeptide expressing nucleotide sequence isolated from the Sargasso Sea
aatgagcaacattaaggtcaattgtaataaaatagaaatttcaaacgataacaaaatatgtattatcgctggtccttgtcagcttgagaccgaacaacacgcgatggatatggctggtaaaatccaagaaattactgagaaatttggggttggatttatttataagacatcttttgataaggcgaacaggacaagtcttaaaggtaaacgaggcgctggacttgatgcttctcttcctgtttttgataaaattaaaaaagaacttaacgtaccaattctaacagatattcataatatcgaacaatgttctattgttgcaaaccatgttgatgttttgcagattcctgcatttttatgccgtcaaacagatttattagtagctgcagctaaaacaaataaaattataaatgttaaaaaaggtcagtttttagcaccgtgggatatggttaatgtaacaaaaaaaatttcagagtcaggaaataaaaatatcttagtaactgaaagaggagctagttttggttacaatactttagtctcagatatgagagcattacccatcatggcaaaaaacggttatccagttatttttgatgctactcactcagttcaacaaccaggaggtcttggtgaaaaaagtgggggtcaaagagagtttgttgaatatttagctagagcagctgttgcagtaggtgttgcaggagtttttattgaaactcatcaagatcctgataatgcaccatcagatggtcctaacatggttccattggataaattggaaagtctattaaaacaattaactgatatagataatttaattaagaattaa

SEQ ID NO: 242898 - DNA, 826 bp, Unknown
  Bacterial polypeptide expressing nucleotide sequence isolated from the Sargasso Sea
aatgagtgaggtaactattaatgaattagaggtaagtaatacaaagccctttactttgattgctggattaaatgtattggaatcagataaagttattgatcaagttattactagttgtattgaggtaactcagaaactaaatataccttatgtttttaaggcttcatacgacaaagccaatcgctcttctattgactcttacagaggacctggtgtcgacaaaggtctcagtattctctcagatttaaaaaaagaatttaaggttccaataatctctgatgttcatacggttgagcaagttatcaaggcctctgaggtacttgatatcatacaaatacctgcttttttaagcagacagactgatttaataagagaggctgctttaacaaaattacctataaatataaaaaaaggccaatttatggcgcctgaagatacaaccaatataatcaaaaagtttgaacattttggaaatagtaaattgatgatttgtgaaagaggaagttccttcggatataacaatctagttgtcgatatgattggcatatctaaattaaaagaaaccaattacccggtaatctttgacgttacgcattctttacaaaaaccaggaggattaggagatagaactgatggaagaggatctaaagtattagacctagctaaatctggtatggctattggcttggccggtcttttcttagaaacacatccagatcctgctaatgctttatgtgatgggccctgtgccctaagtatagatttgcttgaggaattcttggttcagataaaagctattgatgatctggtgaaatctttcaaataa

SEQ ID NO: 242899 - DNA, 502 bp, Unknown
  Bacterial polypeptide expressing nucleotide sequence isolated from the Sargasso Sea
atgattaaaataaaaattaataattttgaaatatcaaacaatttacctttatttattatagctggaccttgtgtaatagaaaatgaatcacattcacttcaaatggtagaaaaaatatcaaaaatttgtgaatctcaaagaataaattttgtatttaaatcaagttttgataaagctaataggtcaagtttgcttagtgaaagaggtattaaaattgaccaagctataaaaatatttaataaaatcagatctgaatttagatgccctatattgactgatgttcataatgaggaacaatgtaaaattttatctgaagttgaatctattaacataattcaaattcctgcttttttatgtcggcagactgatttattaattgctgctggaaaaacaaataaaataataaatgttaaaaaaggtcaatttttatcaccttatgatgttccaaatatttataaaaaaattgagatgtgtggaaaattcaaacataataattactgaa

SEQ ID NO: 242900 - DNA, 438 bp, Unknown
  Bacterial polypeptide expressing nucleotide sequence isolated from the Sargasso Sea
aatgtttaatagtagcgttttaaaaattggtgatatttccgttggaggcgaaagtccgttagtttttattttgggaccatgccagttagaaagccgtgatcatgcactttttatggctgaaaaaatagtaaaagtttgtgaaccctcgtcctctaaatttattttcaaatcaagttttgataaggcaaatagatcttcaataacatccgcaagggggattggaattgaagagggtttaaaaattttagaagaagtaaaagcgactttcagttgtccagttattaccgacgttcatactgttcctcagtgtggtatcgttgctgaagtagttgatgttttacaaatccctgcatttttgtcgcgacaaactgatttgctgattgcagctggagaaactggaaaaccaataaacgttaaaaagggacaatttttagcgcc

SEQ ID NO: 242901 - DNA, 775 bp, Unknown
  Bacterial polypeptide expressing nucleotide sequence isolated from the Sargasso Sea
ctgatagcaggaccttgtgtcatagagagtgaaaaacttattatggaagtcgcggagtgcttgctggaaatcaccagagatcttggtattacgtacgtcttcaagtcctcttttgataaagcaaaccggagttcctctgatagcttcagaggcttgggccttgaagaaggcctgcgtattttggagcaggttcgcaatcaataccagatccctgtcttaacagatgttcacgatgattctccgattgatgaagttgctgatgtagtagacattcttcagactccagcctttctatgtaggcaaactaatttcatacagaaagttgcgaaagctggtaagcctgtaaatgtaaaaaaaggacaatttttggcaccttgggaaatgctcaatgtagtaaaaaaggctagagaaaccggaaacgacgacattatggtatgtgagaggggtacctctttcggttacaactatcttgtttctgatatgaggagcttagtcattatgcgagagactaattgccctattatttttgatgcgacacactcggtgcaaatgccgggagcaaagggttctacttcgggggggcagagagaatttgttcctgcgctagcgcgggcagcagttgctgttggtatctctggcctctttatggaaacccatcccaagccagatctggctttaagtgatggccctaattcagtgcctttgaaagaagtacgtattttattggagacgcttaaaatattggatagtacgataaggaagggtactttgtgac

SEQ ID NO: 242902 - DNA, 202 bp, Unknown
  Bacterial polypeptide expressing nucleotide sequence isolated from the Sargasso Sea
ttctggcggacagcgcgaattcgtgccggtgctggcacgcgcggcggtggctgttggagtgcatgggctgttcatggagagccatgaggacccggatcaggcaccgtcagatggcccgaatatggtgccacttgatgcgatgccgaaaattttacaacagctaatgcgcctcgatgcagcgcggcgcgatttattggcctga

SEQ ID NO: 242903 - DNA, 571 bp, Unknown
  Bacterial polypeptide expressing nucleotide sequence isolated from the Sargasso Sea
atgattaaaattgatttaaaaagattttctatttcaaacaatttgccttttattttaattgctggaccatgtgttatagaaaatgaaataaaaactttaaaaattgcagaagaaataaataacatttgtagagatttaaaaataaattatattttcaaatcaagttttgataaggcaaatcgatcaagtataaaaagtcaaagaggtgtttctcttgatcaaagtttaaagatttttgaaaaagtaaaaaataattttaattgtccaattaccaccgatgttcatactgaaaatcaatgtaacaatttaatgaaagatgatattattgatatacttcagatcccagcttttttgtgtcgtcaaactgatttactaattgctgccgcaaaaacaaataagattatcaatgtaaaaaaaggtcaatttcttgcgccaactgatgtagtgaatatatttgataaaataaaaacaattaataataatattatgattacagaaagaggaacaagttttggatacaataatttaattaatgattttagaggtctggatattatgaagccagtttaat

SEQ ID NO: 242904 - DNA, 705 bp, Unknown
  Bacterial polypeptide expressing nucleotide sequence isolated from the Sargasso Sea
aaagaatagcagataaatttagtattggttttatttacaaaacgtcgtttgataaagccaatcgaacaagtttaaaaggtaaaagaggtgcaggattagaaaagtctttaccggtttttgataaaattaaaaaagatttaaaagttcctgttttaacggatattcataacgaggagcaatgcttggctgtatcaaatcatgtagatattttgcagattccagcatttctatgtagacaaactgacttattaattgctgctgcaaaaacaaaaaaaataatcaatgttaaaaaaggtcaatttttagcaccatgggatatggcaaatgtgacaaaaaaaatttctgaatctggaaataataatattttggttacagagagaggggcaagctttggttacaatactttagtatcagatatgagatcattaccaataatgtctaaacttggatatcctgtaatatttgatgctactcattctgtacaacaacctggtgggatgggtgataaaagtggtggtcaaagagaatttgttgaatatttagctagagcagctgtagcagttggtgttgcaggcgtttttatcgaaacgcatcaagatccagataatgcaccttcggatgggccaaatatgttaccaattaataaattagaacaattattaaatcaattatatgaaatagataagcttgtaaaaattaaatgag

SEQ ID NO: 242905 - DNA, 817 bp, Unknown
  Bacterial polypeptide expressing nucleotide sequence isolated from the Sargasso Sea
tatgactgtcaaagtttctaacttgagtatcgacaatggatcaaggttgaccttaatctctggtccttgcgtcattgaatcaaaagaactaattcatgacgtagctggaaggataaaagagatcaccgattctttggagattggttatattttcaaatcatctttcgataaggcaaatcgaacttcaattgatagctttagaggacctggaatggaagagggtttagctattcttgagagtgtgagagatcaattgggtgtgcctgtcatcacagatgttcatgaagacactcctctagatgaggttgcatcagtggttgatgtacttcaaacaccggcttttttatgcagacaaaccaattttataatcaatgtggcatcgcaacaaaaacctgtgaatataaaaaaaggacagtttctttccccttgggaaatggaaaatgtcgttaagaaagcaaaatttactggcaatgaagatattttggtttgtgaacgcggatatacatttggctacaataatctggtttcagacatgcgttcacttgttgtcttgaaagaaacctcatgccccgtgatttatgacgcaacgcactctcttcagcttcctggaggtaaaggtggttcatcagatgggcaaagcgaatttattattccagtctcaagaggagcagtgggtgttggcattgctggtatattcatcgagactcatccggatccaaagaatgctctaagcgatggaccaaattcactcccactgaataatcttaagccattactcgagcaattattggcaatagatgaaatcgtgaagaaataa

SEQ ID NO: 242906 - DNA, 823 bp, Unknown
  Bacterial polypeptide expressing nucleotide sequence isolated from the Sargasso Sea
aatgagtagtattacagtcaattgtgggaacatagaaatttcaaacgataaaaaaatttgtattattgcgggtccttgtcagcttgaaacagagcaacatgcaatggatatggctggaaaaataaaagaaataacttctaaatatggtcttggttttatttacaaaacctcttttgataaagctaatcgtacaagtttaaaaggtaagagaggtgccgggttagaagcttcgttacctgtatttgataaaattaaaaaagaattaaatgttccaattttaactgatattcataattcagagcaatgctcagttgttgctaatcatgttgatgttttacaaattccagcttttctttgtagacaaactgatcttttaattgctgctgcaaaaacaaacaaaattataaatgttaaaaagggtcaatttttagctccttgggacatggtaaatgttacaaaaaaaatatcagattcaggaaacaccaatattcttgttacagaaagaggtgcaagttttggatacaacactttggtttctgatatgagatctttacctattatggctaagaatggttacccagttatttttgatgcaacgcattcagttcaacaacctggtggacagggcgagtcctctggaggtcaaagagaatttgttgagtatcttgcaagagcagcagttgctgttggtgttgctggtgtttttatagaaacacatcaagacccagataatgctccatctgatggaccaaatatggttcctttaaacaaattagaaaatttactaaaacagttaactgaaattgataaacttattaagtga

SEQ ID NO: 242907 - DNA, 814 bp, Unknown
  Bacterial polypeptide expressing nucleotide sequence isolated from the Sargasso Sea
atgaaaaaagtatctataaaaaatgttgtttttggttcgagtgatttagggcttatttcaggtccttgcgtgattgaaagtctagaccatgctcttaggatggccaatgcaataaaagaaattgcagataaatctgggattaatgttatatataaaagttcatttgacaaggctaatcgttcatcaatctcatcttttcgtggtttaggtatagatgaaggtttatccattctccaaaaggttaaagcagatactggtttgccagtgcttacagatattcatgagccatcgcaggcattgcctgtagctgaagtcgcagatgttatacaaataccagcatttttatgcaggcaaacagacctcctaatagctgcggcaaaaactgaaaaagttgttaatgtaaaaaaagggcaatttttagcaccttgggacatgaagaatgttatcgcaaaactagaagaaagctcttgtgttgatattctacttacagatcgcggaacacaatttggatataataatttggttgcagatatgcgttctatacctctaatgcaggaattaggttatccaattatttttgatgcaacccatagcgcgcaactgccaggtggtggtggcaaaatcacttcaggaatgcgtgatatgattccaaccttggctaaggcagcagtagcagctgggtgtaatggaatctttatggaggttcatgataatatagaaaaagcaatgtccgatgcagcaacgcaatggccacttaatgatctgctatcactccttcttgatttaaagtctataaaagagagtcttcattgaa

SEQ ID NO: 242908 - DNA, 568 bp, Unknown
  Bacterial polypeptide expressing nucleotide sequence isolated from the Sargasso Sea
tatgactgttaaagtttctaacttgagtatcgataatggatcaaggttgaccttgatctctggtccttgcgtgattgaatcaaaggacctgattcatgacgtagcgggaaggataaaagagatcactgactctttggagattggttatattttcaaatcatctttcgataaggcaaatcgaacttcaattgatagttttagaggacccgggatggaagagggtttagctattctcgagagtgtgagagatcaaatgggcgtgcctgttatcactgatgttcatgaagacactcctttgaatgaggtcgcatcagtggttgatgtgcttcaaacaccggcttttttgtgcagacaaaccaattttataatcaatgtggcatcgcaacaaaaacctgtgaatataaaaaaaggccagttcctttccccttgggaaatggaaaatgtcgttaagaaagcaaaatctaccggcaatgaagatattttggtttgtgagcgcgggtatacatttggctacaataatctggtttcagatatgcgttcacttattgtgttaaaagaaacatcatgc

SEQ ID NO: 242909 - DNA, 247 bp, Unknown
  Bacterial polypeptide expressing nucleotide sequence isolated from the Sargasso Sea
atgaaattaaggaattttaatataggcaattcagaaacactgactcttatgggaggcatgaatgtgcttgagtcaagagacctggctatgcatattgcagaaaaatttaaggagtcttctgaaaaatataatattaattacatcttcaagggatcatttgataaagctaatagaagttctataaattcatttagaggacctgggctggatgagggtttaaaaatacttcaagaagtctcaaactcat

SEQ ID NO: 242910 - DNA, 451 bp, Unknown
  Bacterial polypeptide expressing nucleotide sequence isolated from the Sargasso Sea
gctgctgcaaaaactaataaaattgtaaatgttaagaaaggacaatttttagctccatgggatatggttaatgtaactaaaaaaatttctgattcaggaaataaaaatattttagtaactgaaagaggcgcaagttttggttataacactcttgtttctgatatgagatcattaccaataatggcaaagaacggttatccagttatttttgatgctactcactcggttcaacaaccaggtggactcggtgagaaaagtggtggtcaaagagaatttgtagagtatttagctagagctgcagttgcagttggtgttgctggagtctttattgaaacacatcaagatccagataatgctccatcagatggaccaaatatggttcctttagacaacttagaaaatttattaaaacagcttacagatatagataatttaattaaaaataagtgag

SEQ ID NO: 242911 - DNA, 331 bp, Unknown
  Bacterial polypeptide expressing nucleotide sequence isolated from the Sargasso Sea
gagcaagcttcgggttataatactttagtttctgacatgagatcattgcctattatggctaagagcggctacccggttgtttttgacgcaacacattcagtccaacaacctggtggaaagggagacaaaagcgggggacaaagagaatttgttgagtatctttctcgagcagcaatagctgttggtgttgcagctgttttcatagaaactcaccctgatccagataatgcaccatcagatggacctaatatggttcctctatcaaacatgttagatcttttaaaacaattggttgaaatagacaatttaataaagaatgccaaaaattaaa

SEQ ID NO: 242912 - DNA, 508 bp, Unknown
  Bacterial polypeptide expressing nucleotide sequence isolated from the Sargasso Sea
aatggcaaataaatctgttaaatgtggtaaactcaatatttcgaatacaggacccttcactttaattgctggaccttgccaactagaaaatgaaaagcatgctctagatattgctggtgaattaaaaaaaatcactgacaatcttggtataggtcttatttacaaaacttcctttgataaagctaacagaactagtctaaatggaaaaagaggagcgggtcttgaaaaatctttgcctatttttgataaaattaggaaacaaattggagttccagttttaacagatattcacgctatagatcaatgtgctttagtctcaaaacacgtagatgttttgcaaataccagcttttttgtgtagacaaacggacttattagttgccgccgctaaaactggtaaagttataaatgttaagaaaggtcaatttttagccccttgggacatggttaatgttacaaaaaaaattgaagactcagggaataaaaatattttagttacagaaagagga

SEQ ID NO: 242913 - DNA, 814 bp, Unknown
  Bacterial polypeptide expressing nucleotide sequence isolated from the Sargasso Sea
ttgaaagaagtaaaaataggtaacgttatatttagcgataagcatctcggcataattgctgggccttgtgtgattgaggacagagatcactcgttgaggatggctaatgaaataaagaagatatctgatgatattgaaatccctattatctttaaaagttcatttgacaaagccaatagaacatctataaagtcatttagaggccctggcatagatgatgggataaaaatattatccgatgtaaaagtcgagacagggttaccagttataacagatattcacaatgctgatcaggcgaagatagtagctgaagtggttgatgttattcaaataccagcttttttaagcagacagaccgatatcttaattgcggcatcaaatactggtaagccagtaaacatcaaaaaaggtcaatttttagcaccatgggatgtaaagcatattgtgcaaaaaattgaagaaactgggcatagtaatatcttgttaactgatagaggaactcagtttgggtataataatctggtagctgatatgagggcaatcccgcttatgaaaaaatatggatatcctgttgtgtttgacgcaacccatagtgcgcagctacccggagctagcggtgggcactcctcagggatgagagatatgatacctacattggcaaggtcagcggttgctgctggatgctcgggagtttttatggaggttcatgacaaagtagattcagcaaaatcagatgccgcaacccagtggccactaagccaattaaaagatcttctaattgatttaatcaatattcataatgtggttagttgag

SEQ ID NO: 242914 - DNA, 826 bp, Unknown
  Bacterial polypeptide expressing nucleotide sequence isolated from the Sargasso Sea
atgaaaaatataactgtaaaatgtagaaatatagatatatcaaacacaagtaaattttgcttaattgcaggcccatgtcagctagaaacagaacagcatgctatggatatgtcaggaaaaataaaggaaattacatcaaaactaggaatcaattttatttataaaacatccttcgacaaggcgaacagaacaagtttaaaaggaaaaagaggaattggtctagaacaatcactttccatatttgataaaattagaaatgaaacaaaagttcctatacttaccgatatacacaatatagaacaatgtgcagtagttgctgaacatgttgacatattgcaaataccagcttttctttgcaggcaaacagatctacttatagccgcagcaaaaacaaaaaaaattatcaatgtaaaaaaagggcagttccttgctccttgggatatggttaatgttacaaaaaaaatttcagattcagggaataataatattcttgtaacagaaagaggtgctagctttggatataatactttagtatcagacatgagatctttacctattatggccaagaatggttatccagttatttttgatgctactcattcagtgcaacaaccaggaggccaaggggagtcaagcggtggacaaagagaatttgttgagcatttatctagagcagcagtagctgttggcgttgctggaatatttatggaaacccatcaagatccagataatgcgccatcagatggcccaaatatgattccattatctaatctagaaaatttgttaaatcaattaatagaaatagataaaattataaaaaaataat

SEQ ID NO: 242915 - DNA, 832 bp, Unknown
  Bacterial polypeptide expressing nucleotide sequence isolated from the Sargasso Sea
tatgaaattaagaaactttgaaattggaaataataaacctcttactttgatgggcggaatgaatgtacttgaatctagagatttggctatgcaagttgcagaagattttaaaaaagttactgataaattgaatattaattatatttttaaagcttcatttgataaggctaatcgaagttcaattacatcatatagagggccgggattagaagaagggctaaatatattgaaagaggtttctgatgagtttgacgttccagtaattacagatatccatgaacctgatcaagctgaaccggtaagtgagatttgtgaggttatccaaattccagcttttctagcaagacagactgatcttgttaatgctgcagcaaatactaaatcaattattcaatttaaaaagcctcagtttttatcagcacctgaaatgaaaaatgttgttgaaaaatgtgccgctgctggaaactcaaacatattactttgtgagcgtggtaattcgtatggatacaataatttagtagtggatactcttaattttcaaatattaaaaaaattaatgacgcctgtaatctttgacgtaactcattcacttcaacttcctggtggactaggaggctcaactgatggaagaagggaatatgttctaagtctagctaaagctggtatttctcaatcaattgctggactctttcttgaggctcatccaaatccagatgaagcaaaatgtgatggaccatgtgcgctgccattatcaatgcttgaggaattcttgactcaaatcaaagagttagatgattttattaaacaacaagaaaatttagatatttcctga

SEQ ID NO: 242916 - DNA, 364 bp, Unknown
  Bacterial polypeptide expressing nucleotide sequence isolated from the Sargasso Sea
aagattattttatgcgagagaggaaaatatttttggttataacaatcttgtatttgatactcttaatttccagataatgaaagaatattctgtaccggttatgtttgatgttactcactcactccaacttcccggaggtcttggaaaatctactgatggtagaagagaatatcttttgcatatggcaaaatctgggatttctcaaaaaattgctggattatttcttgaagctcatccagatccagataaagccaaatgtgacggaccatgcgcccttagacttgatcagctcgaaccatttcttcttcaagtaaaagaattagataaacttgttaagtctcaaaaagatttagatcttaaataa

SEQ ID NO: 242917 - DNA, 810 bp, Unknown
  Bacterial polypeptide expressing nucleotide sequence isolated from the Sargasso Sea
gaaaattaaacatttctaataatggtcccttcactttaattgctggaccttgtcaattagaaagcgaaaaacatgcaatggatattgcaaccgaattaaaaattatcactgataagcttggaattggacttatttataaaacttcatttgataaagctaacagaacaagtcttaacggtaagaggggagcaggtcttgaaaaatctctaccagtttttgataaaattagaaatcaaattggagtaccagttttaacagatattcatactatagatcaatgtgcaactgtttctaaacacgtagatgttttgcaaataccagctttcttatgtagacaaacagatttgttagttgctgcagctaaaactggaaaaattataaatgttaaaaaaggtcaattcttagctccatgggatatggtgaatgttacaaaaaaaatagaggactctggaaataaaaatattttagttaccgagagaggagcaagctttggttacaacacgttagtctcagacatgcgatctttacctataatggcaaagaatggttacccagttgtttttgatgctacacactcagttcaacaaccaggaggtatgggagataagagtggaggccaaagagaatttgttgaatatctttctagagctgctattgcagttggtgttgccgcagtttttatggaaacacatccagatccggataatgcaccatctgatggccccaatatggttccactatcaagcatgccaaatcttttaaagcaattggttgaaatagataatttaataaagaatggtaaaaattaaa

SEQ ID NO: 242918 - DNA, 605 bp, Unknown
  Bacterial polypeptide expressing nucleotide sequence isolated from the Sargasso Sea
ccaagaggtttcaaatacttttgatgtccctgttattacagatatccatgaaccaaatcaagccaagcctgtaactgaagtttgtgagattattcagatacctgcatttttagcaagacagactgatcttgtaagcgcagcagcaaaaacagattcaataattcaatttaaaaaaccacagtttttatcagctccagaaatgtcaaatacaatagagaaatgttcagcagctggtaatgataaaataatattatgtgagcgaggaaattcatttggttacaacaatttagtcgttgatactttgaattttcaaattcttaaaaaattatctaagccagtaatattcgatgtgactcactcactccaattgccaggtggtctaggaagcgcaacgggcggaagaagagaatatgtattaagccttgccaaagctggaatatctcaatctattgcaggattatttcttgaagctcatcctaatccagatgaagcaaagtgtgatggtccatgcgcactgcctttatctgtcttagaagaatttttaaaacaagtaaaagaattagatgtatttgtgaaaaatcaaaaagatcttgaaataatttaag

SEQ ID NO: 242919 - DNA, 549 bp, Unknown
  Bacterial polypeptide expressing nucleotide sequence isolated from the Sargasso Sea
ttccggtattaacagatgttcatcttcctgatcagtgtaaggcagtagctgaggtttctgatgttttacaaattccggcttttctatgtaggcagactgatttattaattgcggcaggaaaaactggaaaagtaataaatataaaaaaggggcaattccttgcgcctggcaaaatgaaacatgttgcagaaaaagttgaatcaacaggtaataaaaatattttactaactgaaagaggaacctcttttggatatagtttagtttcagatatgacatctataccagttatgcaaaatgtaggctaccctgttatttttgatgcgacacattcagctcaattaccaggcgatcagaatataacaggtgggcagagaaatatgattcctactctagctaaggcagctgttgctgctggttgtaatggcattttcatggaggttcacaatgaccctagcaatgctaaatcagatgcatctactcaatggccactagacagcttagaagatttactaggaaaattattaaaaatttatgaggctgttcattgat

SEQ ID NO: 242920 - DNA, 820 bp, Unknown
  Bacterial polypeptide expressing nucleotide sequence isolated from the Sargasso Sea
atatattaattcacagaaatattctcagctaaagtcacccatgaagtatggtttgtttccaggtggaaaaaaaataagatctaaaattttaatcgacttagggtcattattttcaatagattataaaacattgataatagttgggtcggctgttgaatgtattcatgcttattctcttattcatgacgatctaccctgcatggatgatgatgatataagaagaggaaaaccttcagctcacattaaatttggtgagtctacagcagttctagcaggaaattcattactgactttagcttttgaaattttatcaagtcctaaattgaaattaaatgaaaagataaagatcaaccttatcaaaaaattatcagaatgttcaggacatctaggaatagctggtgggcaatatttagatttaagttatgagagaaagaaaatatcaaggaataaaatattagaaatggaaataaaaaaaactggaatgttatttagtttttgttgtgcagttccagcaataattaagaaaaaaacaatccaagaaattaaattttttgaaaatattggatcaaaaattggtctattattccaaatagctgatgatttgattgatctgaaaagtaattctaaggaagctggaaaaaaaacaggaaaagataaaaaaaaaggcaaggcaacacttataaatttaataggctatgatgactcacttaagtattgtgataagataataaaagatattaataagaatttaagaaaatatggttcaagatctgaaaaaataaatgaaacattaggctatatattgaatagaaaaaaatga

SEQ ID NO: 242921 - DNA, 818 bp, Unknown
  Bacterial polypeptide expressing nucleotide sequence isolated from the Sargasso Sea
agttcaactacgacttcatgaagtcgaagtcgtcggcggccgcggggctgtgcgactgggtggtcaacatctgcatctaccacgacatctacctcgaggtggagcccaagcgcaagctgctcgaggaggccgagcagaagctcagcgacgccaaccgcaagctgcagacggtgcgcgacacggtggcggcgctcgaggcgcgcaaggccgagctgcagggccagctgatggaggccacggacgagaagaaccggctgctcgaggcggcggcggcgacggcgaagcggctcaacctcgccgagcggctcgtcaacgggctcaaggacgagaacgagcggtggggcgcgggggtcgaggcgctcaaggagcagatgggcctgctgcctggcgacgtcatgtgctcggccgccttcatcgcgtacatcggcccgttcaacgagggcttccgcgcggcgatgcgcaccaactggttcgacgacctcgtgtcgcgctccataccgagctccgacagcgtcgatccgatcgcgatgctcgccgacgacgcggcgatcgcggcgtggcagtcggaggggctgcccgccgatcggctgtcggtcgagaacggcgccatcctcaatacgtgctcgcggtggccgctgctgtgcgacccgcagctgcagggcatcgcgtggctcaagcagcgcgaggccgacgcggcggtggtggtgcagctctcgcaaaagggcttcctcgacaaggtgcagcacggcatgaccgaggggctgcccatcctgctcgagaacctcggcgagagcgtcgacgcggtgctcgagcccgtc

SEQ ID NO: 242922 - DNA, 301 bp, Unknown
  Bacterial polypeptide expressing nucleotide sequence isolated from the Sargasso Sea
agcagaattagctgacaaatgcgaggtgcaattttcttacagcatcggtgtcgcggaacccacttccttctatgttaaaacatttgggactggatcaatttctgatgaagaactaactgatttagcaaaagcagtattcccattgaaacctgcaggaataattgaacatttaaaacttaagcatcctagatatctaattacatccgcctacggacatttcggacgtgaagaggattcatttacttgggaacaaaccggcatggttgaaactttaaaattaaaattaaccgaaaggaactaa

SEQ ID NO: 242923 - DNA, 282 bp, Unknown
  Bacterial polypeptide expressing nucleotide sequence isolated from the Sargasso Sea
catgaaggatgggcattgggtcttcacatcggagtctgtgagttcgggtcatccggacaaattgtgtgatgcaatctcagatgcaatcctcgatgcttgcttaactgtagacccaaatgcgaaagttgctgtcgagacacttgtcaagggagaagcgtcacgctcacacatcgttctaggtggcgaggtcacgcttgcaaacggggccaaagtccctgattttgaagcagtagcgcgtgaagccgcagttgcaatcggttacaccgatcatgcgattggtat

SEQ ID NO: 242924 - DNA, 274 bp, Unknown
  Bacterial polypeptide expressing nucleotide sequence isolated from the Sargasso Sea
tctgaatcagtttcagaagggcatacctgacaaaatttgtgatcaaatttctgatgcaatcttacatgaatgtcttaaatctgatccaaattctcgagtagcttgcgagactcttataaaaaataatacagttgttgttgctggagagattacgtcaaatgctaatgttgattatgaagctgtagcgagaaaagtagtgaaagatataggatatatcgaagaaaatcttggatttgccagcgctagctttgaatttcaaaatctcatatactga

SEQ ID NO: 242925 - DNA, 160 bp, Unknown
  Bacterial polypeptide expressing nucleotide sequence isolated from the Sargasso Sea
atgtattattttacttctgaaagcgtatctcctggacaccctgataagttatgcgatcacctctctgacaccattcttgatcatgttttagaacaggacaaaaactctagagtagcttgtgaaacatttgttaaaggtaaagaaaatcaacctggaacag

SEQ ID NO: 242926 - DNA, 244 bp, Unknown
  Bacterial polypeptide expressing nucleotide sequence isolated from the Sargasso Sea
gtttcaaaaccactttcaatttatgttaagttagatgataacgataaaggtaaggttgaaaatattaaaaagttaatagatcaaaattttgatttatcgcctagaggaatcagagaacttttaggactaaacaaacccatttatcaaattacctcagcatacgggcactttggtagagaaccatcaaataatggtgaattttcatgggaaaaaatagataaaaaagatatattttcaaagtaaa

SEQ ID NO: 242927 - DNA, 744 bp, Unknown
  Bacterial polypeptide expressing nucleotide sequence isolated from the Sargasso Sea
ttgaaaaaaatattgctatagaacgtgcactagaaatggtggaacaaggtgctgatataatagatataggaggagagtcaactagaccattttcagattcagtaagtttaaaggaagaaatttcgagagtaattcctgttattgagggtatctgcaaagaatctgatgtatgtatatcaatcgatacaacaaaatccaaagttgcctgtgaagctttagaggcaggtgcttcagttataaatgatataagcgctatggaaattgactctttgatggttgacgttgctttaaaatttaattgtccgattgttttaatgcatatgaaaggaataccaaaaaatatgcaagataatcctcagtatcagtcacttatttctgatatcaaagaataccttcttgctcgaattgattttgttgtttctaaaggaattgatagaaataaaataataattgatccaggaattggttttggaaaaacagttgaaaataattttgaaataattaataatttagaccagtttgttaaaatgaattttcctgttttgcttggtgcatctagaaaatcttttattggagtatctttaaatcttccggaaaacgataggcttgaaggttcaatagctgcaaatattattggactacaaaaaggagctaaaatttttagagttcacgatgtagttgaaacaagtagagctatggtaattgcaaataaaatttttaattcaaacaatataattagctaaa

SEQ ID NO: 242928 - DNA, 646 bp, Unknown
  Bacterial polypeptide expressing nucleotide sequence isolated from the Sargasso Sea
gcacccaaatattgtgaccgtctacgacgccggtgaagaatacgatctagcctatattgcgatggagtttcttgaaggtcacgatctaacgcgctacatcaaggcagatagcctgctaccgttcccaatcgtcatgggaattgtttttaaatcagcgatcgcactcgattcagcacatacgcaaaacgtcgtacaccgtgatataaagcctgccaatatcatgtacgagtcaaacaaaaagcaggtaaaaattactgatttcggcatcgcacggattaccgactcaagtagaacaaaaaccggcatggtgctcggtacgccgtcgtatatgtcccccgaacagttatccggagaaaaggtcgacggacgctccgatctgttttctctaggcgtgatgctttatcagatgaccacggggaccctgccgttcaaaggcgactcgatggcgacattaatgtacaaaattgccaacgaaccgcatcaaaatattttcaagttacgtccagacttggagcagcgaacgccgaatattgcggccattattgacagggcgttgcaaaaagacatcaataaacgttaccaaacaggcgcagaaatggctaaagacatccaggaatgcgttaggcaaatcggcaataagaagtaa

SEQ ID NO: 242929 - DNA, 103 bp, Unknown
  Bacterial polypeptide expressing nucleotide sequence isolated from the Sargasso Sea
aatgaaaaaaaattttttatttactagtgaatcggtatcagaagaacatcctgacaaggtgtgtgacagaatttcagatatggtagttgatacatatttagga

SEQ ID NO: 242930 - DNA, 877 bp, Unknown
  Bacterial polypeptide expressing nucleotide sequence isolated from the Sargasso Sea
gaccattcttcccggacaacatgtccattcacataatgtcacccttcgtgattttgagcgggattacgcatttgggaaggatgtgaaaattccagaagaagttgagcaacaggccacatttgagggatttcttcggcccgatggaaaagccggtacaagaaattatattggcgtcctgacttccgtaaattgctccgcaacggttgcaaagtacatcggtgctgctttcgataaggaaggtgaaacagattttggaaaccttgacggcgtggtcgcattcacccacggaacaggttgcggaatgaatcagggcaacggtctggctttacttcgaagaaccatggcaggatatgctgcccacccaaaccttgccgctgtgcttgtagtgggtttgggatgcgaagtgaaccaaatcccggattggctcaaggaagccgggcttgaggcgggacctcagttacgaacgatggtgattcaggaaagcggaggaacacgcaaaaccgttgaaagaggagtcagtatggtccgtgaaatgatccctgacttcaaatccatccagcgtcaaaccgttcctgcaagtcacttaagcctcgggctggaatgcggaggatcagatgcttattccggaatcaccgccaatccctctctaggagcagcagcagacctgctcgtccgtcatggaggaacagcgattttaagtgaaacacctgaaatctatggagcggaacacctcctcacccgacgtgccgtgagtgaaaaagtaggaagaaaaattgtcgacctgattcagtggtgggaagattataccatgcggaataaagcagaaatgaacaacaatccatcacccgggaataaagcaggaggattaaccaccatc

SEQ ID NO: 242931 - DNA, 694 bp, Unknown
  Bacterial polypeptide expressing nucleotide sequence isolated from the Sargasso Sea
tattaaaatttttgaaattcacctggtaaataaaatcgaagataaagattttgaagttcatattcatacaaacaatcaaataattaaaacaaaaaaaattattgtagcttgcaatggatatctagatgatctcctcggttctataaggaattattttatgccaattaataattatataattgcaactgagcctattggagaaactttagccaaaaaacttataaatagaaactgtggagtaattgattcaagatttatgattgattactatagattttccgaagataatagattgctatttggaggaccagaaacaattacttcaaaatttgtaaaagatgctaaaaattttgtagcaaagagaatgtataaagtatttcctgaaatgcaaaaatataaaatagaattctcatggggtggtaccttagcaatatcaattaatagacttccaattttaggctatctaatgaatcaaaaattgatttactctcatgcatattcgggacacggattagcaatgagtgttatggctggaaagctaatctcagagaaaattttaaatatatccaatcgttttgatatgtttaatcagataaaacatttaaaaattccaggtggaaatattttacgaagaccaatttattcttctgcaataatttattatcgggctattgatttcttaaatagattataa

SEQ ID NO: 242932 - DNA, 535 bp, Unknown
  Bacterial polypeptide expressing nucleotide sequence isolated from the Sargasso Sea
ggaaaaaaccattccttctcttttaaacctagcaaacaggaagtcagtcattcagaggtaaataaaaaagtagagatcagtacagacatcttgaaagcaataagaaaaggaatgtttgacgtactaaatgataaagaagggaccgcctacaagtaccgaactattgatcaaaaaaaactgatagcaggaaaaacaggaacatctcaagtgagaagaataactagagaagaaagagagagaggagtaataaaaaatgaggatctgccttgggaaaagagagatcatgcactttttacttgttatgccccttatgacaacccagactacgctttaagtgtagtcgtcgagcatgggggcagtggatcaaaagtagctgcaccaatcgctagagatataatgttatttcaactgtttaatggaattccaccgatcgaggcataccctgaagagcaacgctcagaaattaatgaacgacttcagaaaatagcgtctaaattaaatatttctagccctaataattcactgagcctataag

SEQ ID NO: 242933 - DNA, 880 bp, Unknown
  Bacterial polypeptide expressing nucleotide sequence isolated from the Sargasso Sea
cggatcaaatcctgaaaaaggttgttgggaaaaaacagatagcatccgcattactcgaccgtatcgaatccttggtatgaaaccagggttttcctgtcttatttcaggcttgttctggtttatccttgtcaatttttgtgtttatgcccagcaaaacccaacggttgcgaatgctccaccagtcagcattaagcaactaaagcaatccatcagcgaaaatgaccgaatcgagtggattactctgagacttgaaaaaaaccttcctcccaatcagccaatccaacgtttacgcatggctgtggagggccgaacaacactgatcctccatcctcttcagcgtcatctcccctttgagacaacccccttaacccaatatctcttctttcatcttgagatgtgttctatggctccggaaatgaatttggaatcccgtttccgttggagagactttattcattcaggagggaccctattcatggatacttgtcccgattccagatctatggaggaacagaaagcgttcaatcaatcctggaaagactggggtcgttccattttccctgggagtggttggagtccactcaaccgaaaacatacactcagtttcagtttctacctgctcgaaaaacggatgctgttacaaaatgagggatcccccttttcactgctggcactcgacggcagagtgattctcctccataaccaatctccccgatggtcatggaataccctgaaatcttctccggtatcggctcaactcaacccgcgcaatatcgaaatccacctccgactctatattaatctcatgatgctattactgagtggggattacaaacaagatcaactccaccttccaacgatattgcttaggaggagatag

SEQ ID NO: 242934 - DNA, 916 bp, Unknown
  Bacterial polypeptide expressing nucleotide sequence isolated from the Sargasso Sea
tactaactcaggacaaatctttgccgaagctgttagctccggggaaactaataataatgctattaagtctgaagacgatacaaacaacatgacccttataaataatattgggggacatatttataataacaactcttctgcaactgctttacaacaagcaacagtttttattgctgccgaagatacagcaactttaaccaatagtggaacaatagaaaataaagcagggccagaaaattatgcaattagaatagctggaagtggagtaaccgtaactttaaaagactcaggaaaagtaattggtaaaattaacgtggctgactctggtcataccataaagttacaacatggtgcaggacaaggttattactatgatatagatggaaatggtacttatactttacaagatctagacggcaatccagttgtcaaaggttccgcaggatctgtaggtcaaggtggcaatgaaatgatagatgaggaattaggatataaatcattaggtgtaagaagttctattgtaagatatcaaaaaagcgatgaatattctcaaagagaaaagggatggggcgaaatcacaacttctttcttaaaaagagatggagataagagtactttagcactagataataaaaaaataggaataggagcaaatatcttcgaaccaatttcagataataaaactctaattttttcctttgaaaccagtttacaaaatatttcaaaaaatcacgatattgataagtttagttttttaacaggagtgaattttgataagataaaaattagtgatgaaatttattcagagttatattttttaggtggagccagcttttataaaagtgacagaaacattttaactaacactacatcatctggattgctggacatatctgatgaatatatgagtttatga

SEQ ID NO: 242935 - DNA, 1117 bp, Unknown
  Bacterial polypeptide expressing nucleotide sequence isolated from the Sargasso Sea
gatggcgggatatctggtgctggcaccttgcatgcaagtcatggcgcagggctccatcggtgcgacagcactggattgcagtttcagcaacccggaagcgtcaccgtggaaaatgatcacgccgttgacgagcatgacgccgcaaaacgcgatcctgtaccagcgcaccgtctctctgatggtgtcgttcaagtacggcacggcgccagtggcgcacgaactcgtgagtgccgcccattgggtgccgggcgcagtcgtcgcggacggcatcgcaccgacgaacgtcaacggcatcggcttcaaatgggttggcgtgtccggcgacgacaccgaacgcgcgctgcagcaacacgcgctgccgatggcgaccgcgaagatcaacctcgatcgcgcgggcggcggcgataccgactcgcggttcatacgctttcgacagtatctggtgctcgacaagccggcttcgcaattgccgcaggaaaagctggtcgtcaagaacctgccgggcaatccgaccgtcgcgatttacgcgctcgacttgcccaaaggcaccgcgacgattggcggcacggtgacggtgcccgagcagcccacgccggccaacctgtgcaagcagctgaagacttttgtcggcgtcggcaacgtgtgcatcggcagcgaatgcgagatccatgtgccgaatcgttgcgagattcagtcgaactggatcgtgccggtgacgctcggcaatttctcgatcagcaattttccgagcgtgaacgcgacgtcgaagccggtcagtttcgacatcgcgctcagtcaatgcgcggcgtcggccaagccggcgatcagcttccgcgacaaggccgcgaagccgaatccggacaagacgttgctgcagctgagcgcgccggccgggcagacggtcgcacgcgggttcaacatcgtgatgacgaacgcgttgaccggcgagcggatcgcgtacggcgagccgggcgcagccgccgagtacccgatgcggcgcacgggcgacatggcggtgatgccgttgcgtgcgcagtacatccgtaccggcggggaaggcgagttggcgcccggctatgcgggcggcggggcggaattctccttcacgtttccgtga

SEQ ID NO: 242936 - DNA, 1213 bp, Unknown
  Bacterial polypeptide expressing nucleotide sequence isolated from the Sargasso Sea
ttgagcacgtcaaccgcctccgccccttcccgccatccgtggcccgtgttcatcgcgttcctgcggctcggcctgacgtcgttcggcggcccggtcgcgcatctcggctacttccgcaccgaattcgtcacgcggcgcggctggctcaccgagcgcacgtacgcggatctcgtcgggctgtgccagttcctgccgggacccgcgagcagccaggtcgggatggcgatcggcctcgcgcgcgccggctacgcgggcatgttcgcggcgtggctcggcttcacgctgccgtcggcgctgctgatgacgctgttcgcgctcggcgtgcacgcaacgggcgcgccgatcgaagccggtgcgctgcacgggctgcgcatcgtgtcggtcgccgtgatcgcgcaagccgtgtggggcatggcgcgcacgctgtgcccggatgcgcgccgcgtcacgctgatggccgcggccgcctgcgttgtgctgctcgcaccggccgcgtggacccaggttgcagtgatcgtcgccgccgggctggccggcctcgtgctgctgccgcagccgacgcgtggcgcgcatgatccgctgccgctgcacgtgtcgcctcgcgcgggcgtgctgtggctcgcgctgttcgcggcgctcctcgtcgtcctgccgtttgcgacccgcacgctgcgctccgatacgcttgccgtcgtcgatgcgttcttccggacgggcgcgctcgtgttcggcggcggacacgtggtgctgccgctgctgcaggcggccgtggttgcgcccggctgggtcggcgatgcggcgttcctggccggatacggcgtcgcgcaggccgtgccggggccgctgttcacgttctcggcgttcctcggcgcgtcgttgcgcaccgcgccgaacggctggctcggcagcacgatcgcgctggtgtcgatcttcgcgccgtcgttcctgctggtggccggcaccgcgccgttctgggaacagctgcgccgcagcacgcgcatgcaggccgcgctcgcgggcgtgaacgcggccgtcgtcgggctgctggtcgccgcgctctatcacccggtctggaccgatacgatcgtggcgccgcgcgatctggccgccgcgctcgtcgcgttcgttgcactggtgttctggcgcgtgccgccgtgggccgtcgtgatcgcgagcgccgcgctcggctgggggctcggcgtcctggcctgac

SEQ ID NO: 242937 - DNA, 1717 bp, Unknown
  Bacterial polypeptide expressing nucleotide sequence isolated from the Sargasso Sea
catgacgcatgtcgacgagccgcccgaagctccggccgaccatgaattccctttcgacctcgccgccgacgtgatcgcgcgctggcagcgcctcgtcgacctgatggcggaaatcgtcggcgtgccggccgggctgatcatgcgcaacgtcggccgcgacatccaggtgctggtggcgagccgcaacaccggcaatccgttctatccgggcgaatcggccgaactgcacggctcgggactttactgcgaagcggtcattgcgagcggccatacgctggtcgtgccggatgcgcggcaatccgcgcagtggcgcaacaatccggacctgcgcgtcaacatggtctcgtatctcggcctgccgatccgctggcccgacaacacgccgttcggcacgatctgcctgctcgactgcaaggagaatgcgtattcggagcgctacatccggctcgtcgaggaattccgcgaccagatcgagatgcagttgcaactgatccgcgcgcagcggatcgccgaacgcgaacgccagcgcgccgcgcagctggccgagaacttccgccggcaaaaggatctcgcgacgcaggccgtgcacgtcaagtcgagctttctcgcggcagcgagccacgacctgcgccagcccgtccacgcgctgagcctgttcgtcggcgcattgcgtcacgtcccgatgccggcggacggcacgctgctcgtcgatcgcatcgaccagtccgtcaacgcgatggatgcgctgttcaccgcgatcctcgacatctcgcggctcgatgcgggcgtcgtgcccgtccatcgccggccgttcgcgatcggcacggtgctggagcgcgtgtgccgcgaagtcgccgccgacgcgcacggaaaaggcctgtcgctgtcgtacgtgcgcagcacggcagtggtcgattccgatccggtgctggtcgagcgcatcgcacgcaacctgctgtcgaatgcggtgcgctataccgacacggggcgtatcgtcgtcggctgcaggcgcacgcgccagcacgttcgcctgcaattcatcgacaccgggcgcggcattccggccgaccagcaggcacgcgtattcgacgattactaccagttgcgccgtcgcggcgacgagcccgaacggggtgtcggcctcgggctggcgatcgtgcggcgcctcgcggggctgctcgactgtccgctgacgctgcgctccgaacccgggcggggctcgtgcttcgaactgcagctggtgcggctggacacggtcgtgcagccgggtgcggccgccgacgagatcgccgtcgacgaggcaacggccgccgcccacctcgtggtcgtgatcgacgacgaaagcgcgatccgcgccggcatgtcgatgctgctcgagcgctggggctaccaggtcgtcacggccgcgtcgatcgacgacgcgatcgcgtgcctggcatcgtgcgaggtacggccaagcctgctgatctgcgacctgcacctgcacggcgaccagaacggaatcgctgcgatcgcacgcattcgcgacgagtacaacacggcgattcccgcgatgctgatcaccggcgatacgaccgcgcgccggcccggccggctgaagcacggcgggttcgtgctgctgcacaagccggtgccgagcgacaagctgcgcgcggcgatggcacgcctgctgcaagcgcagccccccgggcagccgcaccgggccgacgcgggatag

SEQ ID NO: 242938 - DNA, 874 bp, Unknown
  Bacterial polypeptide expressing nucleotide sequence isolated from the Sargasso Sea
aatgaaaaaacagcttaataaaatagctaaagatacaaatatatttcttaaaaaatatattaattcacagaaatattctcagttaatgtcacccatgaagtatggtttatttccaggcggaaaaaaaataagatctaaaatcttaattgacttagggtcattattttcaattgattataaaacgttgataatagttgggtcagctgttgaatgtattcacgcttattcacttattcatgacgatctaccctgcatggatgatgatgacataagaagggggaagccttcaactcatattaaatttggtgagtctacagcagttctagcgggaaattcattactaactttagcttttgaaattttatcaagtcctaaattgaaattaaatgaaaagataaaaattaacttaatcaaaaaattatcagaatgttcaggtcatttaggaatagctggtggtcaatatttagatttgagctatgagaaaaagaaaatatcaaggaataaaattttagaaatggaaataaagaaaacaggaatgttatttagtttttgttgtgcggctccagcaataattaagaaaaaaactaccaaagaaattaaattttttgaaaatattggatcaaaaattggtcttttattccaaatagctgatgatttaattgatttgaaaagcaaatctaaggaagctgggaaaaaaacaggaaaagatcaaaaaaaaggtaaggcaacacttataaatttaataggctatgatgactcagttaagtattgtgataagataataaaagatattaataagaatttaagaaaatacggttcaaaatctgaaaaaataaatgaaacactggactatatattgaatagaaaaaaatga

SEQ ID NO: 242939 - DNA, 668 bp, Unknown
  Bacterial polypeptide expressing nucleotide sequence isolated from the Sargasso Sea
tgagtgtattcacgcttattcactcattcatgatgatctaccctgcatggatgacgataatatgagaagaggcaaaccttcaactcacattaaatttggtgaatctacagcagtcttagcaggaaattcattattaactttagcgtttgaaattttatcaaatcccaaattggaattaaatgaaaagataaaaatcaacttaattaaaaaattatcagaatgctcaggtcatctaggaatagctggtggacaatatttagatttaagttatgaaagaaaaaaaatatcaaagaataaaataatagaaatggaaataaagaaaactggaatgttatttagtttctgttgtgcggctccagcaataattaaaaaaaaaacaattcgagaaattaagtttttcgaaaatattggatcaaagattggtctattgttccaaatagctgatgatttaattgatctgaaaagtaattctaaggaagctggaaaaaaaacgggaaaagaccaaaaaaagggtaaggcaacgcttataaatttaattggctatgatgactcagttaagtattgtgataagataataaaagatgttaataagaatttaagcaagtatggctcaagatcaaaaaaaattaacgaaaccttgaactatatattgaatagaaaaaaatgaa

SEQ ID NO: 242940 - DNA, 763 bp, Unknown
  Bacterial polypeptide expressing nucleotide sequence isolated from the Sargasso Sea
aatgattaaaaaatataaggttggccttgtaatccaagcaagagtttcatcaaaaagatttccaggaaaagtaatgaaaaatattttaggaaagccaatgatatatagaatttatgaaagagtaaaattatgtaaaaaaattgatacaattgtagtatctatcccaaaaaataaatctgatgatatgctttttcaatttcttaaacgctcaaaaataaatgtttttagaggatcagagttaaatttgatatctagattttataatacagctaaaaaatataattttgattacattgtaaggctaccagcagacaatcctttgccagactataagcaaattgataaactgataaagtttcatatgaaattaaagaaaaatatgaatgttttttcaactaaccttcagcctgtaaaaaattctaattatattgatggtattggggctgagatatttagttttaaaatgttagaaaaattagtacaaaataaaaatattcgaaaaagtcgtgaacacatatcgcagaatttttataattttgaaaaaaaaaaagtaatgaacaaaaagtattttcgagtattttatcctatagctccaaaatcaatatcttatcccaatattgttcttgatgtaaattataaaaaacaatttaatttaattaaaaaaatttataaaaatatttatccaaaaaataagttttttttgaccaatcatattattaaatttttaaaaaaacatgaaaaaaatttatttaaaaacaagtaa

SEQ ID NO: 242941 - DNA, 625 bp, Unknown
  Bacterial polypeptide expressing nucleotide sequence isolated from the Sargasso Sea
ttgagttttttttatcaaaaagctaatacaggaaacttttataattgggatgcaatagcctacaccatggcagttcaacttgatgaaggcaaatctactgatgaagctcatggatacacatataaaactttaaaagacgaagttgatcctggtctttttcaaacactttgttgtactggaaaatatagacaagatcagtttgatagcccaggaaatcttaagtctatgatgccaatgtatgcactaaagccgggctatattgctctaattaaagtagtgaagttatttactggattgaatgaatatcaatccatgaaatatatttctattttttctacattaattatgacgttattattttttataactttcttttttcaaaaaaacttcctgcaattcatatggattccattggttttcttttctcaatttttatttctagcaaaacttatgactcctgatgcaatcactgcattactgtttttaatttcagttatgtttttagtgaagaataaactttatacctcttatcttttgatggcattaacactttcatttagacctgacatgattgttgcagctggccttgcaggattattaccactaataaataaagattttcgaa

SEQ ID NO: 242942 - DNA, 2701 bp, Unknown
  Bacterial polypeptide expressing nucleotide sequence isolated from the Sargasso Sea
gctggctcaaaccgaagatgataccgtctggatgcaaacgggcagtggccttcatcagtggacaaaacaagacggactcagtgagccttatcaggcgtttggtcaacacagtgtcaacaatgaaatacgtactttgtttgcccaagggaacaaggtgtgggtaggagggcgtagctcactatttcagtttgatcctgcttcatctcagtttaagagcattcctttttttgataacgccgtcagtcctattattaatgtgctggaaacagatcagcaaggtaacttactggtgggcacctttgatggtatttataaagtctcattaacctcaggtgtctttgaatcttttgccgatggtagacagttacttcaaggcatcaatgtgcgctctttactggtcgatcgcagtgggttgttgtgggtcggcagccgggaaaaggggttattttatggcagacatcagccctcggcctttagtgacttaacccagtgggggcctgcagcggctactttagcaaaacagcaactgacggctgtaaaggtggaagataactttttatggctgggtagctccgatcagtttcatcaaatcaacagaaaaacaggtgctgtattatctctggcaatgcctgcccgagtgaatgctatcaccagatccactcagggagagctttacataggttcagataacggtttatggcaatttgatgaggatacacaacagctgctgcagctggattcagggcaaagtctccaaggtactcaatggcaaaacgtacgggatctggtgagcttgccagatggcagcttgtatcttggcttatggcaaaacggtctgatgcgctgggacccggcaggcaatcaccaattttggttgcaggatatggcacagcacaaagtaggtgatgcagtgcaggtggtgcaggaaatccagggcaaaatctgggttggtacccgttattccggtctttttgtgcttgacccttccagtgctcaattgcagtcgttagcaaacttaattcctgtggcacaagctcttgatattcaatgcatagcgcaagggcctgacgacacagtgctgctgtgcagtcgcagtgggctggtcagtcttgatctaaagaaccctggtatctcaggtttgggggatagtatttccgctgctaaagcagaattgttgggggcttataccgatgtgcagaaaaacatctggttgctttctgctcaggggttgagtttaaaaccttatcagcaagaacgtctgatcacctttactgagcaggatggtttgaataataaggaaatgatttttaaagcattttcggtatccaaacgcggtaacttgtacttgggtactgcaggtggtttgtctattgttcatgctgaattgttgtggctgaatcagcataaaagtacaactcaagtatcagggatatggattgatcagaaaaaactcaagccaggcattatgcaaggctacagctctgaaattgaattaaaacccggcgaaagcattagtctggaattggcaagccttgattatcatgacccgaaacgtaatcagtttatttaccaattggctggtgtagatactggctggcaatacagtactggctacacaaaagtgaattacagccagttagaacccggaacttatcagttcaaagccttgggttcaaatcaacatgcgttgttttccgataagccgtatctgcttactatagaagtattgcccttgtggtggcaacgaggctgggtgatagcagggcttgggttgttgctcctgctgctgttactcggaggccacgcttaccgactacgccatatgcgacaaattaataagctgttgcagcactcagtgcaggaaagagcttacaaccagactgtcctggaaaccatggtggaagagcggactaaagctttgcaggacagctctgccactttgtctctacggaccaggcagttagaagtgagtttgtcgcagttggctgaaaataacagagaactcaaacggctgaataccttaaaagatgagtttatttcaaccgtcagtcacgagctacgcacgcctttaacttctattcgtggtgctgtgggtttgcttgcgaaaaaagcggtaaccgagggctctgaacactacgagcaattgttacaaaccgcgctcggtaatagcgaacgtttgtctcaactgattaatgatttattggatctacagaagtttgagtccggtaattttagcttgtcctttgcgacaactgacatgaagcaactggtgttacaggcattggatagtattgccccttatgcagcaaggtatcaggtgagttttcagactgagttggcagagtgtcaggtggtggctgatcaaaccagaatacggcaagtggtggataacttgctatcgaacgccattaagttttccgcttcgggacagacagtggcggtgaagttaactgagctggtcgggcgtattcgttttgaggtacaggatcaggggtgtggtattcctcaaaatttccgcagccgtgttttcgaaaaattctctcaggcagacggctctaccagtcgcaaagccgagggcacagggcttggtttaaatatctgtaagaccattatcagtgcgcaccatggcgatattggttttgaaagtgaacccgaccatggcgcattattttggtttgaattgcccgttgcacaagcttaa

SEQ ID NO: 242943 - DNA, 113 bp, Unknown
  Bacterial polypeptide expressing nucleotide sequence isolated from the Sargasso Sea
tcttgatttaaagaggccaatatataaaaatactgcctcctatggtcattttggtagggaaaataaagatttttcatgggaaaatactgatatctcaagccaaattaaataac

SEQ ID NO: 242944 - DNA, 790 bp, Unknown
  Bacterial polypeptide expressing nucleotide sequence isolated from the Sargasso Sea
actgattgttgatgatgagcttgaaatcagaaaaatcatacaagaaatcttaaatgatgagggatattcaacctcttcagcctcttccgcagaggaggctagaattgaggcaaataataaaaaaccagacttagtctttcttgatatttggatgccagatgaggatggcattagcctattgaaagaatggtcaagccagccagaaacagactttccggtgattatgatttctggccacgcaactattgaaacagccattgaggcaactaagcttggcgcaaaagactttatagaaaaaccagtatcaattgagaagctgctcgcctcagcagaagaggtgctgagtcaaaacaaaattggagaagatattttttctcatttggtgcaaaacacaccatcatttaaaaaaaccttggatgaagctggctcctttattaaagaaaacaatatttttgtgctccaaggagaagaagggctagagaaatcagcatgggctagagcattatttttaagccaatatagtgatatgggcgagttcctgaaaattgaatttagcgtaaaagagcctgctgaaaatgaagagctcgatgctctttataaagcgttagagagtggaaataattcagcgttatacatagagaacatgcataagctttctgaggatgaaaaatcaatgattagacaaagactaatgatttctgcaaagaagagcacggcgaagatttttattggtgtttctgagaaagaagagagcttttttatggatgaagagagcttcacagaagtaaac

SEQ ID NO: 242945 - DNA, 1246 bp, Unknown
  Bacterial polypeptide expressing nucleotide sequence isolated from the Sargasso Sea
atgagttcgagtaacggcgatacgatcaaaatttatgccggtgtgtatgaggagccaattggtacctcaaaaaacatccattttattggggaagattcatccaatacgataatcagctgggaaaatggaggtgtttttgttatgggtgatggtcaagcctcctacaacactttaatcaaaaatcttactatacgcgatggagagagtgatacatacggaggtatgggtattcacgattttggtaccgttgtactagacagggtgagattggttaataattcaaccgtacctaatgagtcgggtagtaataatgaatttggtataaacacaggcggcggaatcaatatttacaataccactgttacgattaaaaactcctatatcggatcgaattcatctcgaaatggaggcggcgttaaagcaactaatgcaacgctcaccatccataatagtatcattgaaaacaatgtgatcacaggagaaggaggaggggtaatagtaggaaatacaacgactaatattactagatcaaagataatgaataatacatcaggtggtaatggcgcaggtgtttatttgagtggaggtaccttaaatatcactaattctgtaatagcaaataatacagctaatggtggtcacggtggcggtattcgattgcaacgtggaaatacaaccattataaattctacaattgcagataatattgcaaaaaattctaatagtgatgcggttcaattgtaccaaggagccgttttaaatgttattaatagtatattttggggtaacggatcgcagaactttggattttctgatcagtacgagtcaagcacattgaaccttgatttctctttagtgcaaggagcgcttaccaatggatcgcttaatatagacgtcaataataatggcactgtcatttcacaaaaccaagcaacaataattgatgttgaccctaaatttaaaaatgcgagcctaggcgactattctatttccaattcttctccagctgttggtatgggtacgcaatcattatcgataagcggcacgacctataatgcacccacagctgatattaatggaatgcagcgtccatctccatcaggatcaaatccagatttaggggcctatgaatccttgatttcagctccaggtccaatggcaacggccatatacgatggcacatctaatgatactaatgaactagattatacaaattcaccctcaacgctatccgcttattgggacc

SEQ ID NO: 242946 - DNA, 1204 bp, Unknown
  Bacterial polypeptide expressing nucleotide sequence isolated from the Sargasso Sea
tttgtattatttggaggaggtttaacaggtttatcttcagcattacatttatcaaacaaaggatattcagttacaattttagaagctaataaaattggttcaggtgcctctggtagaaatggaggtcaacttggaataggaatgcgtaaagatcaattttatttagaaaaaaaatttggttttgaaaaagctaaaattttctggtcagttggactagatgctgttcaggatgttctaaaattaattaaaaaatatgaaattgattgtgctattaaaccaggagttcttcatgttggcaatactaataaagattataaatattttttagatgaaattaatcatttacaaaaaaattataattatgaacaaattgaatattttgatgagaaagcaataaaagatgagattttaagtgatcgttattattcaggaattctgttgaaagatagttttcatttaaatcctctaaaattaacttatggtttaatgaatgcctgtttaaaaaatggtgttaaaatttatgaaaatagtccagttaatcaaataattgaaaaatcaaataatatagaagttaaatctaatttaaaccttataaatactaaaaaattaattgtttcatgtaacggttatttggataatttacttggttctgtcagaaattattttatgccaataaataactatattatagcaacagagcctttaggtgaaaattttgcaagaaaattaattaaaagaaatgttgcagtaagtgactcaaggtttatgatagattattttagattttcagaagattcaaggttgttgtttggtggacccgaaactgtaacatcaaattttgttaaggatgccaaaaaatttgtttctaaaaggatgataaaagtttttccagatttaaaagatgtaaaaattgattttgcatggggaggaacgcttgctatatcagttaatagaatgcctcaatttggaacattgatgaaagaaaaattatattatgctcatggttattctgggcacggattagctatgagtattatgggtggtaagttggtcgctgataaaattttagggaagaatgatttatttgatttattttcaaatatttttcatttaaaaatacctggaggagatattctgagaaggccaatttattcatcatctataatatattacagacttttagattatattagtagattataat

SEQ ID NO: 242947 - DNA, 2098 bp, Unknown
  Bacterial polypeptide expressing nucleotide sequence isolated from the Sargasso Sea
gcagcgtgcgccgtcgtatttcctgcgtcacggctatagcgacctcgaacaccggacggatagttatatccgcctgctggcgaacggaggtgtcattacgccggcactgcgtgatgccgcgctgtccgcgcaggtggtgttgcgtcacgcaccagacccggcgcagaacacggactcattcgtgtcgcgcaaggccgtgacgtcgatgcgttcgcatctgctggcggcgctcggcatacggagtttctacgaactcgaccggctcgacttgcaggcgacgggtacgctcaacaacgccgtgcagcaagcggtgagtgatcgtctcgctgccgccgcgacgcgcgacggtgcgaaagccgccgggatcgtcggctttgaaatgctgcgcgcctccgacgatccgtcgaagatcgcctacagtttcacgctattcgaacggcgcggcggtgcgaacctcgtgcgggtgcaaaccgacagcgtcaaccagccattcgatatcaactcgggtgcgcggctgaatctcggctcaaccgcgaaaatgcgtaccgtggtgacgtatttgcagatcgtctccgacctgcatgcgcgttatgccccgctgagcatagcggagctcaaggcggtgaaacccgatccgaacgatcagcttacgcgctgggcgctcgactatctgatgcataccccggaccgctcgctgcaagccatgctcgatgcggccgtggagcgcaagtactcggcgagtccgggcgaaacgttctatacgggtggcggggcgcagaccttcaacaacttcgactccgacgacaacagccgcattctcaccgtgcaccgggccttccagcattcggtgaatctggtgttcgtgcggttgatgcgcgatattgtccactatgagatggtgcagactacggggccgtcgtcgcaatggctgggcgatccggcgatccgcaagatgtatctcacgcgttgcgcggatcaggaaagccgcgtgtacatgagtcgcttctacaccaagtaccacggcaaaacgccggatcagcaactggcgctgctgctgctcggcgtgcgcaaatcgccgcccaaagtggcgacggtcttgcgcagtgtggcgccggacgaatctaacgcgtggttcaacgcgaagatgcgggccgcgttgaagaacacaccggccgcatccatactggacgatgaggatctggggaacctgtacgaaaagtatgcgatcgaccgcttcaatctgaacgatcgaggctacatttcgagtgtgcatccactggaactgtggaccctcaactatctgcgcgcccatcccgatgcaacgctcgatcagatggaaaacgcgagtcgggacgtgcgcctgtcgacctattcgtggctcttcaagacccgctatcacgccacccaggaccgccgcatcaagcgcatggtcgaactgcgcgcatacgatgcaatcggcaaatcgtggcaggcgctcggctatccgttcgcgacgctcacgccgtcctatgcagcggcgattggcgcatccggcgaccgtccggctgcgcttgcgcaactgattggcgtgattgcgaacgacggcagcaaggtgccgaccgaaacccttacgcaactcgatttcgcgaaaaacacgccatacgaaacgcattttcagcgcgcggcggtcgcgccgcagcagcagttgtcgccggagattgccggggtggtcagagggctgttgcgtgacgtcgtactgggcggcacggcgaagcgtctcgcccaggggatgacgttccccgacggccagacactggagatctacggcaagaccggcaccggcgatcagcgtttcaatgtgtgggccaaaggcgcgcgcctgatcgagtcgcgcaaggtgaaccgcagcgcgaccttcgtgttcgtgatgggagaccgcttctacggcacattgacggcttgggtgcacgaaccgtacgcggcccggtacgacttcacgagtgcgctgtcggtgcaattgctcaagtcgcttgcgccggtgttgcaaccgttgctcgacaatgacaatccgcctgccagaaccgcgtcgatcacgacggtggccgtgcaagcgcaatga

SEQ ID NO: 242948 - DNA, 817 bp, Unknown
  Bacterial polypeptide expressing nucleotide sequence isolated from the Sargasso Sea
taaacatcaaatatatttaatttcagactctacaggcgaaacaatagatagaatatttttagcaatcaaagctcagtttcaagagtttgactatgaagatcaccaatattcattcacaagaactgaaaaccaaattcaaaaaattttagaattagcaaaaaaacataaaaaatctataatcctatatactattgttgatagtgaacttgctaactttttagaaaacgagactcataaactcaatattccttgttttggagttcttggtaaactaattgaaaacttttctcaaataatagagaaaacagcaacacatattcctagcgcccagtatacacttaacgacgagtattataaaaaaattgaagcgatacaatttactatggatcatgatgatggaaattcattagaagatattgaaaaatctgatattattttattaggtgtaagccgaactagcaaaacacccacagctatttatctcgccaatagaggctttaaaacttctaacataccaatgatcaatgaaaattctgtccctgaatttcttaaaaaaaaccctgaaaaaaaatgtgtaattggtcttacactagaaccaactagattgacagaggtaagaaaaaatagaatgagctctctaaaagagaaccacagcattgattatacaaaccaggaaaaggtagaattggaaattcaaaatgcaagaaaaacatttaaaaaatatcaatggccaattgttgatgtaacaagaaaatctgttgaagaaactgcagcatcaataattaaaatatatgaaatcaaaagggagaatggatag

SEQ ID NO: 242949 - DNA, 160 bp, Unknown
  Bacterial polypeptide expressing nucleotide sequence isolated from the Sargasso Sea
tagggccgatcttgcaaattggataaaagaaaatgtggatctctcccctaaaggaataatagataaatttagcttattcgagctagatttaactgaaacaacactttatggacatttcggcagggataatctcccatatgaaagattagatttattttag

SEQ ID NO: 242950 - DNA, 289 bp, Unknown
  Bacterial polypeptide expressing nucleotide sequence isolated from the Sargasso Sea
atgagcgagagactttttacatcagaatcagtttctgagggacatcccgacaaagtatgtgatcagatttcagactctattttggatgcagcgatagaacaagataagagctcaagagttgcctgtgaagtattagtaaaagataatttagtcgtagttgcaggagaaataacgaccaatgcagaaattgattatgagtctttagctaaaagtgtaatatcggatattggttacaatgatagttcgatgcaattcaactccaaaaattgctctgttgtgaacgcaattg

SEQ ID NO: 242951 - DNA, 387 bp, Unknown
  Bacterial polypeptide expressing nucleotide sequence isolated from the Sargasso Sea
catgaacaacgaatatctatttacatcagaaagtgtatcaccagggcatcctgataaattaagcgatcaattatccgacgcggtactcgattatgtctttgatactgacaaaaatgctcgtgtagcatgtgaagtcttaactaaaggtaaaaaagattcaccaggctcaatagtagtagctggtgaaataacttgtaccaacccattagattttgatcagaaacttagagaagtaatctgtgacattggttataaatctaatgaattgggttttaatggtaatgaatgcgaaatagttagactaataaatcaacaatcaccagatattaaaatgggcgttgatcgcaaagataaagaaagtcaaggtgctggagaccaaggtctcat

SEQ ID NO: 242952 - DNA, 278 bp, Unknown
  Bacterial polypeptide expressing nucleotide sequence isolated from the Sargasso Sea
taagtgtttaatacaactcgcttatgctattggagtttctaaaccattatccatctatgttgatttatttgataacgatgaggaaaaaaacaaacatgtagaaaaattgataagtaaaaattttgatttaagtccaagaggtataagagaaatgttaggtttaaataaaccaatttatgaaaaatcagctgcttatggtcattttggaagagaaccggaagaagatggctctttttcttgggaaaaaacagataaaaaatcaatattttcaaagtaaa

SEQ ID NO: 242953 - DNA, 220 bp, Unknown
  Bacterial polypeptide expressing nucleotide sequence isolated from the Sargasso Sea
aatgagtgatcttaaaaactatttatttactagcgagtcagtttcagaggggcatcctgacaaagtatcagatagaatttcggatatggttgttgatagttatctttcaggcgatcccttttctagagttgcatgtgaaactttgacaaccacaaacaaagtagtccttgctggtgaggttagagggcctgaaattagtaaagatgaaataatagaaaaa

SEQ ID NO: 242954 - DNA, 227 bp, Unknown
  Bacterial polypeptide expressing nucleotide sequence isolated from the Sargasso Sea
aatttatgtcgatttatttgataatgatgaagagaaaaatttgcatgtagaaaaacttatcaaagagaattttgatttaagtccaagaggaattagagagatgcttagtttaaataagcctatatatgaaaaaacttcagcttacggacattttgggagaactccggagaatgatggttcattttcttgggaaaaaactgacaaatctggggtttttagcaagtaaa

SEQ ID NO: 242955 - DNA, 124 bp, Unknown
  Bacterial polypeptide expressing nucleotide sequence isolated from the Sargasso Sea
aatgaaaaaagattacttatttacaagcgagtcagtatctgaaggtcacccagacaaagtttgcgatagaatttcagacatggttgtagatacatatttagcagccgaacctcaatcaagagtt

SEQ ID NO: 242956 - DNA, 203 bp, Unknown
  Bacterial polypeptide expressing nucleotide sequence isolated from the Sargasso Sea
aatgagcaatttaaaaaattatgttttcacaagcgagtctgtttctgagggccacccagataaagtttcagatagaatttctgatatggtagttgatagttatttgtctaatgatcctttttcaagagtagcttgtgaaactttaacgacaacaaataaagttgttcttgctggagaagttagaggacctgaaataaaaaaag

SEQ ID NO: 242957 - DNA, 121 bp, Unknown
  Bacterial polypeptide expressing nucleotide sequence isolated from the Sargasso Sea
aatgaaaagagattatatttttacaagtgaatcagtttcagaaggtcatccagataaagtttgtgatagaatatctgacatggttgttgatagctatctatcaacaagagatccacaaact

SEQ ID NO: 242958 - DNA, 121 bp, Unknown
  Bacterial polypeptide expressing nucleotide sequence isolated from the Sargasso Sea
aggtttaaataaagctatatatgaaaaaacagccgcctatggtcattttggaagagaaccagattcagatggttctttttcatgggaaaaaactgataaaaagggagtttttagcaagtaa

SEQ ID NO: 242959 - DNA, 139 bp, Unknown
  Bacterial polypeptide expressing nucleotide sequence isolated from the Sargasso Sea
atgaaaaaaaattttttatttacaagcgaatcagtttcagaaggtcatccagataaagtatgtgacagaatttcagatatggttgtagattcttatttaggttcagaacctcagtctagagtagcctgcgagacttaac

SEQ ID NO: 242960 - DNA, 178 bp, Unknown
  Bacterial polypeptide expressing nucleotide sequence isolated from the Sargasso Sea
gaaactgaaatagttaaaaaaataaatgacaactttgatttatctcctggtggtcttattcaggatttaaaattaagaaatccaatttataaacaaacttctgcttatggtcattttggaagaaatgacttagatcttccttgggagaaacttaataaagtaacaaaactaaaataat

SEQ ID NO: 242961 - DNA, 125 bp, Unknown
  Bacterial polypeptide expressing nucleotide sequence isolated from the Sargasso Sea
aatgaaaaataattcttatttatttaccagtgagtcagtatctgaaggccatccagataaagtatgcgataagatttcagacatgattgtagatagttacttaagtttagatccatattcgagag

SEQ ID NO: 242962 - DNA, 125 bp, Unknown
  Bacterial polypeptide expressing nucleotide sequence isolated from the Sargasso Sea
aatgagtaatcttaaaaattatctatttaccagcgagtctgtttcagaagggcatcctgataaagtctctgatagaatctcagatatggtagttgatagttatatttcgagtgatcctttttcta

SEQ ID NO: 242963 - DNA, 314 bp, Unknown
  Bacterial polypeptide expressing nucleotide sequence isolated from the Sargasso Sea
attgacatcggaatcagttacagaaggacacccagataaattatgtgaccaaatatcagacgctgttatcgatgcggttatgactgatgacccaatgggaagagttgcttgtgaaaccgcaatgaccaatgggttggttatggtcataggtgaaataaccactaaagcgaacttgaatatccctgaaattgttagggaaacactcagaaaagcaggatacaccaactctgattatggaattgacgcagatagttgcggtgtcagcgttagtgtcgggaaacaatcaactgacattgatgcaggtgttagcaatg

SEQ ID NO: 242964 - DNA, 140 bp, Unknown
  Bacterial polypeptide expressing nucleotide sequence isolated from the Sargasso Sea
aatgagtaatcttaaaaattatcttttcactagtgagtcggtttctgagggtcatccagacaaagtgtctgatagaatttcagacatggttgttgatagttatatttcaggtgatccattttcaagagtagcatgtgaaa

SEQ ID NO: 242965 - DNA, 203 bp, Unknown
  Bacterial polypeptide expressing nucleotide sequence isolated from the Sargasso Sea
tatgaaaaaaaattatttatttacaagtgagtcagtttcagagggacatccagataaagtttgtgacagaatatctgatatggtagttgatacctaccttggggcagagccacagtctagagttgcttgcgaaaccttaaccacaacaaataaagttgtacttgcaggcgaggtaagaggtcctgaaattaagaaagatgatc

SEQ ID NO: 242966 - DNA, 235 bp, Unknown
  Bacterial polypeptide expressing nucleotide sequence isolated from the Sargasso Sea
tctttctctatatgttaacactgataacactggaaaaatttctgatgaagagctctcaaaaattcttagacgtgaggttgacttaaccccttctggaattaggtcttgtttgggtttgaataattccatttataaaccgtctgctgcatatggtcattttggaagagtgccagatgaagaaattaaaggttctttttcatgggaaaaaactgaccttgtatctagaatctcttaa

SEQ ID NO: 242967 - DNA, 234 bp, Unknown
  Bacterial polypeptide expressing nucleotide sequence isolated from the Sargasso Sea
ctttatcaatttatattgatctatttgataatgacctagaaaaaaataagtttgttgtagaaaagataaatgataattttgacttaagcccaagaggtataagagaaatgttaaatttgaataaaccaatttatgaaaaaacatcagcctatggtcattttggtagaatgcccgaagataatgggtctttttcatgggaaaaaactgataaaatagcaattttttctaaatagt

SEQ ID NO: 242968 - DNA, 128 bp, Unknown
  Bacterial polypeptide expressing nucleotide sequence isolated from the Sargasso Sea
tatgaaaagatcctacgtttttacaagcgaatcagtttctgaaggccatcctgacaaagtctgtgatagaatttcagatatggtagttgatagctatttatcaaaagatccaaattcaagagttgctt

SEQ ID NO: 242969 - DNA, 197 bp, Unknown
  Bacterial polypeptide expressing nucleotide sequence isolated from the Sargasso Sea
aatgagtaatttaaaaaattatctttttactagtgaatctgtatcggaaggtcaccctgataaagtttcagacagaatttcagatatggttgtagatagttatttatctaatgatcctttttctagagtagcatgtgaaactttaacaacaactaataaagttgtgttagcaggtgaagttagaggtccagaaatta

SEQ ID NO: 242970 - DNA, 313 bp, Unknown
  Bacterial polypeptide expressing nucleotide sequence isolated from the Sargasso Sea
atgttgcaaaatgtagttgcatctaagattgcagataaatgtttaatacaacttgcatatgctattggtgtttccaaaccactatctatttatgttgatttatttgatggtgatgaaaaaaaatcaaaacatgtggaagaattgataaagaaaaacttcgatttaagccctagaggtattagagaaatgttatctctaaacaaacccatatatgaatgcacatcagcatatggccattttggtagaaatcctggatctgatggatctttttcttgggaaaaaaccaataaaactgatgtttttaaaaagtaga

SEQ ID NO: 242971 - DNA, 106 bp, Unknown
  Bacterial polypeptide expressing nucleotide sequence isolated from the Sargasso Sea
atgaataatttaaaaaattacctttttaccagtgagtcagtttcagagggacatcctgataaagtatgtgacagaatttctgatatggtagtagactcttatttag

SEQ ID NO: 242972 - DNA, 172 bp, Unknown
  Bacterial polypeptide expressing nucleotide sequence isolated from the Sargasso Sea
aatgaaaaaagattatttgtttacaagtgagtcagtttcagaaggccatccagacaaagtatgtgatagaatttcagatatggtagttgatacttatttaggcctagaacctcaatcaagagtagcctgtgaaactttaacaaactacaacaaaggttgtattggcaggtga

SEQ ID NO: 242973 - DNA, 190 bp, Unknown
  Bacterial polypeptide expressing nucleotide sequence isolated from the Sargasso Sea
aatgagtaacttaaaaaattatctatttactagtgagtcggtttcagaaggacatccagataaagtaagtgatagaatttcagatatggttgtagataattatatatctggagatccgttttctagagttgcatgtgaaactcttacaacaacaaataaagttgtgttagctggtgaagtaagaggacct

SEQ ID NO: 242974 - DNA, 125 bp, Unknown
  Bacterial polypeptide expressing nucleotide sequence isolated from the Sargasso Sea
gttaaaattaaataatccaatttatgaaattacctctgcctacggtcactttggaagaaaacctaccaataagggcgaatttacatgggaaaaaactgataaaacagatttatttaaactgtaat

SEQ ID NO: 242975 - DNA, 118 bp, Unknown
  Bacterial polypeptide expressing nucleotide sequence isolated from the Sargasso Sea
atgagtaatttaaaaaattatcttttcacaagtgagtctgtctccgagggtcacccagataaagtgtctgataggatttcagatatggttgttgatagttttatttctggagatccat

SEQ ID NO: 242976 - DNA, 190 bp, Unknown
  Bacterial polypeptide expressing nucleotide sequence isolated from the Sargasso Sea
attattcctgatgtgatggacctccgtcctcgcgggataagggaaacactggggctgaatgcaccaatttatgcatcgacagccgcctatggtcacttcgggcgcaaggcgggtgaggccgggtcggggagcttcccctgggaagcgcttgatctggtcgatacgctcaaatcggctgccggaaagtaat

SEQ ID NO: 242977 - DNA, 207 bp, Unknown
  Bacterial polypeptide expressing nucleotide sequence isolated from the Sargasso Sea
aatgagtaatataaaaaactatctttttacgagcgagtctgtttctgaaggacatccagataaggtttcagatagaatttccgatatggttgtagatagttatctaaccaacgatccattttctcgagtagcttgtgagacactaacaacaactaacaaagttgttcttgcaagtgaggttagaggacctgaaattaaaaaagagga

SEQ ID NO: 242978 - DNA, 97 bp, Unknown
  Bacterial polypeptide expressing nucleotide sequence isolated from the Sargasso Sea
atgacgtacctatttacctccgagtctgtctcagaaggtcaccctgacaaactgtgcgataagatctctgattcaatactggatgcttgtctcaaag

SEQ ID NO: 242979 - DNA, 312 bp, Unknown
  Bacterial polypeptide expressing nucleotide sequence isolated from the Sargasso Sea
atatgtaaggatcctttttctagagttgcttgtgaaactcttactacaacaaacaaagtagttttagcaggagaaacaagaggacctgaaattaaaaaaaatcaccctatagaaaaggttcgagattgtattaaggatattggttatgaacagaaaggttttcattggaaaaactgtgatattgatgtccatttgcactatcagtcttcagatattgcaatgggagtagactcaaaaggtaacaaggatgagggagcaggtgaccaaggtataatgtttgggtatgcttgtgatgagactgaagttttaatg

SEQ ID NO: 242980 - DNA, 288 bp, Unknown
  Bacterial polypeptide expressing nucleotide sequence isolated from the Sargasso Sea
agatttctgaaaagtgtttaattcaacttgcttacgcaattggggtatcaaaacctctatcaatttacgtagatttgtttgataacgatgatgaaaaaaataaacatgtggaaaagttaatacgagaaaattttgatttaagtccccgaggcataagagaaatgctaggattaaataaaccaatctatgaaaaaacatctgcttatggacactttggaaggattccagatgataaaggatcattttcatgggaaaagacagataaatcaaacgtatttatcaagtaaa

SEQ ID NO: 242981 - DNA, 118 bp, Unknown
  Bacterial polypeptide expressing nucleotide sequence isolated from the Sargasso Sea
attggtggacctgatggagacactgggttaacaggaagaaaaattatcgttgatacttatggtggagctgcccacatggaggaggagcattctctggaaaagatccaacaaaagtaga

SEQ ID NO: 242982 - DNA, 295 bp, Unknown
  Bacterial polypeptide expressing nucleotide sequence isolated from the Sargasso Sea
tgcagcaggtgtttccgaaaaatgtttaattcacttagcctatgcgattggggtatcaaaaccactatcaatctttataaagttggctagtggagatgatggaaaagttgaaaaggttaaaaaattaattgaagataactttaatttatcgcctaggggcatcagagagatgttaaacttaaataatcccatatatgaggttacgtcatcttatggccactttggaagaaagcctaacattaaaggccaatttacgtgggaaaaaacagataaaacagatatatttaaattgtaa

SEQ ID NO: 242983 - DNA, 104 bp, Unknown
  Bacterial polypeptide expressing nucleotide sequence isolated from the Sargasso Sea
ttatgaaaaaacagcggcctacggccactttggaagaaccccagagagcgatggatcattttcatgggaaaaaaccgacaaatcagacgtttttagtaagtaaa

SEQ ID NO: 242984 - DNA, 88 bp, Unknown
  Bacterial polypeptide expressing nucleotide sequence isolated from the Sargasso Sea
atggcagaaatgctgttcacttctgaaagcgttacagaaggacatccagacaaaattgcagatcagatctcggattctgtactcgacg

SEQ ID NO: 242985 - DNA, 367 bp, Unknown
  Bacterial polypeptide expressing nucleotide sequence isolated from the Sargasso Sea
atgacaaaaaattatctatttacatccgaatctgttaccgaaggtcatccagacaaagtttgtgatatgatatcagattcaattttagatgaatatctaaaaggtgatcctgattcacgtgttgctgtagaaacaatcactacaactgattttgtaggtgtggcaggagaagttacatcaaaatctagttttgacattgaaaatgtgattagaaaaacaattaccgaaattggttatgacaatccagatctaaaatttgattcacattcttgtgaagttatgattaagttagatccacaaagtccacacatttcacagggagttacagctaacgatgaaaaagaacaaggtgctgagatcagggatt

SEQ ID NO: 242986 - DNA, 325 bp, Unknown
  Bacterial polypeptide expressing nucleotide sequence isolated from the Sargasso Sea
aatgtcatccgagcgtttgctgtttacctctgagtccgtcacagctggacaccccgacaaactctgtgatgccatctccgatgccatcctcgatgcctgtttgtcacaggaccccaatgcacgtgtcgcttgtgaaacattggtgaagggaactgagaacaatagtaagattgtgctcgctggagaaattacctgtgcgcaacccgaaattgactatgccaccgtggctcgaaatgcagcgaagtcgattggttatactgacaaagccttcggtatggatgcggccacttgtgaggtcgaggtgatgattacaacccaatctcct

SEQ ID NO: 242987 - DNA, 205 bp, Unknown
  Bacterial polypeptide expressing nucleotide sequence isolated from the Sargasso Sea
aaagttgatgaaactaaaatagaaaatttaattcctgaactttttgatttaagtcctagaggtattagagaacatttaaatttaactaacccaatatacgtgccaacttctgcttacggacatttcggaagaaaaccaactacagaaggacattttacttgggagaaaactgatttagttgatagttttaaaagtgctttctagt

SEQ ID NO: 242988 - DNA, 157 bp, Unknown
  Bacterial polypeptide expressing nucleotide sequence isolated from the Sargasso Sea
tttgacttaagtccaagaggaattagggaaatgctttctctaaatagaccaatttatcaaagtacatccgcatatggtcattttggtaggaaaccaagctcggatggttctttttcttgggaaaaaactgataaaaccacgattttcaaaaagtaat

SEQ ID NO: 242989 - DNA, 199 bp, Unknown
  Bacterial polypeptide expressing nucleotide sequence isolated from the Sargasso Sea
atgagtaatttaaaaaactttctttttacaagtgagtctgtatctgaaggacacccagataaggtttcagatagaatttctgatatggtagttgatagttatctttcaggagatccattttcaagagtagcttgtgaaacacttacaacaacaaataaagttgttttagctggcgaagtaagaggtccagaaattaaag

SEQ ID NO: 242990 - DNA, 261 bp, Unknown
  Bacterial polypeptide expressing nucleotide sequence isolated from the Sargasso Sea
caaaagtcaaattacaatagaatataaagatggaaatccatcatcagtcaaatcagtcgttatatcaactcaacactcacctgaagtaaatcaagctcaagtaagagatttagttaaaccttacattgaaagatcaattccaaaagaattattaagttcattagatgaaaacgaaatttacgtgaacccaacaggaaattttgttattggaggtcctgatggtgacagtggtttgacaggcagaaaaattatagttgatac

SEQ ID NO: 242991 - DNA, 160 bp, Unknown
  Bacterial polypeptide expressing nucleotide sequence isolated from the Sargasso Sea
aattttgatttaagccctagaggcataagagagatgttaggcctaaataaacctatttatgaaaaaacagcagcatatggacactttggaagaattccagatgagcaaggttcattttcatgggaaaagacagataaatcagacctatttaataggtaaa

SEQ ID NO: 242992 - DNA, 82 bp, Unknown
  Bacterial polypeptide expressing nucleotide sequence isolated from the Sargasso Sea
tatgaacaaatttatatttactagtgaaagtgtttctgaaggacatcctgacaagatatgcgaccaaatttctgattccgta

SEQ ID NO: 242993 - DNA, 91 bp, Unknown
  Bacterial polypeptide expressing nucleotide sequence isolated from the Sargasso Sea
aatgaaatcaaataattatttatttacgagtgagtcagtttcagagggtcacccagacaaagtctgcgataggatttcggatatggttgtg

SEQ ID NO: 242994 - DNA, 196 bp, Unknown
  Bacterial polypeptide expressing nucleotide sequence isolated from the Sargasso Sea
gaaacaggtaacttacctgaagatgagatttcacagattgttagagacaactttgatctaagaccaaagaacctaatcaatcttcttgatttaaagaggccaatatataaaaatactgcctcctatgggcattttggtagagaaaataaagatttttcatgggaaaatactgatatctcaagccaaattaaataac

SEQ ID NO: 242995 - DNA, 176 bp, Unknown
  Bacterial polypeptide expressing nucleotide sequence isolated from the Sargasso Sea
aatgaaatctaaaaattatttatttactagcgagtcagtatctgaaggccatccagataaggtttgtgacagaatttctgacatggttgttgatacttatatttcaaaagaccctttctcaagagtagcatgtgaaactttaacaactactaataaggttgttttggctggagaaa

SEQ ID NO: 242996 - DNA, 247 bp, Unknown
  Bacterial polypeptide expressing nucleotide sequence isolated from the Sargasso Sea
tgagcctttatcagtttatgtaaatacccatgacactggtaaattatccgaattagagataataaatttaattaaaaccaattttgatttaactcctagaggtataagagaaatgttaaatttatcaaatataaattatttacctacagctgcttatggtcattttggacgagagtcggaaaataatgtgtcttttacttgggaaaaaactaataaagcagtacatttaacaggaccaagtaattaa

SEQ ID NO: 242997 - DNA, 226 bp, Unknown
  Bacterial polypeptide expressing nucleotide sequence isolated from the Sargasso Sea
tatgttacacagattatacttggaaaaatttcagacgaagagctctcaaaaattcttagaagagaggttgatttaactccatctggaataagatcctgtttgggtttaaataattccatttataaaccgtctgctgcatatggtcattttggaagagtgccagacgaagaggttaaaggctctttttcatgggaaaaaactgatcttgtatcaaaaatctcctagt

SEQ ID NO: 242998 - DNA, 174 bp, Unknown
  Bacterial polypeptide expressing nucleotide sequence isolated from the Sargasso Sea
aaaagattaaagaaaattttgatttgagccctagaggtatcagagaaatgttgaatttaaataaaccaatatatgaaaaaacagccgcctatggtcattttggtagaacacctcaagaaaatggttcattttcatgggaaaaaactgataaaattaatgttttttctaaatagt

SEQ ID NO: 242999 - DNA, 216 bp, Unknown
  Bacterial polypeptide expressing nucleotide sequence isolated from the Sargasso Sea
catttggtacagagaaaatttctgaagagaaaattgtgcacttagtgaatgaaaattttgatcttactccatatggaatcatgaatatgcttgatctacttcagccgatctatgaaaagtcagctgcatatggtcactttgggagggaagatgaattatttccatgggaaaaaactgacagatctgatgctttaaaagaacaatctggcttgtaat

SEQ ID NO: 243000 - DNA, 347 bp, Unknown
  Bacterial polypeptide expressing nucleotide sequence isolated from the Sargasso Sea
ttcagctgcatatgttgcaagatatttggctaaaaatattgtacactctggtatctctgaaaaatgcttaattcaactttcttacgctattggtatttcagaaccactatcaattttcgttgatttatatgggaacaataaagttgaaactagtaaagtagaaaagtttataaaagataggttcgatttatcccctagaggaataataaatatgcttgggttgagtaaccctattttttcagaaacatcatcctatgggcattttggaagagagcctactgacaatggctgttttacatgggaaaatttaaatatatctaatgaatttaaaaatgaatttctttaat

SEQ ID NO: 243001 - DNA, 142 bp, Unknown
  Bacterial polypeptide expressing nucleotide sequence isolated from the Sargasso Sea
aatgaaagattttttgtttactagtgagtcagtgtctgagggacatccagataaagtcagtgatagaatttcacatatggttgttgatacatatttaagtgcagaacctgttcaatcaaaagtagggcgtgaaactttaacg

SEQ ID NO: 243002 - DNA, 363 bp, Unknown
  Bacterial polypeptide expressing nucleotide sequence isolated from the Sargasso Sea
cttcagtacctgttggtggtggagcgttttcaggcaaagatcctagcaaagtagatagatctgcagcttatgctgctaggcatttagctaaaaatattgtagcccatgaacttgcagaggaatgccttgtgagagtttcttatgcaattggaaaagctgaaccttacgaattgactattgaaactttcgatacacttaaagttgatgaaaagaaacttaatgattttgtaagagcttttgatatgaaacccggtgcaattattgaaagactaaatttaacaagcgttaactataaaactgatacacttttttctcattttggacattcaaatagaaactgggaaaaaatagaaaatatttagt

SEQ ID NO: 243003 - DNA, 136 bp, Unknown
  Bacterial polypeptide expressing nucleotide sequence isolated from the Sargasso Sea
gattagagaaatgttaaaattaaacaatcctatttatgaagtaacttctgcctacggccattttggaagaaaaccgtcaaataaaggccaatttacttgggaaaaaacagataaatcagatttatttaaattgtaa

SEQ ID NO: 243004 - DNA, 115 bp, Unknown
  Bacterial polypeptide expressing nucleotide sequence isolated from the Sargasso Sea
aatgaagaaaaattttttatttactagtgagtcagtgtcagaggggcacccagataaagtttgtgacagaatttctgatatggttgtggatagttttttaacttccgaacccgaa

SEQ ID NO: 243005 - DNA, 283 bp, Unknown
  Bacterial polypeptide expressing nucleotide sequence isolated from the Sargasso Sea
ttcaaataaatgtttaattcaattagcatacgcaataggagtttctaagccactttcaatatttattaaattagatgaaaaagatgattctaaaatagaaaaaattaaaaaaattatcgaggaaaattttgatttatctccaagaggaatcagagaaatgcttaagttaaacaacccgatatatgaagttacatcatcctacggacacttcggtagaaaaccaacaaataaaggcgaattttcttgggaaaaaactgataaaatagatttatttaaactgtaa

SEQ ID NO: 243006 - DNA, 304 bp, Unknown
  Bacterial polypeptide expressing nucleotide sequence isolated from the Sargasso Sea
aatgtcagaaaaattacaatatgattttacttctgagtctgtatctgaaggtcacccagataaggtttgtgacaaaatttcagatgcgattttagatgaactcataaggatagatcaccaagctagagttgggtgcgaagtttttgcaaccactaatcaagtggtggttgggggagaagttgggcttaaaaatacaatgaaaattgaagatctatctgagcttgttacagaaactgtacgatcaacagtcaaacatattggctatgaacaaaaaagggtttcactggaaagacttaaaaatttt

SEQ ID NO: 243007 - DNA, 139 bp, Unknown
  Bacterial polypeptide expressing nucleotide sequence isolated from the Sargasso Sea
acatttgaagctaaacaaccctatttatgttcctacttctgcatatgggcattttggaagaattccagatgaaagcgttgttggttctttttcttgggaaaaaactgatcttgttgatgatattttgaaagatatatag

SEQ ID NO: 243008 - DNA, 283 bp, Unknown
  Bacterial polypeptide expressing nucleotide sequence isolated from the Sargasso Sea
atgtcaagaaatgattatttttttaccagcgagtcagtatctgaaggtcatccagataaaatttgtgatcaaatatcagatgcagttgtggatgcgtatttaaaggaagatcctgagtctagagtaggagtagaaaccttaacaactacaaataaaattgttttagcaggtgaagttagaggtcccaaaaaagttttaagtgaaattgaggatatagctcgcaatactgtaaaaaagattggttacgaacaagttggttttcatggaaaaatgcagatgtgaa

SEQ ID NO: 243009 - DNA, 112 bp, Unknown
  Bacterial polypeptide expressing nucleotide sequence isolated from the Sargasso Sea
atgagtaaattaaaaaattatctttttacgagtgaatctgtttcagaaggccatccagataaagtttcagatagaatttctgacatggtagttgatacatatttatcaaatg

SEQ ID NO: 243010 - DNA, 849 bp, Unknown
  Bacterial polypeptide expressing nucleotide sequence isolated from the Sargasso Sea
tattcggagcaagattatgaagaaacgttatatcaattaaaaagcaaaggtttttcagattcacaaatagctagaaatactcgtacaagcatagataaaatcagaaaaacaagaatcaaagaaaatattttaccctcatataaattggttgatacatgttcagctgagtttgaagcaaaaacaccttattgttattctacatttgaccatgaaaatgaaattgaacctatccaaggtaaaaaagtaatcattcttggaggtgggccaaacaggatagggcaaggtatagagtttgattactgttgcgttcaggcagtttttggactgaaagaattaggctataaaactattatgattaattgtaaccctgagactgttagcactgattttgatttggttgatcgtctttattttgagccggtcacctatgaggacgtaatgaatataattgattttgaaaaacccgaaggggttcttgttcagtttggtggacaaactccattaaaaatttctaatgagctttctaattctggtgcaccaatcattgggacttctccagtgaatattgatgtagcagaagacagagaaaagtttgggaaaattttaaaaaatctaaacattgcatgtcctacttttggaaccggtaagagtttagatgaagtcgttgctgtcgctgataatataggatatcctgtgcttgctaggccaagttatgttcttggaggcagagctatggaaattgtttattctcaagatcagctaattgattatgtatctaggtcagctgatgttactaaggggcatccaatcttaattgatcagtttttagagaatgcttttgagtttgat

SEQ ID NO: 243011 - DNA, 326 bp, Unknown
  Bacterial polypeptide expressing nucleotide sequence isolated from the Sargasso Sea
taaagtagacagatcagcagcctatgctcttcgccaagttgcaaaatcactggtacatgctggtttttgtagttattgtgaagtacagtcttcatatgccattggagtagtggagccaacatcaatattcatcaatacttttgaatccgagcaaaagcctattgaggagatacagaaaatagttagtgaatcttttgacttaactccagctggcataattgaaaatttaaatcttttagaaccgatctatcagaaaacagcaagctatggtcactttgggcgagaagatcaaggttttagttgggaagatgtcaaagatctatgaa

SEQ ID NO: 243012 - DNA, 121 bp, Unknown
  Bacterial polypeptide expressing nucleotide sequence isolated from the Sargasso Sea
atgacaaaaaattatctatttacatctgaatcggttaccgaaggtcatccagacaaagtttgtgatatgatatcagattcaattttagatgaatatctaaaaggtgatcccctgattccac

SEQ ID NO: 243013 - DNA, 229 bp, Unknown
  Bacterial polypeptide expressing nucleotide sequence isolated from the Sargasso Sea
atggcagagccagcccagaagaaagccaagatggagcgcacctttttgttttcctctgagtctgtgaacgagggccacccagacaagctctgcgaccaggtctccgatgctgtgctggacacttgcctcactgaggatcctaagagcaaggtcgcatgtgagactgccaccaaggacaacatggtgatggttgcaggccatcggcattcagccaatggccggtgctaag

SEQ ID NO: 243014 - DNA, 190 bp, Unknown
  Bacterial polypeptide expressing nucleotide sequence isolated from the Sargasso Sea
atgaataatttgaaaaattatctttttacaagcgagtcagtttctgaggggcatcctgataaagtttctgatagaatttcagatatggttgttgatagttttattactgcagatccttattctagagtagcatgtgaaactttaactacgacaaataaagtcgtcttagctggcgaagtaaggggaccag

SEQ ID NO: 243015 - DNA, 181 bp, Unknown
  Bacterial polypeptide expressing nucleotide sequence isolated from the Sargasso Sea
atgtagaaaacttattaatgaaaattttgacttaagcccaagaggaataagagaaatgcttagtttgaacaagccgatatatcaaaaaactgcagcctacggtcactttggaagaactccagagagtgacggatcattttcgtgggaaaaaacagataaatctgacgtttttactaagtaa

SEQ ID NO: 243016 - DNA, 210 bp, Unknown
  Bacterial polypeptide expressing nucleotide sequence isolated from the Sargasso Sea
attctgaactaacacaacttgttcaagatcaattcgatctaagaccaagcgcaattattcaagcattcgatcttcaaaacctaccaagtattaggggtggacgtttttatagagacactgctgcctatggtcattttggtagaacagatattcttctcccatgggaggacgtatctcaaaaagcaaaagaactaagtttgctcatataaa

SEQ ID NO: 243017 - DNA, 172 bp, Unknown
  Bacterial polypeptide expressing nucleotide sequence isolated from the Sargasso Sea
aatgaaaaaagattatttatttacaagtgaatctgtatctgagggtcatccagataaagtatgtgatagaatttcagatatggtggttgatacgtatttagctttagagccgcaatcaagagtggcgtgcgagacattaacaacaactaacaaagtagttttggccgggaaa

SEQ ID NO: 243018 - DNA, 155 bp, Unknown
  Bacterial polypeptide expressing nucleotide sequence isolated from the Sargasso Sea
aatgactgaaaaaaattacttatttacaagcgagtctgtatctgagggtcatcccgataaagtttgtgataagatttcagacatggttgttgatagctatttatctaaagatccattttctagagtagcatgtgaaaccttaaccactacgaaca

SEQ ID NO: 243019 - DNA, 97 bp, Unknown
  Bacterial polypeptide expressing nucleotide sequence isolated from the Sargasso Sea
ctatggacattttggcagaagagatcttgatcttccttgggaaaatgtagaagaaaaagcagccaaattagtagaggcttcaaaagtatttttataa

SEQ ID NO: 243020 - DNA, 175 bp, Unknown
  Bacterial polypeptide expressing nucleotide sequence isolated from the Sargasso Sea
aaaattaataagagaaaattttgatttaagtcctaggggaattagagaaatgttgagtttaaataaacccatttatcaaaaaaccgcagcatatggtcattttggaagagagccagaatcagatggatcattttcatgggaaaaaactgataaatcaaacatttttaacaattaa

SEQ ID NO: 243021 - DNA, 157 bp, Unknown
  Bacterial polypeptide expressing nucleotide sequence isolated from the Sargasso Sea
aatgagtaacctaaaaaattttttttttactagtgagtctgtatcagaaggacatccagataaagtttcagatagaatttcagatatggtggttgatagttatctttctggagatcctttttcaagggttgcatgtgaaacattaacaacaaccaac

SEQ ID NO: 243022 - DNA, 140 bp, Unknown
  Bacterial polypeptide expressing nucleotide sequence isolated from the Sargasso Sea
tatgaaaaaaaataattatctatttacaagtgagtcagtttctgaaggacatccagataaagtttgtgatcggatatctgacatggtagttgatagttatttatcaaaagatccattttcacgagtgggctgtgaaactt

SEQ ID NO: 243023 - DNA, 136 bp, Unknown
  Bacterial polypeptide expressing nucleotide sequence isolated from the Sargasso Sea
aatgaaaaataacaaatatttattcactagcgagtcagtctccgaaggtcatccagataaagtttgtgataggatttcggatatggttgttgatttgtatttatctcaagatcctgtttctagagttgcctgcgaa

SEQ ID NO: 243024 - DNA, 194 bp, Unknown
  Bacterial polypeptide expressing nucleotide sequence isolated from the Sargasso Sea
aaaaaataaatttgttgaagaaaaaataaaagataattttgatttgagtcctaggggaattagagaaatgcttaatcttaataaacctatatatgaaaaaactgctgcatacggtcattttgggagagcacctgaaagtgatggagcattttcatgggaaaagactgataaaactagtgtttttttaaaatagt

SEQ ID NO: 243025 - DNA, 165 bp, Unknown
  Bacterial polypeptide expressing nucleotide sequence isolated from the Sargasso Sea
aaaataattttgatttaagcccaagaggtataagagaaatgttaaatctaaataggcctatttacgagtccacggctgcctacggacattttgggagaaaaccaagagaagatggttctttttcgtgggaaaaaaccgataaaatatctatttttaaaaagtaat

SEQ ID NO: 243026 - DNA, 81 bp, Unknown
  Bacterial polypeptide expressing nucleotide sequence isolated from the Sargasso Sea
aatgaagaaaaattttttatttactagtgagtcagtgtcagaaggacacccagataaagtatgtgatagaatttcagatat

SEQ ID NO: 243027 - DNA, 124 bp, Unknown
  Bacterial polypeptide expressing nucleotide sequence isolated from the Sargasso Sea
aatgagtaatttaaaaaattatcttttcacaagtgagtctgtttctgagggacatccagacaaagtatctgataggatttcagatatggttgttgatagttttatttcaggagatccatattcc

SEQ ID NO: 243028 - DNA, 118 bp, Unknown
  Bacterial polypeptide expressing nucleotide sequence isolated from the Sargasso Sea
attaaataaaccaatatatgaaaaatcggctgcctatggacattttggtagagacccaggcagtgatggatcgttttcttgggaaaaaactgataaagcatcagtttttcagaagtaa

SEQ ID NO: 243029 - DNA, 199 bp, Unknown
  Bacterial polypeptide expressing nucleotide sequence isolated from the Sargasso Sea
atgacgtatctgttcacatccgaatcagtatcagaagggcatccagacaaactatgtgatagaatctcagactcgatactagatgcctgcttaaccatggacagcggagcaagagtagctgtggaaacgatggtgaaggggatggacgaggagagtcacataatcgtcggaggcgaggtaacgatttctggagaggatg

SEQ ID NO: 243030 - DNA, 283 bp, Unknown
  Bacterial polypeptide expressing nucleotide sequence isolated from the Sargasso Sea
ttgcagacaatgtttaattcaattagcttatgcgattggtgtatcaaaaccattgtctatttatgtggatttatttgataacgatctagataaaaataaatttgttgtagaaaagatcaaagaaaattttgatttgagccctagaggtattagagaaatgttaaatttaaataaaccaatatatgaaaaaacatctgcttacggccattttgggagagtacctgaagaaaatggttcattttcatgggaaaaaactgataaaattaatgttttttctaaatag

SEQ ID NO: 243031 - DNA, 244 bp, Unknown
  Bacterial polypeptide expressing nucleotide sequence isolated from the Sargasso Sea
atgaaaaaaaactttttatttactagtgagtcagtttccgaaggtcatccagataaagtttgtgatagaatatctgatatggttgtagatagttatttaggagcagagcctcagtcaagagttgcttgcgaaacattaacaacaacaaataaagttgttttagctggagaggttagaggaccagaaataaaaaaagatgatttaatccaaaaagttagagagtgtattaaagacatagggtaga

SEQ ID NO: 243032 - DNA, 303 bp, Unknown
  Bacterial polypeptide expressing nucleotide sequence isolated from the Sargasso Sea
cgactaaatgtgaaattcaacttgcttatgctatcggtgttaaagagcctgtttcagttcgagtagatacgtttggaacaaatagatatgctgaagagatcatagaaaaagcagtgataaatacttttgatatgactccttatggcatcacaaaaagtcttaacttactcaaacctgtatacgaaacaacagctgcatttggtcattttggtcgagagctttctgagtttagttgggaaaaaactgacaaagcaaatgaactaaaaaaattatgcgcaactcaaacacagcatgatggctaat

SEQ ID NO: 243033 - DNA, 679 bp, Unknown
  Bacterial polypeptide expressing nucleotide sequence isolated from the Sargasso Sea
gtcctttgcgctgcgcgcgtcctgcgctccaacgaatttcgcagcgcctttgatgcggctggggcggattttaagatcatggggcaccggctgggcgcgcacttcggccttaccgtggcgctcgcactcgtcgaccgagacgtgggaagtattgaagactatttcacactcaagggccgattggcagcgtacctggctgggtgtctgccgacggcgtgccatatcgggatcaacaccctggatgacccagctacgcttgacgagagcggaatttacctgaccgtgaccgggttaagtgcggagcacggcgacgatggcgaggtcggccgcggcaatcgcgtcaacggcttgatcacgccgtaccgcccgatgtcattggaagcggcagcgggaaagaatccggccgcgcatgtcggcaagctctacaacgtgctggcacatcgattggcggcgagcattcatgccgacatcgaaggcgtggatgaagtgacggtcaggctgctctcggcaatcggccacccggtcgaccagcctcagttggtggcgatcgaccttgcagcggcgggtgggttctccgctgcgcggcagcggcaagttcgcgagctgaccgcgcagcatttggcggcgcttccagcgctgatacgggagttggccacgggtgccatcgccgtcttttagc

SEQ ID NO: 243034 - DNA, 320 bp, Unknown
  Bacterial polypeptide expressing nucleotide sequence isolated from the Sargasso Sea
catagcaagatatatttcaaaaaacattgttgcctcaggagttgctgataaatgcacgcttcagcttgcttatgcaattggtgtttcagacccattatctatttatattgatactcacggtacatctaaaatatcagatgatgaattaataaaaaaaatcgagtcaaatatcgatctcactccaagaggaataagagatcacttaaatcttcataagcccatatataaaaagagtgccgcatacggccattttggaagagagcctgaggatgatggatctttttcatgggaaaaaattgatatttcaaataaattttaaa

SEQ ID NO: 243035 - DNA, 205 bp, Unknown
  Bacterial polypeptide expressing nucleotide sequence isolated from the Sargasso Sea
aatgaaaaaaaattatttatttactagcgagtccgtctctgaaggtcatccagacaaagtttgcgatagaatttctgatatggttgtagatacatacttaggtgctgaacctcaatcaagagtggcttgtgagactttaacaacaactaataaggtagtgcttgctggagaagtaagaggtccggaaataaaaaagatgatttaa

SEQ ID NO: 243036 - DNA, 157 bp, Unknown
  Bacterial polypeptide expressing nucleotide sequence isolated from the Sargasso Sea
gaggaagagttcgaccttaggcctaaaagcttaattaatatgcttgatttaaagagacctatctactttccaactgcagcctatgggcactttggaaggtctgatgttgacctaacttgggaaagaactgataaagcagataagatttcacaataaa

SEQ ID NO: 243037 - DNA, 105 bp, Unknown
  Bacterial polypeptide expressing nucleotide sequence isolated from the Sargasso Sea
catgagtaagtttttatttacatcggagtctgttactgaggggcatcccgataaagcatgtgatgcaatatcagatgcaatattagatgatattttatcaaaaga

SEQ ID NO: 243038 - DNA, 136 bp, Unknown
  Bacterial polypeptide expressing nucleotide sequence isolated from the Sargasso Sea
aattagagagatgttagcactaaacaaacctatatacgaacgtacagcagcatatggtcattttggaagaaaaccagggtcagacggttctttttcatgggaaaaaacagataaaattggagtttttaaaaagtag

SEQ ID NO: 243039 - DNA, 256 bp, Unknown
  Bacterial polypeptide expressing nucleotide sequence isolated from the Sargasso Sea
ttatgcaataggagtatccaaaccgttatcaatttatgtagatttatttttttttgatgaagaaaaaaataaacatgttgaaaaactaattaatgaaaattttgatttaagcccaagaggtataagagaaatgctaggtttaaataagcctatttatgaaaaatcggcagcttatgggcattttggtagagatccagagtcaaatggtgcattttcatgggaaaaaactgataaagcagcagtatttaataagtaa

SEQ ID NO: 243040 - DNA, 121 bp, Unknown
  Bacterial polypeptide expressing nucleotide sequence isolated from the Sargasso Sea
atgaagaagaattttttatttactagtgagtcagtgtcagaaggacacccagacaaagtttgtgacagaatttccgacatggttgtggacagttttttagcttccgaacctcaagcaagag

SEQ ID NO: 243041 - DNA, 310 bp, Unknown
  Bacterial polypeptide expressing nucleotide sequence isolated from the Sargasso Sea
ggctaaaaatgttgtggcttctaaaattgcagacaaatgtttaattcaacttgcttatgcaattggagtttcaaaacctctttcaatttatgttgatctttttgataatgatgaggaaaaaaacagacatgttgaaaaactgataaatgaaaattttgatttaagtccaagaggaattagagaaatgttaggtttaaataaaccaatttatgagaaaacgtcagcttatggacactttggaagagaaccagagcaagatggttcattttcatgggaaaaaactgataaatcagacattttcagcaagtaa

SEQ ID NO: 243042 - DNA, 220 bp, Unknown
  Bacterial polypeptide expressing nucleotide sequence isolated from the Sargasso Sea
atgtattattttacatctgaaagtgtatcacctgggcatccagataaattatgtgatcacttatcagacgccattttagatcatgtcctctcacaagataaagaatcacgtgttgcatgtgaaacttttgtaaaaggtaaatctgatgatgctgggactgtagtagtgggtggagagataactactcaagcaaatctcgatatagatgaactaataagag

SEQ ID NO: 243043 - DNA, 277 bp, Unknown
  Bacterial polypeptide expressing nucleotide sequence isolated from the Sargasso Sea
tttgtggcatccgggagtttcacaaaatgctactattcaacttagctatgcaataggtgttaaagagcctgtatcgctttatgtttattgtgatggtaaagttagaaatgatatatcagaatggatttataaaaatattgatttgacacctttaggtatcattagaaaatttaatctatttaaattagacctaactgagaccacaaactatggacattttggtaaaaaccatcttgcttgggaaaatactgatatagcaaatcaattaaacttataa

SEQ ID NO: 243044 - DNA, 323 bp, Unknown
  Bacterial polypeptide expressing nucleotide sequence isolated from the Sargasso Sea
atcaagatatttggcaaaaaatattgttgcttcaaaaattacagataagtgtttaattcaacttgcttatgcaattggagtatcaaaacctttatcaatatatgttgatctttttgataataatgaagaaaaaaataaacatgtagaaaaattgattaatgaaaattttgacctaagtccgcgaggaattagagaaatgttaggtttaaataagccaatatacgaaaaaacagctgcatatggacattttggaagagatccagattcgaatggtggattttcttgggaaaatactgataaagcttatatttttagtaagtaat

SEQ ID NO: 243045 - DNA, 106 bp, Unknown
  Bacterial polypeptide expressing nucleotide sequence isolated from the Sargasso Sea
gatggaaaataataaatatttatttactagtgagtctgtatctgaaggccatccagataaagtctgtgatagaatttctgatatggtggtagactcctatctatct

SEQ ID NO: 243046 - DNA, 1427 bp, Unknown
  Bacterial polypeptide expressing nucleotide sequence isolated from the Sargasso Sea
cttggcgtgtcttttacctatgcgcggcatgagcattgtgccgtctctatggctatggcctatgcacgggtaacaggccagcccagcctcgccacggtgacatgcgggcctgggctaacacaagtaatgacgggcctttccgcagccgtgcgagcacggatcccgctcgtgctatttgtcggggaatcaccattgcgggcttcatggtataatcaagaaattgatcaagcaccgtttgtaacggcttgtggcgccgagtacgtaaggattttacataagcctcgggtcacccgtcagattcaggatgcgttttcccgcacccaaatgagtgggactccagttgtgattgggatgccttttgatctacaggaaagtgagtggggtaatcttaactttacctttgaagtggcgtctgatttcgttccatctgccggaaaggtatttcctgatccgggagttgtggatgccgtaacggcgttggtagcgcaggcaaaaaggccagtgttgattggagggcgaggcgccgtgctggccgatgcgggcccgtcctgtatacgccttgccgataaaattggcgcggtgcttttaacgagtttaccagcccgtggtctttttcatcgctcaatccattccttgaatgtcgttggtggttttgcctctgatacggcgcgcgaggcttgcctggagtctgacctggtgattgctgtcggcacgagcctcgcatcacattctgccgacgcgggccggttatatcctaatgctaagattctgcatattgacacgcaccctatcatttatcagcaaggccgtgtggcagcacatcatcatctttgcgcggatgccaaaattggtgttgatgcaattttgaacgctcttggtgatatcaagggctgctcttcaggtagccatgaatggcgcgatgaattggcagcacagcagaaagctgccgaatatcccgatgcactgccatttcaggtagcgcctgatgtgattgatccgcgccagatgatcaaggcgctggatcaaaaattgcccaaagactggtttatggtgaattcttctggtcattgttcttattacgcggctcatatgacgggccgttcggctgatgcgtttttgaccattcgagaatttggcgcaattggaaacgggttatcctatgccattggtgttgcagctgcccgctctgaaacacaagttgtattgattgatggtgatggtggttttttgatgcatgcacaagagcttgaaactataaagcggcatggaatcaaattgttgataatcgtgatgaatgacgcagcctatggatcagaaattcataaactacgcgttgatgggcacgatgaaaccggtgcggcttttggccaaactgatctcgccagtgtggcacgcggctttggtcttggcggcgttagctttaccaa

SEQ ID NO: 243047 - DNA, 160 bp, Unknown
  Bacterial polypeptide expressing nucleotide sequence isolated from the Sargasso Sea
atgaaaaactatttttttacatctgaatcagttacagaaggtcatccagataaagttgctgatctaatctcagataatgtggctaattatttaataaatcaaaatgaaaatcatagagctgctattgaaacaatggtttcatcgaatatggtaaccattg

SEQ ID NO: 243048 - DNA, 136 bp, Unknown
  Bacterial polypeptide expressing nucleotide sequence isolated from the Sargasso Sea
tatgtcgtatttgtttacgtctgaatctgttagtgaaggacaccctgataaagtttcagatcaaataagtgatggaatattggataacttcctagcttttgatcccaaagtaaagttgcttgtgaaactcttgtaa

SEQ ID NO: 243049 - DNA, 256 bp, Unknown
  Bacterial polypeptide expressing nucleotide sequence isolated from the Sargasso Sea
tatgcaattgtgggtatcaaaacctttatctatttatgtcgatttatttgataatgatgatgaaaaaaataagcatgtagaaaagcttataagtcagaattttgatttaagccctagaggaataagagaaatgcttggtttgaataaacctatttatgaaaaaacagcagcctatggacactttggaagaattccagaagataacggctcattttcttgggaaaagactgataaatcagatatatttagcaagtaa

SEQ ID NO: 243050 - DNA, 169 bp, Unknown
  Bacterial polypeptide expressing nucleotide sequence isolated from the Sargasso Sea
tgcattttcaggaaaagacccaacaaaagttgatagatccgctgcttatgcatctaggtatttagcaaaaaatgttgttgcatctaaaatttctgataagtgtttaattcaacttgcttatgcaattgtgggtatcaaaacctttatctatttatgtcgatttatttga

SEQ ID NO: 243051 - DNA, 256 bp, Unknown
  Bacterial polypeptide expressing nucleotide sequence isolated from the Sargasso Sea
acgctattgggtgtttctaaaccactatctatttatgttgatctttttgatggagatgaggaaaaatcaaaacatgttgaaaaattaataaatgataattttgatttaagccctagaggaattagagaaatgttgtctttaaataaacctatatatgagtgcacatctgcgtatggtcattttggtcgaaaaccaggatcaaatggtgaattttcttgggaaaaaacggataaaacagcagtttttaaaaagtaaa

SEQ ID NO: 243052 - DNA, 1186 bp, Unknown
  Bacterial polypeptide expressing nucleotide sequence isolated from the Sargasso Sea
atgccctctacggcgaacatcgtcgtctgcgtcagacgcgcggcacttcactccgacgcagacacggaaatgtgcgaacacaagggtgtcggacaccccgacacgttgtgcgacaacgcggtcgaggcagctgcccgcgcgcttagtctcgcgtatctcgacgaatacggcgctgttcagcacttcaacctggacaaagcgttattgattgggggattgagtgcgccgaaatttcgcggcggccgtctgctgcggcctatgagactgatcgtgtcaggtccggttgccgagctggcgtcacaatcggcggaggcgatcatccaggaagccatctacgctcacctgaaagcgacgttggacgtcgactcgagcatgatcgccgtggagcctgcggtacgtgccagtgcaccgagccttcgtcgtgtgaacggcccggcggcaatgccgctcgccaatgacacgtccttcggtgtcggctacgctccgctttcgcgccttgaacagcaggtgaaagcagttgcagacatcttgaactccgacggtctgcgctctgcatttccggcgattgggcgggattacaaggtcatgggccatcgcgttggcgaccgtatcgcactcacgctcgcggccgcctttgtcgatcgttgggtgggagacgtagcggattattttgctgtgaaggcgcgcgtcgcccagcgagtcggcgagcgcctgggaccagcctgcacgcttcgcatcaatacgctcgatgatcccggtgcgcacgaccaaagcggcctgtatcttacggtaaccggtctgagcgccgagcagggcgacgacggcgaagtcggtcgcggcaatcgcgtgaacggcttgatcacgccctaccgtccgatgtcacttgaggccgccgcaggtaagaacccagccgcccatgtggggaagctttacaacgtgctggcacaccaattggcacaacgcattctgaacgacgtcgacggcgtggtcgaggtgacagttcgcctgctgtcggccattggccagccaattgatcagccgcagctggcggcggtggacgtatgcgcgccggacggactttcccctgcgcagcgccgaggtatagatgagcttgtcgagcagggactttccgagttgccggcgttgacccgacaactcgtgaacgccgagattcgtatttgctaga

SEQ ID NO: 243053 - DNA, 778 bp, Unknown
  Bacterial polypeptide expressing nucleotide sequence isolated from the Sargasso Sea
aatgtataaaacagctgaaacagtctctcctggacatcccgataaaattgctgatttaatttcagactatgttttgaccgaagccctttcaaacaacagtaaatcaagagttgcagtagaaacattcttaactggtacaacttatggtggattagttgttgttggtggagaaattagtgatattgcaaaaatagatgataaaggtattgagaaaatagttaaagatgcactagcaaaaacaataaaaacaagcttcgaggattttcaattagatagtttaaaaattcaaaatgagttaactcctcaatctgaggagataagatctgcagttgaggacgacgaagacctaggagcaggagatcaaggtattatggttggctatgctaccaacgaaacggaatcttttatgcctccaacctttgatatcagtagaaatattcagatggctctttgggaaattcagaataatgatgaaaaacttgatttagattctaaagttcaggtgactacaggtggagaagaaacaaaagttgttatatccacacagcataaaaaagatatagatattgatgaactaagaatcaatcttgaagatatgataacgaaatacgttgatggaaaatttcagtttcatcttaacccatctggttcatttgttaaaggtgggcctgctggagatactggactgacagggagaaaaatcgttgttgatgcatatggaccaactgtgcccgttgggtggtggtgcatttttctgggaaagacccatcaaaagttg

SEQ ID NO: 243054 - DNA, 303 bp, Unknown
  Bacterial polypeptide expressing nucleotide sequence isolated from the Sargasso Sea
aatattgttgcttccaaattgctgacaaatgtttaattcagcttgcttatgcaataggagtttcaaaacctctatcaatatatgttgatctttttgataatgatgaagaaaaaaatagacatgtagaaaaattaattaaagaaaattttgatttaagcccaagaggcataagagaaatgttaggtttaaataaaccaatttatcaaaaatcagctgcatacggacactttggaagagatcccgagtcagatggatcattttcatgggaaaaaactgataaatcacagatatttaataagtaaa

SEQ ID NO: 243055 - DNA, 231 bp, Unknown
  Bacterial polypeptide expressing nucleotide sequence isolated from the Sargasso Sea
aatgagtaatctaaaaaattttcttttcactagcgagtcagtttcagaaggacaccctgataaagtttcagatagaatttctgatatggtagttgatagttatctttcaggagatcctttttcaagagtagcttgtgaaacacttacaacaacaaataaagtcgttttagctggcgaagtaagaggcccagaaattaaaaaaaatgatttaattgaaaaagtaagacactg

SEQ ID NO: 243056 - DNA, 154 bp, Unknown
  Bacterial polypeptide expressing nucleotide sequence isolated from the Sargasso Sea
aatgaaaaaagatttcttatttacaagtgagtcagtttctgagggccatccagacaaggtctgtgatagaatttctgatatggtagtagatacatatttaacaaaagaaccccaatcaagagtagcctgtgaaactttaacaacaactaataaa

SEQ ID NO: 243057 - DNA, 283 bp, Unknown
  Bacterial polypeptide expressing nucleotide sequence isolated from the Sargasso Sea
tatgagttatatatttacatcggaatcagtttctgcaggacatccagataaagtctgcgatcaaatatcagatgctgtcttggatgcttatctagcagaagatccagatagcagagttgcatgcgaaacaatgataaaaaataatatggtttacattgcaggtgaaattacctcactaggttcaccaaatttagaaccgattgtaagacaaaccattaatgatattggttataacactgatgaatatggatttaatggtgatacatgtgaatttacaaactta

SEQ ID NO: 243058 - DNA, 193 bp, Unknown
  Bacterial polypeptide expressing nucleotide sequence isolated from the Sargasso Sea
caaaaaatagaaaaatctgttcaagatttatttgatcttagcccaagaggaataagagagcatttaaaactgactaatgcaatttatgttccaacttcggcttatgggcattttggaagagaaccaactgataaaggtcattttacttgggagaaaacagatttggtagattcattaaaaagtatactttaaa

SEQ ID NO: 243059 - DNA, 248 bp, Unknown
  Bacterial polypeptide expressing nucleotide sequence isolated from the Sargasso Sea
tcggcgtttcaaaccactttcaatatttataaaattagctgagggcgatgggagcaaagaggaaaaaattaaaaaaatagttcaagataactttaacttatcacccagaggtataagagaaatgttaaagttaaacaatccaatatacgaggttacatcagcttacggtcactttggaagaaaacccactaataatggagaatttacctgggaaaaaactgataaagcagatttatttagattgtaat

SEQ ID NO: 243060 - DNA, 229 bp, Unknown
  Bacterial polypeptide expressing nucleotide sequence isolated from the Sargasso Sea
tctatatatgtagatttatttgataataatctagataaaaataaatttgttgtagaaaagattaaagaaaattttgatttgagtcctagaggtataagagaaatgttgaatttaaataaaccaatatatcaaaaaacagccgcttatggtcattttggtagaacacctgaagaaaatggttcattttcatgggaaaaaaccgataaaaccaacgttttttctaaatagt

SEQ ID NO: 243061 - DNA, 115 bp, Unknown
  Bacterial polypeptide expressing nucleotide sequence isolated from the Sargasso Sea
acagccgatctatgaaaagtcagctgcatatggtcactttggaagggaagatgaagcatttccatgggaaaaaactgaccgatctgacgcattaaaagaacaatctgggttgtaa

SEQ ID NO: 243062 - DNA, 122 bp, Unknown
  Bacterial polypeptide expressing nucleotide sequence isolated from the Sargasso Sea
aggtctaaataaacctatatatgaaaaaacagctgcctacggacacttcggaagaattccagatgataagggttcattttcatggaaaaagacagataaatcagatgtatttggcagttaaa

SEQ ID NO: 243063 - DNA, 256 bp, Unknown
  Bacterial polypeptide expressing nucleotide sequence isolated from the Sargasso Sea
tatgctatttggagtttcaaaaccattatcaatttttataaaacttgatgaagataatgaagataaagttgttaatataaaaaagattattgaccaaaatttcgatttatctccacgaggcattagggaaatgttaaaactaaataatccaatatacgagattacatctgcctacggtcattttggcagaaaatcatcaaataaaggtgaatttacttgggaaaaaacagataaagcacatttatttaagctgtaa

SEQ ID NO: 243064 - DNA, 157 bp, Unknown
  Bacterial polypeptide expressing nucleotide sequence isolated from the Sargasso Sea
aatgagtagatcttatttatttactagtgaatcagtttcagaaggacatccagataaagtttgtgatagaatatcagatatggttgttgatacctatttatcatcaggtgatccacaaactcgagttgcgtgtgaaacacttactaccactaacaaa

SEQ ID NO: 243065 - DNA, 185 bp, Unknown
  Bacterial polypeptide expressing nucleotide sequence isolated from the Sargasso Sea
gcatgttgagaagttaataaaagataattttgatttaagtcctcgaggtattagagagatgttagatttaaataaacctatatatgagtgcacatcagcctatggacattttggaagaaaacctggatcaaatggtagtttttcttgggaaaaaactgacaaaacaggggtttttaaaaagtaat

SEQ ID NO: 243066 - DNA, 232 bp, Unknown
  Bacterial polypeptide expressing nucleotide sequence isolated from the Sargasso Sea
ttatctatttttataaaactttctgatggagatgaagataaagtaagtgcagtgaagaaaattatcgacaagaattttgatttatctccgagagggattagagagatgttaaaattgaataatccaatatacgaagtaacttctgcctacggacattttggtagaaaaccatcaaatgcaggtgaatttacttgggaaaaaacagataagtcagatttatttaaattgtaat

SEQ ID NO: 243067 - DNA, 160 bp, Unknown
  Bacterial polypeptide expressing nucleotide sequence isolated from the Sargasso Sea
aaactttgatcttagcccgagaggaatcagagaaatgctaggtttaaataaacctatttatgaaaagactgctgcctacggtcactttggaagaattcctgagaaagatggctcattttcatgggaaaaaacagataaatctggagtttttgttaattaa

SEQ ID NO: 243068 - DNA, 262 bp, Unknown
  Bacterial polypeptide expressing nucleotide sequence isolated from the Sargasso Sea
tatgtgtgattattgtgaagttcaatcttcttatgcaattggagtagtagagccaacatcaatatttattaatacttttgaatcagaaaaaaaacctattgaagagatacaggcgatagtagatgaatcttttgatttaactccagctggcatcattaataatttaaatcttttagagccaatttatttaaaaactgcaagctatggtcactttggtcgagaagatcaaggatttagttgggaagatacaaaagatctatga

SEQ ID NO: 243069 - DNA, 597 bp, Unknown
  Bacterial polypeptide expressing nucleotide sequence isolated from the Sargasso Sea
aatgaaaaaaaattttttatttactagcgaatcagtttcagaaggacatccggataaggtgtgcgatagaatatcagatatggtagttgatacgtatttaggcatggagccccaagctagggtagcatgtgaaactttaactacaacaaataaagtagttctagcaggagagacaagaggtccaaacattaaaaaagaggaattaatatcaaaagttagagactgtattaaagatattggttacgatcaagatggttttagttggaaagacagtactaagattgaaactcacttacactctcagtctgcggatattgctatgggagtagactcctctggaaataaagacgaaggagcaggagatcagggaattatgtttggatacgcatgtaatgaaactgatgttttaatgccagctccaatacattactcacatagaattttaagattaatggccgaagatagaaaatccggaaaattgaaaggaattgagccagactctaaaagtcaaattacgattgagtacaaagatggtgtacctaatgcggtaaaatcagttgttatctctacacagcattctaaagatgttgatttaaa

SEQ ID NO: 243070 - DNA, 711 bp, Unknown
  Bacterial polypeptide expressing nucleotide sequence isolated from the Sargasso Sea
ggctgaagatagaaaatctggggaatttaaaaaatattgaaccagattcaaaaagtcaaattactattgaatataaagatggtaaaccagcagctgttaaatcagtagtaatttcaactcaacattcagccgatgttaatcaagcacaagtaagagaattggtaaaaccatatattgaaaaatctatcccaaaagaacttttgacaggattagatgaaaatgaaatttatgtgaaccctacaggcaattttgtaattgggggaccagatggtgatagtggattaacaggtagaaaaataattgtagatacttatggaggtgctgcaccacacggcggtggagcattttcgggaaaagatcctacaaaggttgataggtcagcagcatatgcatcaagatacttagctaagaatgtggtagcatcaaaaattgctgataaatgtttaattcaacttgcatatgcaataggtgtctctaaacctttatctatttatgttgatctttttgataatgatgaagaaaaaaataggcatgttgaaaaattaattaatgaaaattttgatttaagcccaagaggcattagagagatgttgggattaaacaaaccaatttatgaaaaaacggcagcctatggacattttggaagagaacccgagtcagatggttcattttcatgggaaaaaacagacaaatctggggtttttaaataag

SEQ ID NO: 243071 - DNA, 619 bp, Unknown
  Bacterial polypeptide expressing nucleotide sequence isolated from the Sargasso Sea
atgaaaaataataaatatttatttactagcgagtcagtttctgaaggtcatccagataaagtctgtgatagaatttctgatatggtagttgactcttatttatctctagatcctttttctcgtgttgcgtgcgaaacacttacaacaaccaacaaagttgtattggctggagagactagaggtccaaaaatagaaaaagaagaaattataaataaagtcagagaatgtataaaagatattggttatgaccaaaaaggttttagttggaaatcagctaatatagagacgtttctacacgaacaatcttcagatatcgcaatgggtgtagactctaaagataataaagatgaaggtgctggtgatcaaggaattatgtttggttatgcatgtacggaaacgcaggaattaatgccagctccaattcatttttcacataaaattttaaggttaatggctgaagatagaaaaaaaggaattttaaaagggatagagccggactctaagagtcaagtaacgatgttatatcaagataacaagccagttaaagttacttcagtagtaatttctactcaacattcaaaagatttaaatcaagaaaaagttaaagatttagttgttc

SEQ ID NO: 243072 - DNA, 637 bp, Unknown
  Bacterial polypeptide expressing nucleotide sequence isolated from the Sargasso Sea
atgggggttccatcaaaagttacagcagtagttatttcaacacaacactctcctaaagtttcgcagtctcaggtcaaagaaattgtgagaccatatcttgaaaaagcaattcctaaaaaattattaatgaatttaaatgacaaagatttttacgtaaaccctacaggacaatttataattggaggacctgatggtgatacaggattaactggaagaaaaattattgttgatacttacggtggtgcagcacgccacggtggaggagctttttcaggaaaagatccaagcaaagtagatcgatctgcagcttatgccgcaaggtatgttgcaaaaaatgttgtagcttcaaaaatcgcaaaaaagtgtgagattcagttatcttatgcaattggtgtctcaaagccactatctatttatgtcaatctttttgatggagatatagaaaaagaaaagcatgttgaaaaattaattacaaataattttgatttaagcccaagaggtataagagaaatgttaaatctaaataggcccatatatgaatcaaccgcttcatacggacattttggaagaaaaccaagagaagatggttctttttcgtgggaaaaaactgacaaaatatctatttttaaaaagtagt

SEQ ID NO: 243073 - DNA, 921 bp, Unknown
  Bacterial polypeptide expressing nucleotide sequence isolated from the Sargasso Sea
agttatttatttacatctgaaagcgtctctgagggtcatccagataaaattgctgaccagatatctgatgcactaatcgataattttttagcttttgatccaagctctaaagtagcctgtgaaactttggtaaccacaggacaagttgtacttgcgggtgaagtaaaatctaacaccaatttagatgttgaagccatttccagagatattataaataaaattgggtacaataaaaaagaatacatgtttgatggtaattcttgtagtgttttttcagctatacatgagcaatcttctgatatcaatcaaggtgttgaaaaaaaaaccccacaggatcaaggtgccggagatcaaggaatgatgtttggatatgcatgtaatgaaaccaaaaactatatgccattagcccttgatttatcacataaaattcttattgaattagcagatttaagaaaagaaaataatgaaataacttacttaagacctgattctaaatcacaagtaactttacaatattctgaagataatatccccgaaaaaattgtagctattgtagtttccactcaacatgatgattttgataatgaagataacatgctagcaaaaattaagcatgatattattacaatcttaattcctaggttattagaaaaatatccagattataagaaattctttaataataaaattgaataccatattaatccaacaggaaaatttgtaataggaggtcctcatggtgacactggtttaactggaagaaaaattatagttgatacttatggaggaaagggtgctcatggtggtggtgcattctctggaaaagatccaagtaaagttgatagaagtgctgcttatgctacaagacacattgctaagaatttagttgctgcaggcgttgctaacgaatgtttagttcaa

SEQ ID NO: 243074 - DNA, 697 bp, Unknown
  Bacterial polypeptide expressing nucleotide sequence isolated from the Sargasso Sea
agcggtgagctcagttggctaagacccgatgcaaagagtcaggtaaccattctttttgaagatggaaaacctaaatcaatcgatacagttgttctatccactcaacacgatgaaaatatctcaatgaatgatattcaagaaggtgtcatggaacatatcattaaaccaatactccctgagggtttgctaactgattcaacgcaatatctcattaatcccactggaaattttatcattggtgggccagtcggagattgtggtttgacaggaagaaaaatcatcgttgatacttatggcggtatggcaagacatgggggcggtgcattctctggaaaagacccatcaaaggttgatcgatctgcagcatatgcagcaagatatgtagccaaaaatgtcgttgctgctgggttggcagaccggtgtgaaattcaagtctcatatgccattggtgttgcaaaaccaacctcagtaagaataaagacttttggtactgaaaagatttcagaagaagaaattgtgcatttggtaaatgaaaattttgatttaactccttatggaatcatgaacatgctggacctgctccagccaatctatgagaagtcagcagcatatggtcattttggcagagaggatgaagcattcccctgggaaaagaccgatcgatctgatgcactaaaggagcaatctggcttgtaat

SEQ ID NO: 243075 - DNA, 758 bp, Unknown
  Bacterial polypeptide expressing nucleotide sequence isolated from the Sargasso Sea
agcactcatgcctcttccaattgatctttctcatagactagtacgacaacaagcagaagttatgaaaagcaatgggctttcatggctaagacctgatgcaaaaagccaggtaagtgcaatttactcagatgacggaaagacaattgagggtctttcagcaattgtactttcaacccaacatgatgaagatgttacacaagatgaaattaaagaaggagtaatggaaaatatcattaagccaattgttcctcaagaatggatactagattcaacaaagatatatatcaatccaacaggtaaatttgtaattggtggtccagttggtgattgcggtcttactggaagaaaaattattgtagatacctatggcggtatggcaagacatggtggtggtgcattttcaggaaaagatccatcaaaagttgatagatcagcagcctatgcagcaagatatgtagctaaaaatattgttgcagccgggcttgctgattattgtgaaattcaagtttcatatgcaattggagtagctaagcctacatcaattaatgtaaatacatttaatagcgaaaaagtatcaaaagaggctattgaaaaaatagttgaggaaaaatttgatcttaggcctaaaagtcttataaatatgcttgatctcaaaagaccaatctatcttccaacagcggcttatggtcattttggaaggactgatattgatctttcatgggaaaagactaataaagcattagaaatttcacaataaa

SEQ ID NO: 243076 - DNA, 910 bp, Unknown
  Bacterial polypeptide expressing nucleotide sequence isolated from the Sargasso Sea
aacagttaaagaaattggctacacgcactcagatatgggcttcgacgctgattcatgtgcggtattaaatgctattggcaaacagtcacctgacatcaatcaaggtgttgatcgcgcaagccttgaagaacaaggtgctggtgaccaaggtctaatgtttggctacgctagcgacgaaactgacgtactaatgcctgcgccaatcacgtactctcaccgccttgttcaaaaacaagccgaagtgcgtaagtctggtaagctagactggttacgcccagatgcgaaaagccaaattactttcaaatatgaaaacgacaagcctgttggcatcgacgcggttgtgctttcaacccagcactgcgattcagtaagcactgaaacagttcgcgaagcggtaatggaagaaattattaagccagtgctgcctagtgaatggattgatggaaatacacgctttcacattaacccaacgggacgattcgttatcggtggtccaatgggcgactgtggcttaacaggtcgtaaaatcattgttgatacttacggtggtatggcccgtcacggtggtggcgcgttctctggtaaagatccatcaaaagtagaccgcagtgcagcatacgcgggtcgttacgttgctaagaacattgttgcagcaggacttgctaagcgttgcgaaatccaagtgtcttatgcaatcggtgtggcagagccaacgtctatcagcatcgataccttcggtacaggtgtggtagatgagaaaacattagtggcactggtccgtgaacatttcgacctacgcccgtatggacttattcaaatgctagaccttgagcgccctatttaccgcccaacggctgcgtacggtcactttggtcgtgacgaattcccatgggaagcaacagataaagca

SEQ ID NO: 243077 - DNA, 145 bp, Unknown
  Bacterial polypeptide expressing nucleotide sequence isolated from the Sargasso Sea
attggcaaaatatttattcacatccgagtcagtaacagaaggtcatccagataaagtttgtgatgcaatatctgatgctatacttgatagtttactatcccaagacaaggaatctcacgtagcctgtgaaactcttgcaacaaat

SEQ ID NO: 243078 - DNA, 667 bp, Unknown
  Bacterial polypeptide expressing nucleotide sequence isolated from the Sargasso Sea
aatgaaaaagaattttttatttactagtgagtcagtgtcagagggacacccagataaagtgtgtgacagaatttcagatatggttgtagatacttttttagcttctgagccacaagctagagttgcttgtgaaactttaacaacaacaaataaagttgtattagcaggagaagtaagagggccagagctaaagcaagacgaattaatttcaaaagtaaggcattgcattaaagatattggttacgatcaagatggtttttcttggaaagaacaaactaaaattgaaacacatttacactcacaatcagctgatattgctatgggagtagactcagctgggaataaagatgaaggtgctggagaccaaggaataatgtttggttacgcgtgcaacgaaacagatgttttgatgccagcaccaattcattattctcataaaatcttaaggctaatggctgaggatagaaaaacagggaacttaaaggggatagaaccagactcaaaaagtcaaattaccattcaatataaagatggtatgcctgcagcggtaacatcagtagttatttctacacaacattctaaagatgttaacttagcccaagttaaagatctttgcttgccctatatagaaagatctatacctaaaaattttattaggaagtcttga

SEQ ID NO: 243079 - DNA, 852 bp, Unknown
  Bacterial polypeptide expressing nucleotide sequence isolated from the Sargasso Sea
ggtgcagaacctcaatcaagagttgcttgtgaaactttaacaactacaaataaagttgttttagctggagaagtaagaggacctgaaattaaaaaagatgaattaattcaaaaagttagagattgtataaaagatattggatatgaccaagaaggcttcacatggaaagaagctaccaagatagaaagtcatttgcattcacaatctgcagatatagcaatgggtgttgattctgttggaaataaagatgaaggagctggagaccaaggaataatgtttggatatgcatgtaacgaaacagatgtgttaatgccagcgcctatacattattcgcataagattttaagattgatggcagaagatagaaaatctggaaagttaaaaagtattgagcctgattcaaaaagtcaaattacaattgaatacaaagatggaaaaccagcaaatgttaaatcagtagtaatttcaactcaacattcagctgaagttaatcaatctcaagtaagagaattggttaaaccttatatagaaaaatcaattccaaaaaatcttttaaatgggttacaagaaaatgaaatttacgtaaatccaaccggaaattttgtaattggtggtccagatggagatagtggattaacaggaagaaaaattattgtagacacatatggaggagcagcgccacatggtggaggagctttttctggaaaagatccaacaaaggttgatagatcagcagcatacgcgtcaagatacttagctaaaaatgtagtagcatcaaaaattgcagacaaatgcttaatacaacttgcttacgctataggagtttcaaaacctttatcaatttatgtagat

SEQ ID NO: 243080 - DNA, 275 bp, Unknown
  Bacterial polypeptide expressing nucleotide sequence isolated from the Sargasso Sea
atgcttaatacaacttgcttatgcaattggagtttctaagccattgtctatttatgtagatttatttgataatgatttagataaaaataaatttgttgaagaaaaaatcaaagaaaattttgatttaagtccaagagggatcagggaaatgcttgaactaaacaaagcaatttatgaaaagacagctgcttatggtcattttggtagaattccagaaaaagatggttcattttcttgggaaaaaacagataaaattaatattttttctaaatagt

SEQ ID NO: 243081 - DNA, 682 bp, Unknown
  Bacterial polypeptide expressing nucleotide sequence isolated from the Sargasso Sea
aatattgaaccagattctaaaagccaagtaacttttgaatacattgatggaaagccatcaaaagtaaaatcagttgttatttcttcacagcactctgctgatgtaaatcagtcccaagtcaaagatttgttgagaccttatatgttaaagtctataccaaaatttttttttgatggttttaacgaagatcaattttacgttaatccaacaggtaattttgttattggtggccccgatggagattgcggtttaactggaagaaaaattatagttgatacttatggaggagctgctccacatggaggtggcgcattttcaggcaaagatcctacaaaagtagatcgatcagcagcgtatgcagctagatatattgctaaaaatgttgttagttcaaaaatttcagaaaaatgtttaattcagttagcatacgcaattggagtttcaaagccattatcaatctatgtggacctatttgataatgatatagataagaataaatttgtagtagaaaaaattaaggaaaattttgatttgagcccaagaggaataagggaaatgttgaatctaaataaaccgatttatgaaaaaacagccgcctatggtcattttggtagaataccagaggacaatggttcattttcatgggaaaaaacagataaaacaggtattttttctaaatagt

SEQ ID NO: 243082 - DNA, 583 bp, Unknown
  Bacterial polypeptide expressing nucleotide sequence isolated from the Sargasso Sea
gatgttaactttggctcaagttaaagaactctgtatgccttatatagagagatctatacctaaaaatttattgggaagtcttgatgaaaaagagatctatattaatcctactggaaattttgtgattggaggaccagatggagacagtggcttaactggtagaaaaataattgtggatacatatggtggagctgcgcctcatggtggaggtgccttttcaggtaaagaccctacgaaagtagatagatctgctgcctatgcatccagatatttagctaaaaacgttgttgcatcaaaaattgcagataaatgtttaattcaattagcatatgcaattggggtatcaaagcctttatcaatttatgtagacctatttgataatgatgaagaaaagaatatgcacgtagaaaaacttataaaagaaaattttgatttaagtccaagaggaattagagaaatgcttggtctgaataaaccaatatatgaaaaaacagcagcttatggtcatttcggaagaatacctgaaggagatggatcattttcttgggaaaaaactgataaatcagaggtttttgctaagtaa

SEQ ID NO: 243083 - DNA, 581 bp, Unknown
  Bacterial polypeptide expressing nucleotide sequence isolated from the Sargasso Sea
tatgagccgttacgtcttcacctcagagtcggttacggaaggacatcccgacaagatctgcgaccaggtcagtgatgcggtgctcgatgccttgctggcccaggatcccgccagccgcgtggcctgtgaaaccgtggtgaatacaggcttatgcatgatcaccggtgaggtgacctccaaagcccaggtggacttcatccacctggtgcgcaacgtcatcaaggaaatcggttacagcggcgcccgggccggtggcttcgatgccaacagctgcgcggtgttggtcgctctcgaccagcaatctcctgacatcgcccagggggtcaatgaggccgatgaccacgctggcgaccctctggacctggtgggtgccggtgaccagggaatcatgttcggctacgcctgcaacgagacgcccgaactgatgcccctgcccatcagtctggctcacagattggcgcgtcggctggccgaggtgcgccacaacggctccctggattacctgcttcctgatggcaagacccaggtgagtgttgtctatgaaaacgacaagcccgttgccattgacacgatcctgatct

SEQ ID NO: 243084 - DNA, 697 bp, Unknown
  Bacterial polypeptide expressing nucleotide sequence isolated from the Sargasso Sea
atctgctcctggattagagccagactcaaaaagtcaagtaacgatgctatatgaaaatggtaagccaagtagagttacatcattagtaatttcgtctcaacacaaagaaggactatctcccttagaagtcaaagaaatagtaaagccttatgtttacgaatgtataccaaatgaattgcttgagggtcttaaagatgaagaattttatgttaatccaacaggaaacttcgttataggaggaccagatggagactctggtttaactggcagaaaaattattgtggacacttatggtggtgcagcacctcatggaggaggcgcattctctggcaaagatccatctaaagttgatagatcagcagcatatgctgcaagatatttggctaaaaatgttgttgcggctgatcttgcagatcagtgcacaatacagttatcttatgcaataggagtttcaaaacctttatcagtttatgtaaatactaatggcacgaataaagttgatgagcaaaaaattgaaaaatctgttcaagatttatttgatcttagcccaaggggaataagggagcatctaaaattaactaatgcaatttatgttccaacctcagcttatggtcattttggaagagaaccaactgatcaaggtcattttacttgggagaaaactgatttagtagattctttaaaaagcataacttaa

SEQ ID NO: 243085 - DNA, 739 bp, Unknown
  Bacterial polypeptide expressing nucleotide sequence isolated from the Sargasso Sea
ctggcacacaggcttacagaacggcttacagaagttcgcaaaaatgggacactggaataccttcgtcctgatggaaaatctcaggtaacagttcgctatgttgatggtgaacctaaatcaattgaagcagtagttattagcacacagcattcggaggatgttagccaggagaagcttcatgaggatattatcagtaatgttatcaataatgttattccttccaaatacttgaatggttctccaaaatttcatattaatccaaccggactttttgttataggcggaccacagggagattgtggactgacaggtagaaaaatcattgttgatacttacggaggtatgggaagacacggtggcggagcattttccggcaaagacccttcaaaggttgaccgctctgctgcttatgcagcacgtcacgtggcaaagaacgtagttgctgcaggacttgcatcacgctgtgaggttcagctggcttatgccattggaatagcggaaccagtctccgtctctgttgatacattcggtacaggcaggattgaagaatcaaaaataataaatttgattcgtgataattttgaacttaagcctgcaggactaatcagctatctcaaactgctgcgtccaatctaccgaaaaacatctgcatatggacactttggaagagaggttccggaatttacctgggaatcaactgaaaaggctgatgatcttagaacaaaggcaggaatttaga

SEQ ID NO: 243086 - DNA, 148 bp, Unknown
  Bacterial polypeptide expressing nucleotide sequence isolated from the Sargasso Sea
atgaagaaagattttttatttacaagcgagtcagtttcagaaggacatccagacaaagtatgtgacagaatttcagatatggttgttgatacatatttaggtatggagccacaagctagagtagcttgtgaaactttaacaactacaa

SEQ ID NO: 243087 - DNA, 319 bp, Unknown
  Bacterial polypeptide expressing nucleotide sequence isolated from the Sargasso Sea
gagatatttagcaaagaatgttgttgcatctaagattgctgacaaatgtttaatacaacttgcatatgcaattggtgtatcaaaacctttatctatttatgtcgatttatttgataacgacaatgaaaaaaatatgcatgtagaaaagcttattcatgaaaattttgatttaagtcctagaggtataagagaaatgctgggactaaataaacctatttatgaaaaaacagctgcttacggacactttgggagaattcctgataataaaggctcattttcatgggaaaagacagataaatctgacatatttagcaagtaa

SEQ ID NO: 243088 - DNA, 309 bp, Unknown
  Bacterial polypeptide expressing nucleotide sequence isolated from the Sargasso Sea
ttgttgctgcaggtttatgtgatcaatgcacaattcatttgtcatacgcaatcggagtggctaagcctttgtcaatttatgttaacacgcaaggcacaaataaaatagatgaagccaaaattgtggcagcaatacctgagattatgaacttatcgccaagaggaattagagagaaactgcagttaaataaaccgatttacgaacaaacagcagcttatggtcactttggcagaactcatgatagctctactggagctttttcatgggagagtttagatttagtctctgattttaaatcccttgcttagt

SEQ ID NO: 243089 - DNA, 868 bp, Unknown
  Bacterial polypeptide expressing nucleotide sequence isolated from the Sargasso Sea
tctaacaacgacaaataaagttgttcttgctggagaaacacgtggacctaaaattcataaagatgaattaataagcaatgtaaaaaattgtataaaagatatcgggtatgatcaagaaggttttagttggaaaacagcaaatattgaaactttcttacatgaacaatcctctgatatcgctatgggagtagattcaaaagataacaaagatgagggagcaggagatcaaggaattatgtttggctatgcttgcaaagaaaccgaagatttaatgccggcacctattcatttctctcataaaattttaagattaatggcagaagatagaaaaaaagggattttaaaaggtatcgaaccagactcaaagagtcaggttactatgcaatatgaaaataataaacctgtaaaagttacttctgtagtaatttcatcacagcattcaaaagatttgagtcaagaaaaagtaagagaattggttattccttatataagtaaatctatacctagcaagtatttacaagatttagataaacaagaaatttacataaatcctactggtcaatttattatcggaggaccagatggggatacaggcttaacaggaagaaaaataattgttgatacatatggaggagctgcaccgcacggaggaggtgctttctccggaaaagacccaacaaaagttgacagatcagctgcatacgcatcaagatatttagcaaaaaatattgttgcagcaggtgtatcagaaaaatgtctcattcaacttgcttatgcaatcggagtttctaagccgctatctatatttataaaacttgatgaaggagatgagagtaaaattgaaaaaattttaaaaattattaatcaa

SEQ ID NO: 243090 - DNA, 283 bp, Unknown
  Bacterial polypeptide expressing nucleotide sequence isolated from the Sargasso Sea
catggcaaaacacctctttacgtccgagtccgtatcagaagggcatccagacaaaattgctgaccaaatctccgacgccgtgctggatgcgatcctcgaacaggatccgaaagcgcgtgtcgcgtgtgaaacttatgtcaaaactggcatggtgctggtcggcggtgaaatcaccaccagcgcatgggttgatatcgaagagattacccgtaatacggttcgtgaaattggctacgtgcattccgatatgggctttgatgccaactcctgtgccgtactgagc

SEQ ID NO: 243091 - DNA, 777 bp, Unknown
  Bacterial polypeptide expressing nucleotide sequence isolated from the Sargasso Sea
aatgagtaatttaaaaaattttcttttcactagcgagtcagtttctgaaggacatccggataaagtttcagatagaatttctgatatggtagttgatagttatctttcaggagatccattttcaagagtagcttgtgaaacacttacaacaactaataaagtcgttttagctggtgaagtaaggggtccagaaattaaagaaaatgatttgattgaaaaagtaagacactgcataaaagatattggttatgatcaagatggtttcacttggaaagaagctacaaaaatagaaagccatctccattcccaatcatctgatatagcaatgggtgtagattcttcaggcaataaagacgaaggagctggagatcaaggaataatgtttggttatgcatgcaatgaaacagaagagttaatgccagcacctattcattactcacacaaaattttaagactaatggctgaggatagaaagtctggtaaacttaaaaatattgaaccagactctaaaagccaagttacttttgagtatgttgatggaaagccaacaaaagttaaatctgtagttatttcatcacaacattctgcagatgtaaatcaaatgcaggttagagagttattaagaccctatatgataaactctattccaaaaatttttttagacggtttcaatgaaggggagttttatgtaaatccaacaggtaattttgttattggaggccctgatggtgattgtgggcttacaggaagaaaaattatagttgatacatatggagg

SEQ ID NO: 243092 - DNA, 552 bp, Unknown
  Bacterial polypeptide expressing nucleotide sequence isolated from the Sargasso Sea
aatgagtaatttaaaaaattatcttttcacaagtgagtctgtctctgaaggccatccagataaagtatctgataggatttcagatatggttgttgatagctttatttctagagatccatattctagagttgcctgcgaaacattaactactacaaataaagttgtcttagctggtgaagtaaggggacctgagattaaaaaagatgaattaattgaaaaagtaagaaattgtataaaagatattggttatgaccaagagggttttacctggaaagaagctacaaaaattgaaagtcatttacattcccaatcagctgatattgctatgggagtagactcatctggcaataaagatgaaggagcaggagaccaaggtattatgtttggttatgcatgtaatgaaacagatgttctgatgcctgcaccaattcattactcacataaaattttgagattaatggctgaggatagaaaatctggaaaattaaaaaatattgagccagattcaaaaagccaagtaacatttcaatatgtcgatggtaaaccttcaaa

SEQ ID NO: 243093 - DNA, 589 bp, Unknown
  Bacterial polypeptide expressing nucleotide sequence isolated from the Sargasso Sea
atgagtaatttaaaaaattatcttttcacaagcgagtctgtctctgaaggccatccggataaagtctctgatagaatttcagatatggttgttgatagttttatttctggagatccgtattctagagttgcctgcgaaacactaactactacaaataaagttgttttagctggtgaaataaggggaccagaaattaaaaaagatgaattaattcaaaaagtaaggaattgtatcaaagatattggttatgaccaagaaggatttacttggaaagaagccacaaaaattgaaagtcatttacattcccaatcagctgatattgctatgggagtggactcatcaggaaataaagatgaaggagctggagatcaaggtatcatgtttggatacgcatgtaatgagacagatgttttaatgccagcaccaattcattattctcataaaattttaagattgatggcggaagacagaaagtcaggaaagttaaaaaatattgaaccagactcaaaaagccaagtaacatttgaatatattgataaaagaccttcaaaagtaaaatctgtagttatctcttcacaacattcagctg

SEQ ID NO: 243094 - DNA, 931 bp, Unknown
  Bacterial polypeptide expressing nucleotide sequence isolated from the Sargasso Sea
ggaagtcctgatctagagcctgttgtgagaaaaacaattaatgatattggctataactcggatgaatatggatttaatggagatacgtgtgaattcacaaatctagtttttgagcaatcacctgacatctcccaaggtgtcaccgagggtgaaggagaaaaccttgaacaaggagctggagatcagggattaatgtttggatatgcatgcaaagaaacagaatcattaatgccgcttccaatagatctttctcacagattggtaaaaaaacaagcagatgtaatgaagagcggagagataaaatggttgcgccctgactctaagagtcaagtcagtgtaatttactccgatgatggtaaaacaatcgaaggcttgtccgcggtcgtgctctcaacacagcacgatgaagatgttagccaggaagaaataaaaattgaggtaatggataaaattatcaagccaatagttccagaggaatggttgcttgattctacaaatatatttattaatccaaccggaaaatttgttattggtggacctgtgggagattgtggtctcactggaaggaaaattattgtagatacctacggaggtatggccagacacggcggtggagcattttctggaaaagatccatccaaagtagacagatctgcagcatatgcatcaagatatgttgctaaaaatatagttgcagcagggcttgcagattactgtgaaattcaagtttcatatgctattggtgtagccaagcctacttcaatacatgtagaaacttttaatagtgaaaaaatttccaaagaagcgattgttaaaattgttgaggaagaatttgatctcagaccaaaaagtctgattaatatgctggacttaaaaagacctatctaccttccaacggcagcgtatggtcattttgaagatcagacataga

SEQ ID NO: 243095 - DNA, 277 bp, Unknown
  Bacterial polypeptide expressing nucleotide sequence isolated from the Sargasso Sea
agtccaagttgcgtatgcaattggggtcgcgcgcccagtatcggtgctggttgaaacctttgggaccgagaatgttgaccccgaacgcattaattcggcaatcaacgaagtattcgatctgaggccggcagcgattctaagggacctagatcttcgacggccgatctttcaacccacggcgtcgtacggtcatttcggtcgcgatgcatctgacgaaatgtttacgtgggaacgaaccgaccgggttgatgacctccgttcggcgctcggtctataa

SEQ ID NO: 243096 - DNA, 838 bp, Unknown
  Bacterial polypeptide expressing nucleotide sequence isolated from the Sargasso Sea
tctgcagataataatgcccatgtcgcctgtgagaccctagcaacaaagggagtcgtggtagtttctggagaaataaggacatctttttctcctgatgtagatcaaattgttaaaaatacaattaaagaaataggttatcataaagagaatagtggtattgatcctgctgaagtcaaagttatttcaatgcttcatgaacaaagtcctgaaattgctcaaggtgtggactctgaaaatttaagagaacagggtgcgggagatcagggtttaatgtttggttatgcatgtaaggaaacgcctgaattaatgcccttacctattcaaatatcacaaagattgacagaaaaattatctgaattgcgaaaagatggatctctttcttgggttcgtcctgatggtaagtctcaagtttctgttaattatgaaaacggaaacccaatttcagttgatagggttgtcatagcaacacagcatgatgatatgcttgctaaatatgaaactgaagaaaaagagttagcatttgtaaaagaagaagttataaataaaataataaaaccagtgcttgattcttatggatatccatattctaaagattttatcgtaaatggtacaggaagatttgtttatggtggaccagaagcagatactggattaactggaaggaaaattatagttgatacttatggtggttatgctccacatggaggtggtgctttttcaggtaaagatccttctaaagtagatagaagtgctacctatatggctcgttatattgcaaaaaatatagttgcatctgaattagctgatagatgtgaagtccagttatcttatagtatag

SEQ ID NO: 243097 - DNA, 688 bp, Unknown
  Bacterial polypeptide expressing nucleotide sequence isolated from the Sargasso Sea
atgagtaaaaaaacatatctatttaccagtgaatctgtttcagaaggtcatccagataaagtttgtgatcgtatatctgatatggttgtagatagttacttagcaaaagaacctttttcaagagttgcttgtgaaactttaacaactacaaacaaagttgttttggcaggcgaaactagaggccctgatataaaaaaagatgatttaattcaaaaagtacgtgattgtattaaagacattggttatgaacaaaaaggttttcattggaaaaattgcaatatagacgtacatcttcattctcagtcggcagatattgcgatgggagttgactcaaaaggaaataaagatgagggagctggagaccagggaattatgtttggttatgcttgtaatgaaacagaagttttaatgcctgctccaatttactattcacataaaattttagaactaatggctgaagatagaaaaaaaggaattgcagataaattggaaccagattcgaaaagtcaagttacaatgcaatatgaaaatggaaaaccttcaaaggtaacatctgttgttatttcaacccaacattctgctgatgtaaatcaatcaaaagtaaaagaaattgttagaccctatttagaaaaatctattcaaaaaaaattattgtcagggcttaaagaagaagaattttatgtaaatc

SEQ ID NO: 243098 - DNA, 285 bp, Unknown
  Bacterial polypeptide expressing nucleotide sequence isolated from the Sargasso Sea
gatgcaaaaagccaagtaagtgttatatatgacgataatggtaaatctataaaaggcctatcagcaattgtattatcaactcaacatgatgagggtatttctcaggacgacttaaaagaggctgttttagaagaaataattaagcctgtgattccatcaaattggctattagatgaaactaagatctttattaatcctactggaaaatttgttattggaggtcctgttggagactgtggacttactggaagaaagataattgtagatacatatggtggtatggcg

SEQ ID NO: 243099 - DNA, 419 bp, Unknown
  Bacterial polypeptide expressing nucleotide sequence isolated from the Sargasso Sea
tatgaaaagatcttatttatttacaagtgaatcagtttctgaaggccatccagataaagtttgtgatagaatttcagatatggttgttgatacttatttatcatctggtgacccacaaacacgcgtagcttgtgagactttgactaccactaataaagtagttttagctggagaagtaaggggcccatcagtttctaaagatcagattatatctcaagttagagattgtattaaagatattggttatgaacaagatggctttcattggcagaattgtgatattgaaagttttcttcatgagcagtcagctgatattgctatgggtgttgattctggtagcaataaagatgagggcgcaggtgatcaaggaatcatgtttggttttgcttgtaaagacactgaatcattaatgccagcac

SEQ ID NO: 243100 - DNA, 724 bp, Unknown
  Bacterial polypeptide expressing nucleotide sequence isolated from the Sargasso Sea
aagtgctatctattatagccataagattactaaagtgctttcaactgcaagacatagtggacaagactggatgggtccagatggaaaagcgcaagtaacagttgagtatagtaatgtgaatgaacctgtaaggatatcaaacgttatttgcagtacccaacatagtaaagatttgaaagataatcctggtgaagttcaaaaaagagtagaagaaattatcaagccagaattgaataatatgttcgatagcaatactatctttcaagtgaacccaactggtaattttgtaacaggtggaccagatggcgatactggagtcactggacgaaaaatcattgttgatacttatggtggctatgcacctcacggtggaggagcatttagcggaaaagactgtacaaaagtagatagaagtggcgcatatatggcaagatatttagctaaaaatattgtggcatcaggagtttcacaaaatgctactattcaacttagttatgcaataggcgtcaaagagcctgtatcgctttacgtttattgtgatggtaaagttagaaatgatatatcagattggatttataaaaatattgatttgacacctttaggcatcattagaaaatttaatctatttaaattagatctaactgaaaccacaaactatggacattttggtaaaaaccatcttgcttgggaaaaaactgatatagcaaatcaattaaacttttaa

SEQ ID NO: 243101 - DNA, 757 bp, Unknown
  Bacterial polypeptide expressing nucleotide sequence isolated from the Sargasso Sea
aaaaaaatctgctcagggagctggagatcaaggtataatgtttgggtatgcgtctaacgagacagaatctttaattccccttccgctatatctttctcataaaatcttgattgagttggctaagctgcgaaaggaaaataatgaaatcacctaccttcgacctgactcaaaatcacaggttactatcaaatatgataacaacaacaaacctttatgcattgatactattgtggtatcaactcaacacgatgagtttaataataatgaacaattgatgttagacaaaataaaatctgatgtcatcaacattttgataccacgtgttattaagaaatcacagcctaatattcaaaaactttttggggaagatatcatatatcacgtaaacccaacaggaaaatttgttattggtgggcctcacggtgacactggtcttactggaagaaagatcattgtagatacatatggaggtaaaggtggacacggaggaggagcctttagcggaaaagatcctagtaaagtagaccgaagtgctgcttatgcagcgcgccatatggctaagaacctagttgcagcggggatagcagatgaaatgctggttcaattgagttatgccattggagttgttgaaccaacttccatttttgttgacacttatggcagctctaaattagaattaagtgacactcaaattgctgcaaaagcagcagccctatttgatatgcgtccatatgctatagaacagcgacttaaactt

SEQ ID NO: 243102 - DNA, 307 bp, Unknown
  Bacterial polypeptide expressing nucleotide sequence isolated from the Sargasso Sea
aatgagtagatttttattcacatcagaatctgttacagaaggacatccagataaggcgtgtgatgccttctcagatgcgatcttggataatatattatcaaaggataatgaagcacatgtcgcctgtgaatccttagcaacaaaagggttggtagttatttcaggagaaataagaactactgcaaccgtaaatgttgagaaagttgtcaaagatacaataaaagaaatagggtatcataaaaccaatagtgggattgatccagacgatgttgaagttctttctaaactacatgagcaaagccctgaa

SEQ ID NO: 243103 - DNA, 589 bp, Unknown
  Bacterial polypeptide expressing nucleotide sequence isolated from the Sargasso Sea
agtcttacctgcaatcagtaagcaatcaccggatattgcgatgggcgttgaccgtgctgataaaaaagaacaaggcgcaggtgatcaaggtctcatgtttggttatgccaccaatgagacaaaggaactgatgccagcaacaattcagttatctcatcagcttgtgaagcgacatgcagatgtcagaaggagtggtgagctaagttggctgagacccgatgcaaagagtcaggtaaccattctttttgaagatggaaaacctaaatcaatagatacagttgttctatccactcaacatgatgaaaatatttcaatgaatgatattcaagaaggtgtcatggaacatatcattaaaccaattcttcctgagggcttgctaactgattcaacgcaatatctcatcaaccccactggaaacttcataatcggtgggccagtcggagattgtggtttgactggaagaaagatcatcgttgatacatatggcggtatggcgagacatgggggcggtgcattctctggaaaagatccatcaaaggttgatcgttctgcagcatatgcagcaagatatgtagccaaaaatgtcgtg

SEQ ID NO: 243104 - DNA, 283 bp, Unknown
  Bacterial polypeptide expressing nucleotide sequence isolated from the Sargasso Sea
atgagtaatttaaaaaattatcttttcacaagcgaatctgtctctgaaggtcatccagataaagtttctgatagaatctcagatatggttgttgacagttttatttcaagagatccatattcaagagtcgcatgtgaaaccttaactacaacaaacaaagttgttttagctggtgaggtaaggggaccagaaataaaaaaagatgaactaatcgaaaaagttagaaatggtataaaagatattggttatgaccaggaaggttttactggaaagaagcaacaaa

SEQ ID NO: 243105 - DNA, 608 bp, Unknown
  Bacterial polypeptide expressing nucleotide sequence isolated from the Sargasso Sea
tgttgtactatccactcaacattcgaaagatgtaactcttagtgatgttaaagatttcgtgatggaagaaattataaaaacaacaatacctaaaaatttattatcgaataccactaagattcatatcaatccaacaggaaactttgtcattggaggaccaaacggagattgtggtttgactggtagaaaaataatcgttgatacttatggtggtatggcaagacatggtggaggtgctttctctggtaaagatccatctaaagttgataggtctgctgcctatatggcaaggtatatcgcgaaaaatattgtagctactaagcttgcagataaatgtgaaatacaactctcttatgcaattggcgttgctgagccaacttcgatatctgtagatacctttggaacatcgaagattgagaattctaaaatatcctctgcagtaagtaaggtatttaatctcactccgaagggtattattgacacactagaccttctgaacgtaaaatatcaacctactgcggcttttggacatttcggaagagatgacaaaaattttacttgggaacaaaaggataaggttgatatactaatgaatgaactaggatagg

SEQ ID NO: 243106 - DNA, 574 bp, Unknown
  Bacterial polypeptide expressing nucleotide sequence isolated from the Sargasso Sea
attcctgctactgaagatttagaaatcaaaccaaacgttcatacaacaagatttctagtaaatcccacgggcaaatttgtcgtagggggccctcaaggtgatgccggacttactggaagaaaaattatagtagatacttatgggggttacgcaagacacggaggaggggcattttctgggaaagatcccacaaaagtggatagatcagctgcttacgcagcacgttatgtagctaaaagtatagttacggcaaaattagcaaaaaaggtagaagtacaattaagttatgcaattggagttgcaaaaccgatttcaattcttgttgaaacttttgatactggcgttatttcacaagctaatttgactgagatcattaataagtactttgatttaagaccagcagcaattataaaagaatttgatctaagaaatctacccaaaaaaatgggtggtacatttttcagaaagactgcatcctatggacattttggcagaagagatctaaatctcccttgggaaaaggtagaagaaaaatcagcccaattagcggaggcttccaaagtatttttataaa

SEQ ID NO: 243107 - DNA, 319 bp, Unknown
  Bacterial polypeptide expressing nucleotide sequence isolated from the Sargasso Sea
atgaaaaaaaattttttgtttacaagtgaatcagtatcagaaggacacccagataaagtttgtgatagaatatcggatatggttgtggactcatatttgagcgctgaaccccaatccagagttgcttgtgaaactttaacaacaacaaacaaagttgttttagctggagaagttagaggtccagaaataaaaaaaaatgatttaattcaaaaagttagagaatgtattaaagatattggttatgaccaagcaggtttcacatggaaagaggcgacccagatagaatgtcatttgcattccccaatctacttgatatagc

SEQ ID NO: 243108 - DNA, 838 bp, Unknown
  Bacterial polypeptide expressing nucleotide sequence isolated from the Sargasso Sea
tctggaacaggatgaaggagcaggtgatcaaggaatcatgtttggatatgcatgtaatgaaactgatatgctaatgccagctcctattcattattcacataaaattcttagacttatggcagaggatagaaaatcaggaaaattaaaaaacattgagcctgattcaaaaagccaagttacttttgaatatgttgatggaaaaccaaataaagttagatcagtagttatatcatcacaacattctccagatattaatcaagtacaagtcagagatttactaagaccttacttgttaaaatcaattcccaaaaattttcttgagggatttgatgaaaaagaattttatgttaatccaactggaaattttgttataggaggcccagatggtgattgtggattaacaggaagaaaaataattgtagatacttatggtggtgcagcaccccatggaggaggtgcgttttcaggaaaagacccaactaaagttgatagatccgcagcttacgcagcgaggtatatagctaaaaatgttgtagcttcaaaaatagctgaaaaatgtttaattcaattagcttatgcaattggggtttctaaacctctatctatttatgttgatttatttgataaagatttagaaaaaattaaatttgttactgaaaaaattaaagagaattttgatttaagtccaagaggaataagagaaatgttgaatttaaataaacctatatatgaaaaaactgctgcctatggccattttggtagatcacctgaggataatggatcattttcttgggaaaaacagataaatcaagcttttttttcaaatagtttttgttga

SEQ ID NO: 243109 - DNA, 820 bp, Unknown
  Bacterial polypeptide expressing nucleotide sequence isolated from the Sargasso Sea
gtaactgctgagacagtttcacctggtcatcccgacaaaatcgcagattttatatctgataatgtattgacaaaagctttagaaaataatagttcgtcaagagtcgcagtagaaacttttcttacgggtacaaaaaaaggtggcttagttcttgttggaggagaaataagtgaaattgctaatatcacaacggaagacatagtcagtattgttaaagaagccttaaataaaacaataaaaacaagttttgaagattttaacttacagaatttgtcaatttttaatgagctgacaccgcagtctgaagaaatccgtgctgcagttgaagatgataaagatcaaggtgctggagaccagggaattatggttggttttgcaacaaataagactgaatcattcatgccaccaacatttgataaatcaagaaatatacaaaaagatatgtgggaacttcaaaattctaatgaatttttagatttagattctaaagtacaagttacaagtggaggagaaaaaacaaggattgttgtttcaactcaacaccataaagatatcgatatggaaaatcttcatgatgaagtttccaaaattgtttctaagcatgtttctggaaatttcgaattagatttaaatccatcgggctcttttatcaaaggtggaccagctggagatacaggcctaacaggaagaaaaatagtagttgactcatatggacctactgtgccggtaggtggcggagctttttcaggtaaagatccaagtaaagtggatcgatctgctgcttatgctgctaggcatttagctaaaaatattgtagccc

SEQ ID NO: 243110 - DNA, 589 bp, Unknown
  Bacterial polypeptide expressing nucleotide sequence isolated from the Sargasso Sea
tcaactcaacacgatgaagatgttacacaagatgaaattaaagaaggagtgatggaaaacatcattaagccaattgttcctcaagaatggatattagattctacaaagatatatatcaatccaacagggaagtttgtaattggtggtccggttggtgattgcggtcttactggaagaaaaattattgtagatacctatggcggtatggcaagacatggtggtggtgcattttcaggaaaagatccatcaaaagttgatagatcagcagcatatgcagcaagatatgtggctaaaaatatagttgcagctgggcttgcagattattgtgagattcaagtttcatatgcaattggagtagctaagcctacatcaattaatgtaaatacatttgatagcgaaaaagtatcaaaagatgctattgaaaaaatagttgaagaaaaatttgatcttaggcctaaaagtcttataaacatgcttgatctcaaaaggccaatatatcttccaacagccgcttatggtcattttggaaggactgatattgatctttcatgggagaatactgataaagcatcagaaatttcacaataaa

SEQ ID NO: 243111 - DNA, 866 bp, Unknown
  Bacterial polypeptide expressing nucleotide sequence isolated from the Sargasso Sea
tacgatacagatgaatatggttttaatggtgatacatgtgaatttacaaatcttgtattcgaacaatctcccgatatctctcagggcgttactgaaggtgaaggcgaaaacctagagcaaggtgctggagaccaaggtttaatgtttggttatgcatgtactgaaactgaatcactaatgcctcttccaatagatctttctcataggctggtaaaaaaacaagctgatgtaatgaaaagtaatgagttatcatggttaagaccagatgctaaaagccaggtaagtgcaatttactcagatgatggaaaaactatagaaggtttgtctgcaatagttctttctacacaacatgacgaagacgtcagtcaagaagaaatcaaagaaggtgttatggaaaagattattaaaccaatagtacctgaagaatggattttagattcaacaaaaatctatatcaatccaactggaaaatttgttattggtggtcctgtaggggactgcggtcttactggaagaaaaattattgttgatacttatggaggaatggcaagacatggtggtggtgctttctctgggaaagatccttctaaagtagaccgctctgcagcatatgctgctagatatgtagcaaaaaatattgttgctgccggtctggctgattactgcgaaatacaagtttcatatgcaattggagttgcaaaaccaacttcaataaatgtaaatacatttaacagtgaaaaaatatctaaagaagctattgaaaaaattgttgaagataaatttgatttaaggcctaagagtttaattaatatgcttgatttagaaaggcctatttatcttccaactgctgcttacggacactttgg

SEQ ID NO: 243112 - DNA, 305 bp, Unknown
  Bacterial polypeptide expressing nucleotide sequence isolated from the Sargasso Sea
aatgaaaaaaaattttttatttacaagtgagtcagtttccgagggtcatcctgataaagtttgtgacaggatttcagatatggtagttgacacatatttaggagcagagtcacaatcaagagtagcatgtgaaacattaacaacgacaaataaagttgttctcgcaggtgaagtgagaggaccagaaatcaatagagatgagctgattcaaaaagtaagaggttgcataaaagatattggatacgatcaagaaggatttacatggagagatgcaacaagtgtagagtgtcatcttcattcacaat

SEQ ID NO: 243113 - DNA, 673 bp, Unknown
  Bacterial polypeptide expressing nucleotide sequence isolated from the Sargasso Sea
tttgtcaaaatatttatttacatctgagtcagttactgaaggtcatccagataaggtttgtgatgcaatttctgatgcaattttggataatttgctatcacaagatcaggagtctcatgtagcttgtgaaacattagcgacaaatggacttgtagtagtttcaggagaagttaggtcagctggttctttggatatcccaagcattgtaaaaaatactttgtctgatattggttatactgatgaagctagaggcatggataataattctgttgagattaaagaaataattcatgagcaaagtcccgagattgcgcaaggtgttgattcagaagacatatcagagcaaggagcaggcgatcaaggtctgatgtttggttttgcatgtgaagagactgaagagttgatgccattaccgatacaaatttctcaaagattaactgaaatgctagcaaaagtaagaaaagatagtactcttccctggcttagacctgatggtaaatctcaagttactgttgagtacgacggttttaaacctgtgagagtaacaaaagttgtaattgcaactcaacatgacgatatgcttgaaaaatatggtactgaagatgaagagttaaattttgtaaaaaaagaagttattgatcatattattattcctgtattaaaaaattatgac

SEQ ID NO: 243114 - DNA, 871 bp, Unknown
  Bacterial polypeptide expressing nucleotide sequence isolated from the Sargasso Sea
attgggtaaacaatctcaagatattgcacaaggagttaatgaaggtgaaggagaagatctagaacagggagctggagatcaaggtttgatgtttggatatgccacaaatgaaacagaagttttaatgcccgctccaataacttactcgcatagattagttgaacaacaggcttttataagaaaaagcaataaattgtcatggttaagaccagacgccaaaagccaagtcagttttgtctatggagaagatggaaaacctcagtctatatcagccgttgtgctttcaacacaacatgatcctgatgtttctcaagaagaccttaaagaaggagtaatggaagaaatcatcaagcccatattgccttccaattggttaaacgagcatacaaaatatttcataaatcctactggtagatttgaaataggtggccccgttggagattgtggtctcacaggaaggaaaattattgttgatacctacggagggatggctaggcatgggggtggagcgttttcagggaaagacccatcaaaagttgatagatcagcagcctatgcaggcaggtatgtggctaaaaatattgttgctgcaggtctggcagatagatgtgaaatacaagtatcttatgcaataggagtagcagaaccaacttccattagtgtgaatacctttggaacatcaaagatagacgaagaaaaaatttctgatctagtaagagaacatttcgacctgaggccaagacagttaattaatatgcttgacttgaaaagacctatctatcagtcaacggctgcttatggtcattttggaagagaagagtcggcatttacatgggaaaaaacagataaagtagaagctttaaaaggataa

SEQ ID NO: 243115 - DNA, 452 bp, Unknown
  Bacterial polypeptide expressing nucleotide sequence isolated from the Sargasso Sea
tatgaatagatcttatttatttactagtgaatcagtttctgaaggtcatccagataaagtttgtgatcggatttcagatatggttgttgatacttatttgtcatccggagatccacaaacacgagttgcttgtgaaacattgactacaaccaataaagtagttttagctggagaagttagagggccatcaatatcaaaagatcaaattatatctcaagtaagagattgtattaaagacattggttatgaacaagaaggatttcattggaagaattgtgatattgaaagttttttacatgaacaatctgcagatatagccatgggggttgattcaggaagtaataaagatgaaggtgcaggagaccaaggcatcatgtttggttatgcatgtaaagatactgaaattttaatgccagctcccattcattactctcatcaaatattacataaaa

SEQ ID NO: 243116 - DNA, 870 bp, Unknown
  Bacterial polypeptide expressing nucleotide sequence isolated from the Sargasso Sea
caatcagcagatatagcaatgggtgttgactcgaatgaaaaaaaggatgatggagcaggagaccagggaataatgttcggttatgcttgtaaagaaactgatgatttaatgccggctcctattcatttttcccataaaattttaagattgatggctgaagatagaaaaactggaaaactgattggaatcgaaccggactcaaagagtcaagttacaatgttgtatgagaatggaattccaaaagatgttacttctgtagtaatatctactcagcattctgaaacagtcaatcaaaaaaaagtaaaagagttaattcttccttatattgagaagtctattcctaaaaatctattaagtggtttaaaagaaaataatatttatataaatcctactgggcagttcataataggcggaccagacggtgatacgggattaactggtagaaaaataatagttgatacttatggtggtgcttctcctcatggtggaggagcattttctggaaaagaccctactaaggttgaccggtcagcagcgtatgttgcgagatatattgcaaaaaatattgttgctgctggtgtttctaataagtgcttgattcaactatcttatgcaataggtgtctccaaacctctatcaatatatttaaaactatctgaaaaagatgaagacaaaacccatgagctcataaaaataataaataataattttgatttatctccaagaggaattagagagcttcttggtctcaataaacctatttataagataacagctgcctatggacattttggaagaaaaagtaatgaaaaaggtgaattttcatgggaaaaaactgacaaaacacaaatatttaaactgttatcttga

SEQ ID NO: 243117 - DNA, 464 bp, Unknown
  Bacterial polypeptide expressing nucleotide sequence isolated from the Sargasso Sea
aatgaaaaagaattacttatttactagcgagtcagtctcagaaggtcatccagataaagtttgtgatagaatttctgacatggttgtagacacatatttaggcgctgagcctcaatcaagagtagcttgtgagactttaacaacaactaataaggtggtgcttgctggagaagttagaggtccagaaataaaaaaagatgatttaattgaaaaggtaagacactgcataaaagatattggttatgaccaggatggatttacttggaaggaggctactaagattgaaagtcatctacacgcacaatcagccgacatagcaatgggtgtcgactcgtccggtaataaagatgagggggcaggagatcaagggattatgtttggctatgcgtgtaatgaaactgatgttttaatgcctgcaccaatccattattcacataaaattttaaggttgatggccgcagata

SEQ ID NO: 243118 - DNA, 409 bp, Unknown
  Bacterial polypeptide expressing nucleotide sequence isolated from the Sargasso Sea
atgaaaaataacaaatatttatttacaagcgagtcagtttctgaaggacatccagataaagtctgtgacagaatttctgatatggttgttgactcttatttatctaaagacccagtttcaagagttgcttgtgagacactaaccacgactaacaaagtagttcttgccggagaaacaagaggaccaaagattaagaaagaagaaataatttctaaagttagagattgcattaaagatataggttatgatcaagaaggttttagttggaaaactgctaatgttgaaacattccttcatgaacaatcaacagatattgcaatgggtgtcgactcgaaagataataaagatgaaggggcaggtgatcagggtataatgtttgggtacgcttgcaatgaaactgatgaattaa

SEQ ID NO: 243119 - DNA, 623 bp, Unknown
  Bacterial polypeptide expressing nucleotide sequence isolated from the Sargasso Sea
aaaagctgtaaaatcagtagtaatttctacacaacattccaaagatgttaacttagctcaggtaaaagaactttgtatgccatacattgaaagatctataccaaaaaatttattaggaaatcttgatgaaaacgaaatatatattaatccaacgggaaattttgtaattggcggaccagatggagacagtggattaactggaagaaaaataattgttgacacatatggtggtgctgcacctcatggtggtggtgcattttctggtaaagatccaacaaaagttgatagatcagcagcgtatgcatcacgatatttggctaaaaatattgtggcgtcaaaaattgctgacaaatgcttaatacaattagcttatgcaatcggtgtatctaaaccattatccatctatgttgatttgttttctaatgatgaggaaaaaaacaaacatgtagaaaaattgattaatgaaaattttgatttaagtcctagaggcataagagaaatgcttggtttaaataaacctatttatgaaaagtcagctgcttatggtcattttggtagagaaccagagtcaaatggtgcattttcatgggaaaacactgataaagcttcagtatttaactagt

SEQ ID NO: 243120 - DNA, 842 bp, Unknown
  Bacterial polypeptide expressing nucleotide sequence isolated from the Sargasso Sea
tgttctagctggtgaggtgagaggaccagaaattaaaaaagatgaattaattgaaaaagtaagaaattgtataaaagatattggttatgaccaagaaggatttacttggaaagaagctacaaaaattgaaagtcacttacattcccaatcagctgatattgctatgggtgtagattcctctggcaacaaagatgaaggagctggagatcaaggtatcatgtttggatacgcttgtaatgaaacggatgttttaatgccagcaccaattcattattctcataaaatcttaagattaatggctgaagatagaaaatctggaaaattaaaaaatattgaaccagattcaaaaagtcaggtaacattcgagtatgttgatggaaaaccatcaaaagtaaaatctgtagttatatcttcacagcattcaccagatgttaatcaatcgcaagtcagagatttacttagaccttatatgttaaaatctattcctgagaattttcttgatggttttaatgaggacgagttttatgtaaatccgacgggaaattttgtaattggtgggccagatggagactgtggtttgactggtagaaaaattattgttgatacttatggtggagcagcacctcatggtggtggagctttctctggaaaagatccaactaaagttgatagatcagcagcttatgcggcaaggtacattgctaaaaatgttgttggatctaaaattgttgagaaatgtttaattcagttagcttatgcaattggtgtatcaaaacctttatctatttatgtcgatttgtttgataacgatttagataaaaataaatttgttgtagaaaaaa

SEQ ID NO: 243121 - DNA, 631 bp, Unknown
  Bacterial polypeptide expressing nucleotide sequence isolated from the Sargasso Sea
catgcccgctgctgtaacatcagtagttatttctacacaacattcaaaagatgtcagcttagcccaagttaaagaactatgtatgccttatatagagagatctatccctaaaaacttattgggtagtcttgatgaaaaagagatttatattaaccctaccggaaactttgtaattggtggcccagatggagacagtggtttaaccggaagaaaaattattgttgacacatatggtggagccgcacctcatggtgggggtgcattttcaggaaaagatcctacaaaagttgatagatcagctgcttatgcatcaagatatttagctaagaatgttgtggcatcaaaaattgcagacaaatgtttaattcaattagcttacgctattggagtgtccaaaccactatcaatttatgtagatttatttgataatgatgaagaaaagaatttgcatgtcgaaaaactaataaaagaaaactttgatttaagtccaagaggaattagagaaatgctaggtttaaataaacctatttatgaaaaaactgctgcctacggtcactttgggagaattcctgagaatgatggctctttttcttgggaaaaaacagataaatctggagtttttagtaagtaa

SEQ ID NO: 243122 - DNA, 823 bp, Unknown
  Bacterial polypeptide expressing nucleotide sequence isolated from the Sargasso Sea
tcagagtgttgatattgcaagaggtgttgataagggtggagcaggtgatcaaggaatgatgtttggttatgcatgcaatgaaaatgattctttaatgccaagtgcaatttattacagccataaaattactaaagcactctcaaatgcgagacattctggtcaagaatggatgggtccagatggaaaagcacaagtaacggtcgagtacagtagtgttaataaacctgtaagaatttcaaacgttatttgtagtacgcaacatagtaaagatttgaaagataatcctgatgaagttaaaaaaagagtagaaaaaattataaaaccggaattgaatgatatgttggataaaaatactgtctttaaagtgaacccaactggtaattttgtaacaggtggaccagatggtgatactggagtcactggaagaaaaatcattgttgatacatatggtggctatgcacctcatggtggaggagcatttagcggaaaagactgtacaaaagtagatagaagtggcgcatacatggcaagatatttagctaaaaatattgtggcatcaggagtttcacaaaatgctactattcaacttagttatgctataggtgtcaaagagcctgtatcgctatacgtttactgtgatggtaaagttagaaatgatatatcagattggatttataaaaatattgatttgacacctttaggaatcattagaaaatttaatctatttaaattagaccttactgaaacaacaaactatggccattttggtaaaaaacatcttgcttgggaaaatactgatttagctaatcaattaaacttttaa

SEQ ID NO: 243123 - DNA, 412 bp, Unknown
  Bacterial polypeptide expressing nucleotide sequence isolated from the Sargasso Sea
tgtagatacttatggaggagcagctccacatggtggaggagctttttcaggaaaagatccaacgaaagttgacagatcagcagcttatgcttcaagatatttagcaaaaaatgttgtagcctcaaaggtagctgacaaatgtttaattcagcttgcttatgcaattggagtatcaaaacctttatcaatttatgtagatctttttgataatgatgaagaaaaaaatagacacgtggaaaaattaattaatgataattttgacttaagtcctagaggaattagagaaatgctaggtttaaataaggcaatatatgaaaaaaccgcagcttatggccactttggaagagatccgggttcagatggatcattttcatgggaaaaaactgataaagcaggtgtatttaagaagtaa

SEQ ID NO: 243124 - DNA, 883 bp, Unknown
  Bacterial polypeptide expressing nucleotide sequence isolated from the Sargasso Sea
atggaaacaatggtttcatcgaatatggtaaccattgctggagaagttaaaactgacttaatggacaataaagaaaccatagaagaattagttaggcaaacggtcaaagatattggttatgaacaagaaaactttcattgggatacattatcttttaaaaacttaattcataatcaaagtatcgatattgctagaggtaccgataacttcggtgcaggagatcaaggaatgatgtttggttatgcatgtaatgaaaatgattctttaatgccaagtgcgatcttctatagccataagattacaaaagcactttcaactgcaagacatagtggacaagactggatgggtcctgatggaaaagcacaagtaacagttgaatatagcaatgtgaatgaacctgtaagaatatcaaacgttatttgcagtacccaacatagtaaagatttgaaagatagtcctggtgaagttcaaaaaagagtagaagaaattatcaagccagaattgaataatatgttcgatgacaatactatttttcaagttaatccaaccggtaattttgtaacaggtggaccagatggcgatactggaattacaggcagaaaaattattgttgatacatatggtggctatgcacctcatggtggaggagcatttagcggaaaagactgtacaaaagtggatagaagtggcgcatacatggcaagatatttagctaaaaatattgttgcatcaggaatttcatacaatgctactattcaacttagttatgctataggtgttaaagagcctgtatcgctatatgtatattgtgacggtagagttagaaatgatatatctgaatggatttataaaaatattgatttgacacctttaggtattatta

SEQ ID NO: 243125 - DNA, 400 bp, Unknown
  Bacterial polypeptide expressing nucleotide sequence isolated from the Sargasso Sea
aatgagtaatttaaaaaattttcttttcactagcgagtctgtctccgaaggtcatccagacaaagtatctgatagaatttctgatatggttgtcgatagttatatttctggagatccatattctagagttgcctgtgaaacattaactacaacaaataaagttgttttagcgggtgaagtaagaggaccagaaataaaaaaagatgaattaattgaaaaagtaagaaattgcataaaagatattggttatgaccaagaaggatttacttggaaagaagctacaaaaattgaaagtcatttacattcccaatcaactgatattgctatgggtgtagactcatctggtaacaaagatgaaggagctggagatcaaggtatcatgtttggatacgcatgtaat

SEQ ID NO: 243126 - DNA, 813 bp, Unknown
  Bacterial polypeptide expressing nucleotide sequence isolated from the Sargasso Sea
gagctggagatcaaggtattatgtttggatacgcgtgtaatgaaacagatgttttaatgccagcacctatacattattcacataaaattttaagattaatggctgaagatagaaaatctgggaagttaaaaaatattgaaccagattccaagagtcaggtaacattcgagtatgttgatggaaaaccttcaaaagtcaaatctgtagttatctcttcacagcattcaccagatgttaatcaatcgcaagtcagagatttacttagaccttatatgttaaaatctattcctgagaattttcttgatggttttaatgaggatgagttttatgtaaatccgacaggaaattttgtaattggtggaccagatggagattgtggtttgacaggaagaaaaattattgttgatacttatggtggagcagcacctcatggtggtggagctttctctggaaaagatccaaccaaagttgatagatcagcagcttatgcagcaagatatatcgctaaaaatgttgtaggttcaaaaattgcagaaaaatgtttaattcaattagcctacgctattggtgtatcaaaacctctgtctatttacgttgatttatttgataacgacctagataaaaataaatttgttgtaaataagattaaagaaaattttgatttgagccctagaggtatcagagaaatgttaaatttaaataaaccaatatatgaaaaaacagcatcctatggtcattttggtagatcacctgaggaaaatggttcattttcatgggaaaaaactaataaaaccagcgttttttcaaaatagt

SEQ ID NO: 243127 - DNA, 532 bp, Unknown
  Bacterial polypeptide expressing nucleotide sequence isolated from the Sargasso Sea
aatgagtaatcttaaaaattatcttttcactagtgagtcagtttctgaaggtcatccagacaaagtatcagataggatttcagatatggtagttgacagttatctttcaaaagatcctttttcaagagtggcatgtgaaactctcacaacaactaacaaagttgtattagctggtgaaattagaggtcctgaaattaaaaaagattctttaatagaaagtgtgagaaaatgcatcaaagatattggatatgatcaagagggttttacttggaaagaagcaactaagattgaatgtcatcttcactctcaatcaacagacatagcaatgggagttgattcttctggaaataaagatgagggagctggtgatcaaggtattatgtttggttatgcttgtaatgaaactgaggaattaatgccagcacctatccattattcacataaaattttaagattaatggcagaagataggaaatctggtaatttgaaaaacattgagccagattccaaaagtcaggttacatttgaatat

SEQ ID NO: 243128 - DNA, 685 bp, Unknown
  Bacterial polypeptide expressing nucleotide sequence isolated from the Sargasso Sea
gatacttatttgtcatctggtgacccccaaacacgtgttgcttgtgagactttgactaccactaataaagtagttttagctggagaagtaaggggcccatcagtttctaaagatcagattatatctcaagttagagattgtattaaagatattggttatgaacaagatggctttcactggcagaattgtgatattgaaagctttcttcatgagcagtcagctgatattgctatgggtgttgattctggcagcaacaaagatgagggcgcaggcgatcaaggaattatgtttggttttgcttgtaaagatacagaaacattaatgccagctcctatacattattctcatcaaattttatataaaatggcacaagcccgtaaagatggatctgcatctggtttagaacctgattcaaagagccaagttacaatgctttatgaaaacggaaaaccaagcaaagttacttctttagtaatttcttcacaacacaaagaaggtttatctcctgaggatgtaaaagaaattgttaaaccttatgtatatgagtgtatacctaatcatttgttagaagatcttaaagatgaagaattttatgttaatccaacaggtaattttgtaattggaggccctgatggtgactctggtttaactggccgtaaaataattgttgatacatatggtggtg

SEQ ID NO: 243129 - DNA, 778 bp, Unknown
  Bacterial polypeptide expressing nucleotide sequence isolated from the Sargasso Sea
gttgacggccaagcgcaaggacggaaccctcgactacctccgcccggacggcaagacgcaggtgacgatccgttacgacgaggacgatcgtccgacgggtatcgacacgatcgtcgtcagcagccagcacgccgctgacgtggatcttgacgcaacgctgattcccgatgtccggcgtcatgtagtggttccgattttggaaacgttcgatatcgatagccgtgactaccgcctgctcgtcaatccgacagggcgattcgaagtcggcggtccgatgggcgacgctggtctcaccggacgaaagatcatcgtcgacacctacggtggcatggcgcgtcacggtggcggggccttctccggtaaggacccgtcgaaggtggaccggtcggccacgtacgccatgcgctgggtggccaagaacgtggtggctgcgggtctcgcctctcggtgtgaggtgcaggttgcctacgccatcggcgtctcacatcctgtcggcgttttcgtgcagacttttggcacgggagtcatgagcgacgagcagattcaagaagcagtgttggcggtcttcgatctgcgccccgcggcgatcatccgcgacctcggtctcctgcgcccgatctaccgcaccaccagcgcctacggtcatttcgggcgtccgcaaggcgtcaaccagctgctcgacgccgatgaaccatcccggcggaccgaggttgggcctacgttcacgtgggagagcaccgatcgggcggcggatctccgcacagcagcgggtgtctag

SEQ ID NO: 243130 - DNA, 500 bp, Unknown
  Bacterial polypeptide expressing nucleotide sequence isolated from the Sargasso Sea
tgaagatgaattttacgtaaatccaacaggtaattttgttattggtgggccagatggagattgtggattaactggaagaaaaattatagtggacacatatggtggagcagcacctcatggtggtggggctttttctgggaaagatccaaccaaagtagatagatccgcagcttatgcagcaagatatattgccaagaatgtagttggatcaaaaatttcagaaaaatgtttaatccaattagcctatgcaattggtgtatctaaacctttgtctatatacgtagatttgtttgataatgatttagataaaaataaatttgtagtcgaaatgattaaagaaaattttgatttaagccccagaggtatcagagaaatgttaaatttaaataaacctatatatgaaaaaacagcagcctatggtcattttggtagagcttctgagaaaaatggttcattttcatgggaaaaaacagacaaaacaaacgttttttctaaatagt

SEQ ID NO: 243131 - DNA, 727 bp, Unknown
  Bacterial polypeptide expressing nucleotide sequence isolated from the Sargasso Sea
atgaaaaaaaattttttatttactagtgagtcagtttcagaaggtcatccagataaagtttgtgatagaatatcagatatggttgtagatagttacttaggtgcagaaccacaatcaagagtagcttgtgaaactttaacaacaacaaataaggtagttttagctggagaggtaagaggaccagaaataaaaaaagaagatttaattcaaaaagtaagagattgcattaaagacattggttacgaccaagatggctttagctggaaagatactactaaaattgaaactcatttacacgctcagtcagcagatatagctatgggtgtagactcatctggaaataaagatgaaggtgctggagatcagggaattatgtttggatatgcatgcaatgaaactgatgttctaatgccagctccaattcattactcacatagaattttaagattgatggctgaggatagaaaatctggaaagctaaaaggaatagaaccagattcaaaaagtcaaattacaattgaatataaagatggtttacctaatgctgtaaaatcagtggtgatatctacgcaacattctaaagatgttgatcttgcacgggttaaagaactttgcatgccatatattgagagatctattccaaaaaatttattaggaaatctcgacgaaaaggagatttatataaatcctacaggtaattttgtaattggtggaccagaatggtgac

SEQ ID NO: 243132 - DNA, 837 bp, Unknown
  Bacterial polypeptide expressing nucleotide sequence isolated from the Sargasso Sea
tgttgtagacacatttttagcttctgagccacaggcaagagtcgcttgtgaaacattaacaacaactaataaagttgtactagcaggagaagtaagaggaccagagctcaataaagatgaattgatttcaaaagttagagattgcataaaagatattggttatgaccaggatggattttcatggaaagaacaaactaaaattgaaacatatttacattcacaatcagccgatattgccatgggtgtagactcatctggaaataaagatgaaggagctggagaccagggaattatgtttggctatgcatgcaacgaaacagatgttttgatgccagccccaattcattattcacataaaattttaagattaatggctgaggatagaaaatcaggaaagttaaatggaatagagccagattcaaaaagtcaaattacaattgaatataaaaatggtatgcctgcagctgtgacatcggtagttatttccacacaacattcaaaagatgttaacttagctaaagttaaagaactttgcatgccctatatagaaagatctgtacctaaaaatttactaggaagtcttgatgaaaaagagatttatattaatcctactggaaatttcgtaattggaggcccagatggagatagtggtttaacaggcagaaaaattattgttgatacatatggaggagctgcaccacatggaggaggtgcgttttcagggaaagatccaacaaaagtagatagatcagctgcttatgcatcaagatatttggcaaaaaatgttgttgcttcaaaaattgctgacaaatgtttaatacagttggcctatgcaat

SEQ ID NO: 243133 - DNA, 445 bp, Unknown
  Bacterial polypeptide expressing nucleotide sequence isolated from the Sargasso Sea
atggagacactggttaactggtcgaaagataattgttgatacatatggtggagctgctccacatggtggaggcgcgttttcgggaaaagatcctacaaaagttgatagatcagcagcttatgcgtctagatacctagctaaaaatattgttgccgcaggtatttctgaaaaatgtctaattcaattagcatatgcaataggtgtgtcaaaacctttatctatttttattaaattagctaatggagatgaagaaaaaattagtagggtaaaaaaaatcatagaagacaattttaatttgtcaccaagaggtatcagagaaatgttaaagttaaataacccaatttatgaagttacttcagcttacggccactttggtagaaaggccacaaataagggtgaatttacttgggaaaaaacagataaaacagaattatttaaattgtaa

SEQ ID NO: 243134 - DNA, 346 bp, Unknown
  Bacterial polypeptide expressing nucleotide sequence isolated from the Sargasso Sea
agttgacagatcagctgcttatgcatcaagatatttagcaaaaaacattgttgcatctaatatttcagataaatgtttaattcaattggcttatgcaatcggagtatcaaagcccttatcaatatatgtagatttgtttgataatgatgaagaaaagaatatgcatgtagaaaaacttattaaagagaattttgatttaactccaagaggtatcagagaaatgcttggtttaaataaagcaatatatgaaaaaacagcagcttatggacactttggaagagtgccagagagtgatggatcattttcatgggaaaaaactgataaatctggggtttttagcaagtaa

SEQ ID NO: 243135 - DNA, 691 bp, Unknown
  Bacterial polypeptide expressing nucleotide sequence isolated from the Sargasso Sea
aatgagtaatttaaaaaattatattttcacaagtgagtcagtttcagaaggccatccagataaagtgtctgataggatttcagatatggttgttgatagttatatttctggagatccatattctagagttgcttgcgaaacactaactacgacaaataaagttgttttagctggtgaagtaagaggaccagaaattaaaaaagatgaattaattgaaaaagtaagaaattgtataaaagatattggttatgaccaaaaaggatttacttggaaagaagctacaaaaattgaaagtcatttacattcgcaatcagctgatattgctatgggagtggactcatcaggaaataaagatgaaggagctggagatcaaggtattatgtttggatacgcatgtaatgaaacagatgttttaatgccagcaccaattcattactctcataaaattttaagattgatggcggaagacagaaagtcaggaaagttaaaaaatattgaaccagactcaaaaagccaagtaacatttgaatatgttgatggaaaaccttcaaaagtcaaatcagtcgttatatcatcacaacattcacctgatgttaatcaagcagaagttagggatttattaaggccttacatgcttaaatctattccagaaaattttctacagggttttgatgaagatgaattttacgta

SEQ ID NO: 243136 - DNA, 691 bp, Unknown
  Bacterial polypeptide expressing nucleotide sequence isolated from the Sargasso Sea
gaaattaaaagaaattgagccagactcaaaaagccaggtaacatttgagtacattgatggaaagcccgccaaaattaaatctgtagttatatcatctcaacattcttctagtattaatcagtcccaagttagagagcttttaagaccttatatgttaaaagctgttccagaaagttttcttgaaagttttaatgaggatgagttttatgtaaatcctactggaaattttgttattggtgggccagatggagactgtggattaacaggaagaaaaataattgttgacacttacggtggtgcagctccacatggtggtggtgctttttcaggaaaagacccaacaaaagttgatagatcagctgcttatgcagcgagatatatcgcaaaaaatgtagttgcatccaagatagcagacaaatgtttaatacagttatcttatgcaattggggtatctaaaccactgtcaatttatgttgatttgtttgatagtaacttagagaaaaataaatttgttgttgaaaaaataaaaagtaattttgatttaagtccaagaggtattagagaaatgttaaagttaaataacccaatttatgaaaaaacagctgcctatggtcattttggaagaaacccagaagatgatggttctttttcatgggaaaaaactgataaaatcagctttttttccaaatag

SEQ ID NO: 243137 - DNA, 547 bp, Unknown
  Bacterial polypeptide expressing nucleotide sequence isolated from the Sargasso Sea
tatgaaaagatcttttttatttacaagcgaatccgtatcagaaggtcatccagataaagtttgtgatagaatttctgatatggttgttgactcttatttatctaaggaccctttatcaagggttgcttgtgaaactttaacgactaccaacaaggttgttttagctggagagataagaggaccctctattactaaagaagaaattattactaaggtacgcgaatgcataaaagatataggttatgaacaagatggtttccactggcaacactctgatattgaatgtcatttacatgagcaatcttctgatattgctatgggtgtagattcaggtagtaacaaagatgaaggtgctggtgatcaaggaataatgtttggttttgcatgcagagatacagaagaattaatgcctgcccctattcattattctcatcaaatcttattaaaaatggctacttcaagaaagaaaggtcaatcaaaagaactagagcctgattcaaaaagtcaaattactatgctttatgaaaatggaaaaccttctaaggtt

SEQ ID NO: 243138 - DNA, 447 bp, Unknown
  Bacterial polypeptide expressing nucleotide sequence isolated from the Sargasso Sea
gagactctggtttaactggaagaaaaattatagttgatacatatggcggatcatctcctcatggtgggggcgcctttagtggaaaagatccaacaaaagttgataggtctgcagcttatatttctagatatatggcaaaaaatgttgttgctgcaaatttagctgaaaaatgtactattcaattatcctatgcaattggtgtttcagaacctctttcattgtatgtaaatacatcaaacactggtaaattatcagatgtagaattatcaaatatactaagaaaggaaatagacttaactccatctggtataagatcaaagctaggtttaaataatgctatttataccccatctgcttcatatggtcacttcggaagaattccagatgagattgtaaaaggctcttttacatgggaaaaaacagatttagttgataaaatttcataat

SEQ ID NO: 243139 - DNA, 472 bp, Unknown
  Bacterial polypeptide expressing nucleotide sequence isolated from the Sargasso Sea
aacccaacaggaaagtttgttattggaggtccagttggagattgtggtttaacaggcagaaaaattatagttgatacatatggtggaatggcaagacatggcggtggggcattttctggaaaagatccttctaaagtagatagatctgcagcatatgcagcaagatatgttgcaaaaaatattgtggccgcaggacttgctgattattgtgaaattcaggtttcatatgctattggagtagcaaaacctacatccattaacgtaaacacttttaacagtgagaaaatttcaaaagaagctatagaaagtattgtcgaggaaaaatttgaccttaggccaaagagtcttataaatatgcttgatctaaaaagacctatttatcttcccacagcagcttatgggcattttggaagaactgatatagatctttcatgggaaaaaactgataaagcttcagaaatttcacaataaa

SEQ ID NO: 243140 - DNA, 688 bp, Unknown
  Bacterial polypeptide expressing nucleotide sequence isolated from the Sargasso Sea
taaaaaatatttgaaccttgattcaaaaagccaaattactatagaatataaagatggaaaacctgcatcagttaaatcagttgttatttcaactcaacattctccagatgtaaatcaggctcaagtaagagatttggtaaaaccttacattgaaagatctattccaaaaaatcttgtgaatggattagatgaaaatgaaatttatgttaatccaacgggtaattttgttattggaggccctgatggagatagtggtttaactggaagaaagattatcgtagatacttatggtggagctgcacctcatggtgggggagctttttctggaaaggatcctactaaagttgataggtcagcagcgtatgcttcaagatatttggcaaagaatgtagttgcctcaaaaattgctgataagtgtttaattcaacttgcttatgcaataggggtatcaaaacctttatcaatctatgttgatctttttgataatgatgaagaaaaaaatagacatgttgaaaaactgattcaagaaaattttgatttaagcccaagaggtattagagagatgttaggtttaaacaaaccaatttatgaaaaaacttctgcttatggtcattttggtagagatccagagtctaatggttcattttcttgggaaaagactgataaatctgatgttttcaataagtaa

SEQ ID NO: 243141 - DNA, 371 bp, Unknown
  Bacterial polypeptide expressing nucleotide sequence isolated from the Sargasso Sea
aatgagtaatttaaaaaattatcttttcacaagcgagtctgtctctgaaggccatccagataaagtctctgataggatttcagatatggttgttgacagttttattttgggagatccatattctagagttgcgtgtgaaacattaactacaacaaataaagttgttttagctggtgaagtaaggggaccagaaatcagaaaagatgaattaattgaaaaagtaagaaattgtataagagatattggttatgaccaagaaggatttacgtggaaagaagctacaaaaattgaaagtcatttacattcacaatcagctgatatcgctatgggagtggattcatcaggaaataaagatgaaggagcaggagatc

SEQ ID NO: 243142 - DNA, 676 bp, Unknown
  Bacterial polypeptide expressing nucleotide sequence isolated from the Sargasso Sea
tgagccagattccaaaagtcaagttacgatgcagtatgaaaatggtgtacctaccaaagtaacttctgtggtaatatcaacgcaacactctgctgaagttaatcaggcccaagttaaagaaattgttagaccatatttagaaaagtctatcccaaaaaatttattagcagatttaagagatgaagaattttatgtaaatccaacaggacaatttataattggcggtcctgatggtgactctggtttaacaggaagaaaaattattgtagatacttatggtggcgcagcacctcatgggggaggagctttttctggaaaagatccgagtaaagtagacagatcggcagcttatgcagcaaggtatgtagctaaaaatgtagtcgcatcaaaaattgcaaacaaatgtttaattcaacttgcatatgcgattggagtttcaaaaccattatcgatatatgttgatctttttgatggagacgaagaaaagtctaaacatgttgaaaatttaataaaagaaaattttgatttaagtccaagagggatacgcgagatgttatctttaaataaacctatatatgagcgcacagcagcatatggtcattttggtagaaaatctggatctgacggatctttttcttgggaaaaaactgataaaactgcagtttttacaaagtaa

SEQ ID NO: 243143 - DNA, 833 bp, Unknown
  Bacterial polypeptide expressing nucleotide sequence isolated from the Sargasso Sea
cttgaacattcaagctattgcaagggatgttataaaaaaaattggctacaataagagtgaatatttatttgatggaaattcttgtggtattctttcatatttgcatgaacaatctaccgatattaatagaggtgtagataaaaaaaatatagaagatcagggtgcaggcgatcagggaattatgtttggatatgcaacaaatgaaactgaaaattatatgcctttgactcttgatttatcaaataaaatactcagagagttaactgagctcagaagagaaaacactcagattaaatacttaagacctgattcaaaatctcaagtcacaatacaatattctgatgataataaaccagaaaaaataaaaactattgtcatatcaactcagcatgatgattttgatgaagatgaaatcatgctaaaaaaaataaaatcagatatgatttctattttgattcctagaatattaaaaaagtatcccaattataaaaaattttttaacaaggaaatagagtattttataaatcctactggtaaatttgttattggcggaccgcatggtgactctggattaactggtagaaaaattattgttgatacgtatggtggcaagggagctcacggcggtggagccttttctggtaaagatcctagtaaagtagacaggagtgctgcatacgctgcgagacatattgcaaaaaatttagtagctgccggagtctcagatgaatgtttagtgcaaatttcttatgcaattggcgtagctgaaccaacagcgttatatgttaatacaaacggaacttcaaaaacagaattatctgatacagaaatct

SEQ ID NO: 243144 - DNA, 704 bp, Unknown
  Bacterial polypeptide expressing nucleotide sequence isolated from the Sargasso Sea
gttgtctaaggatgaatatatttttaccagtgaatctgtctccgagggtcatcccgataaggtttgcgatcaaatctctgatacagttttagatttgtttcttgctgaagataaatctagtcgagttgcttgcgaaactatggcgactacaaatcgcgtcatcttagcgggcgaagtaagaggaccctccaatataaccaatgatatcatcgccgaaaaaattcgggaaaaaattcgtgatataggctacgagcaaaatggatttcactgggaaaatgttgacatttcaattctcttgcatgaacaatccacagacatagccatgggcgtagacgcatccggtaataaagatgagggggctggcgatcaagggataatgtttggtcatgcctgtcgtgaaacagatgttcttatgcccgctcccattcagttctcccatctaatattaaaaaaaatggccgatgcaagaagaagtaatttaatcaaaggtttagggcctgactcaaaaagccaagtgagccttttatacgaaaacggtaaaccaattcgcgctacatcaatcgttatctccactcaacacgatgacgacttagagcaagcagagatacgagaaatagtacggcctttcgttgaacaaacgctaccaaagggttggatgtgtccagaaaacgagttttatgtaaatccaaccggggcgctttgtc

SEQ ID NO: 243145 - DNA, 853 bp, Unknown
  Bacterial polypeptide expressing nucleotide sequence isolated from the Sargasso Sea
aaagatgagttaatttctaaggttagagattgtattaaagatatcggttatgaccaggaaggttttacttataaggaagcaactaaaattgaatgtcatttacactctcaatcagcggatatagccataggagttgactcttcagggaacaaagatgagggcgctggagatcaaggaataatgtttggttatgcatgtaacgagaccgatgtacttatgcctgctccaattcatttttcccatagaattttaaggcttatggctgaggatagaaagtctggaaaactaaagggaatagagccagactcgaaaagtcaaattactatagaatataaagatggtgtaccaaaagctgtaaaatcagttgttatttctacacaacactcaaaagatgtgaacttagctcaagttaaagaactttgcatgccatatattgaaaaatctattccgaaaaacttacttgggaaccttgatgaaaatgaaatatatattaatcccactggaaattttgtaattggtggacctgatggagacagtggtttaactggaagaaaaataattgtagatacatatggtggcgcagcacctcatggtggtggagctttttctggaaaagatccaactaaagttgacagatctgcagcttatgcatctagatatttagcgaaaaatattgtggcatcaaaaattgcagataaatgtttgatacagttagcttatgcaataggagtatcaaaacctttatcaatatatgtagatttatttagcaatgatgaagaaaaaaatctacacgttgagaagcttatcaaagaaaatttcgatttaagtcctagaggaattagagaaatgctgg

SEQ ID NO: 243146 - DNA, 238 bp, Unknown
  Bacterial polypeptide expressing nucleotide sequence isolated from the Sargasso Sea
aatgagtgatttcatcttcacttctgagtccgtaactgaaggtcatcctgacaaaatatgtgatcaaataagcgacgctgttctagatgctttactaacagaagatccagaaagcagagttgcatgcgagactgttgttaatactggtctttgcttacttactggagaaataacttcaaaagcaaaagtcgattatataaaacttgttaggaacgtaattaaagaaattggatatgaa

SEQ ID NO: 243147 - DNA, 433 bp, Unknown
  Bacterial polypeptide expressing nucleotide sequence isolated from the Sargasso Sea
ggtggatatgcaagacacgggggaggggcattttctggtaaagaccctacaaaagtagatagatcagccgcttatgcagctcgttacgtagctaaaagcatagttaaggcaaaattagcaaaaaaagcagaagtacaattaagttatgcaattggggtagcaaaaccaatttccattctcgtggaaacttttgatacgggtgttatttctcaagccaatttgactgaactaattaaagagcactttgatttaagaccagcagcaataataaaagaatttaacttaagaaatctacctaaaaaaatgggaggtaaattttttagaaagactgcatcctatggacattttggaagaagagatcttgagctcccttgggaaaatgtagaagggaaagcagcccaattagaagaggcttccaaaatctttttataaa

SEQ ID NO: 243148 - DNA, 562 bp, Unknown
  Bacterial polypeptide expressing nucleotide sequence isolated from the Sargasso Sea
aaatattgttgagccttacattcgagaaatcttaccagaggaatggattggtcaagaaacagagtggcatattaatccaacaggaaagttcgtaattggtggcccagatggtgacgcaggcttgacaggtaggaagatcattgttgatacatatggaggagctgctccacatggtggtggagcattttctggaaaggatccaactaaggtcgatagatctgcagcttatgcggctaggtaccttgcaaagaatgtagtagcagcggggcttgcggaaaaatgctgtatccagttatcctatgccataggaattgataggcccctatcaatatttgctgaaacttatggaacaggaacagtctcacgtgaattaattgaaaaggcaataagtgaatctatggatctttctcctaaaggaataatagatcatttaaggttgagaaggccaatttattctagaacagcagcttatggacatttcggaagggatcctgaatctgacggtggttttagttgggagaagttggatttaattgacgaaattaaatcaaattcaaggtaa

SEQ ID NO: 243149 - DNA, 445 bp, Unknown
  Bacterial polypeptide expressing nucleotide sequence isolated from the Sargasso Sea
tggtgatacaggcttaacaggtagaaaaataattgtagatacctatggtggcgctgctccgcacggaggaggtgctttttcaggaaaagatccaactaaagtcgatagatctgcagcttatgcagctagatacttagcaaagaatattgtgtcatctggagcttcagataaatgtctcattcaactagcctacgcgattggtgtatctaagcctttatcaatttttattaaattaggaaacggcgatgaaaacaaagttgaaaaaataaataaaattataagtgaaaattttgatttatcaccgcgagggataagagaaatgttaaaattgaataatccaatttacgaggttacttctgcatacggacatttcggaagaaaacccaatgataacggtgaattttcatgggaaaaaactgacaaagctgatttatttaaattgtaa

SEQ ID NO: 243150 - DNA, 544 bp, Unknown
  Bacterial polypeptide expressing nucleotide sequence isolated from the Sargasso Sea
aatgaataatttaaaaaattacctttttacaagtgagtcagtatcagagggccatcctgataaagtttgtgatagaatttcagacatggtggtagacacttatctgagagccgaacctcaatctagagtagcttgtgaaactttgacaaccacaaataaagttgttcttgctggagaagtaagaggcccagaaattaaaaatgatgatttaattcaaaaggttagagaatgtattaaagatattgggtatgaccaaaaaggttttacttggagagaaccaacaaaaatagaaagtcatcttcactcccagtcagctgatattgcaatgggagttgacgcaacaggtaataaggatgaaggtgcgggagatcaaggtataatgtttggttatgcttgtagagaaactgatgtattaatgccagctccaatacatttttctcataaaattttaagattaatggctcaagatagaaaatctggtaaattaaaaaatattgagccagattcaaaaagtcaaataaccattgaatataaagatggtatt

SEQ ID NO: 243151 - DNA, 373 bp, Unknown
  Bacterial polypeptide expressing nucleotide sequence isolated from the Sargasso Sea
cccaccaaagtgtatcgctccgccgcctacgcagcgcgctacgtggccaagtgccttgttgcagccggactcgccgaacgggcggaggtgcagctgagttatgcgatcggcgtggccaaacccgtctcgatcctggtggaatcctttggcaccagcaaactggccaacgatgccctcacggccctggtggagaacaacttcgatctgcgccccggcgccatcatcgaaaccttcggcctgcgcaacctgccgcagcagcgcggtggacgcttctatcaggacacggcggcctacggccacttcggtcgcaacgacctgaaggctccctgggaagacgtggagaccaaagcagccgaattgcgcaaggcctgaa

SEQ ID NO: 243152 - DNA, 863 bp, Unknown
  Bacterial polypeptide expressing nucleotide sequence isolated from the Sargasso Sea
atcatctgatatagcaatgggtgtagattcttcaggcaataaagacgaaggagctggagatcaaggaataatgtttggttatgcatgcaatgaaacagaagagctaatgccagcacccattcattactcacacaaaattttaagactaatggctgaggatagaaagtctggtaaactcaaaaatattgaaccagactctaaaagtcaagttaccttcgagtatgttgatggaaaaccaacaaaagttaaatctgtagttatttcatcacaacattctgcagatgtaaatcaaacgcaggttagagatttattaagaccttatatgataaactctattccaaaaaattttttagacggtttcaatgaagaggagttttatgtaaatccaacaggcaattttgttattggagggcctgatggtgattgtggtctaacaggaagaaaaattatagttgatacttatggaggtgctgcacctcatggtgggggagcattttcaggaaaggatccaactaaagttgataggtcagcagcttatgcagcaaggtatattgcaaaaaatgtagttgcctcaaaaatcgctaacaaatgtttaattcaattagcatatgcaataggtgtatctaaaccgttatcaatttatgttgatttatttgataacgatgttgaaaaaaataaatttgttatagaaaaaattgatgataattttaacttaagcccaagaggaattagagaaatgttaaatctaaataaacctatatatgaaaaaacagctgcatatggtcattttggaagaagcccagaagaaaatggctctttttcttgggaaaaaacagacaaaataaaagcctttttaaaatagt

SEQ ID NO: 243153 - DNA, 874 bp, Unknown
  Bacterial polypeptide expressing nucleotide sequence isolated from the Sargasso Sea
agagatgttattaagtcaatcgggtatgagcaaaatactttccattggaataatgtcagtattgacattaatttgcatgctcagtctccggatattagcatgggagttgatgctgtaggtaaaaatgaagaaggtgcaggtgatcaaggaattatgtttggttacgctactgacgagacaaaagctctaatgcctttacctattcaacttagtcatcaattgctaaaaactataagagagaagaggcttaaatctcaaatagtaggtttaggtcctgatgctaaatcacaattttcaattatttatgaaggaaataaaccaataggtgttcattctatagttttatctatacaacatatcaattcatataagacagatgatattaaacaattagttttacctttagtagataatattttgcctgaaggatggaagtgtccagaagaaaatatatttattaaccctactggaagatttgaaataggaggccctcatggtgatgcaggacttacaggaaggaaaattgtagtagacacttatggagggatatgtccacatggtggtggtgcattctcaggaaaagatccatcgaaagtagataggtctggtgcctacgcagctcgttatatagcaaaaaatcttgtcgctgccggtatagcaaaaaaatgtacaatccaattagcttatgtcattgggattgctgacccagtttctatttttttagatactcatgaaacatcagatgtagaaaataccaaaatagttgatgtaataaaaaaagtatttgaactaaagccagctggtattagaaagatgctaaatttagctagacccatttatcaaaaaacatcttattttgggcattttgtagaga

SEQ ID NO: 243154 - DNA, 868 bp, Unknown
  Bacterial polypeptide expressing nucleotide sequence isolated from the Sargasso Sea
tatgaaatctaaagtatttacttctgaatctgtatccgaagggcatccagataagatatgtgatcaaatttctgatgccattttagatgctgttatattgttggataataaagctagggtcgcctgtgaaacatttgttaaatctgaggaagggtcagttggggttgtagttttgggaggcgaaattactacttctgcaaatatagactatgaaactatcgttagacaaactataaaagaaattggttatgattcagatgatttaggttttaattcaaaaactgttgagtttatcaataaaataggtttacagtcggcagatattgctcaaggtgtagatagggttaaagatgaagatcagggtgcaggtgatcaaggcttgatgtttgggtatgcaaataatgaaacagatgttttgatgccagctccaattacatattctcacaggttagttcataaattagctcaattaagaaaagcaggtgatgttaactggctaagacccgatgcaaaaagtcaagtcactataaaatacgataatggtaaaattcattctattgatacagttgtcatttcatctcagcattctccgaatgtaagccaaaaagaaattaaggattatatttttgagacagtgatgaaagacgttttacctttaccatatcttacaaaagatacaaaaatttatatcaatccaactggttcttttgaaataggtggaccagttggagattgcggtcttacaggaaggaaaataattgtggatacttatggcggtatggcaagacatggaggaggagctttttcaggaaaagatccttcaaaagttgacagatcagcagcatatgctgcaaggtacgttgcaaaa

SEQ ID NO: 243155 - DNA, 775 bp, Unknown
  Bacterial polypeptide expressing nucleotide sequence isolated from the Sargasso Sea
ttggcaaaatatttattcacatccgagtcagtaacagagggtcatccagataaagtttgtgatgcaatatctgatgctatacttgatagtttattatcccaagacaaggaatctcatgtagcctgtgaaactcttgcaacaaatggtttagtggttgtttctggagaggtcaggtcatctgggtcgcttgatgtagagagtattgtaaaaaccaccttagaagacataggatacactgatgaagcaagaggtatggatagtgataatattgaaattcgctctattattcatgagcagagtcctgaaattgctcaaggtgtggactcagatgatttatcagagcagggcgcaggtgatcagggtttaatgtttggttttgcatgcaaagagactgaggagctaatgcctcttccgattcaaatagcccagcgtctaactgaaaaattagcaagaattagaaaagatggaactcttccttggttgaggccagatggaaagtcacaggtcactgttgagtatgatgggtttacaccagtcagggtaacaaaggtggtaattgcaacgcagcatgacgatatgcttgaagaatatggctctgaagaagatgagttaaaatttgtaaaaaaagaggtaattgatcacatcattattccagtcttggatagctatggtattccctatgagaatgagtttattgttaatggtacaggaagatttgtatatggtggtccagcagctgacacggggcttacgggaaggaagatcattgttgata

SEQ ID NO: 243156 - DNA, 895 bp, Unknown
  Bacterial polypeptide expressing nucleotide sequence isolated from the Sargasso Sea
atggttgtagatacatatttggctgccgaaccccaatcaagagttgcttgtgaaactttaacaacaacaaacaaagttgtcttagctggtgaagtaagaggtccagaaattaaaaaagaagatttaatagaaaaagtgaggcattgtattaaagatattggttacgaccaagaaggtttcacctggaaagaagcaacctcagttgaaagtcatttacatgcacaatctgctgatattgctatgggcgtagactcttcaggaaataaagatgaaggcgctggtgaccaaggaattatgtttggttatgcttgcaacgaaactgatgttcttatgccagcaccaatacattactcccataaaatattaaggcttatggcggaagatagaaaatctggaaaattaaaaaatatagaaccagactcaaaaagccaaataacaatcgaatataaagatggaaagccatcatcagtaaaatcagtagttatatcaactcaacactcgcctgatgtaaatcaagctcaagttagagatttagttaaaccttatattcaaagatcaattccaaaagaattattaagttctttagatgaaaatgaaatttatgtaaacccaacaggaaattttgttattgggggccctgatggcgatagtggtttgaccggtagaaaaattattgttgatacatatggtggagctgccccacatggtggaggagcattttctgggaaagatcctacaaaggtcgatagatcagctgcttacgcatccagatatttggcaaaaaatgttgtagcatctaaaattgctgacaaatgtttaattcaacttgcttatgcaataggagtatcaaaacctttatcaatttacgtagatttatttgataatgatgatgaaa

SEQ ID NO: 243157 - DNA, 682 bp, Unknown
  Bacterial polypeptide expressing nucleotide sequence isolated from the Sargasso Sea
aatgacaaaaaattatttatttacatccgaatctgttaccgaaggtcatccagacaaagtttgtgatatgatatcagattcaattttagatgaatatctaaaaggtgatcctgattcacgtgttgcagttgagacaatcactacaactaattttgtaggagtagcaggagaggtaacatcaaaatcaagttttgatattgagagcgttataagaaaaacaattacagatattggatatgacaatccagatctaaaatttgattcacattcttgtgaggttatgattaaattagatccacagagtccacatatttcacaaggagttacagctaacgatgagaaagaacaaggtgcaggagatcagggattaatgtttggatatgctactaatgaaaccgaggaattaatgccattaccaatacttttggcacataagttaacaaagaaattaactgatgttagaaaaagtaatgaattaacatgggtaagaccagatggtaaatcacaggtttcagtaagatatgaagataacaaaccacaagcaattgaggcaattgttgtttcaacacaacattctccagaaataactaatgaagaaattacatcacaattaatcgagcatgtcatcaaaccagtgtgtggtaatctttggaatgataacatcaagattcatgtaaatcca

SEQ ID NO: 243158 - DNA, 795 bp, Unknown
  Bacterial polypeptide expressing nucleotide sequence isolated from the Sargasso Sea
tatgaataaatacacttttacatctgagtcagtatctgagggtcatccagataaggtttgcgatgcaatatcagatgcgattttagatgaatacttaaatcaagacgccaattcaagagtcgcatgcgagacactggcaaccactggaacagtttttgtttcaggagaagtaacctcagctggcactgtagacgttcaagcaatagttaagaataccttagatgatattgggtataatgatcaggcgtatggtatggatgcgaaaagtgttaaggtaatttctatgcttgataaacaaagcccagaaattgctcagggtgtaaatgaagggtctggattgcatgatgagcagggagcaggtgatcaaggtttaatgtttggctttgcctgtaatgagacaaaagaactgatgccgcttcctattcacctttcccatcggcttgttgagaaaatgactaatcatagaaaaagcggtaagattccatggcttagaccagatagcaaatctcaagtttcagtttcttatgaagatgataagcctatttccatttctaaagtcgttattgctacccagcacgatgatatgctagataaatttgaagatgaatctgaagaacataaatttgtagaaaaagaaataatcgatcatgtcattaaaccggttctagatgaatcaggttttccttataatgatgattttatagttaacggtacgggccgctttgtctttggtggtccagaagctgatactggcctaactggaagaaaaattattgtcgatacatatggtggata

SEQ ID NO: 243159 - DNA, 684 bp, Unknown
  Bacterial polypeptide expressing nucleotide sequence isolated from the Sargasso Sea
aatgagtagatttttatttacatctgaatctgttactgaaggacatccagataaagcctgtgatgcattttcagatgctattttggataatatattatctaatgataatgaggcacatgttgcatgtgaatcactggctacaaaaggtttagtggttatttctggagaaataagaactactgctgatgttgatgttgataaaattgttaaagatacaataaaagaaataggatataacaaagcaaatagtggaatagatcccgatgatgttgaagttctatctaaactgcatgaacaaagcactgaaattgctcaaggtgttgattcagaggacgtatcagagcaaggggcaggagaccaaggacttatgtttggctttgcttgcagagaaacgcccgaattaatgccattaccaattcagatagcacataggctgactgaaagattaacccagttaaggaaagatgaaaccttgccttggcttaggcctgatggtaagtcacaagtttcagtctcctatgaaaatggcaatcctgtatctatagataaaacagtaattgcaactcagcatgatgatatgcttaacaagtatgggaccgagaataaagaattagacttcgtaaaagaagaagtagttgagcatattataaggccagtccttgattcttatggttatgcttataa

SEQ ID NO: 243160 - DNA, 828 bp, Unknown
  Bacterial polypeptide expressing nucleotide sequence isolated from the Sargasso Sea
gtgaaggtctggatttaaatcaaggtgctggcgatcagggtttgatgtttggttttgcctgtaacgagacagatgtgttgatgcctttccctatcacttattctcatcgtctggtgaaaagacaggcagaagtgcgtaaaaaaggtgttttgccctggttacggcctgacgcaaagtcacaagttaccgttgcttatgaagagggtaagcctgttgctattgataccgttgttttatcaacccaacacaatcccgaaatagaacataaagatctggaagaagccattatcgaagaagtgattaaaccggttttacctgaaaatatgattactgataaaacccgctatctggttaaccctactggccgttttgttattggtggcccggttggagactgcggattaactggccgtaaaattattgttgatacctatggtggcatggcacgtcatggtggcggtgcattttctggtaaagatccttcaaaagttgatcgatcagctgcttatgctgcacgttatgttgccaagaatatcgttgctgcgggtcttgctgatcgttgtgaaatacaggtgtcttacgcgattggtgtagctgaaccaacctctattagtgtagaaacattcggtaccggcaaagtcgaagaagcgaaactagttgaattaattcgtgaacactttgacctaagaccaaaaggtattattcaaatgctggatttattacagcctatttatagacctactgcggcatacgggcattttggccgtagtgatattgatttaccttgggaaagaactgataaagcagaggtattaagtaaggcataat

SEQ ID NO: 243161 - DNA, 771 bp, Unknown
  Bacterial polypeptide expressing nucleotide sequence isolated from the Sargasso Sea
aatgagtgatttcatttttacctcagaatccgttactgaaggccatcctgacaaaatatgtgatcaaattagtgacgctgttttagatgctttattaacagaagatccagaaagcagagttgcatgcgaaactgttgttaatacgggtctttgtttacttactggagaaataacttcaaaagcaaaagtcgattatataaaacttgttagaaatgtaattaaagaaattggatatgaaggctataaagcaggtgggtttgacgcaaatagttgtgctgttttagtagcacttgatgagcaatcacccgatatttctcaaggagtaaacgaagcggatgatgttaacgatgatttggaagataatactggagctggtgaccaaggcataatgtttggctatgcatgcgatgagacgcctgaattaatgcccttaccgattagcttggcacatagattagccattcaacttgccaaagtgaggcatgaagaagtccttaattatttactacctgatggtaaaactcaagtaagcattgattacgaaaaaggattaccagtctctattaatacgattttaatttcaactcaacataatcctgagattgatggaataacaaatgaagaagaaattcgtcaaagaataaaagaagatttatggacgcatgttgtaattcctgctactgaagatttagaaattaaaccaaacattaacaagacaagatttctagtaaatcccacgggaaaatttgtcgtaagggggcctcaaggaga

SEQ ID NO: 243162 - DNA, 886 bp, Unknown
  Bacterial polypeptide expressing nucleotide sequence isolated from the Sargasso Sea
aagctttcttcatgagcagtcagctgatattgctatgggtgttgattctggtagcaataaagatgagggtgcaggtgatcaaggaatcatgtttggttttgcttgtaaagacactgaatcattaatgccagcaccaatacattattctcatcaaatattatttaaaatggcacaagcccgtaaggatggatctgcatctggtttagaacctgattcaaaaagccaagttacaatgctttatgaaaatggaaaaccaagcaaggttacatctttagtaatctcttcacaacataaggaaggtttgtctcctgctgatgtaaaagaaattgttaaaccttatgtatatgagtgcatacctaataaattattagaagggtttaaagatgaagaattctacgttaatcctacaggaaactttgtaataggaggtcctgatggtgactctggtttaactggacgtaaaataatagttgatacatatggtggcgcagcgccccatggtggaggtgcattttcaggaaaggatccatctaaagttgatagatctgcagcatatgctgctaggtacttagcaaaaaatgttgttgcagcggatctagctgatgagtgtactatacaattatcttatgcaataggagtatcaaaacctttgtcggtctatgttaatactaatggtacaaataaagttgatgaacagaaaatcgaaaaatctctgcaagatttatttgatctaagcccaagaggaataagagagcatttgaaactgacaaatgcaatttatgttccaacttctgcttatggacattttggtagagagccaagtgacaaaggacatttcacttgggaaaaaactgatttagtggaagctctaaaagatattgcataa

SEQ ID NO: 243163 - DNA, 309 bp, Unknown
  Bacterial polypeptide expressing nucleotide sequence isolated from the Sargasso Sea
aatgaaaaaaaattatttatttacaagcgagtcagtctcagaaggacatccagataaagtatgtgatagaatttcagatatggtggtagatacctacctgggtgctgagcctcattcaagagtagcatgtgaaactttaaccacaacgaataaagtcgttttagctggcgaagtaagaggaccagaaataaaaaaagacgatttaatagagaaagttagaaattgtataaaagacattggatatgatcaggatggattcacttacaaagaggcaactaaaatagaaagtcattttacatgctcaatctt

SEQ ID NO: 243164 - DNA, 781 bp, Unknown
  Bacterial polypeptide expressing nucleotide sequence isolated from the Sargasso Sea
atgaattcaaaaaattatttgtttacaagcgagtcagtttctgaaggtcatccagacaaagtttgcgaccgtatttctgatatggttgtggatacgtatatttccaaagatccatttgctcgtgtagcttgtgaaacactaaccacgactaacaaagtaattctagcgggtgaggtaagaggaccggaaacctcaaaagaggatatgattagtaaagtaagagaatgcatcaaagatattggttatgagcagaaaggttttcactggaagaattgtaatatagatgttcatcttcattcacaatcatctgatatagctatgggagttgactcaaaaggtaataaagacgaaggagctggggatcagggaataatgtttggatatgcgtgtaacgagaccgatgtattgatgcctgcaccaatatattactctcataaaattttagaattaatggctttagacagaaaaaaaggtattgctaaggatttagaacctgactcaaaaagccaagttacaatgatctatgaaaatggaaaaccaattaaagtaaagtctatagtgatttcaacacaacactcaccaaaagtagatcaaaaaaaagtaaaagaaatagtcagaccatacttagaaaaatcaataccaaaaaaattcttatccgaattaaaagaagaagaattctatgtaaatccaacgggtcaatttataattggtggacctgacggagacagtggtcttactggcagaaaaattatagttgatacttacggtggagctgcaccac

SEQ ID NO: 243165 - DNA, 461 bp, Unknown
  Bacterial polypeptide expressing nucleotide sequence isolated from the Sargasso Sea
tatgagcgactactctctcttcacatcagaatcggtctcggaggggcaccccgacaagatgtcggatcaaatttccgacgccatccttgacacctacctcaccaaggaccccgatgcgcgagtggctgtggagacaatggtcaaaaccggcatggtggtggtcgcgggcgaggtaacaacgtcaggcactgtgaccacgggagagcttgaggaagtcatccggcggaccgtgctggatattggctttgactcatctgatgtatgtttcgatggcaacacctgtgccgtgatcaacgcgataggccaacaatcggcagacattgccctgggcactcatgaagcggatgaagccaaccaaggcgctggagatcaggggctcatgtttggctttgcctcggatgagaccgacgtacttatgcccgcgccgattcattattcccatcgccttgtggaaaggcagg

SEQ ID NO: 243166 - DNA, 490 bp, Unknown
  Bacterial polypeptide expressing nucleotide sequence isolated from the Sargasso Sea
tataaaccctacaggaaagtttgtaattggaggacctgatggtgatgcaggtttaacgggaagaaaaattattgttgatacatatggtggagccgcgccacacggaggaggagcgttttccggaaaggatccaactaaggtagaccgatcggcagcttacatttctaggtatttagccaaaaatattgttgccgctggggttgcacctaagtgcctcattcaactttcttatgcaattggggttgcagagccactatcaatttacgtagatacttacgggacagcatcaaaatatgaaaaaaaattggaggaaatcttaccaaaaatagtagatttatcgccaaaaggcataattgaaaaacttggtttaagaaaacctatttatgaaaaaaccgcagcctacggacattttggaaggaagccagatgtggagggtggtttttcatgggaaaaaacggatcttgtagatcagttatcagaacatctttaa

SEQ ID NO: 243167 - DNA, 138 bp, Unknown
  Bacterial polypeptide expressing nucleotide sequence isolated from the Sargasso Sea
ggcctaaaagtcttataaatatgcttgatcttaaaagaccaatctatcttccgacagcggcttatggtcattttggaaggactgatattgatctttcatgggagaaaactgataaagcatcagaaatttcacaataaa

SEQ ID NO: 243168 - DNA, 762 bp, Unknown
  Bacterial polypeptide expressing nucleotide sequence isolated from the Sargasso Sea
ttggatatgcctgcaaagagaccccagaacttatgccactaccaattgctttagctcataaattaatgctcaaacactcagaaataagaaaatctaagggccttggattacgaccagacgcaaaatcgcaagtttctatagaatacgattcaaattatcaaccaaaacgaattgattcaattgttctatcaacacagcatagtgatgatctggatttagaggacttaagagaaattgttaaaacacaaattattgattcatgtttacctgaaaaacttctagacaataaaacaaaatatctaattaatcctgctggccgatttgtcatagggggcccagttggtgactgtggcttaactggaagaaaagtcattgtagacacctatggtggaatggctagacacggtggtggaggtttttcaggcaaagatccaacaaaagttgatcgctcagctgcttatgggctcaggcaagtggctaagtcattaataaagaatgatctttgcgattattgtgaagtacaagcatcttatgccattggaatttctgagcctgtatcaatttatatcaacacatttgagtctgaaaaaatatgtttagataaaatcaataaaattgttaatgaaaactttgatctatcaccatctggccttattgaaaacttagacctcataaccccaatttacttaaaaactgcatcatatggtcattttggtcgagaggatcagggttttacttgggaaaaatcaaaaaaactttaaa

SEQ ID NO: 243169 - DNA, 373 bp, Unknown
  Bacterial polypeptide expressing nucleotide sequence isolated from the Sargasso Sea
gctttttcaggcaaagatcctacaaaagtagatagatctgcagcatacgcttcaagatatttagctaaaaatatagttgcatctaaaattgcagacaaatgcttaattcaacttgcttatgcaattggagtttcaaaacctttatcaatatatgttgacctatttagtaatgatgaggataaaaatttacatgttgaaaaacttataaaggaaaattttgatctgagtccaagggggataagagaaatgttaggattgaataagccaatttatgaaaaatcggctgcttatggacattttggaagagatccagaaaatgatggctcattttcatgggaaaaaactgacaaagcgtctgtatttcaaaagtaaa

SEQ ID NO: 243170 - DNA, 481 bp, Unknown
  Bacterial polypeptide expressing nucleotide sequence isolated from the Sargasso Sea
tggcagatttgttttggaggtccagaggcagatactggtttaactgggcgaaagattattgttgatacttacggaggttacgctccgcatggcggaggtgctttttctggaaaagacccttcaaaagttgataggtcagctgcatacatggcaagatatatagctaaaaatattgttgcagcagaattagccgataaatgcgaggtgcaattttcttacagtataggcgtcgcagagcccacctcgttctatgtcaaaacattcggaactggatcaatttctgatgaagaactaactgatatagcaaaagcagtgttcccattgaaacctgcaggaataattgaacatcttcagctcaagcatccaaggtatcaaattacatccgcatatggacatttcggccgtgaagaggattcatttacatgggaacaaaccggcatggttgaagctttaaaattaaaattaaccgaaaggaattaat

SEQ ID NO: 243171 - DNA, 652 bp, Unknown
  Bacterial polypeptide expressing nucleotide sequence isolated from the Sargasso Sea
tatgaaccctggaaattttttattcacatcagaatctgtatccgaaggtcatcccgataaaatggcagaccaaatttcagattctattctggatgcaatattagctaaggatcaaacagcccgtgtagcctgcgaaacaatgatcacaactggttttgtagtaatcgctggagaaatctctacgaattgttatgtagaaatgcctaaaataattcgcaatacaataaaaaatattggctacacccaatcagatatgggattcgactttgaaacatgtggcgttcaaatagcccttgatgaacagtccaaagatatagctcggggagttaatgacgacaaacatgaacaaggtgctggcgatcagggaatgatgttcggctatgccagcaaggaaacaccagaactcatgccaatgcctattatgtattcccataaactggtaaaaaaacttgctgatgtaagaaaaaaaggcgccctctcctaccttcgccccgatagtaaatcacaggtatccgtgcgctacgaaaataataagccgatatgcattgaaacggttgttatttccactcagcacaatcctagtgtaactacaaaacaaatcaaagcagatgtcaccgaaatggtcatcaataaagtcattccgaaaaattta

SEQ ID NO: 243172 - DNA, 613 bp, Unknown
  Bacterial polypeptide expressing nucleotide sequence isolated from the Sargasso Sea
tcagttgttatatctacacaacactcgtctgatgtaaatcaagcacaagttagagatctagttaaaccttatattgagagatcaattccaaaagaattgttgaattcattagatgaaaaagaaatttatataaaccccactggaaattttgttattggtggtcctgatggtgatagtggtttgactggtagaaagattattgttgatacatacggtggagctgcaccacatggtggaggtgctttttcgggcaaagatcctaccaaagtagatagatctgccgcttatgcatccagatatttagcaaaaaatgttgtagcatctaaaattgccgataaatgcttaattcaacttgcatatgcaatcggtgtatcaaaacctttatctatatatgttgatttatttgataatgatgatgaaaaaaataaatatgttgaaaaacttataagcgaaaattttgatttaagtccaagaggtattagagaaatgcttggtctgaataaacctatttatgaaaaaaccgctgcctatggtcactttggaagaattcctgataataaaggctcattttcatgggaaaaaaccgataaatcagatatatttagcaagtaaa

SEQ ID NO: 243173 - DNA, 127 bp, Unknown
  Bacterial polypeptide expressing nucleotide sequence isolated from the Sargasso Sea
acaggaagaaaaattatagtagatacatatggaggagctgcacctcatgggggaggcgctttttcaggaaaagatcctacaaaagtagatagatcagcagcgtacgcatcaagatatttggcaaaaa

SEQ ID NO: 243174 - DNA, 636 bp, Unknown
  Bacterial polypeptide expressing nucleotide sequence isolated from the Sargasso Sea
tgatacttatttaagtgcagaaccacagtcaagagtggcatgtgaaacgttaacaactacaaacaaagttgttttagcaggtgagacacgaggtccaaatattaataaagatgatttaatcttaaaagtaagagaatgtattaaagatattggttatgatcaaaaaggttttacctggaaagaagaaactaaaatagaaagtcatcttcattcgcaatctgcagatattgctatgggtgtagactcatctggaaataaagatgaaggagcaggagatcaaggtataatgtttggttatgcttgcaatgaaacagatgttttaatgccagcaccaattcattattcacataaaattttaagacttatggcagaagatagaaagtcaggaaaactaaaaaatattgaaccagattctaaaagtcaaattacaattgaatataaagatggcaagccatcatcagttaaatcagttgttatttcaacacaacattcagctgatataaatcaatctcaagtacgagaattagttaaaccttatatagaaaaatcaattccaaaaaatttaataaatggattagatgatacagagatttatgttaatccaacaggtaattttgtaataggaggtccagacgg

SEQ ID NO: 243175 - DNA, 493 bp, Unknown
  Bacterial polypeptide expressing nucleotide sequence isolated from the Sargasso Sea
atgaagaaaaattttttatttactagtgagtcagtgtcagaaggacacccagacaaagtttgtgacagaatttcagatatggttgtggatagttttttagcttctgagcctcaggcaagagttgcttgtgaaactttaacaacaacaaataaagttgtattagcaggagaagtaagagggccggaacttaaagaagatgaattaattgcgaaggtaagaaattgtattaaagatataggttatgatcaagacggcttttcttataaagatcaaaccaaaattgaaacacacttacacgctcagtcagctgatattgcaatgggagtagactcatcaggaaataaagacgaaggtgctggagaccagggaattatgtttggttatgcttgtaatgaaacagatgttttgatgccagctccaattcattattcacataaaatcttaagattaatggctgaagacagaaaatcaggaaagttgaatggaatagagc

SEQ ID NO: 243176 - DNA, 861 bp, Unknown
  Bacterial polypeptide expressing nucleotide sequence isolated from the Sargasso Sea
tccacaaacgcgcgtagcttgtgagactttgactactactaataaagtggttttagctggagaagtaaggggtccatcagtttctaaagatcagatcatatctcaagttagagattctattaaagatattggttatgaacaagacggctttcattggcagacttgtgatattgaaagttttcttcatgagcaatccgctgatattgctatgggtgttgattctggtagtaacaaagatgagggtgctggtgatcaaggcatcatgtttggttttgcttgtaaagacactgaatcattaatgccagcaccgatacattattctcatcaaattttatataaaatggctcaagcccgtaaagatggatctgcatccggtttagaacctgattcaaaaagccaagttacaatgctttatgaaaatggcaaaccaagtaaagttacatccttagtaatttcttctcaacataaggaaggattgtctcctgatgacgttaaagaaatagttaaaccttatgtatatgagtgcataccaaataacttattagaaggtcttaaagatgaagaattctacgttaatcctacaggaaactttgtaattggaggtcctgacggtgattctggtctaacaggcagaaaaataattgttgatacatatggtggtgcagcccctcatggcggaggtgcattctctggaaaagatccatctaaggttgatagatctgcagcatatgcagctagatatttagcaaaaaatgtagttgcagctgaccttgcagacgaatgtactatccagttatcctatgctataggagtctcaaaacctttatcagtatatgtaaatactaatggaacaaataaagt

SEQ ID NO: 243177 - DNA, 796 bp, Unknown
  Bacterial polypeptide expressing nucleotide sequence isolated from the Sargasso Sea
gatgttcggttatgcatgcaaagaaacttctgaattgatgcctgcaccaatttattattcccataaaatccttcgtcttttagccgaggcaagacactcaggcaaaattaaaggaattaagcctgattcaaaaagtcaactaacattgcaatacaaaaatggtattccaatagaagcttcttccatagtaatatccacgcaacatgacgaaggcctttctcaggaagaaataagaacaattgttgagccatatgttgttgaagctttgccagagggctggatgtgtaataaaaataatttttttgtaaatccaacaggtaaatttgttgtaggaggcccggatggagatgcaggccttactggtagaaaaattattgtagatacatacggtggtgctgccccccatggaggaggtgctttttcaggaaaagatcccactaaagttgatagatcagcagcttatgcagcaaggtacttagcaaaaaatatagttgcagcaaattttgctgacaaatgttctattcaattatcttatgctatcggagtttctcatccattatcagtttatgttgatacatatggaacaggtaaggtttcagactctcaaattgaggaagtattaaaaaaagttatggacctttcaccaagaggtattagggagcatttgcagttaaataaacctatttatcagaaaactgcttcgtatgggcactttggacgcaagcctgagggcgatggcagtttttcatgggaaaagcttgatctagttgaagatttaaaatctaatctttcttga

SEQ ID NO: 243178 - DNA, 805 bp, Unknown
  Bacterial polypeptide expressing nucleotide sequence isolated from the Sargasso Sea
aatgaaagattatatattcacatcagagtctgtttcagagggtcatcctgataaagtttgcgatcaaatttcagatgcagttcttgatgcatatttaaaagaagatccagaaagtagagttgcttgtgaaacaatgataaaaaacaatttagttattattgctggagaaattacttcagatggaaatccagatttagaatctattgttagaaatgtaatcaatgacattggctataatgatgataatcttggatttaatggaaacacatgtgattttattaatcatatcactaaacaatctcctgatattgctcaaggtgtcaatgaaggcgaaggtgaagatataaatcaaggagctggagatcaagggctcatgtttggatatgcttgtaatgagactgatagtttaatgcctgcaccaatagatttgtctcataaacttgttaaaaagcaatcagaggtaaggaagtcaggtactttagaatggctaagaccagatgcaaaaagccaagtaagcgtagtttacgatcaagaaagaaaaagtattaaaagattgtccgcaattgtactttcaacacaacataatgaggacatatcttatcaggagctcaaagatggagttttcgaccatattatttctcctgtaataccaaaaaattggattacaaatgaaacaaaaatattaattaatcctactggtaaatttgtaataggaggaccagttggagattgcggacttacaggtagaaaaattattgtagatacttatggaggtatggctagacatggtggtggtgcttttttc

SEQ ID NO: 243179 - DNA, 281 bp, Unknown
  Bacterial polypeptide expressing nucleotide sequence isolated from the Sargasso Sea
aatgagtgatttaaaaaactatctttttactagcgaatctgtttctgaaggacatccagataaagtatctgatagaatttcagatatggttgttgatacttatatttctggtgatccgtattctagagtagcttgtgaaacactaaccacaactaataaagttgttttagcaggtgaggttagaggaccagaaattaaaaaagatgaattaattgaaaaagttagagcctgtatcaaagatattggttatgatcaagatggggtttacctggagagaagca

SEQ ID NO: 243180 - DNA, 725 bp, Unknown
  Bacterial polypeptide expressing nucleotide sequence isolated from the Sargasso Sea
aatgaagaaagattttttatttacgagtgagtcagtttcagaaggacatccagataaagtctgtgatagaatatcagatatggttgttgatacttatttaagctcagaaccacaatcaagagtggcatgcgaaacattaacaactacaaacaaagttgttttagcaggcgagacacgaggccctgatattaataaagatgatttaatttcaaaagtaagagaatgtattaaagatattggttatgatcaaaaaggttttacttggaaagaagctactaaaatagaaagtcatcttcattcgcaatcttcagatattgctatgggagtagattcgtctggaaataaagatgaaggagcgggagatcaaggtataatgtttggttatgcatgtaatgaaacggatgttttaatgccagcgcctattcattattcacataaaattttaaggcttatggcagaagatagaaaatcaggaaaactaaaaaatatagaaccagattctaaaagtcaaattacaattgaatacaaagatgggaagccgtcatcagttaaatcagttgttatttcaacacaacattcagctgatataaatcaatcacaagtaagagaattagtaaaaccatatattgaaaaatcgattccaaaaaatttgataaatggattagatgatacagagatttatgttaacccaacaggtaattttgtaataggaggtccagatggtg

SEQ ID NO: 243181 - DNA, 265 bp, Unknown
  Bacterial polypeptide expressing nucleotide sequence isolated from the Sargasso Sea
gacgaattagtttctaaagttagagattgtattaaagatattggctactaccaagatggttttagttggagggatgcaactaaaattgaatgtcatttacattcacaatcagctgacattgcaatgggagtagactcatcaagaaataaagacgaaggtgctggagatcaaggaataatgtttggttatgcttgcaatgaaacagatgttttaatgccagctccaattcattactctcataaaattttaagattgatgtgctgaa

SEQ ID NO: 243182 - DNA, 629 bp, Unknown
  Bacterial polypeptide expressing nucleotide sequence isolated from the Sargasso Sea
aatgagtgatttcattttcacttcagaatccgtaactgaaggtcatcctgacaaaatatgtgatcaaattagtgacgctgttttagacgctttattgacagaagatccagaaagcagagttgcatgcgaaactgttgtaaatacgggtctttgtttacttactggagaaataacctcaaaagcaaaagtcgattatataaaacttgttagaaatgtaattaaagaaattggatatgagggctataaagcaggtggttttgacgcaaatagttgtgcagttttagtagcacttgacgagcaatcaccggatatttctcaaggagtaaacaaagcagatgatgttaacgatgatttggaagataataccggtgctggcgaccaaggcataatgtttggctatgcatgcgatgagacgcctgaattaatgcccttaccgattagcttggctcatagattagcaattcaactttctaaggtaaggcacgaaaacgtgcttaattatctactccctgatggtaaaactcaagtaagtattgattataaaaatggagtaccactatcgattaataccattttaatttcaactcaacataatcctgaaatagatggtatgacaaatgaagaagaaa

SEQ ID NO: 243183 - DNA, 552 bp, Unknown
  Bacterial polypeptide expressing nucleotide sequence isolated from the Sargasso Sea
aatgagtgatttcattttcacttcagaatccgtcactgaaggtcatcctgacaaaatatgtgatcaaattagtgacgctgttttagatgctttattgactgaagatccagaaagcagagttgcatgcgaaactgttgttaatacgggtctttgtttacttactggagaaataacttcaaaagcaaaagtcgattatataaaacttgttagaaatgtaattaaagaaattggatatgaaggctatagagcaggtgggtttgacgcaaatagttgtgctgttttagtagcacttgacgagcaatcaccggatatttctcaaggagtaaacgaggcagatgatgttaacgatgatttggaagataatactggagctggtgatcaaggcataatgttcggctatgcatgcgatgagacgcctgaattgatgcccttaccgattagcttggcacatagattagccatccaacttgccaaagtgaggcatgaagaagtccttaattatctactaccagatggtaaaactcaagtaagcattgattacgaaaaaggttt

SEQ ID NO: 243184 - DNA, 924 bp, Unknown
  Bacterial polypeptide expressing nucleotide sequence isolated from the Sargasso Sea
aaaaactttcttttcacaagtgagtctgtatcagaaggacacccagataaagtttcagatagaatttctgatatggtagttgatagttatatttcaggagatccattttcaagagtagcttgtgaaacacttacaacaacaaataaagtcgttttggctggcgaagtaagaggcccagaaattaaagaaaatgacttaattgaaaaagtaagacactgcataaaagatattggttatgaccaagatggtttcacttggaaagaagctacgaaagtagaaagtcatcttcattcccaatctgctgacattgcaatgggtgtagattcttcaggtaataaagatgaaggagctggcgatcaaggcataatgtttggcttcgcttgtgatgaaacagaagagttaatgccagcacctattcaatactcacataaaattttaagactaatggcacaggacagaaagtctggtaaacttaaaaatattgaaccagactcaaaaagccaagttacttttgagtatgtcgatggaaaaccaacaaaagttaaatctgtagttatttcatcacaacattctgctgatgtaaaccaaactcaagtaagagatttgttgagaccttatatgataaactccataccagaaaaatttttggatggctttgatgaagaagagttttatgtaaatccaacaggtaattttgtaattggaggccctgatggtgattgtggtttaacaggaagaaaaattatagttgatacttacggaggtgcagcacctcatggtggcggcgcattttcaggaaaggatccaactaaagttgataggtcagcagcttatgcagcaagatatattgcaaaaaatgtagttgcctcaaaaattgctgacaaatgcttaattcaattagcctatgcgataggtgtatcaaaa

SEQ ID NO: 243185 - DNA, 893 bp, Unknown
  Bacterial polypeptide expressing nucleotide sequence isolated from the Sargasso Sea
gatggtttcacttgtcagagaagctaccaaaatagaaagtcatcttcactcacaatctgcagacattgcaatgggggttgactcttcaggaaataaagatgaaggcgcaggagatcaaggaataatgtttggttatgcttgtaatgaaactgacgttttaatgcccgccccaattcattattcacacaaaattttaagattaatggctgaagacagaaaatctggaaagctaaatggaattgagccagactcaaaaagtcaaattactatagaatataaaaatggagttccttcagcagttaaatcagtagttatctcaacgcaacattcaaaagatgttaatttagcaaaagtaaaagaactatgtatgccatatatcgagaggtcaattccaaaaaatttattaggtaatcttgaccaaaatgagatctatataaatcctacaggaaactttgtaattggtggcccagatggagatagcggtttaactggtagaaaaatcattgttgatacttatggtggtgccgcaccacacggtggaggagcattttcaggtaaagatccaacgaaagtagatagatctgcagcatatgcttcaagatatctagcaaaaaatgtcgtggcatctggagtagctgataaatgcttaattcaattagcatatgcaattggtgtttcaaaacctttatcgatatatgttgatctttttgacaacgatgaagagaaaaatgctcatgtcgaacaattaataaacgaaaattttgatttaagccctagaggaattagagaaatgttaggtcttaacaaagctatatatcataaaacagcagcttatggtcattttggtagggagcacgagtctgatgtgtctttttcatgggaaaaaacagata

SEQ ID NO: 243186 - DNA, 808 bp, Unknown
  Bacterial polypeptide expressing nucleotide sequence isolated from the Sargasso Sea
ctggagacagggaattatgtttggatatgcgtgtaacgaaactgatgttttaatgccagctccaattcattactcacataggattttaagattaatggctgaagatagaaagtctggaaagttaaaaggaatagaaccagattcaaaaagtcaaattacaattgagtacaaagatggtttacctaatgctgtaaaatcagtagtaatctctacacaacattctaaagatgttaatttagcaaaagtcaaagagctttgcatgccatatattgagagatctattccaaaaaatttattaggaaatcttgatgaaaaagagatttatataaatcctacaggtaattttgtaattggtggaccagatggagatagcggattaacaggaagaaaaataattgttgatacttatgggggtgctgcgcctcacggaggaggagcattttccggaaaagatcccacaaaagtagataggtctgctgcttatgcgtcaagatatttggcaaaaaatgttgttgcctctaaaattgctgataaatgtttaattcaacttgcatatgctattggagtgtcaaaacctttatcaatttatgttgatctttttgataatgatgaagaaaaaaatagacatgtagaaaaattgataagtgaaaattttgacttaagtcctagaggtataagggaaatgcttggattaaataaaccaatatatgagcaaactgctgcctatggacactttggaagggaacacggctctaatggctcattttcatgggaaaaaacagataaagctaatgtttttagcaagtaa

SEQ ID NO: 243187 - DNA, 859 bp, Unknown
  Bacterial polypeptide expressing nucleotide sequence isolated from the Sargasso Sea
aatgagtgatttcatcttcacgtctgaatctgtaactgaaggtcatcctgacaaaatatgtgatcaaataagtgatgctgttttagatgctttattaacagaagatccagaaagcagagttgcatgcgaaactgtagttaatactggtctatgcttacttactggagaaataacttcaaaagcaaaagttgattatataaaacttgtcagaaatgtaattaaagaaattggatatgaaggctataaagcaggtggctttgacgcaaatagttgtgctgttttagtagccattgacgaacaatccccagatatttcacaaggggtcaacgaagcggatgatgttaacgatgatttggaaaacaataccggagctggcgaccaaggcataatgtttggctatgcatgcgatgaaacgcctgaattgatgcccttacctattagcttggctcatagattagccattcaacttgccaaagtaagacatgaaaaagtccttaattatctcctccctgatggtaaaactcaagtaagtattgattacgaaaaaggtgtgccagtctcaattaatactattttaatttcaactcaacataatcccgagattgatggaattaaaaatgaagaagaaattcgtcaaagaataaaagaagatttatggacgaatgttgtaattcctgctactgaagatttagaaatcaaaccaaaaattcacaaaacaagattcttagtaaaccccacaggaaaatttgtcgtaggagggcctcaaggagatgctgggcttactggcagaaaaattattgtagatacttatggaggatatgcaagacacggagggtggtgcattctcgggaaaagaccc

SEQ ID NO: 243188 - DNA, 888 bp, Unknown
  Bacterial polypeptide expressing nucleotide sequence isolated from the Sargasso Sea
cttagagccccagtctagagttgcatgtgaaactttaacaacaactaataaagtagttttagcaggagaagttagagggccagaaataaaaaaagacgatttaatttctaaagttagagattgcattaaagatattggatatgatcaagatggattttcttggaaagaagaaacaaaagtagaatgtcatttacattcacaatcttcagatatagcgatgggggtagattcatcaggaaacaaagatgaaggtgccggagatcaaggaattatgtttggatatgcttgtaatgagacggatgttttaatgccagcaccacttcattattctcataaaattttaaggcttatggctgaggatagaaaatctggtaagttaaaaaatattgaaccagactcgaaaagccaaattacaattgaatacaaagatggaaaacctgcttctgttaagtcagttgtgatatcaacccaacattctgcggatgttaaccaatctcaagttagagaattagtaaaaccttacatagaaagatctatacccaaaaatcttattaatggattagatgataatgaaatttatgttaacccaacaggaaattttgttataggaggtcctgatggagacagtggattaacgggaagaaaaatcattgtagatacctatggtggtgctgctcctcatggtggaggcgctttttcaggaaaagatccaacaaaagttgatagatctgcagcatatgcttcaagatacattgcaaaaaatattgttgcctcaggtcttagtgataaatgtttaattcaattagcttatgcaattggagtttcaaaacctttatcaatttatgttgatctgtttgaaaatgatgaaagaaaaaacaaacatgcaga

SEQ ID NO: 243189 - DNA, 732 bp, Unknown
  Bacterial polypeptide expressing nucleotide sequence isolated from the Sargasso Sea
aatgaaaaaagattacttatttactagcgagtcagtatccgaaggacatccagataaagtttgtgatagaatttcagatatggttgtagatacatatttggctgctgaaccacaatcaagagttgcttgtgaaactttaacaacaactaacaaagttgtattagctggtgaagtaagaggtcctgaaatcaaaaaagaagatttaattcaaaaagtaagacattgcattaaagacattggatatgatcaggatggatttacttggaaggaagcaacatctatagaaagtcatttacatgctcaatcagctgatatagcgatgggagtagactcttcaggaaataaagatgaaggtgctggtgatcagggtattatgtttggctatgcgtgtaatgaaactgatgtgctaatgccagctccaatacattattctcataaaatactaagacttatggcagaggacaggaaatcaggtaaattaaaaaatatagaaccagattcaaaaagccaaataacaattgaatacaaaaatggaaaaccatcatcagtcaaatcagttgtaatatctacacagcactcaccagatgttaatcaagctcaagtaagagatctagttaaaccttatattgaaagatcaattccaaaagaactgttaagttctttagatgaaaaggaaatttatgttaatccaacaggaaattttgtaattggaggccctgatggtgacagcgg

SEQ ID NO: 243190 - DNA, 805 bp, Unknown
  Bacterial polypeptide expressing nucleotide sequence isolated from the Sargasso Sea
aaagcgtccgttgatatacaagaagtcgttcgtaatacagttgcagatattggatacgacgatcccacatttggttttgactatcgatcttgtggtgttttggttgctcttgatcaacagtctccagatatttcacaaggtgtgacagagggagagggattgtatcatcagcagggtgcaggtgatcaagggatgatgtttgggtatgcatgccgcgagactcctcagttaatgcccctgcctattatgctggcgcacaagcttttgctgcatttaactaagttgcgtaaggggaaaaaactacagtatctattgcctgatgctaagtcacaagtaagcgtagaatatgtggataataagccacgacgaatcgattctgttgttatctcaactcaacatcgtccaaatgttacgcataagcgaatagagcgggacatgatctcgcagatagtgaaaaaagtgattccctccaaattcctggatgcggagaccaagtatcacatcaatccgacgggtaggttcgtggtaggtggtccacacggtgattgtggtttgacgggccgtaaaatcattgttgacacctatggtggaatgtgtcctcatggaggcggtgctttttctggaaaggatccgagtaaggtagatcggagtgcgcactatatggcaagatacgtagcgaagaatgttgtcgcggctcgtctggcagagcgatgtcaagtccagttggcttacgctattggtgtccccgaaccggtttccgtattaatcgacacttacggttcagggaaaaaagctgatgaagaaa

SEQ ID NO: 243191 - DNA, 798 bp, Unknown
  Bacterial polypeptide expressing nucleotide sequence isolated from the Sargasso Sea
ggaattaattgagaaagtgaggaactgtataaaggatattggctacgatcaaaaaggttttagttggaaaacagcaaatatagaagcacatttacataaacaatcttcagatattgctatgggagtcgactctaaaggtaacaaagatgaaggagctggagatcaaggaataatgtttgggtatgcgtgtaaagaaaccaaagatttgatgcctgctccaatacatttttctcacaaaattttaagattaatggcagatgacagaaaaaaaggaattattgaaggtattgaacctgactctaaaagccaggttaccatgttgtacgaaaatggcattccaaaaaaagttacttcagttgttatttcaactcaacactccaaagatcttgatcaaaaaaaagttaaggatttagtctttccatatatatctaaatccatacctaaagacttaatccaagaattagatgaaaaagacgtttatgttaatccaacaggacaatttattattggaggtccagatggagataccggcttaactggaagaaaaattattgtagatacgtatggtggagcagctcctcatggcggaggagcattttcaggcaaagatcctaccaaagtagatagatctgcagcttatgtcgccaggtatattgcaaaaaatattgttgctgctggaatttcagataaatgcttaatccaattagcttatgcaattggggtatccaagccactttctgtttacgtaaaactttctgatgaagataaaaataaaaatgaagatataaaaaaaataat

SEQ ID NO: 243192 - DNA, 356 bp, Unknown
  Bacterial polypeptide expressing nucleotide sequence isolated from the Sargasso Sea
cccaactaaagttgatagatctgcagcttatgcagcgagatatatagctaaaaacgttgttgcctcaaaaatagcagacaaatgtttatttcaactatcttatgcaattggtgtttcgaaaccattgtctatttacgtagatttatttgataatgatttagataaaaataaatttgttgttgaaaagataaaagaaaattttgatttaagcccaagaggaataagagaaatgctaaatttaaacaaaccaatttatgaaaaaacagctgcttatggtcatttcggaagaacacccgaatctgatggttcattttcctgggaaaaaactgataaaattgcgtttttttctaaatagt

SEQ ID NO: 243193 - DNA, 876 bp, Unknown
  Bacterial polypeptide expressing nucleotide sequence isolated from the Sargasso Sea
tgcagaacctcattcaagagtagcatgcgaaactttgacaactactaacaaagtagttttagctggagaagtaagaggacctgaaatcaataaagatgatttaattcaaaaagtaagagagtgcatcaaagatattggttatgatcaaaaaggttttagttggaaagatgccactaagatagagagtcatctacatttacaatcagctgatatagcaatgggtgtagactcatcaggaaataaagatgaaggcgcaggcgatcaaggaataatgtttggttatgcatgtaacgaaacagatgttttaatgcccgcaccaatacattattctcataaaattctaagattaatggctgaagatagaaaatctggtaaattaaataatattgaacccgactcaaaaagccaaattacaattgaatataaaaatggaatacctgcaaatgtaaagtcagtggttatatctacacaacactctgcagatgtcaatcaaacccaagtaagagaattagtaaaaccatatattgaaagatctattccaaaaaatcttttaaatggattagatgataatgaaatttatgttaatccaactggcaattttgttattggaggtcctgatggagatagtggattaactggaagaaaaataattgtagatacatatggaggtgccgcaccacacggtggtggagccttttctggtaaagatccaactaaagttgatagatcagcagcttacgcgtcaagatacttagcaaaaaatgtagttgcctcaaaaatagctgataaatgtttaatacaacttgcttatgcgataggagtttcaaaaccattatctatttatgttgatcttttcgacaaagatgaagaaaaaaa

SEQ ID NO: 243194 - DNA, 759 bp, Unknown
  Bacterial polypeptide expressing nucleotide sequence isolated from the Sargasso Sea
agataaagtatccgatagaatttcagatatggttgttgatacttatatttctaaagatccgtattctagagtagcttgtgaaacgttaaccactactaataaagttgttttagcaggtgaggtaagaggaccagaaattaaaaaagatgaattaattgaaaaagttagagcctgtattaaggatattggttatgatcaagaggggtttacctggagagatgcaactaaaatcgaaagttatttacattcccaatctgctgatattgctatgggtgttgactcaagcggaaataaagatgagggagctggagaccagggtattatgtttggttatgcgtgtaatgaaactgaagaattaatgccagcaccaattcattattctcacaaaattttaagattaatggctgaggatagaaaatcaggaaaactaaaaaatattgaaccagattcaaagagtcaagtaacatttgaatatgttgacggcaaaccctcaaaagtaaaatcagttgttatttcttctcaacattcagctgatataaatcaatcacaaataagagatttgcttagaccttatttatcaaaatctatgcccgaaaattttcttaatgattttagtgaggacgaattttatgttaatccaacaggcaattttgttattggtggccctgatggtgattgcggtttgacaggtagaaaaattatagttgatacatatggcggagcagcacctcacggtggtggtgctttttctggaaaaga

SEQ ID NO: 243195 - DNA, 520 bp, Unknown
  Bacterial polypeptide expressing nucleotide sequence isolated from the Sargasso Sea
aattatttagagggtctaaaacaaaatgaaatttatattaatcccacaggtcaatttattattgggggtccagacggagataccggattgacaggaagaaaaattatagttgatacttatggaggagccgctcctcatggtggcggtgctttttcaggtaaagatcctacaaaagtagacagatcagctgcttatgcctcaaggtatttagcaaaaaatattgtatcatcaggaattacagataaatgcttaatccaattagcttatgcaattggagtttcaaaacctttatctatttttgttaaactagctgataatgactatttaaaagtagaaaagataaagaaaatcataaatgataattttgatttatctcctagaggcataagagaattacttaaactaaataatccgatttatgaagttacgtcatcctacggtcactttggaagaaaaccaacaaataaaggtgaattttcttgggaaaaaacagataaagcagatttatttaaattgtaat

SEQ ID NO: 243196 - DNA, 604 bp, Unknown
  Bacterial polypeptide expressing nucleotide sequence isolated from the Sargasso Sea
atggttgatcaatcaagaaattatttttttacatctgagtctgtttcagagggccacccagataagatttgtgataagatatctgatactattttggatgcttatctgtctgaagataaagattcgcgagttgcagtggaaacccttgtgactactaatttagtagtaatttcaggagaagtcagatcagaagcaaaaatttcagaaaacgatattgagtctattacaagaaatgtgattaaagatataggttataattttggtgattttaattatcaaaatgtaaccataatgactcgtttgcatgaacaatcacccgacatagcgaggggcgttgatgcagttggaaatagctctgaaggtgctggtgatcaaggaattatgtttggctatgcttgtaatgaaacaacagagctaatgccagctactctatcctattctcatcaaattcttaaaaatttagcagataaaagaaaaaacaatattattcaaggattgcttccagactcaaaatctcaattaactcttttttatgaaaatgatcagccaaaatatattgattcaatagttgtttcctctcagcatactgaagatacaactcagg

SEQ ID NO: 243197 - DNA, 505 bp, Unknown
  Bacterial polypeptide expressing nucleotide sequence isolated from the Sargasso Sea
atgaataaagaatatttgtttaccagcgagtctgtctcagagggacatcctgataaagtttgtgatataatttctgattatatagttgatgattttttagcacagccaaattctgaaaattggagagttgctctagaaacattggttactacaaatcaagtagttgtatctggtgaggtacgagggcctgagggtttcaattgtgattatgaatccttagcaagggaagcagtaaagcatataggctacgagcaagataagtttcattggcaaaattttaattttacatcctacgtacatggtcaatctggtgatattgcaatgggagttgatgcaaaagataataaggaccaaggtgctggtgaccagggcataatgtttggttatgcttgtaaagaaacccctgttttaatgcctgcccctatttactattcacatttgattttaagaaatcttgcggaagctagaaaaaataaaacaattagtggaattcagcccgactcaa

SEQ ID NO: 243198 - DNA, 898 bp, Unknown
  Bacterial polypeptide expressing nucleotide sequence isolated from the Sargasso Sea
agactatttgtttacaagtgaatctgtgtctgaaggacaccctgataaagtctgcgatagaatatcagacatggttgttgatacatatttaggtatggaaccacaagctagggttgcttgcgaaactttaacaactactaacaaagttgttcttgctggagaaacaagaggacccgatattaataaagatgaattaatttccaaagttagagactgcattaaagatattggttatgaccaagatggttttacttggagagacgcaactaaaattgaaagtcatttacactcacaatctgctgatattgcaatgggagttgattcctctggtaataaagatgagggtgctggtgaccaaggaattatgtttggatatgcttgtaatgagacagatgttctaatgcctgctccaattcattattcacataaaattcttagattgatggctgaggacagaaaatcaggtaacttgaatggaattgagcctgattcaaaaagtcaaattacgattgaatataaaaatggtaagccatctgctgtaaaatctgtagtgattagtacacaacattctaaggacgttaacttagcaaaagtaaaagagctttgcatgccatatattgaaaaatctattccaaaaaatttattaggaagccttgatgaaaatgagatttatataaatcctacaggtaattttgtaataggtggtccagatggagacagtggtttaaccggtagaaaaattattgttgatacatatggtggagctgcaccacatggtgggggtgctttttcaggaaaagacccaacaaaggtagatagatctgcagcatatgcttcaagataccttgcaaaaaatgttgttgcttccggagttgctgacaaaatgtttaattcaatt

SEQ ID NO: 243199 - DNA, 391 bp, Unknown
  Bacterial polypeptide expressing nucleotide sequence isolated from the Sargasso Sea
gctcctcatggaggtggagcattttcaggtaaagatccgacaaaagtagatagatcagcagcttacgcttcaaggtatttagcaaaaaatgttgttgcgtcaggtgtatccgagaaatgtttgatccaattagcatatgcaattggtgtatctaagcctttatcaatatttataaagctcgctaatggagatgagtcaaaagttgataaagtaaaaaagcttatcgaggacaattttaatttatcgccaagaggcattagagaaatgttgaaattaaataatccaatatatgaaattacctcagcctacggacactttggtagaaagcctggtaataatggagaatttacttgggaaaaaacagataaaactgatttatttaaattgtaat

SEQ ID NO: 243200 - DNA, 256 bp, Unknown
  Bacterial polypeptide expressing nucleotide sequence isolated from the Sargasso Sea
aatgctatttacatcagaatctgtctccgagggacatcctgataagttatgcgatcaagtatctgatgccattttagatgcttgtttaaaagaagatcctgactccaaagttgcgtgtgaaacctctgctaagacaggatttattatagtatttggtgaaattactacaaaagctaatttaaattttcaagagattgtaagaaacactgttagaaaaattggatataatgactctagtacgagttttgatgctgac

SEQ ID NO: 243201 - DNA, 144 bp, Unknown
  Bacterial polypeptide expressing nucleotide sequence isolated from the Sargasso Sea
tatgtctgaatataaattatttacatctgaatctgtctcagaagggcatccagacaagatggctgatcaaatttctgacgccgtattggatgctatgctaaaagatgaccctgactctagggttgcctgtgaaactctagttaa

SEQ ID NO: 243202 - DNA, 751 bp, Unknown
  Bacterial polypeptide expressing nucleotide sequence isolated from the Sargasso Sea
agcaccaatacattattctcataaaattttgagattaatggctgaagatagaaaatctggaaaactaaaaaatattgagccagactcaaaaagccaaattactattgaatacaaagatggagtgcctgctaatgttaaatctgttgtaatttctactcaacattcagccgacgttaaccaatcaaaagtaagagaattagttaaaccttacatagaaaaagcaataccaaaatcacttttaagtggattagatgaaaaagaaatttatgtaaatccgacaggaaattttgtaataggtggtccagacggtgatagtggattaactggaagaaaaattattgttgatacttatggaggtgcagctccacatggtggaggagcattctcaggaaaagatcctacaaaagtagacagatctgcagcttatgcttctagatatttagctaaaaatgtagttgcttctaacattgcagataaatgtcttattcaattagcatatgcaattggtgtctcaaaacctttgtcaatttatgtagatctttttgataatgacgaagaaaaaaatagacatgtggagaaattaattaaagaaaattttgacttgagtccaagaggtattagagaaatgcttggacttaataaaccaatctacgaaaaaacagcggcatacggacattttggaagaaattcagagaaaaatggttcattttcatgggaaaaaacagataaagctgacgttttcaataagtaa

SEQ ID NO: 243203 - DNA, 844 bp, Unknown
  Bacterial polypeptide expressing nucleotide sequence isolated from the Sargasso Sea
gggagtggactcatcaggaaataaagatgaaggagctggagaccaaggtattatgtttggttatgcttgtaatgaaacagatgttttaatgccagcaccaattcattattctcataaaatcttaagattaatggctgaagatagaaaatctggaaaattaaaaaatattgaaccagattcaaaaagtcaggtaacattcgagtatgttgatggaaaaccatcaaaagtaaaatctgtagttatctcttcacagcattcaccagatgttaatcaatcgcaagtcagagatttacttagaccttatatgttaaaatccattcctgagaattttcttgatggttttaatgaggatgagttttatgtaaatccgacgggaaattttgtaattggtgggccagatggagattgtggtttgacaggtagaaaaattattgttgatacttatggtggagcagcacctcatggtggtggagctttctctggaaaagatccaactaaagttgatagatcagcagcttatgcggcaaggtacattgctaaaaatgttgttggttctaaaatttctgagaaatgtttaattcagttagcttatgcaattggtgtatcaaaaccattatctatctatgttgatttatttgataacgacctagataaaaataaatttgttgtagaaaagattaaagaaaattttgatttgagccctagaggtatcagagaaatgttaaatttaaataaaccaatatatgaaaaaacagccgcctatggtcattttggtagagcacctgaagaaaatggttcattttcatgggaaaaaactaataaaactaacgttttttctaaatag

SEQ ID NO: 243204 - DNA, 573 bp, Unknown
  Bacterial polypeptide expressing nucleotide sequence isolated from the Sargasso Sea
aatgaaaaaaaattttttatttaccagtgagtctgtgtccgaaggacatccagacaaagtttgtgacagaatttctgatatggttgttgatagtttcttaagtttagagcctcaagcgagagtcgcttgtgaaactttaacaacaacaaataaagttgtgttagctggagaagtaagaggtccagaacttaaaaaagatgaattaatttcaaaagtaagagattgcattaaagatattggttatgaccaagatggtttttcttggagagatcaaactaaaattgaaacacatttacactctcaatcagcagatattgcgataggtgtagattcagctggaaataaagatgagggtgcgggagatcaaggaattatgtttggttatgcttgcaatgaaacagatgttttaatgccagctccaattcattattctcataaaattttgagactgatggctgaggatagaaaatcaggaaagttgaatggaatagagccagactcaaaaagtcaaataactatagagtataaagatggtatgccttcagctgtaacatcagtagttatttctacaca

SEQ ID NO: 243205 - DNA, 604 bp, Unknown
  Bacterial polypeptide expressing nucleotide sequence isolated from the Sargasso Sea
atgacgtacctgtttacttctgagtctgtatctgaaggccaccccgacaagttgtgtgataatatttcagattacattctcgatgcgtgcctgagaattgatagaaatgccagggtagctgtagaaaccatggtcaagggaatggcagaagaaagttacatcatagttggtggcgaggtgacggtttctactgatgaggccatagattatgagtcaattgccaggaaagcagcagcagaaatcggttacaccaaccatgaagttggcatggatgcaaccaatactgaaaattgcaatgttaaagtcctaatcagtcaacaatctggagatatcgctcagggggttgacgaggggaaaggtctccatctcgaacagggtgctggtgatcaggggctaatgttcggatatgcatccaacgagtctgaagaattctccgaattaagaggaacattcatgccacttccggccatcctctctcagagactaactctcaaattaagcgagtcgatgaaagacggtactctcccctgggcacgtcctgactcgaagagtcaagttaccatcgagtacaacgatgatggaagtccaaatcgactgaaacggt

SEQ ID NO: 243206 - DNA, 757 bp, Unknown
  Bacterial polypeptide expressing nucleotide sequence isolated from the Sargasso Sea
gatgccagcaacaattcagctatctcatcaactggtcaagaggcatgcagatgtcagaagaagcggagatcttgaatggctgagacccgatgcaaagagtcaggtaaccattctttttgaagatggaaagcccaaatcaatcgatacagttgttctatccactcaacacgatgaaaatatctcaatgaatgacattcaagagggtgtcatggagcatattattaaaccaattcttccagaagacttactaactgattcaacgcaatatctcattaatcctactggaaacttcataatcggtgggccagtcggagattgtggcttgactggaagaaaaatcatcgttgatacatatggcggtatggcgagacatggaggtggtgcattctctggaaaagatccatcaaaggttgatcgatctgcagcatatgcagcaagatatgtggctaaaaatgttgttgctgcaggattggctgaccgatgtgaaattcaagtctcatatgccattggtgttgcaaaaccaacctcagtaagaataaagacttttggtactgaaaagatttcagaagaagaaattgtgcatttggtaaatgaaaattttgatttaactccttatggaatcatgaacatgctggacctcctccagccaatctatgagaagtcagcagcatatggtcattttggcagagaggatgaagcattcccttgggaaaaaaccgatcgatctgatgcactaaaggagcaatctggcttgtaa

SEQ ID NO: 243207 - DNA, 298 bp, Unknown
  Bacterial polypeptide expressing nucleotide sequence isolated from the Sargasso Sea
tatgttaaaaaaatacttttttacaagcgagtcagtatctgaaggtcatccagataaagtatgtgataggatttcagatatggtagtagacacctatttatcaaatgacccctactctagagttgcatgtgagactcttacaactacgaataaagtagtcctagcaggtgaaactagaggtcctgaaataaaaaaagatgaaataattgaaaaagttcgaagctgtataaaagatataggatatgaacagaaaggctttcactggaaaaactgtgatatagatacctatcttcactcg

SEQ ID NO: 243208 - DNA, 600 bp, Unknown
  Bacterial polypeptide expressing nucleotide sequence isolated from the Sargasso Sea
gatgaataatttaaaaaattatctttttaccagtgagtctgtatctgagggtcacccagataaagtttgtgacagaatttcagatatggttgttgatacatatttaggtgctgagccatattccagagtagcctgtgaaactttgactacaacaaacaaagttgttcttgcaggagaagttagggggccagaaattaaaaaagaagatttaatacaaaaggtccgagattgtattaaagatatcggttacgatcagaaaggttttacttggagagaaaatactaaaattgaaagtcatcttcattctcaatctgcagatattgcaatgggtgtggatgcatcaggcaataaagatgaaggagcaggtgatcaaggtataatgttcggatatgcatgtcgtgagaccgatgttttaatgcctgcacctatacactactctcataaaattttaagattaatggccgaggatagaaaatcaggaaagttaaaagatattgaacctgactcaaaaagtcaaattacaattgaatataaagatggattaccgtcaaatgtaaaatcagtagtaatttctacacaacactcggcagatgtaaatca

SEQ ID NO: 243209 - DNA, 946 bp, Unknown
  Bacterial polypeptide expressing nucleotide sequence isolated from the Sargasso Sea
aacaggcatggtgttagtaggtggtgaaatcactacctcagcctgggtcgacatcgaagagctcactcgcagcactattcgtgacattggttacgtgcattcagatatgggttttgacgccaattcctgcgctgtgttaagcgccattggtaaacaatctcctgacatcaatcagggtgtggataagaaaaatgaagatcctagtgagcaaggtgcaggcgatcaggggttaatgtttggttatgccagcaatgaaactgacgtgttaatgccggctcctattacgtactctcaccgcttagtgcaacaacaagccaaagtgcgtaaggatggtactttgagctggttacgtcctgatgctaaatcccagctgagttttgtgtacgaaaacggcaaaccagtgggcatagatgcagtggttttatccactcagcactgtgacaccatttctacggctgacctgcgtgaagctgtgatggaacacatcatcaaaccagtattaccagcagaatggctgagcaataaaaccaagtatttcattaaccctactggccgctttgtgatcggtggccctatgggtgactgtggtttaactggccgtaaaatcatcgtagacagctacggtggtatggcgcgtcacggtggtggtgctttctctggtaaagacccttcaaaagttgaccgctctgcagcttacgccgcccgttatgtggcaaaaaacattgtagctgcaggtttagctgaacgttgtgaaattcaggtgtcttacgctatcggcgttgctgaacctacttctatcagcgttgagacttttggcaccagtaaattaagcgaagatcaactgatagctctcatccgccgtcacttcgatttacgcccttatggtctgatccagatgttgcagttagagcgtcctatttaccgcgcaacagcagcctacggtcac

SEQ ID NO: 243210 - DNA, 685 bp, Unknown
  Bacterial polypeptide expressing nucleotide sequence isolated from the Sargasso Sea
accgtgtggcgtggatgcgattgttctgtcgactcagcacgatccggaaatcgatcaagaagacctgcgcaaaatgattaagcgtgaagtcattgagcaggtgattcccgctgagtggttggatgccaacacccaataccacatcaacccgaccggcaagttcgtgattggcggcccggtgggcgactgtggcctgaccggtcgtaagatcatcgtcgatacctacggcggcatggcgcgccacggtggcggcgcgttctcgggcaaagatccgtcgaaagtagaccgcagcgccgcgtacgctggccgctatgtggcgaaaaacgtcgtagcagcgggcttggcggacaagtgcgagattcaggtctcctacgccattggcgtggccgagccgacctcggtgtccatcgacaccttcggtaccggcaaaatcgacgacgctaaaatcgttgatctggtgcgggagcacttcgatctgcgcccctacgcgatcaccaagatgctggatctgctgcacccgatgtaccgtctgacggcggcttatggccactttggccgcgagccgttcgagcacagctacagctgggtagacgacaaaggcgaaacgcacaccgagacgtttacagccttcccgtgggaaaaaactgacaaagcagacgcactgcgtcaggccgctggcctataa

SEQ ID NO: 243211 - DNA, 617 bp, Unknown
  Bacterial polypeptide expressing nucleotide sequence isolated from the Sargasso Sea
tttagtaatttcatcacaacataaagaaggattatcacctacagatgtaaaagaaattgttaaaccttatgtttatgaatgtattccaaatgagttacttgaaggactcaaagatgaagaattttatgttaatccaactggaaactttgtaattggtggtcctgatggtgactctggcttaacaggtagaaaaattattgttgatacttatggcggtgccgcacctcatggagggggagctttctctggcaaagatccatctaaagttgatagatctgcggcttatgcagcaagatatttagcaaagaatattgttgcagctgatcttgctgatcaatgcacaattcaattatcttatgcaataggagtttcaaaacctttatcagtttatgtaaatacaaatggcacgaataaagttgatgaacaaaaaattgaaaaatctgttcaagatttatttgatcttagcccaagggggataagagaacatttaaaattaactaatgcaatttatgttccaacctcagcttatggtcattttggaagagagccaagtgatcaagggcattttacttgggagaaaactgatttagtagattctttaaaaagtttaacttaaa

SEQ ID NO: 243212 - DNA, 629 bp, Unknown
  Bacterial polypeptide expressing nucleotide sequence isolated from the Sargasso Sea
caacaaaattgtcggtatcgatgcgatcgtactgtctacccaacacagcccagacatcgcccaagcggatctgatcgaaggcgtgatggaaaccatcatcaagccagttctgccagctcaatggctgaacaaggacactaaatacttcatcaacccaactggccgtttcgttattggtggtccaatgggtgactgtggtttaactggtcgtaagatcatcgtagatacctacggtggtatggcgcgtcacggtggtggtgctttctctggtaaagacccatcaaaagttgaccgtagtgcggcttacgctgcccgttatgtcgcaaaaaacatcgttgctgctggcttagctgaccgttgtgagatccaagtgtcttacgctatcggtgtagccgaacctacgtctatcagcgttgagaccttcggtacaggtaaagtgtctgaagaagtcttaatcaagctagtccgtcaacacttcgacctgcgtccatacggcctgactgaaatgctgaacctggctcgcccaatctatcaagcaaccgccgcttatggtcactttggccgtaacgagttcccatgggaagcgacggataaagctgacgcactgcgcgccgatgcaggtctgtaat

SEQ ID NO: 243213 - DNA, 785 bp, Unknown
  Bacterial polypeptide expressing nucleotide sequence isolated from the Sargasso Sea
aatgaaagatatccaagaagattttgaatttacaagtgagtctgtttcggagggacatcctgataaagtttgtgatcaaatttccgacactattctcgatctttttatggaaaaaaatagtaattcaagggtagcatgtgaaactttagcaactactaatagaatagtactagctggagaaattaacctgaaaaagaaaaaagatgatctcagtgaaagcttgattgaagaggtagttagaaaaaaagttagagacattggatacgagcaagatggttttcactggaaaaatttaaaaatagaaaatttacttcatgaccagtcatcagacatctcgcaaggagtggataaagatgaatcaaatgaaatgtacggtgctggcgatcaaggtataatgtttgggtatgcatgtaatgagacagatagcttaatgcctgcgcccatagattacagtcataggatattaaaaacacttgccaactatagacataataatgattctttttttggccctgactctaaaagtcaagtaagtgttctttacaaaaataataaacctaaaaatataagttctattgttgtgtccagtcagcatttggagtcggctaataatgatgaaattagaaaaaaaattttagagataattgaagaagctatccctaacttagtgcttccatctgagaaaaagattcttataaaccctaccggaagatttgtaatcggtggtcctgatggtgatgcaggcctgactggaagaaaaataatagtagacacatatggtggag

SEQ ID NO: 243214 - DNA, 385 bp, Unknown
  Bacterial polypeptide expressing nucleotide sequence isolated from the Sargasso Sea
catggaggaggtgctttttctggaaaagatcctacaaaggttgatagatcggcagcttatgcctcaagatatttagctaaaaatattgttgcttcaaaaattgcagataaatgtttaattcaattagcatatgcaataggagtttctaaaccactttcaatttatgttgatcttttttcaaatgacgaggaaaaaaacaagcatgtagaaaaacttattaaagataattttgatttaagtccaagaggaataagagaaatgttaggtttaaataaaccaatatatgaaaaatcagcagcctatggacattttggaagagaaccagagtcaaatggagctttttcatgggaaaaaactgataaagcatcaatatttaataagtaaa

SEQ ID NO: 243215 - DNA, 473 bp, Unknown
  Bacterial polypeptide expressing nucleotide sequence isolated from the Sargasso Sea
tatgtcaaatttttttacatcagaatcagtaagcgaaggtcatcccgataagatagctgatcaaatttcagattctattttagataactttcttgcatttgatccacagagtaaagttgcatgtgaaactttagttactaccggtcaggttattttagctggtgagataaaaagtaacacatatatagaccttcaagatatcgcaagaaaaacaataaataaaatcggatatacaaaaggagaataccaatttagtggagattcttgtggggtaatgtcactaattcatgagcaatctgaggatataaatcaaggtgttgtcaaagatgaaaaaaagaatcaaggtgctggagatcaaggaattatgtttggttatgcatgtagtgaaacagataattacatgcccttagctttagatttatccaaccaaatcttaaaaactttagctgatttcagaagagaaaataaggata

SEQ ID NO: 243216 - DNA, 634 bp, Unknown
  Bacterial polypeptide expressing nucleotide sequence isolated from the Sargasso Sea
gatggtcgacctgaaaaaattgatactgttgtactatccactcaacattcgatagatgtaactcttagtgatgttaaagatttcgtgatggaagaaattataaaaacaacaatacctaaaaatttattatcgaataccactaagattcatatcaatccaacaggaaactttgtcattggaggaccaaacggagattgtggtttgactggtagaaaaataatcgttgatacttatggtggtatggcaagacatggtggaggtgctttctctggtaaagatccatctaaagttgataggtctgctgcctatatggcaaggtatatcgcgaaaaatattgtagctactaagcttgcagataaatgtgaaatacaactctcttatgcaattggcgttgctgagccaacttcgatatctgtagatacctttggaacatcgaagattgagaattctaaaatatcctctgcagtaagtaaggtatttaatctcactccgaagggtattattgacacactagaccttctgaacgtaaaatatcaacctactgcggcttttggacatttcggaagagatgacaaaaattttacttgggaacaaaaggataaggttgatatactaatgaatgaactaggatagg

SEQ ID NO: 243217 - DNA, 870 bp, Unknown
  Bacterial polypeptide expressing nucleotide sequence isolated from the Sargasso Sea
aagagttgcttgtgaaacattaacaacaactaataaagtagttttggcaggagagactagaggtcctgagttaaataaagatgaattaatattaaaagtaagagattgtattaaagacattggctatgatcaagatggatttagttggaaagatacaaccaagattgaaactcacttacactcacagtcagcagatatagctatgggagtagattcatcaggcaataaagatgaaggcgcaggagatcagggtattatgtttggatacgcatgtaatgaaaccgatgttctaatgccagccccaattcattactcacatagaattttaagattaatggctgaagatagaaaatctggaaagttaaaaggaattgaaccagattcaaaaagtcaaattacaattgagtacaaagaaggtgtacctaatgctgtaaaatcagtggtcatttctacacaacattctaaagatgttgacttagcaaaagtaaaagagctttgtactccgtatattgaaaaatctattccaaaaaatttattaggaaatcttgatgaaaaagaaatttatataaatcccacagggaattttgttataggtggtcctgatggagatagtggattaacaggcagaaagataattgtagatacttatggtggtgcagcacctcatggtggtggcgctttttcaggaaaagatccaacaaaagtagatagatcagcagcatacgcatcaagatatcttgcaaaaaatgttgtggcgtctggtattgcagataagtgcttaattcaattagcatatgcaataggtgtttctaaacctttatcaatatatgtggatctatttgataatgatgaagaaaaaaatgcacatgt

SEQ ID NO: 243218 - DNA, 388 bp, Unknown
  Bacterial polypeptide expressing nucleotide sequence isolated from the Sargasso Sea
gggatggcaagacacggaggtggtgccttttctggaaaagacccatccaaagttgataggtctgcagcttatgcatccagatatgttgcaaaaaacatagttgcagcaggtttagccgatttttgtgaaattcaggtatcctatgccattggtgttgcaaaacctacttcaatcttcgtggaaacattcaacagtgaaaaagttgcaaaagaagttattgtcaaattagttgaagaagaatttgacttgaggcccaaaagtattatcgaaatgctggatttgaaacgcccaatttatcaacaaacagctgcctatggtcattttgggagaactgacattgagctcagttgggaaaaaacggatagagctgaaaagttaaaaaaataat

SEQ ID NO: 243219 - DNA, 519 bp, Unknown
  Bacterial polypeptide expressing nucleotide sequence isolated from the Sargasso Sea
acgctgccctggttggagccagacgccaaaagccaattgacgatgcgttattcaaatggcaaaccggagggtattgatgccgtcgtgctctcgacacaacaccgagatgaggtttcactatcagagcttagggaagcggtaatggaggaaattataaaaccagtgctgccagcccactggatagatgaaggtacaaaatattttatcaatccaactggcaggtttgtaattggaggcccacagggagactgcggattaacgggaagaaagattatagtcgatacttatggcggcatggctcgtcatggaggcggtgctttttcaggcaaggatccttctaaagtagataggtcagctgcctacttggctaggtatatagcgaagaatctggttgccgcgaatctcgcggaacgatgcgagttacagctgtcctacgctattggcatcgctgagccaacatcaatcagcgttgaaacctttggaacaggcaagatttcagacgaaagaattgtcgcgctg

SEQ ID NO: 243220 - DNA, 754 bp, Unknown
  Bacterial polypeptide expressing nucleotide sequence isolated from the Sargasso Sea
aatggcaaataagaattatttatttactagcgagtcagtttctgagggtcatccagataaagtttgtgacagaatctctgatatggttgtagacacttatttgtctaaagatccggtttctagagtagcttgtgaaacgctaactacaactaataaggtcgttctagctggtgagacacgtggacctaaattagataaagaggaacttataactcaagtgaggaattgcataaaggatattggttacgatcagaaaggatttagttggaaaactgcagatatagaaacacacttgcatgaacaatcctccgatatagcaatgggagtagattccaaggaaaataaggacgaaggtgcaggtgaccaaggtataatgtttggctatgcctgtaaagaaaccgaagatctaatgccagccccaattcatttctctcataagattcttaggttaatggcatcagatagaaaagatggatcattaaaaggaatcgagccagattcaaaaagtcaagttacaatgatgtatgaaaatgggaaacctaaaaaagttacttcaattgttgtttctactcaacattctagggacctaagacaagaagaagtaagagaattaattattccttatatcaaaaaatctattcccgataattatttggaagaacttgataataatgaaatttatattaatcccactggtcaattcataataggtggcccagacggtgatacaggccttactggaagaaaaatattg

SEQ ID NO: 243221 - DNA, 655 bp, Unknown
  Bacterial polypeptide expressing nucleotide sequence isolated from the Sargasso Sea
aataacaattgaatatagagatggaattccagcagcggttaaatctgttgttatttcaactcaacattcagcagatgtagatcaaaaaaaagtaagagagcttgtaaagccctatattgaaaaatcaatacccaaaaatttattaggagaattaaaagaggaagaaatttatgtaaacccaactggaaattttgttataggtggaccagatggagacagtggactaactggtagaaaaataattgttgatacttacggtggagcagccccacacggtggtggagctttttcaggaaaagatccaacaaaagtagatagatctgcagcttatgcttcaagataccttgcaaaaaatgtagtcgcgtcaaaaatagcaaaaagatgcttgatacagcttgcttatgctattggagtttctaaacctctctcaatttatgttgatctttttgataatgatgaaaataaaaatatgcatgtagaaaaattaattaacgagaattttgatttaagtccgcgagggattcgggagatgttaggtttaaataaaccaatttatcaaaaaacagcagcctacggtcattttggaagagtggctgagtcagatggttcattttcttgggaaaagacagataaatccaatatttttaataagtaa

SEQ ID NO: 243222 - DNA, 503 bp, Unknown
  Bacterial polypeptide expressing nucleotide sequence isolated from the Sargasso Sea
gatgaaaaggaaattttatgtgaacccaacaggaaatttcgtaattggaggccctgacggtgacagtggtttgactggtaggaaaattattgttgacacatatggtggagcagcaccccatggaggaggtgcattttctggaaaagatccaaccaaagttgatagatcagctgcttatgcatccagatatttagcaaagaatgttgttgcatctaaaattgctaacaaatgtttgattcaacttgcatatgctataggtgtatcaaaacctttatcaatttatgttgatttatttgataatgatgatgaaaaaaataaatatgtagaaaaacttatacatgaaaattttgatttaagccctagaggcataagagagatgttaggtctaaataaacctatttatgaaaaaacagcagcatatggacacttcggaagaattccagatgataaaggttcattttcgtgggaaaagacagataaatcagacttatttagtaagtaaa

SEQ ID NO: 243223 - DNA, 841 bp, Unknown
  Bacterial polypeptide expressing nucleotide sequence isolated from the Sargasso Sea
gatgtcatatctattcacatcagagtctgttagtgaagggcacccggataaagttgctgatcaaattagtgatggtattttagaccatttccttgcatttgatccaaatagtagagttgcagttgaaactttagttactacgggtcaagtaattttatctggagaagtatctagttcagcttatttagatgttcaaaatattgctagagaaatcatctcttcaataggatataataattcagaatacaaatttactggagaatcttgtgcagttatgtctctaattcatgaacaatctgtagatatctctagaggagtagttgctgacaataaggaagatcaaggtgctggtgatcaaggtattatgtttggatatgcgtgtaacgatacagaaaatgcgataccacttactcttgaaatatcaaatgaaattcttaaagaacttgctctactcagaaaagaaaaagtattagattatttaaggccagattcaaaatcacaggtaactataaagtatggtgatgatgatgacccaatcatgattgatacaattgttatctcaacacaacatgatgagtttgataaagatgaaaataaaatgttatctgttatcaaagatgatatgataaataaattaatgcctagagtaatagataaatttcctgatgcaattaagaaattatttagtgaaaaaataaaatattttattaacccaaccgggaaatttgttatcggaggacctcatggtgatacaggcttaacaggtaggaaaatcattattgatacttatggaggaaaaggtgctcatggaggcggagcatttagtggaaaagatcctagt

SEQ ID NO: 243224 - DNA, 924 bp, Unknown
  Bacterial polypeptide expressing nucleotide sequence isolated from the Sargasso Sea
aattatatttttacatctgagtcagtgtctgagggacacccagataaagtttctgataggatttctgatgcagttgtcgatcattttatctccaaagacccatttgctagagtcgcttgcgaaacattaacaacaaccaacaaagttgttttatctggtgaagtaagaggaccagtccaagaagacaaagatgaaattatttcaaaagtaagggagtgcataaaagacatcggctatgagcaagatggttttcattggcaaaccgcagatatccaatatttacttcacggacaatctgcagatattgcaatgggtgtagactcatcatctgacaaagacgagggggcaggtgaccaaggaattatgtttggatacgcttgtacggaaacacctgaactgatgccggcaccaattttttattctcataaaatcttagagataatggctaagggtagaaaagacggtagcttaaaaggattagagcctgactcaaaaagccaagtaactcttaaatacgttgatggtaaaccaagtgcagttacatctgttgtgatatcaacacaacatgctgatggattatctcctgctgatgttaaagaaatagtaaatccagcattaaaagaatctatccctgaagagttattaaaaaatttagatgataaagaatactacgtaaatccaacaggtaattttgtaattggaggaccagatggtgatacgggattaacaggaagaaaaattattgtcgacacctatggtggtgcagcacctcacggtggaggggctttctctggaaaagatcctacaaaagtcgaccgctctgccgcttatgcttcacgatacttagcaaaaaatattgttgctgccggtttatgtgatcagtgtactatcccagttgtcttatgcaatcggtgtagccaaacc

SEQ ID NO: 243225 - DNA, 885 bp, Unknown
  Bacterial polypeptide expressing nucleotide sequence isolated from the Sargasso Sea
gtcgtggactcatatctatctaaagatccattttctagagttgcatgtgagacacttactacaacgaataaagtagtgttagcaggagaaataagaggtcccaaaatagataaagaagaaataataagcaaagtaagagaatgtataaaagatattggctatgaccagcaagggtttagctggagaacttctaatgtagaaacttttttgcacgagcagtctgcagatatagctatgggagtagattcaaaggataacaaagatgagggagcaggagatcagggaataatgtttggttatgcttgcgacgagacggaagaacttatgccagcccctattcacttttctcacaaaattttaagatcaatggcagaagatagaaaaaaaggtgatttaaaaggaatagagcctgactctaaaagccaagttacaatgttatacgaagacaataaacctattaaggtaacttctgttgttatttctacacaacattcaaaagatttaaatcaagaaaaagtcaaagatttgataattccttatataaataaatgtattccaaaaaactatattaaagaattaaatccaaaagaaatttatattaatcctaccggacaatttattattggtggaccagatggagatacaggtttaacaggaagaaaaataattgtagatacttatggaggagcagcgcctcacggtggaggagctttttctggaaaagacccaactaaagtggacagatctgcagcttatgccgcaagatatttggctaaaaatattgtttccgcaggagtttctacgaaatgtttaattcagttggcttatgctattggagtctcaaagccgttatcaatttttataaaacttgctgaaggagatgag

SEQ ID NO: 243226 - DNA, 346 bp, Unknown
  Bacterial polypeptide expressing nucleotide sequence isolated from the Sargasso Sea
gatgaaaaagaattatctatttactagtgagtcagtttcagagggtcacccagataaagtttgcgatagaatatcagatatggtcgtagatagttatttaggagcagaacctcagtcaagagtagcctgtgaaacattaacaacaacaaataaagttgttttagccggagaggtcagaggaccagaaattaaaaaagatgatttaattcagaaagttagagaatgtatcaaggatattggttatgaccaagatggttttagttggaaagatacaactaagattgaaactcatttacacgctcaatcagcagatatagcaatgggtgtagactcatcaggaaataaa

SEQ ID NO: 243227 - DNA, 272 bp, Unknown
  Bacterial polypeptide expressing nucleotide sequence isolated from the Sargasso Sea
gtttgatacattatcttacgctataggagtttctaagccattatcaatttatgttgatctttttgatggtgacgaagaaaaagcaaagcatgttgaaaaattaatcaaagacaattttgatttaagtcctcgaggaataagagaaatgctattgctgaacaaacctatatatgagtgtacagcagcctatggtcattttggaagaaaaccagattcaaaaggcagtttttcatgggaaaaaactgataaaattggtattttcaaaaagtagt

SEQ ID NO: 243228 - DNA, 637 bp, Unknown
  Bacterial polypeptide expressing nucleotide sequence isolated from the Sargasso Sea
tatgagtaaatttttatttacatcagaatctgtgactgaagggcatccagacaaagcatgtgatgcaatatcagatgcaatattagataatattttatcaaaagataataatgctcatgtcgcatgtgaaactttggctacaaaagggttagttgtagtttctggtgaaattagaactactgcaagtatagatgtagaaaaagtggttaagaatacaattggagaaattggttatcataaaggaaatagtggtgtagaccctaatgaagttgaagtactatcaaaattacatgagcaaagtccagaaattgctcaaggagtagattcgaaagatatatctaaacaaggagcaggagatcaaggcttgatgtttggttttgcttgtaatgaaacaaaagaactcatgccattgcccatacaaattgcacaacgattaacggaaaaattaacagaattaagaaaaagtggtaccttaccatggttaagaccggacggtaagtctcaagtttctgtcgattatgaaaatggaaaacctatttccatccaaaaaactgtaattgcaacacaacatgatgatatgattgatcaatatgggtctgaagaaaaagagctcgaatttttaaaaatgaagttgtaa

SEQ ID NO: 243229 - DNA, 814 bp, Unknown
  Bacterial polypeptide expressing nucleotide sequence isolated from the Sargasso Sea
taataatataagtcaaagagaattcttttttacatctgaatcagtaactgaaggacatccagataaagtttgtgattgtatttcagatggcgttttagattctattttatcattagatccagatgcaagagtagcgtgcgaaacaatggcatcagctgaaaagataattttatctggtgagataagtacaaagttaaatttagataaagatttttatatagatgtagcgagaaaatctttaaatgaaattggctattcatgtaattcagctggaatgattggtgataaagttgatgttgaggttaatattgttaaacaaagtccagatatcgctagaggattaagccagaaaaataagaaaaatcaaggagcaggtgatcagggcttaatgtttggttttgcatgtaaagaaactaaacagttaatgcctcttcctatccaaatgtctcatcagcttgcagaacaattaactgaagttagaaagtctaatattctagattttctgcagcctgatggtaagactcaagtaacaattaaatataaaggttataccccaattgaaatttcaaaaattgtaattgctactcaacataatgatttattaaaaaagttttctaatagtacagctaaggagcagaaattcattagagaatctttgattaaagaagtaattaatcctattattgggaagtatgaaattgattttaatgataatgtgatagttaatgggactggaagatttgttaaaggcgggccaggtgcagatactggtttaacaggaagaaaaattatgtcgatacatatggtggatatg

SEQ ID NO: 243230 - DNA, 859 bp, Unknown
  Bacterial polypeptide expressing nucleotide sequence isolated from the Sargasso Sea
tctgatatagcaatgggtgtagattcttcaggcaataaagacgaaggagctggagatcaaggaataatgtttggttatgcatgcaatgaaacagaagagttaatgccagcacctattcattactcacataaaattttaagactaatggctgaggatagaaagtctggtaaacttaaaaatatcgaaccagactctaaaagccaagttacttttgagtatgttgatggaaaaccaacaaaagttaaatctgtagttatttcatcacaacattctgcagatgtaaatcaaacacaggttagagagttattaagaccttatatgataaattctattccaaaaaattttttagacggtttcaatgaaggggagttttatgtgaatccaacaggtaattttgttattggaggccctgatggtgattgtgggcttacaggaagaaaaattatagttgatacttatggaggtgcagcacctcatggtgggggagcattttcaggaaaggatccaactaaagttgataggtcagcagcttatgcagcaaggtatattgcaaaaaatgtagttgcctcaaaaatcgctaacaaatgtttaattcaattagcatatgcaataggtgtatctaaaccgttatcaatttatgttgatttatttgataatgatgttgaaaaaaataaatttgttgtagaaaaaattaatgataattttaacctaagcccaagaggaattagagaaatgttaaatctaaataaacctatatatgaaaaaacagctgcatatggtcattttggaagaagcccagaggaaaatggctctttttcttgggaaaaaacagacaaaataaaagccttcttaaaatagt

SEQ ID NO: 243231 - DNA, 338 bp, Unknown
  Bacterial polypeptide expressing nucleotide sequence isolated from the Sargasso Sea
catggctagacatggtggtggtgctttctctggcaaagatccttctaaagttgatagatcggcagcttatgcaggaagatatgtagcaaaaaatattgtagcagcaggccttgctgatcgatgtgaaatccaagtttcttatgcaataggtgttgctgagccaacctctattagcgttaatacttttggaacttcaaaaattgatgaagaaaagatttctgatttaattagagagcattttgatctaaggccgagacagcttatcaatatgctcgacttaaaaaggcctatatatcaatctacagccgcttatggacacttcggaagagaagaagctg

SEQ ID NO: 243232 - DNA, 343 bp, Unknown
  Bacterial polypeptide expressing nucleotide sequence isolated from the Sargasso Sea
atgagtaatttaaaaaattttcttttcaccagtgagtctgtttcagaaggacacccagataaagtttcagatagaatttctgatatggtggttgatagttatcttttaggtgatccattctcaagagtagcttgtgaaacacttacaacaacaaacaaagtcgttttagctggtgaagtaagaggcccagaaattaaaaaaaacgatttaattgaaaaagtaagacactgcataaaagatattggttacgatcaagatggtttcacctggaaagaagctacaaaaatagaaagccatcttcattctcaatctgctgatatagcgatgggcgtagactcttcag

SEQ ID NO: 243233 - DNA, 817 bp, Unknown
  Bacterial polypeptide expressing nucleotide sequence isolated from the Sargasso Sea
tgatcagggagcaggtgatcagggattaatgtttggttacgcatcaaatgaaactgagcaacttatgccagcaccaatatactattcacatcgacttgtcgaaaaacagactaaattattaaaaagtaaaaaagtagattggttattacctgatgctaaaagtcagattacttttgtttatgagaacggtcgacctgaaaaaatagatactgttgtattatccactcaacattcgaaagatgtaactcttagcgatgttaaagattttgtgatggaagaaattataaaaacaacaatacctaaaaatttattatcgagtgccactaagattcatattaatccaacaggaaactttgtcattggaggaccaaacggcgattgtggtttgactggtagaaaaataatcgttgatacttacggtggtatggcaagacatggtggaggtgctttctctggtaaagatccatctaaagttgataggtctgcagcctatatggcaaggtatatcgcaaaaaatattgtagctactgagcttgcagataaatgtgaaatacagctctcttatgcaatcggcgttgctgagccaacttcaatttctgttgatacttttggaacatcgaagattgagaattctaaaatatcctctgcagtaagtaaggtatttaatctcactccgaagggtattattgacacgctagaccttctgaacgtaaaatatcaacctaccgcagcttttggacatttcgggagagatgacaaaaattttacttgggaacaaaaggataaggttgatatactaatgaatgaactaggatag

SEQ ID NO: 243234 - DNA, 856 bp, Unknown
  Bacterial polypeptide expressing nucleotide sequence isolated from the Sargasso Sea
agatattgcaatgggcgttgattctaaagacaacaaagatgaaggagccggagatcaaggcataatgtttggatatgcctgcgatgaaacaaaggaacttatgccagcaccaatacactattcccataagatattaagattgatggcggaggatagaaaaaaaggaattcttgaaggtattgaacctgactcaaaaagccaagtaacaatgttatatgaaaatgaaagaccaattaaagtaacatcaatagttgtatcaacacaacattctaaagatttaaatcaggaaaaagtgagagaagctattatcccatatattaagaaatcaataccagaaaattttttaaaagaactcgatcctaaagaaatttatataaatcctacaggccaatttattattggaggacctgacggcgacactggccttacaggtagaaaaattattgttgatacatatggtggtgctgcaccacatggtgggggagcattttcaggaaaagatccaacaaaagtagatagatcagcagcctatgtatcgagatatttggctaaaaatattgttgcagggggtgtttccaaaaaatgtctaattcaacttgcttatgctattggagtatcaaaacctttatctatttttatcaaactagcaaatggcgatgaaaaaaaagttgataaagtaaaaaaaataattgaagataattttaacctttcaccaagaggcattagagagatgttaaaactaaacaagccaatatacgaagtcacatcggcttacggacactttggaagaaaccacacaaataaaggtgaatttacttgggaaaagaccgataaaagtgatttatttaaattgtaa

SEQ ID NO: 243235 - DNA, 820 bp, Unknown
  Bacterial polypeptide expressing nucleotide sequence isolated from the Sargasso Sea
agatgaaggtgccggagatcaaggtataatgtttggctatgcatgtgatgaaacagatgttttaatgccagctccaattcactattcacataaaattttaagactaatggctgaagatagaaaatcagggaaattaaaaagcattgaaccagactcaaaaagccaaataacaatagagtataaagatggaaaacctgcagctgttaaatctgtagtaatatcaacacaacattctgcagatgtaaatcaagctgatgtaagagaattagttaaaccttacattgaaaaatctataccaaaaaacttattatcagatcttagagaagatgaaatttatgtaaatcctactggaaactttgttattggaggaccagatggagatgcaggcttgactggaagaaaaattatagttgatacttatggtggtgctgcgcctcacggtggtggagcattctcgggaaaagatcccacaaaagttgatagatcagcagcttatgcttctagatatttagcaaaaaatatagttgcttcaaaaatttctgatagatgtttaatacagcttgcttatgctattggggtctctaaaccactttctatttatgttaatcttttcaataataatgaggaacaaaatagacatgttgaaaagttaataagagaaaattttgatttaagtcctagaggaattagagaaatgttgagtttaaataaacctatttatcaaaaaactgcagcatatggtcattttggaagagagcctgaatcagatggatcattttcatgggaaaaaactgataaatcaaacatatttaatagttaa

SEQ ID NO: 243236 - DNA, 691 bp, Unknown
  Bacterial polypeptide expressing nucleotide sequence isolated from the Sargasso Sea
atgagaccttatttttttacgagtgagtccgtatcagaaggacaccctgacaaagtctgtgacagaatatcggatatggttgtcgatacatacttatcatcaggagacccaaatactcgcgttgcatgcgaaacacttactacaacaaataaagtagttttagctggtgaggtaagaggtccatccatatcaaaagatcaaatcatttctcaagtaagagaatgcattagggatattggatatgaacaaaatggctttcattggaaaaattgcgaaatagattatcatttacaccctcaatcatcagatattgccatgggggttgactctggaagtaataaggatgaaggagcaggagaccaaggtattatgtttggctttgcatgtaaagatacagacacattaatgccagcaccaattcactattctcatcaaattttatataaaatggctgaggctagaaaaaatggatctgcagctggtttagagccagattctaaaagtcaagtaacaatgctttacgaaaatggcaaaccgactagagtaacatcacttgtaatatcatcacaacacaaagaaggcttgtcaccaactgatgtaaaagaaattgttaagccttatgtttatgaaagtataccaaatcatttacttgaagaccttaaagatgaagaattttatgttaatccaactg

SEQ ID NO: 243237 - DNA, 763 bp, Unknown
  Bacterial polypeptide expressing nucleotide sequence isolated from the Sargasso Sea
atgacaaataaaacatatttaatgacatctgagtcggttggagaaggccatcctgataagatggcagatcagatctcagacgcaatactagatgcaattctcgcgcaagacaaaggctgcagagttgctgtggaaactctcgtcaaaaccggattggttgttctgggcggcgaaataacaactactgctgatgtggattatgaggcaatcgcaagaagaaccattaaaagaatcggttatgacaaagaagagcttgggtttgatgatcaatcctgtgaggttttagtagcgatcagcaagcaatctccggatatcgcgatgggcgtggatcgcgctgatgagaaagaacaaggcgcaggagatcagggtttaatgtttggttatgcgaccaatgaaacgaaacaattgatgccagcaaccattcaattgtcgcatcaattggtaaaaagacacgccgatgtcagaagaagcggtgagctcagctggctaaggccggatgcaaaaagtcaggtaaccattctattcgatgacggtaaaccgaaatcaatcgatacagtggttctatcgacacaacatgacgaggatgtctcgatggatgaaattcaagcaggtgttttggaacacatcattaagccaatacttcctgaagaacttttgactgaaaccacccaatacctcatcaatccaactggaaattttattattggcggtcccgtaggagactgcggactgaccggtagaaaaataatgtggatacttatgg

SEQ ID NO: 243238 - DNA, 695 bp, Unknown
  Bacterial polypeptide expressing nucleotide sequence isolated from the Sargasso Sea
gctggctgatcaaatctcggatggcatcttggatgcgtgcttggaacaagacccggactccaaggttgcgtgcgagacggcgacgaagacgaacatggtgatggtgttcggtgagatcacgaccaaggccaaggttgattacgaggcggtcgttcgtcaagtgtgccgcgacgtcgggttcatctcggacgaaaccggtctcgacgggaacaagtgccgcgtgctcgtggaattgcacgatcaatctccggatatcggacaaggtgtgcacggtatgggtacgaagtctgatgaagacgttggtgccggtgatcaaggtcacatgtttggctacgccacggatgaaacgccggaattgatgccgctcacgcacgtcttggccaccaagctcggacaccgcctcaccgtcgtgcgcaaggatggcacgtgcccgtgggtgcttccggatggtaagacgcaagtcaccatcgagtacgagaacgagaacggtgccatggtgccgaagcgcgtccacaccatcttgatctccacccaacacatcgaaggcgtcaccaacgaaaagatcgccgacgatttgatgaacgaagtcatcaaaaaggttgtcccggagaagtacctcgacgccgacaccatcttccacttgaacccgtccggaagattcgtcatcggtggtccgcacggtgacgccggtttga

SEQ ID NO: 243239 - DNA, 304 bp, Unknown
  Bacterial polypeptide expressing nucleotide sequence isolated from the Sargasso Sea
aatgaaaaaagattttttgtttactagcgagtcagtttcagaaggacatccggataaagtttgtgatagaatttcagatatggtagtagatacttatttgggtttggaaccccaatcaagagtagcttgtgaaactttaaccacaacaaataaagttgttttagctggagaggtaagaggaccagaaatcaaaaaggatgatttaattcaaaaagttagagaatgcattaaggatattggatatgaccaaaaaggcttcacttggaaagatgcaactaaaatagagagtcatttacactcacaa

SEQ ID NO: 243240 - DNA, 299 bp, Unknown
  Bacterial polypeptide expressing nucleotide sequence isolated from the Sargasso Sea
agttgcatcaaaaatttccgatagatgtttaatacagcttgcgtatgctatcggtgtctccaaaccactttctatttatgttaatcttttcactaatgatgaagaacaaaacagacatgttgaaaaattaataagagaaaactttgatttaagtcctagaggaattagagaaatgttgagtttaaataaacctatttatcaaaaaactgcagcatatggtcattttgggagagagccagaatcagatggatcattttcatgggaaaaaactgataaatcaaacatatttaatagttaaa

SEQ ID NO: 243241 - DNA, 628 bp, Unknown
  Bacterial polypeptide expressing nucleotide sequence isolated from the Sargasso Sea
aatgaagaagaaattcgtcaaagaataaaaaaagatttatggacgagtgttttgattcctgctactgaagatttagaaattaaaccaaacatcaacaaaacaagatttctagtaaatcctacgggaaaatttgtcgtaggaggtcctcaaggagatgcggggcttactggcagaaaaattattgtagatacttatggtggatatgctagacatggaggcggagcattttctggtaaagatcccacaaaagtagatagatcagccgcttatgctgcacgttatgtagctaaaagtatagttaaggcaaaattggcaaaaaaagcagaagtacaattaagttatgcaattggagtagcaaaaccaatttcgatactcgtggaaacttttgatactggtgttatttcacaagctaatttgactcagcttgttaaagagcactttgatttaagaccctcagcaataatcaaagaatttaacttaagaaatctacccaaaaaaatgggaggtaaatttttcagaaaaaccgcatcttatggacattttggcagaagagatctagagcttccttgggaaaatgtagaagaaaaagcagcccaattagcggaggcttccaaaatctttttttaga

SEQ ID NO: 243242 - DNA, 562 bp, Unknown
  Bacterial polypeptide expressing nucleotide sequence isolated from the Sargasso Sea
atgaaaaaaaattatttatttactagcgagtcagtttcagaaggacatccagacaaagtttgtgatagaatatcagacatggtcgtggatagttatttaggtgcagaacctcaatcaagagtagcatgcgaaactttaacaacaacaaataaggtagttttagcaggagaagttagaggacctgaaattaaaaaagacgatttaattcaaaaagtcagagaatgtattaaagatattggttatgatcaagatggctttagttggagagacactactaagattgaaacacacttacactctcagtcagcagatatagctatgggtgtagactcatctggaaataaagatgaaggtgctggagaccagggaattatgtttggatatgcgtgtaacgaaactgatgttttaatgccagctccaattcattattcacatagaattttaagattaatggccgaagacagaaaatctggaaagctaaaaggaatagaaccggattcaaaaagtcaaattacagttgagtacaaagatggtctacctaatgctgtaaaatcagtagtaa

SEQ ID NO: 243243 - DNA, 961 bp, Unknown
  Bacterial polypeptide expressing nucleotide sequence isolated from the Sargasso Sea
tgagtctgtatcagaaggacaccctgataaagtttcagatagaatttctgatatggtagttgatagttatctttcaggagatccattttcaagagtagcttgtgagacacttacaacaacaaataaagttgttttagctggcgaagtaagaggtccagaaattaaagaaaatgatttgattgaaaaagtaagacactgcataaaagatattggttatgatcaagatggtttcacttggaaagaagctacaaaaatagaaagccatctccattcccaatctgctgatatagcaatgggtgtagactcttcaagtaataaagatgaaggagctggagatcaaggaataatgttcggttatgcatgcaatgaaacagaagagttaatgccagcacctattcactactcacacaaaattttaagactaatggctgaggatagaaagtctggtaaacttaaaaatattgaaccagactctaaaagccaagttacttttgagtatgttgatggaaaaccaacaaaagttaaatctgtagttatttcatcacaacattctgctgatgtaaatcaaactcaagttagagatttattaagaccttatatgataaactctattccaaattcttttttagatggttttaatgaagaggagttttatgtaaatcccacaggtaattttgtaattggaggccctgatggtgattgcggtttaacaggaagaaaaattatagttgatacttatggaggtgccgcacctcatggtggtggagcattttcaggaaaggatccaactaaagttgataggtcagcagcctatgcagcaaggtatattgcaaaaaatgtagttgcctcaaaaataactaacaaatgtttaattcaattagcctatgcaataggtgtatcaaaaccgctatcaatttatgttgatctatttgataaagatgttgaaaaaaataaatttgtt

SEQ ID NO: 243244 - DNA, 802 bp, Unknown
  Bacterial polypeptide expressing nucleotide sequence isolated from the Sargasso Sea
aaaaaagaggaatattgtgtcaaaagtaagagattgcattaaagatatcggatatgagcaagaaggttttcattggaagaattgtagcatagatgttcacctacatgctcaatcttctgatattgctatgggtgtcgactcaaaaggaaacaaagatgagggagcaggagatcaagggattatgtttggttacgcttgtaatgaaacagatgttttaatgcctgcaccaatttattactcacataaaatcttagaattaatggcagaggatagaaaaaaaggtatttccaaagatttagaacctgactctaaaagtcaagtcactatggaatatgaaaatgggaaaccagtaagagtaaaatctatagttatttcaacccaacactctcctaaagtaaatcaaaaagaagtaaaagaaattgttagaccatatttagaaaaatctataccgaaaaaactactagcagaattaaaagaagaagaattttatgtaaatccaacaggtcaatttataattggtggaccggatggagatagtggtcttaccggaagaaaaatcatagttgatacttatggtggtgctgcgcctcatggtggcggagcattttctggaaaagatccaagtaaagttgatagatctgctgcctatgctgcaagatatgtagcaaaaaatattgtagcgtcaggaataactgacaaatgtttaattcaacttgcttatgcaattggtgtatcaaaacctctttcaatttatgtaaatctttatgacggtaatgaaaaaaaatcaaaacaagttgagaaa

SEQ ID NO: 243245 - DNA, 922 bp, Unknown
  Bacterial polypeptide expressing nucleotide sequence isolated from the Sargasso Sea
agtgagtcagtttcagaaggtcatccagataaggtttgtgatagaatatcagatatggttgtagatagttatctaggagcagaacctcagtcaagagtagcttgtgaaacattaacaacaaccaacaaagttgttttagccggagaggtaagaggaccagaaattaaaaaagatgatttaattcagaaagttagagaatgtatcaaggatattggttatgaccaggatggctttagttggaaagacaccactaagattgaaactcatttacactctcagtcagcagatatagctatgggagtagactcatctggaaataaagacgaaggtgctggagatcagggaattatgtttgggtatgcatgtaatgaaaccgatgttctaatgccggctccaattcattactcacatagaattttaagattaatggctgaagatagaaaatctggaaagctaaaaggtatagagccagattcaaaaagtcaaattacaattgagtataaagatggtgtgcctaatgcagtaaaatcagtggtgatatctacacaacattccaaagatgttgacttagcaaaagttaaagaactttgtacgccatatattgaaagatctattccaaaaaatttattaggaagtcttgatgaaaaagagatttatataaatcctacaggaaactttgttataggcggacccgatggagatagtggattgacaggtagaaagataattgtagatacttatggtggagcagcaccacatggtggaggtgctttttcaggaaaagacccaacaaaggttgatagatcggccgcatacgcttcgagatatttagcaaaaaatgtggttgcttcaaagattgcagacaaatgtttaattcagttagcttatgctattggagtttcaaaacctttatcaatttatg

SEQ ID NO: 243246 - DNA, 583 bp, Unknown
  Bacterial polypeptide expressing nucleotide sequence isolated from the Sargasso Sea
atgagtcattttttattcagttcagaatcagtatctgaaggtcatcctgataagctatgtgaccaagtatcagatgctgtcttggatgcagccttagcaggcgacccaaatagtcgagttgcagtggaaacatttgcaacaaccggtttaattgttgtggggggtgaaattaccaccacgacatcaatgaatgtgcaggacttagttcgagaaaccgttgagaatattgggtataccaacccagaatttggaattgatgctcggtcttgtgcggttttagttaccctgcataaacaatccccagatatcgcacagggtgttgatacaggtgcgggtttatttcaggagcagggggcaggagatcaagggattatgtttggttatgcgtgcaaacaaactgaaaactatatgccactcccaatcaacttgtcgcatgccttggtccgtcgtttagcagagtgtcgtaaaacaggggttcttccatatttgcgtcccgattctaaagcgcaggtaacggttgagtttaatgagaatcgtgaaccggttgccgttaaaacagttgtcgtatcgacccaacattctc

SEQ ID NO: 243247 - DNA, 799 bp, Unknown
  Bacterial polypeptide expressing nucleotide sequence isolated from the Sargasso Sea
tttacatccgagtctttttctgaaggtcatcccgataagatttgtgatagaatatccgatacaattttagatgcatacttatctttagataaaaattcccgagtagcaatagaaactcttgtcactactaatttagttgtaatttctggagaaatcagatcaacaaaaataatttctgatagtgaaattgaatctttagcaagaaatgcaattaaagaaataggatatgatttcggagactttaattatgaaaatgtaaaaattatgattcacctacatgagcaatcaccagatattgcaagaggggttgacgctattggtgataattctgaaggtgcaggcgatcaaggaattatgtttggttatgcttgtaatgaaacaaaagaattaatgccggcgacattatccttttcacataaaattctcaaagacctagcagataaaagaaaaaacaatataattactggaatacttccagactcaaaatctcagttaactctcttttatgaaaatgataaaccaaaatatattgattcaattgttgtttcctctcagcatactcaagaaacaactcaggaatatttgcatgaagaaattaataaattatgcaaaaaaatcctaccggatgtatggtatacagctgatacaaaacttttagttaatcccacaggtaattttgttataggtggtcctgtaggagatacaggtttgacaggaagaaaaatcattgtcgacacttatgggggagcatctcctcatggaggaggagcattttctgggaaagacccaacaaaggttg

SEQ ID NO: 243248 - DNA, 739 bp, Unknown
  Bacterial polypeptide expressing nucleotide sequence isolated from the Sargasso Sea
tatgtttggatatgcttgcttggaaactgaaaattatatgccaatggctatttatttatgtcacaaaatattagaacgggttcaagatgaaagaaaaaatcatgcatggatccttccagacaacaaaagccaagtaactcttacctacaatgatattaataagccaaaaaatattgaaaaaatagtttgtagcactcaacatgcagaggatgttgatattgagtatgttagaaaaaagatagaagaaataatcagagatgaaataaaagaagatcttagctctaccgagtttcttattaatccaactggtaggtttgttattggggggccggatggagatactggtttaactggtagaaaaataattgttgatacatatggaggttatgctcctcatggtggtggagctttttcgggaaaagattgcaccaaggtagatagatctggcgcttatatggctagatatctagcaaaaaatattgtttcaagtggcagagcttctaatgcaaccgtgcaattaagctatgctattggtgttgttgagccaacaagtgtttatgtttatgccgatggaaaagttagacctgatcttgcaaattggataaaagaaaatgtggatctctcccctaaagggataatagataaatttagcttatttgaactagatttaactgaaacaacattatatggacattttggcagggataatctcccatatgaaagattggatttattttag

SEQ ID NO: 243249 - DNA, 532 bp, Unknown
  Bacterial polypeptide expressing nucleotide sequence isolated from the Sargasso Sea
tatgagctacttatttacctctgaatctgtatcggaaggacatccagataaaatggcggatcaaatttctgacgccgttttagatgctatattacaaaaggatcctggcgccagagttgcctgtgaatgtcttgttaagacaggccttgccttagtcgcaggtgaaatcaccaccaactcttgggttgatattgaaaatttagtccgtgatgttattgttgatatcggctacacctcctctgacatgggctttgatggtagatcttgctcagtcctaaacgctattggtaaacaatcttttgatattgcccagggtgtcgatggtcaccgccgtggcataggagcaggagaccaaggcattatgtttggttatgcctgcaatgaaaccgatacgctcatgcccgcccccattaccctggcgcatcgcttaaccaagcgcttagcgcagcttcgtaaagaccaagttttatcatggcttagacccgatgctaaaagccaagtcaccttgcgctatgaagacacaaacccgtag

SEQ ID NO: 243250 - DNA, 425 bp, Unknown
  Bacterial polypeptide expressing nucleotide sequence isolated from the Sargasso Sea
aagaaaaattatagtagatacgtatggaggagcagcacctcatggaggcggagctttttcaggaaaagatcccacaaaagtagacagatccgcagcctatgtttctcgatatttagctaaaaatatagttgctgcaggagcctcaaataaatgtttaattcaactcgcttacgccataggagtatctaaacctctttctatatttatcaaacttgacaacggcgatgagtcaaaaatagagaagataaaaaaagtgattaatgataattttgatttatccccgagaggaatcagagaaatgttaaatttaaataacccaatttatgagataacttctgcctacggtcacttcggcagaaaaccatcaaataaaggacaattttcatgggaaaaaacagataaagtagatttatttaaagtgtgat

SEQ ID NO: 243251 - DNA, 811 bp, Unknown
  Bacterial polypeptide expressing nucleotide sequence isolated from the Sargasso Sea
agtttctaaagttagagactgtattaaagatattggttacgatcaagaaggtttttcttggaaggaacaaaccaaaattgaaacacacttgcactcacaatcagcagacattgcaatgggagtagattcggctgggaataaagatgaaggagcaggagaccaaggaattatgtttggctacgcatgtaatgaaactgatgttttgatgccagctccaattcattattcgcataaaattttaagacttatggctgaggacagaaaatcaggtaagttaaaagggatagaaccagactcaaaaagtcaaattactattgaatacaaagatggtatgccggctgctgtaacatcagtcgtcatttcaacccaacactcaaaagatgttaacttagcaaaagttaaagaactttgtatgccctatattgatagatctatacctaaaaatttattaggtaatcttgatgaaaaagaaatttacattaacccaactggtaattttgtaattgggggtccagatggagatagtggtttaacaggtagaaaaattattgttgatacttatggaggagcagcgcctcacggcggtggagcattttctggaaaagatccaacaaaagtagatagatccgcagcttatgcttcaagatatttagccaaaaatgttgtagcatcaaaaattgctgataaatgtttaattcaattggcatatgctattggagtatctaaacctttatcaatttatgtagacttgtttgataatgatgaagaaaaaaatatgcatgtagaaaaactaattaaggaaaattttgat

SEQ ID NO: 243252 - DNA, 583 bp, Unknown
  Bacterial polypeptide expressing nucleotide sequence isolated from the Sargasso Sea
gttgttatacctgcgactgaagatttagaaatcaagccagacatgcacaaaacaagatttctagtaaatcccacaggtaaatttgtcataggaggtcctcaaggagatgcaggccttactggcagaaaaataattgtagatacttatggagggtatgcaagacacggaggtggcgcattttcgggcaaagatcccacaaaagtggatagatcagctgcttatgcagcacgttacgtagctaaaagtattgttaaggcaaaattagcaaaaaaggctgaagtacaattaagttatgcaattggagttgcaaagcctatttccattctcgttgaaacttttgatactggtgtgatttcacaagctaatttgactgaaattattaaagagcactttgatttaagacctgcagcaataataaatgaatttaacttaagaaatctaccaaaaaaaagcggtgggaaattttttataaagactgcatcctacggacattttggcagaagagatcttgagctcccttgggaaaatgttgaagaaaaagcagcccaattagtaaaggcatctaaaatatttttgaaataaa

SEQ ID NO: 243253 - DNA, 246 bp, Unknown
  Bacterial polypeptide expressing nucleotide sequence isolated from the Sargasso Sea
catgggccatctttttacctctgagtccgtttcagaggggcatcccgacaagctgtgtgaccgcgtatcggacaccgtactcgacctgtttctggccgaagaggccgaggcacgcgtggcctgtgaaacctttgccacaaccaaccgggtgatcattggcggtgaagttcgcgcctcaaaggacaagcttgccggcattctgtcatcggtcgagggcgccgttcgcggtgccgttgccgatattgg

SEQ ID NO: 243254 - DNA, 741 bp, Unknown
  Bacterial polypeptide expressing nucleotide sequence isolated from the Sargasso Sea
tatgagttacaaattagtgacatcagaatcggtttctgatgggcacccagataaaatagccgaccaaatttctgatgcagtacttgatcaagcattaatgcttgacaaagatgcgcgggtggcctgtgagacgattattaaaggcaagtggattggcttggcaggagagttaacagcctcttcagagatcaattactcagatgcagtatgcagtgtgttatctgaggtttataatcgaaaggtttgtgcatcagaattagagctactgattcacatggggttgcagtctaaagaaattgcgcatggtgttgatcactaccgtgatgctcgtataggtgcgggtgatcagggtgttatgtttggctatgcatgtaatgaaaataatttatttatgccctattcagttgtattatcacatcagttgatgcggcagcaaaaaaaagtacgtcaatctaatccattacttggagctgatgctaaggcgcaggttacaatggcttatacggagcatcaaccgagttatgtggatacagttttgatttcgacacagcatgtggaggagttgtcattatcagagcttagaagtttagtcaaaaaagatattatagacccggttattcctctggacttagtcactgaggatactcagtttgtgattaaccctgcaggtagttttatagaaggagggcctgatgcagattgtggcttgacagggcgtaagattattgtcgatacctatgg

SEQ ID NO: 243255 - DNA, 433 bp, Unknown
  Bacterial polypeptide expressing nucleotide sequence isolated from the Sargasso Sea
actgactggaaggaaaattatcgttgatacttatggtggggcagctccacatggaggtggagctttttcagggaaggatcctacaaaagttgatagatcagcagcttatgcttctagataccttgcaaagaatattgttgcttcaggaattagtgataaatgccttatacaactatcgtatgctattggaatatcaaaacctttatcaatttatttgaaattatcagataaagatgaaaataaagttgaggatgttaaaaaaattattaaaaaaaattttgatctctccccaagaggaattagagaaatgttagatttaaacaaacctatatatgaggtaacatctgcatatggtcattttggtaggaaaccaacagataaaggtgagttttcttgggaaaaaacagataaaaaatctttatttcaactgtaa

SEQ ID NO: 243256 - DNA, 815 bp, Unknown
  Bacterial polypeptide expressing nucleotide sequence isolated from the Sargasso Sea
aatgaaaaaaaattttttatttacaagtgaatcggtttcagaaggtcatccagataaagtatgtgacagaatttcagatatggttgtagattcttatttaggttcagagccccaatctagagtagcttgtgagactttaaccacaacaaacaaagtagtactagcaggagaagtaagaggaccggaaattaaaaaagatgatttaattcaaagggttagagactgtataaaagatattggatatgatcaggatggatttacatggaaggaagctactaaaatagaaagtcatcttcattctcaatctgcagatatagcaatgggagtagactcttcaggaaacaaagatgaaggagccggagaccaaggtataatgtttggttatgcttgcaatgaaacagatgttttaatgccggccccaattcactattctcataaaattttaaggcttatggcagaagatagaaagtcaggtaaattacaaaatattgaaccagattcaaaaagtcaaataacaatagaatataaagatggaaaacctgcttccgtaaaatcagttgtaatatcaacgcaacattctgctgatgtaaatcaatctcaagttagagatttggtaaaaccatacattgagagatcaattccaaaaaatcttattaatggactagatgaaagtgaaatttatgtaaatccaacaggtaattttgtaattggaggaccagatggagatagtggattgacaggaagaaagattattgtagatacttatggaggagctgctccacacgggggaggagctttttcaggaaaagatccta

SEQ ID NO: 243257 - DNA, 727 bp, Unknown
  Bacterial polypeptide expressing nucleotide sequence isolated from the Sargasso Sea
atgaaaaaaaattatttatttacgagcgagtcagtttccgaaggtcatccagataaggtatgtgatagaatatcagatatggttgtagactcttatttaggcgcggagtctcagtcaagagtagcttgtgaaactttaacaacaacaaataaagttgttttagctggtgaagtaagaggtccagaaataaaaaaagaagatttaattcaaaaagttagagaatgtattaaggatattggttatgatcaaaaaggttttacatggagagatgctactaaaatagaatgtcatcttcattcacagtcagctgatattgcaatgggagttgattcatcgggaaataaagatgaaggagcaggagaccaaggaataatgtttggctatgcatgcaatgagacagatgttctaatgccggcaccaatacattattctcataaaattttaaggcttatggctgaagatagaaaatctggtaaattaaaaagcatagaaccagattcaaaaagtcaaatcacaattgaatataaagatggaaaacctgctaaagtaaaatcagttgtcatttcaacacaacactcagcagatgtaaatcaatctaaagtaagagaagtagttaaaccatatattgaaaaatctattccaaaaaatcttttaaatggattagaagaaaatgaaatatatgtaaatccaaacaggaaattttgtaatcggtggccccgatggtgat

SEQ ID NO: 243258 - DNA, 375 bp, Unknown
  Bacterial polypeptide expressing nucleotide sequence isolated from the Sargasso Sea
gagctttttcaggaaaagatcctacaaaagtagacagatcagcagcctatgcagcaagatatattgcaaaaaatatagttgcgtcgaaaatttcagaaaaatgcttgattcaaatagcttatgcaattggtgtatcaaaacctctatcaatctatgttgatttatttgataaaaacattgaaaaaaacaaatttgttgttgaaaaaattaatgagaattttgatttaagtccaagaggaattagagaaatgttaaatctaaataaacctatatatgaaaaaacagcagcgtatggacattttggaagaagcccagaagaaaatggctctttttcatgggaaaaaacagataaaataaatgcttttttaaaatagt

SEQ ID NO: 243259 - DNA, 511 bp, Unknown
  Bacterial polypeptide expressing nucleotide sequence isolated from the Sargasso Sea
aaagatttgaaagaagaggaaatttatattaatccgactggacagtttataataggaggacctgatggagacacgggtctaacgggaagaaaaataattgtagatacctacggcggttcagcacctcatggtggaggagcattttctggtaaagatcctactaaagtagatagatcagctgcgtacgcatcgagatatttagcgaaaaatattgttgccgcaggtgtcagtgataattgtttaattcaacttgcatacgcaattggagtttccaagccgttatcaatttttttaagactagatgagaaggataaggacaaaagtgaaaagattttaaaaataattcatgagaattttgacttgtcacctagaggtattagggaaatgttaaagctaaacaaaccgatttatgaggttacctcttcatatggtcactttggaagaaaactaggtaaaaatggtgaattttcttgggaaaatactgataaaaaagacctttttaaactgtaaa

SEQ ID NO: 243260 - DNA, 967 bp, Unknown
  Bacterial polypeptide expressing nucleotide sequence isolated from the Sargasso Sea
atatctgatgctgttttagatgcttatttagctgaggatcctaatagtagagtagcttgtgagactatgattaaaaataatatggtttttattgcaggcgaaataacatcccttggaagtccagatcttgagccagttgtaagaaaaacaatcaatgatattggttataacactgatgagtatggttttaatggagacacttgtgagtttacaaatcttgtttttgaacaatcgcctgatatatctcaaggtgtaactgaaggagaaggtgaaaatcttgagcaaggagctggcgatcaaggtcttatgtttggttatgcttgtacagaaacagaatcattaatgccgcttcctattgacctatctcatagattggttaaaaaacaagctgatgtaatgaaggctaatggattatcatggctaagacctgatgctaaaagccaagttagtgcaatttactcagatgatggtaaaactatagaaggtctatcagcaatagttctctctacacaacatgatgaagatgttactcaggatgatattaaagaaggggttatggaagaaattattaaaccaatagttccagcagaatggattctagattcaaccaagatttatataaatcccacaggtaaatttgttatcggagggccagttggagactgtggtcttaccgggagaaaaattattgttgacacttatggtggaatggctaggcatggtggaggtgccttttctgggaaagacccatctaaggttgatcgatcagctgcttatgctgcaagatatgttgctaaaaatatagttgctgctggccttgctgattattgtgaaattcaagtttcatatgcaattggtgttgctaaaccaacttcaataaatgtaaacacattcgatagtgaaaaaatttcaaaagaagcgattgagaaaattgttgaagaaaaatttgaccttaggcctaaaagtc

SEQ ID NO: 243261 - DNA, 931 bp, Unknown
  Bacterial polypeptide expressing nucleotide sequence isolated from the Sargasso Sea
aaaatttacttatttacaagtgaatcagtttcggaagggcatccagataaagtttgtgatagaatttctgatatggtcgttgatagttatctgtctaaagatcctttttcaagggtggcttgcgaaaccttgacaacaacaaacaaagtggttttagccggggaaaccagaggaccagagattaataaaaatgaattagaggaaaaagttcgaaattgcattaaagatataggttatgagcaagatggatttcattggaaaaattgtagtgtggatataaatcttcattcacagtcatcggatatagcgatgggcgtcgactcaaaaggcaataaggatgaaggagctggagatcagggtattatgtttggatatgcatgcgatgaaactgaagttttaatgccagcaccgatatattattctcacaaaattttagagttaatggcgattgataggaaaaatggaaaagcaaacaaactagaaccagactctaaaagccaagtaacattgcaatatgaggatggagtgccatcaaaagttacagcagtagttatctcaacacaacattcccctaaagtttcgcaatcacaggttaaagagattgtgagaccatatcttgaaaaagcaatcccaaaaaaattattgacaaatttaaatgataaagatttttatgtaaatcctacaggacaatttataattggtggacctgatggtgacacaggattaacaggaagaaaaattatagttgatacttatggaggtgcagcacgtcatggtggtggagctttttcaggaaaagacccaagtaaagtggatcgatccgcagcttatgctgcaagatatgttgcaaagaatgtcgttgcatcaaaaattgccaaaaaatgtgaaatacaattatcttacgcaattgggtttcaaagccgctatctat

SEQ ID NO: 243262 - DNA, 391 bp, Unknown
  Bacterial polypeptide expressing nucleotide sequence isolated from the Sargasso Sea
gatgaaaaaaaattatttatttacaagtgagtcagtctcagaaggacatccagataaagtgtgtgatagaatttcggacatggtggtagatacctacctgggtgctgagccccattcaagagtagcatgtgaaactttaaccacaactaataaagtcgttttagccggcgaagtaagaggaccagaaataaaaaaagacgatttaatagagaaagttagaaaatgtataaaagatattggatatgatcaggatggattcacttacaaagaagcaactaaaatagaaagtcatttacatgctcaatcttcagatatagctatgggagtagattcttctggaaataaagatgagggagctggagaccaaggaataatgttcggatatgcatgt

SEQ ID NO: 243263 - DNA, 748 bp, Unknown
  Bacterial polypeptide expressing nucleotide sequence isolated from the Sargasso Sea
caacgagactgacattctgatgccagcgccaatcacctatgcccacgcattagtgaagcgccaatcagaagtgcgtaaagatggcactctgccatggttacgcccagatgcgaaaagccaagtcaccttcgcttacgaagacaacaaaattgtcggtatcgatgcgatcgtactgtctacccaacacagcccagacatcgcccaagcggatctgatcgaaggcgtgatggaaaccatcatcaagccagttctgccagctcaatggctgaacaaggacactaaatacttcatcaacccaactggccgtttcgttattggtggtccaatgggtgactgtggtttaactggtcgtaagatcatcgtagatacctacggtggtatggcgcgtcacggtggtggtgctttctctggtaaagacccatcaaaagttgaccgtagtgcggcttacgctgcccgttatgtcgcaaaaaacatcgttgctgctggcttagctgaccgttgtgagatccaagtgtcttacgctatcggtgtagccgaacctacgtctatcagcgttgagaccttcggtacaggtaaagtgtctgaagaagtcttaatcaagctagtccgtcaacacttcgacctgcgtccatacggcctgactgaaatgctgaacctggctcgcccaatctatcaagcaaccgccgcttatggtcactttggccgtaacgagttcccatgggaagcgacggataaagctgacgcactg

SEQ ID NO: 243264 - DNA, 655 bp, Unknown
  Bacterial polypeptide expressing nucleotide sequence isolated from the Sargasso Sea
aattactatagagtataaagatggaaaacctgctcatgtaaaatcagttgtaatttcaactcaacactcagcagatgtaaatcaatcacaagtaagagaattagttaaaccatatatagagaaatctattccaaaaaatcttataaatggattagaagaaagtgaaatttatgtaaaccctacaggtaattttgtaattggtggaccagatggagacagtggattaacaggaagaaaaattattgtagatacttatggaggagcggcaccccatggtggaggagctttttctggaaaagatccaactaaagtcgatagatcagcagcatatgcatcaaggtatttagcaaaaaatgttgtagcttcaaaaatagcagataaatgtttaattcaacttgcctatgcaatcggtgtatcaaagccactatcaatttatgtagatctttttgataatgatgaagaaaaaaatagacatgtagaaaaactaattaatgataattttgatttgagcccaagaggaatcagagaaatgttgaatttaaataagccaatatatgaaaaaacatcagcttatggacactttggaagagatacaggatctgatggctcattttcttgggaaaaaacagataaagcaaatgtttttaataagtaa

SEQ ID NO: 243265 - DNA, 346 bp, Unknown
  Bacterial polypeptide expressing nucleotide sequence isolated from the Sargasso Sea
atcgccagatattgctcaaggtgttaatgagggtgagggtgaagacttagatcaaggcgctggtgaccaagggcttatgtttggatatgcatgttctgaaactccagttctaatgcctgccccaattaatttatctcatgagctcgtcttaaaacaatccgaagtaagaaagaatggtgaactaagctggcttagaccagatgctaaaagtcaagttagtgttgtttataaagatgatagaaaaactgtagattatgtttctgctattgttttatcaactcaacatgatgaagatatttctcaagatgaaataaaagcaaaagtacgcgagaaaattattaatccg

SEQ ID NO: 243266 - DNA, 759 bp, Unknown
  Bacterial polypeptide expressing nucleotide sequence isolated from the Sargasso Sea
gtgctggcgatcaaggccttatgtttgggtatgcttgcttagaaactgaaaattatatgccaatggctatttatttatgtcacaaaatattagagcgggtccaaaatgaaagagaaaatcatacttggatccttcccgacaataaaagtcaagtaactcttacctataacgatattaataagccaaaaaatattgaaaaaatagtttgtagtacgcaacatgcagaggatactgacattgaacatgttagaaagaaaattgaagaaataattagagatgaaataaaagaagatcttagctctacagagtttcttattaatccaactgggaggtttgttgttggggggcctgatggagatactggtttaactggtagaaaaataattgtagatacatatgggggttatgctcctcatggaggtggagccttttcgggaaaagattgtaccaaagtagatagatctggtgcctatatggctagatatctggcaaaaaatatagtttcaagtggtaaagcttcaaatgctaccgttcaattaagttatgctattggtgttgttgagccaacaagtgtttatgtttatgctgatgggaaagttaggcccgatcttgcaaattggattaaagaaaatgtagatctttctcctaaagggataatagataaatttagcttgttcgaactagatttaacccaaacaacattatatggacactttggcagggacaatctcccatatgaaaaattagatttgttttagg

SEQ ID NO: 243267 - DNA, 332 bp, Unknown
  Bacterial polypeptide expressing nucleotide sequence isolated from the Sargasso Sea
agcatatgcagcaagatatattgccaaaaatattgttgcttcaaaaatagctgacaaatgtttaatccaattagcatatgcgattggagtatctaaaccattatctatttatgtagatttgtttgataatgatttagataaaaataaatttgttgtagaaaagattaaagaaaattttgatttaagtccaagagggatacgggaaatgctcaatctaaataaacctatttatgaaaaaacagctgcttatggtcattttgggagatcgccgaatgatgacggatcattttcctgggaaaaaactgataaatcaagcttttttaccaaatagt

SEQ ID NO: 243268 - DNA, 911 bp, Unknown
  Bacterial polypeptide expressing nucleotide sequence isolated from the Sargasso Sea
attcacttggaaagaggctacaaaaattgaatgtcatcttcactcacaatcttcagatattgcaatgggtgtagactcatcggggaataaggatgaaggagctggagaccaaggaattatgtttggatatgcttgtaatgaaacagatgttttaatgccagccccaattcattactctcataaaatattgagactaatggctgaagatagaaaatctggaaagttaaaaaatattgaaccggacagtaaaagtcaggttacatttgaatatgtagatggaaaacctactaaagttaagtcagtagtaatatcttctcaacattcagctgatgtaaatcaagcgcaagttagagatttattaagaccttatatgttaaattctattccaggaaattttcttgagggttttaatgaggatgaattctatgttaatccgacaggaaattttgtaattggtggtccagatggagattgtggtttaactggaagaaaaattatagttgatacttatggtggtgctgcccctcatggtggaggagctttttcaggaaaagatccaactaaggtagatagatcagcagcttatgcagctagatatattgcaaaaaatgttgttgcttcaaaaatatctgacaagtgtttaattcaactagcttatgcaattggagtttcaaaacctttatcaatttatgtagatttatttgataacgatttagataaaaataaatttgtaatagaaaagataaatgaaaattttgatctaagcccccgaggaataagagaaatgttaaatctaaataagccaatatatgaaaaaacagctgcttacggccattttggtagagttccagaaaatgatggctcattttcatgggaaaaaacagataaaactaatgttttttctaaatagt

SEQ ID NO: 243269 - DNA, 742 bp, Unknown
  Bacterial polypeptide expressing nucleotide sequence isolated from the Sargasso Sea
cattactctcacaaaatcttaagattgatggcagaagacagaaaatctgggaaattgaaaaatattgaaccagactctaaaagccaagtaacttttgaatatattgatggaaagccatctaaagtaaaatcagttgtcatttcctcacagcattctgccgatgtaaatcaaactcaagtcaaagatttgttgaggccttatatgttaaagtctataccaaaaaattttcttgatggttttaatgaagatgaattttatgttaatccaacaggtaactttgttattggtgggcctgatggagattgtggcttaactggaagaaaaattatagtcgatacttacggaggggccgcacctcacggtggtggggctttttcaggcaaagatccaactaaagtagatagatcagcagcttatgctgctagatatatagctaaaaatgttgttggttcagaaatttcaaaaagatgtttaatacagttagcatatgcgattggcgtatcaaaacctttatctatctacgtggatttatttgataatgatttagataaaaataaatttgtagtagaaaaaattaaagagaatttcgatttgagtccaagaggaataagagaaatgttaaatttaaataaaccgatttatgaaaaaactgcagcttatggtcattttggtaggtcacccgaagacaatggttcattttcatgggaaaaaacagataaaataggcattttttctaaatagt

SEQ ID NO: 243270 - DNA, 807 bp, Unknown
  Bacterial polypeptide expressing nucleotide sequence isolated from the Sargasso Sea
taatacgggtctttgtttacttactggagaaataacttcaaaagcaaaagtcgattacataaaacttgttagaaatgtaattaaagaaattggatatgaaggctataaggcaggaggttttgacgctaatagttgtgcagttttagtagcacttgacgagcaatcaccagatatttctcaaggtgtaaacgaagcagatgatgttaacgatgatttggaagataatactggagctggcgaccaaggcataatgtttggctatgcatgcgatgagacccctgaattaatgcccttaccgattagcttggctcatagattagccattcaacttgctaaggtgaggcatgaaaacgtacttaattatctactccctgatggtaaaactcaagtaagcattgattacgaaaaaggtttaccagtctccattaatacaatcttaatttcaactcaacataatcctgagatagatgggatgacaaatgaagaagaaattcgtcaaaggataaaagaagatttatggaagcatgttgtaattcctgctactgaagatttagaaatcaaaccaaacattatcaaaacaagatttctagtaaatcccacgggcaaatttgtcgtaggggggcctcaaggagatgccggacttactggaagaaaaattattgtagatacttatgggggttacgcaagacatggaggaggggcattttcgggtaaagatcccacaaaagtggatagatcagctgcttatgcagcacgttttgtagctaaaagtatagttaatgcaaaattagcaaaaaaggcagaagt

SEQ ID NO: 243271 - DNA, 457 bp, Unknown
  Bacterial polypeptide expressing nucleotide sequence isolated from the Sargasso Sea
aatgaaaaaagattatttatttacaagtgaatcagtatctgagggccacccagataaagtatgtgatagaatttcagatatggttgttgatacttatctagcatctgaaccgcaatcgagagttgcttgcgaaacattaacaacaacaaataaagtggttttagcaggcgagacaagaggtccagaaatcaaaaaagatgaattaatatctaaagttcgagattgtattaaagatattggttatgaccaagatggttttagttggaaagatacaactaagattgaaactcacttacattctcagtcagcagatatagctatgggtgttgattcttcaggaaacaaagatgaaggtgctggagatcagggaataatgtttggatatgcatgtaatgaaactgatgttctaatgccagccccaattcattactcacacagaattttaagattaatggct

SEQ ID NO: 243272 - DNA, 586 bp, Unknown
  Bacterial polypeptide expressing nucleotide sequence isolated from the Sargasso Sea
gcacagcgaagacatctctcaaaacgatttagtagaagctgtgatggaaaccatcatcaagccagtacttcctgctgaactaatcacaagcgcaactaagttttttattaacccaacaggccgatttgtaattggtggtccaatgggtgactgtggtttaacaggacgtaaaatcattgttgatacatacggtggtatggcacgtcacggtggtggtgctttctctggtaaagatccatcaaaagttgaccgctcagctgcatacgctgcacgttacgtggctaaaaacgtagtggctgctggccttgctgataagtgtgaattacaagtatcttacgcaataggtgttgctgagccaacctctatcagtgttgaaacctttggtactggtaaattagaagaagcacgtttaatcgaattaattcgtgaacattttgacctacgcccttacggcttaattcaaatgcttgatttagagcgccctatctaccttcctactgcagcttacggccactttggccgtgacgaattcccatgggaacgcacagataaagctgacgcacttcgcgcagcagcgggtctttaa

SEQ ID NO: 243273 - DNA, 834 bp, Unknown
  Bacterial polypeptide expressing nucleotide sequence isolated from the Sargasso Sea
accaaggcctcatgtttgggtttgcttgtaatgagacaaaagaattaatgcctcttccaattcatttatcgcatcgtttagtagaacgtatgactgatcttcgaaaaaatggaacaatatcatggttaaggccagatagtaaatcacaggtatctgtagcatatgaaaatgaaactcctattgcaattaaaaaagttgtaattgctactcaacatgatgatatgttaaataaatttgataatgagaatgatgaacatgattttgttgaaaaagaaattattaatcatgtgattaaacctgttcttgatgaatctggacttccctacgatgagtcatttatagtaaatggaactgggagatttgtttttggtgggccagaagcagatacaggtttgactggacgaaaaataattgttgatacttatggaggatacgccccacatggaggaggtgctttctcaggaaaagatccatccaaagtagatcgttctgcagcttatatggcaaggtatatagcaaaaaattttgttgctgccaatttagcgacaaaatgtgaagtgcagttgtcttatagtataggcgtagctgagccaacctcattttatgtaaagtcatttggtacaagcgaattatccgatgaacaacttactgatatagcaaaatcagtatttgaattaaaacctggacaaattattaatcatttaaatttgaaatatcctagatatagaattaccgctgctaatggacactttggtcgtgagaatgatctttttacgtgggaaaaaacagacaaggttgatgaacttaaagcagcagtttcagaaaggaaataat

SEQ ID NO: 243274 - DNA, 838 bp, Unknown
  Bacterial polypeptide expressing nucleotide sequence isolated from the Sargasso Sea
gaattaatttcaaaagtaagagattgtattaaagatataggttatgaccaagatggtttttcttggagagatcaaactaaaattgaagcacatttacactctcaatcagcagatatagcaatgggtgtagactcggctggaaacaaagacgagggtgcgggagaccaaggaattatgtttggttatgcttgtaatgaaacagatgttttaatgccagccccaattcattattctcataaaattttaagactgatggctgaggatagaaaatcaggaaagttgaatggaattgagccagactcaaaaagtcaaattactattgaatataaagatggtatgccttcagctgtaacatcagtagttatttctacacaacattcaaaagatgttaacttagctcaagttaaagaactttgtatgccctatatagagcgatctatccctaaaaatttattgggaagccttgatgaaaaagagatttacattaaccctactggaaactttgtaatcggtggaccagatggagatagtggtttgactggaagaaaaattattgttgatacatatggtggagctgcacctcatggtggaggtgcattttctggaaaagatcctacaaaagttgatagatcagctgcttatgcatcaagatatttagctaaaaatgttgtggcatcaaaaattgctgataaatgtttaattcagttagcctacgctattggagtttctaaaccactatcaatttatgtagatttgtttgataatgacgaagaaaagaacgtgcatgttgaaaaacttattaaagaaaactttgatttaagcccaagaggaattagag

SEQ ID NO: 243275 - DNA, 727 bp, Unknown
  Bacterial polypeptide expressing nucleotide sequence isolated from the Sargasso Sea
gaccaaggaatcatggtaggttatgctataaatgaaacagaatctcttatgcctccaacttttgataagtctagaaatattcaacaggctttgtgggatatacaacattctgatgaaatgttagatttagactcaaaagtgcaagttactacaggaggggataaaacaaaagttgttgtgtctacccaacaccaaagtgaaattgatattgatgatttacattcaagagtatttgaacttgtagggaattatataagcgaggaatatattcttgatttaaatccttcaggatcatttgtcaaaggaggtccagcgggagacacaggccttactggaagaaagattgtcgttgatgcttatgggccatctgttccagttggaggaggagcattttctgggaaagacccaagcaaagtggacagatcagctgcttatgcagctagacacctagcaaagaatatagtatctcatggcctatcagacgagtgtctagtaagagtttcctatgcaataggcaaagctgatccatacgaattaacagttgaaacttttggtactgaaaaatcagaaaataaagttttagatgattttacaagcaagtttgatatgaagcctggggcaataattgaaaggctcaaccttcttgaggttgactataaggaggatactttgttttcacactttggtcataatgatagaaattgggaaaaaatagaaaatttataga

SEQ ID NO: 243276 - DNA, 402 bp, Unknown
  Bacterial polypeptide expressing nucleotide sequence isolated from the Sargasso Sea
tttccggtaaagaccccactaaagtagatagatcagccgcttatgcagctcgttatgttgctaaaagtatagttaaagcaaaattggcaaaaaaggtagaagtacaattaagttatgcgattggagttgcaaaaccgatttccattcttgttgaaacttttgatactggtgttatttcacaggctaatttgactgagcttgttaaaaagtactttgatttaagacctgcagcaattataaaagaatttgacttaagaaatctaccaaaaaaaatgggtggtaaatttttcagagagactgcatcctatggacattttggcagaagagatcttgacctgccttgggaaaatgtagaagaaaaagcatctcaattagcaaaagcctccaaagtatttttataga

SEQ ID NO: 243277 - DNA, 340 bp, Unknown
  Bacterial polypeptide expressing nucleotide sequence isolated from the Sargasso Sea
aatgagtaatttaaaaaactatctttttacaagtgagtccgtatccgaaggacatcctgataaagtttcagatagaatttcagatatggtagttgacagttacttatctaatgatcctttttctagagtagcctgtgaaacattaacaacaactaataaagttgttcttgcaggtgaagttagagggccagaaattaaaaaggacgaattaattgaaaaagttagagactgcattaaagatattggttatgatcagaagggttttacctggagagaagcaacaaaaattgaaagtcatttacattctcaatcagttgatattgcaatcggtgtagattct

SEQ ID NO: 243278 - DNA, 864 bp, Unknown
  Bacterial polypeptide expressing nucleotide sequence isolated from the Sargasso Sea
aagtagagtggcctgcgaaacagtagtcaacacaggcctttgcctacttacaggtgaaataacttctagagcaaagcttgattatataaaacttgtcagaaaagtaattaaagaaattggatatgaaggttcaaaagctggaggttttgactcaaatagctgcgctgttttagtagctcttgacgagcaatcacctgatatttcccaaggagtaaatgaagcagatgatatgaatgaggacttggaaaataatactggggctggtgatcaggggataatgtttggctatgcatgtgatgaaacacctgaattaatgccattaccaattagcttggctcacagattagcaatacaacttgcaaaagtaagacatgaaaaagttcttgattatcttctacctgatggaaaaactcaagtaagtattgattacaaaaaaggggtcccagtttcaataaacaccattttaatttcaactcagcatacggctgagattgatgggattacaaatgaagaagaaattcgtcaaaagataaaagaagatttatggatcaatgttgtattgccagcaacagaagatttagaaatcaaaccttcaagtcacaagaccagattcctagtaaaccccacaggtaaatttgtagtagggggacctcaaggagatgcaggacttactggtagaaaaattattgtagatacttatggaggatatgcaaggcatggaggtggggcattctctggtaaagatcctactaaagttgacagatccgctgcatatgctgcacgttatgtcgctaaaagtattgttaatgcgaaattagcaaaaaaagcagaagtacaattaagttatgccattggagttgccaa

SEQ ID NO: 243279 - DNA, 649 bp, Unknown
  Bacterial polypeptide expressing nucleotide sequence isolated from the Sargasso Sea
tatgttatatgatgatggtaagccaaaaaaagttacttcaatagttatttctactcaacactctaaagatcttgatcaaaaaaaagttaaggatctagtttatccttacatatcaaaatctatacctaaagaattgataaaagatttaaacgaagaaaatgtttatgttaatccaacaggtcaatttattattggaggacctgacggcgacaccggcttaaccggaagaaaaattattgttgacacatatggtggcgctgcaccacacggaggaggagctttttcaggaaaagatcctactaaagttgatcggtcagcagcttatgttgcaagatacgttgcaaaaaatgtagttgcttcaggtgtttcagataaatgtttaattcagctggcttatgcgattggtgtatccaagccactttcggtttatgtaaaactttctgatcaagataaaaacaaaacagaagatgtaaaaaaaataattaaccaaaattttgatttatcacctagaggaataagagagcttttagggttaaataagcctatttatgaaattacatcagcgtatggtcactttggaagagatccatcaaataacggtgagttttcatgggaaaaaactgacaaaaaagacatttttataaagtaa

SEQ ID NO: 243280 - DNA, 631 bp, Unknown
  Bacterial polypeptide expressing nucleotide sequence isolated from the Sargasso Sea
aatgagtagatttttattcacatcagaatctgttacagagggacatccagataaggcatgtgatgccttttcagatgcaatcttggataatatattatcaaaggataatgaggcacatgtcgcctgtgaatccttagcaacaaaggggttggtcgtcatttcaggagaaataagaactactgcaaccataaatgttgagaaagttgtcaaagatacaataaaagaaatagggtatcataaaactaatagtggaattgacccagacgaagttgaagttctttctaaattacatgagcaaagccctgaaattgctcaaggtgtagattctgaggatatttctgctcaaggtgctggagaccaaggacttatgtttggttttgcatgtaaggagactcctgagttaatgccgctccccattcaaatttcacataggcttactgaaagattaacacagttaagaaaagatggtaccttaccttggcttagaccagacggtaaatcgcaggtttcggttaactatgaagatggtagacctgtatctattgataaaacagttatagcaactcaacatgatgatatgatcggagaatatggatctaaaaacaaagaactagaatttgttaacaaagaa

SEQ ID NO: 243281 - DNA, 484 bp, Unknown
  Bacterial polypeptide expressing nucleotide sequence isolated from the Sargasso Sea
tataaatcctacaggaaattttgttataggtggtcctgatggagatagtggattgactggcagaaaaataattgtagatacttatggaggagcagccccacatggtggaggagctttttcaggcaaagatcccacaaaagtagacagatcagcagcatatgcatcaagatatttggcaaaaaatgtagttgcatccaagatagcagacaaatgtttaattcagttagcatatgcaatcggtgtatcaaagcctttatcaatttatgttgatttatttgataatgacgaagaaaaaaatagacatgtagaaaaattaattaatgataactttgatttaagcccaagaggaataagagaaatgttaggtttgaataaagcaatatatgaaaaaacagcagcatacggacactttggaagagatccagggtcagatggctcattttcatgggaaaaaactgataaagcagatgtatttaggaagtaa

SEQ ID NO: 243282 - DNA, 155 bp, Unknown
  Bacterial polypeptide expressing nucleotide sequence isolated from the Sargasso Sea
aatgagtgatttcattttcacttctgaatctgtaactgaaggtcatcctgacaaaatatgtgatcaaataagtgacgctgtattagatgccttattaacagaagatccagaaagcagagttgcatgcgaaactgttgttaatacgggtctttgtt

SEQ ID NO: 243283 - DNA, 775 bp, Unknown
  Bacterial polypeptide expressing nucleotide sequence isolated from the Sargasso Sea
gaattcaaaaaactatttatttacgagcgagtcagtttcagaaggacatccagataaagtttgtgaccgtatatcagatatggtagttgatacttacatttcaaaggatcctttatcaagagtagcgtgtgaaacattaacaacaacaaataaggtcattttagctggtgaggttcgaggtccagaaactaaaaaagaagatatagaagttaaggttagagattgcataaaagatattggatatgagcaaaaaggttttcattggaagaattgcagtgtagaagtccacctacatgctcaatcttctgatattgctatgggtgttgattccaaaggaaacaaagacgagggagctggagaccaaggaattatgtttggttacgcatgtaatgaaactgatgttctaatgcctgcaccaatttattactcacataaaatcttagagttaatggctgaggataggaaaaaaggaatttcgaaagatctagagcctgactctaaaagtcaagtgaccatggaatatgaaaacggaaaaccagtaaaagttaaatcaatagtaatatcaactcaacactcacctgaagtggatcaaaaaaaagtaaaagaaattgttagaccttatttagagaaatctataccaaaaaaattactcaaagaattaaaagaagaggaattttatgtaaatccaacaggtcaatttataattggtggaccagatggagatagtggtcttactggaagaaaaattatagtcgatacttacggtggtgcagct

SEQ ID NO: 243284 - DNA, 808 bp, Unknown
  Bacterial polypeptide expressing nucleotide sequence isolated from the Sargasso Sea
ggagaccaaggaattatgtttggttacgcttgtaatgaaacagatgttttaatgccagccccaattcattactcacataaaattttaagattgatggctgaagatagaaaatcagggaagctaaatggaatagaaccagattcaaaaagtcaaattactattgaatataaagagggcatgcctgcagctgtaacatcagtagttatatctacccaacattccaaagatgttagcttagcacaagtcaaagagctttgtatgccttacatagaaagatctattcctaaaaatttattaggaagtcttaatgaaaaggaaatttacataaatcctactgggaattttgtaataggtggacctgacggggatagtggtttaacaggtagaaaaattattgttgatacttatggtggagccgcaccacatggaggtggtgcattttctggtaaagatccaacaaaagtcgatagatcagctgcttatgcatcaagatacttagcaaaaaatattgttgcatcaaaaatttcagataaatgtttaattcaactagcttacgcaattggagtatcaaagcccctatcaatatatgtagacttgttcgataatgatgaagaaaagaatatgcatgtagaaaaacttatcaaagagaattttgatttaagcccaagaggtattagagaaatgcttggattgaacaaagctatatatgaaaaaacatcagcttatgggcactttggaagagtgcctgagagtgatggatcattttcatgggaaaaaactgataaatctgaggtttttagcaagtaaa

SEQ ID NO: 243285 - DNA, 305 bp, Unknown
  Bacterial polypeptide expressing nucleotide sequence isolated from the Sargasso Sea
aagatatgttgcgagaaatattgtagctgctggtttggctgataaatgcgaagtgcaagtatcctatgcaattggaattgctgatccaacctcgatcagtgttaatacttttgaaacagggaaaatttctgaagagcaaatattgagcttaatcagagaaaaatttgatttaagaccaaaagggctaattgctatgcttgatttattaaaacctatttatcaagaaacagctgcttatggacattttggaagagaacaatttccctgggaaaaaaccgataaaattgaagagttaaaatcctaaa

SEQ ID NO: 243286 - DNA, 736 bp, Unknown
  Bacterial polypeptide expressing nucleotide sequence isolated from the Sargasso Sea
ctcacacaaaatcctaagattgatggctgaggataggaaatcaggaaagttgaatggaatagagccagactcaaaaagtcaaattactattgaatacaaagatggtatgccggcatctgtaacatcagtagttatttcaacacaacactcaaaagatgtaagcttagctcaagtcaaagaactttgtatgccttatatagaaagatcaatccccaaaaaattattgggaagtcttgatgaaaaagagatttatattaatccgactggaaattttgtaataggtggtccagatggagatagtggtttaactggcagaaaaattattgttgacacatacggtggagccgcaccacacggcggaggtgcgttttctggaaaagatcctacaaaagttgatagatcagctgcttatgcatcaagatatttagctaaaaatattgtagcctcaaaaattgctgataagtgtttaattcaattagcttatgctattggagtttctaaaccactatcaatttatgtagacttatttgataatgacgaagaaaagaacatgcatgttgaaaaacttattaaagaaaatttcgatctaagccctagaggaattagagaaatgttaggtttgaataaacctatttatgaaaaaactgccgcctacggccactttggaagaattccagaggatgatggatcattttcatgggaaaaaacagataaatctggagtttttagtaagtaa

SEQ ID NO: 243287 - DNA, 435 bp, Unknown
  Bacterial polypeptide expressing nucleotide sequence isolated from the Sargasso Sea
aatgtcttatatttttacatctgaatcagtatcggctggccatcctgataaaatatgtgatcaaatttctgacgctgttttggatgcttgtcttattcaagataaaaactcaagagttgcctgcgagactatggtcaaaaataataatgttgtcttagctggagaaattacttctatcgctgaaatagattacgaacagattgctcgtagtgtagtgaaaaacattggctatgatcatgagggacttggttttagctatgacagcttcaaatttaccaactatatttcagagcaaagccaagacataagcgaagggattgctaaaggcgagcagttagggtcaggcgaccaaggaattatgtttggctacgcttgtcgggaaaccccagagttgatgccactacccattgctttggcccatcaactgacacgcaa

SEQ ID NO: 243288 - DNA, 510 bp, Unknown
  Bacterial polypeptide expressing nucleotide sequence isolated from the Sargasso Sea
aatgaataatttaaaaaactatctttttactagcgagtcagtatccgaaggtcatccggataaagtatgtgatagaatatcagatatggtagtcgactcgtatttgggtgcagatccaaactccagggttgcttgtgaaacattgactactacaaataaggttgttcttgcaggtgaggtaagaggaccagaaataaaaaaagatgaattaatacaaaaagttcgagaatgcattaaagatattggatacgaccaagaaggctttacatggaaggacgctacaaagatagaaagtcatcttcattctcaatctgcagatattgcaatgggggtcgatgcttctggaaataaagatgaaggagctggtgatcaaggaattatgtttggttatgcctgccgcgaaactgaagttttaatgcctgcgccgatacattattctcataaaattctaagattaatggctgaagatagaaaatcagggaaacttaaaaatattgaaccagactcaaa

SEQ ID NO: 243289 - DNA, 737 bp, Unknown
  Bacterial polypeptide expressing nucleotide sequence isolated from the Sargasso Sea
tatggggaggctgtttacgtcagaatccgtgtccgagggacatccggacaagatcagtgatcagatttcggatgccgttctcgacgcgatgctcgcgcaggattcgcgatctcgtgtggcctgcgaaacgcttgtaacaaccgggcaggtaatcgtatccggagaagtgacgagcaaggccttagttgatgtcccagtacttgtacgtgacacgatcaagcgtattggctatacggattcggactacgggttcgattaccagtcgtgcggtgttcttgtagcccttcatcaacagtcaccggacatctcgcagggggtgtcgtctggcgaggggctacacgaggatcagggtgcgggggatcaggggatgatgttcggttacgcgtgccgggagactccggagcttatgcctatgccgatcatgatgtcgcacaagctggttcagaagcttgcgcagctccggaagaacaagagcatcccctatttgcggccggactcgaagtcgcaggtcacggtcgagtatgacgagaaggacaaaccggtacgggtgcacacggttgtcatatctacacagcacgacgacaaggtttcacactcacggatcaccaacgacatggtcaaacaggtcatccagaaggtgattcccgcccgatttttggacaaagatacggtctatcacattaatccgacggggcgatttgtggtcggaggaccgcacggcgatacggggctgacgg

SEQ ID NO: 243290 - DNA, 886 bp, Unknown
  Bacterial polypeptide expressing nucleotide sequence isolated from the Sargasso Sea
cactatagatgttcaagcaatagttaagaataccctaaatgatattgggtattatgacgaagcatatggtatggatgcgaaaaacgttaaggtaatttctatgcttgataagcaaagtcctgaaattgctcagggtgtaaatgaaggatctggattgcatgacgaacagggagcaggtgatcagggtttaatgtttggctttgcctgcaatgagacaaaagaactgatgcctcttcctattcacctttcccataggcttgttgagaaaatgaccgatcatagaaaaagcggtaaaattccatggcttagaccagatagtaaatcccaagtctcagttgcttatgatgatgataagccaatttctatttctaaagttgttattgctacccagcacgatgatatgctagacaaatttcaagatgaatctgaagagcataaatttgtagaaaaagaaataattgatcatgttataaaaccagtgctaaacgaatcaggtcatccctataatgatgattttattgttaatggtacgggacgttttgtttttggtggcccagaagcagatacaggcctaactggaagaaaaattattgttgatacatatggtgggtatgctcctcatggtggcggcgctttttctggaaaagatccatcaaaagttgataggtcagccgcttatatggcccgatatattgcaaaaaatattgtagcagcaaagcttgctgataaatgtgaagttcagttttcctacagtattggcatagctaaccctacatctttttatgcaaaaacatttggtacaggcaccatgtctgatgaaaaattaactgaattagctcagtcagtttttccattgaagcctgctggaattattgatcatttaaat

SEQ ID NO: 243291 - DNA, 691 bp, Unknown
  Bacterial polypeptide expressing nucleotide sequence isolated from the Sargasso Sea
aattactggaatacttccagactcaaaatctcaattaactctcttctatgaaaatgataaaccaaaatatattgattcaattgttgtttcctcacagcatactgaagaaacaactcaggaatatttgtatgaagaaattaataaattatgtaaaaatatcctaccggatgaatggtatacagctgacacaaaacttttagttaatcctacaggtaattttgttataggtggtcctgtaggagatacaggtttgacaggaagaaaaattattgtcgatacttatgggggagcatctcctcatggaggaggagcgttttctggaaaagatccaacaaaggttgatcgatcggctgcatatgccgcaagatatttgtccaaaaacatagtccatgcaggtatttctgaaagatgtacgattcaattatcatatgctattggaatttctgaaccattatcaatttttgttgatttacatggtaataatagagttgactctaatagagtagaaaaattcattaaggatcgatttgatttatcaccaagaggaattatagacatgcttggtttatgtaatccaattttttctgaaacttcgtcttacggacattttggaagagaaccaaacgacaaaggttgttttacatgggaaaatatagacctatctagtgaatttaaaaatgaactactctga

SEQ ID NO: 243292 - DNA, 301 bp, Unknown
  Bacterial polypeptide expressing nucleotide sequence isolated from the Sargasso Sea
catgtcagtgaatgaatttattttttcctctgaatcagttactgaaggtcatccagataaagtagctgatcaaatatcagactcggtacttgatgaaatactaaaagaggatccaaatgctcgtgtagcctgtgaaacacttattactagaaatagagttattctttcagctgaaatcaaatctaatgtaaaagtcgattatgagcaaatagtaaaaaatacattattaaatattggctatgatgatgaatctaaaggttttgatgcaaatagttgtattattgatctttatattgaagaa

SEQ ID NO: 243293 - DNA, 632 bp, Unknown
  Bacterial polypeptide expressing nucleotide sequence isolated from the Sargasso Sea
tatgagcaacaagtatctttttacaagcgagtcagtttcagaaggtcacccagataaggtatgtgatataatttcagattctgtagttgatgattttctctctcaggaaaatcctgaaaattcaagggtagcaatggaaacgttagtaacaacaaataaagttgtgatggctggagaagtaagaggtccagaaaactataagtgtgattacgagacgcttgcaagaaatgcagtgaaagagattggatatgaacaagaaggttttcactgggaaaagttttcttttgactgttcaggtgtacatagtcaatctgctgatatagctatgggagttgatgcatcaggaaataaagatcaaggtgcgggtgatcaaggaatcatgtttggctatgcttgcaaagaaacaccgtcattaatgcctgcaccgatatactactcacataaaattttagaagaaatggcacttaaaagaaagaaaggcgaaacaccgggaatacaacccgactctaaaagtcaagttacgcttcaatataataatggctcaccagagaaatgtactaaaatagtagtttctacacagcatgatgaaaatcttgatcaacgaggagtgagtgaaattattatttctataa

SEQ ID NO: 243294 - DNA, 562 bp, Unknown
  Bacterial polypeptide expressing nucleotide sequence isolated from the Sargasso Sea
agagaagcagtcattccttatattaaaaaatctattccagaaaatttcttaactgatctcaactcaaaagaaatttatatcaatcctacaggacagtttataataggaggacctgacggtgatacaggcttaactggaagaaaaattatagttgatacttatggaggtgctgcacctcatggaggaggagcgttttcaggaaaagatcctactaaagtagatagatcagcagcatatgcatcaagatatcttgcaaaaaatattgtagctgctggcgtatccagtaaatgcttaatacaattagcgtatgctataggagtatctaaacctctatcgatttttataaaattagctgatgatgacgagggaaaagttgataaagtaaaaaaaatcattgaagataattttaatttatctccaagggggatcagagaaatgttgcaattgaacaatccaatttatgagataacgtctgcctacggtcactttggtagaaagtcgactaataagggtgaatttacgtgggaaaaaacagataaaattgatttatttaaactgtaat

SEQ ID NO: 243295 - DNA, 556 bp, Unknown
  Bacterial polypeptide expressing nucleotide sequence isolated from the Sargasso Sea
gaaataaaaactgaggtaatggataaaattatcaaaccaattgttcctgaggaatggttgcttgactcaacaaatatatttattaatcccactgggaaattcgtcattggtgggcctgtgggtgattgtggtctgactggaagaaaaataattgtagatacatacggaggtatggcaaggcatggtgggggagcattttctgggaaagatccctctaaagtagacagatctgcagcatatgcatcaagatatgttgctaaaaatatagttgctgcaggactagcagactattgcgaaattcaagtttcatatgctatcggtgtggctgagcctacatcaatacatgtagaaacttttaatagtgagaaaatatcaaaagaagcaattgtcaaaattgtcaaagaaaaatttgatctcaggccaaaaagtcttattaatatgctcgatttaaaaagacctatctaccttccaaccgctgcatatggtcactttggaagatcagatattgagctatcttgggaaaaaacagacaaagcagctgatatttcagaataat

SEQ ID NO: 243296 - DNA, 466 bp, Unknown
  Bacterial polypeptide expressing nucleotide sequence isolated from the Sargasso Sea
aaggtttgtttatgggggtccagaagcagatactggtctaacgggtcgtaagatcatagtggatacatatggaggttatgctccccacggcggaggtgctttctctggtaaagactcctctaaagtagatcgtagtgctacttatatggcgagatacattgcaaaaaatatcgtagcagcagatctcgcagatcgttgtgaagtacaactgtcttatggcattggggttgcagaaccaacttctttttatgttaagacccaaggtactggtaaaaaagatgatcaaacgcttacagagattgccagagatgtattcccaatcaaacctggagaaatagtcgctcatttagatcttaaaaaacctagatatagagatacagcagcttatggtcattttggacgagagctggaaaaattcacttgggaaagaaccgatatggttgaaaccctacttaaaagattatag

SEQ ID NO: 243297 - DNA, 670 bp, Unknown
  Bacterial polypeptide expressing nucleotide sequence isolated from the Sargasso Sea
gactcaaaaagtcaaattactattgaatataaagatggtctgcctgctgctgtaacatcagttgtcatttcaacacaacattcaaaagatgttaatttaacaaaggttaaagaattgtgtctgccctacattgaaagatccataccgaaaaatttattaggtaaccttgatgaaaaagaaatttatatcaacccaactggaaattttgtgattggaggtccagacggagatagtggcttaactggaagaaaaattattgttgatacttatggaggagcagcgccacacggcggtggagcattttctggaaaagacccaacaaaagtagatagatcagcagcatatgcatcaagatatttggctaaaaatattgttgcttcaaaaattgctgataaatgcttgatccaattagcttatgcaattggagtatctaagcctttatcaatttatgtagatttattcgataatgatgaagaaaaaaacatgcatgttgaaaaactaattaaggaaaactttgatttaagtccaagaggcataagagaaatgttaagtttaaatagacctatttacgagaaaactgcagcttacggacactttggaagaatacccgaaacagatggttcattttcttgggaaaaaacagataaatctgaggtttttagtaagtaaa

SEQ ID NO: 243298 - DNA, 232 bp, Unknown
  Bacterial polypeptide expressing nucleotide sequence isolated from the Sargasso Sea
aatgacatctgagtcggttggagaaggtcatcctgataagatggctgatcaaatctcagacgcaatactagatgcaattcttgaacaagataaaggctgcagagttgctgttgaaacactcgtcaaaactggactggttgtactgggtggagaaataacaactactgccgatgttgattatgaggcaatcgcaagacgtaccattaaaagaattggttatgacaaagaagag

SEQ ID NO: 243299 - DNA, 658 bp, Unknown
  Bacterial polypeptide expressing nucleotide sequence isolated from the Sargasso Sea
atgtcaaaaaactcagaaaattttattttcactagtgaatcagtttcagaaggacatcccgacaaaatatgtgatcaaatctcagatttagttgttgatctctatatgaaggcggataaaaactcgagagtagcatgcgagactctagctactacaaatagagttattttatcaggagaggtaaaaataaatcagaatcaccaagaggttaaaaatgaaattatagaccaaaaaataagagaaaaaattaaagatatcggttatgagcaggacggttttcattgggaaaatattgagatagagaattatttacataaacaatctgaagacatttctcaaggtgtcgattcctcagaaacgctaggtgcaggagatcagggaataatgtttggctatgcttgttctgaaactgattatttgatgcctgcaccaattcattactcccacaagattcttcaaaatctatcaaattatagaaaaaataatgattctttttttggacctgattcaaagagccaagtttctatgcaatatgaggacaacaaaccgaaaaatataacctctattgtggtctcaacacaacatttcgaagatgtacaaaatgaagaaataagaaaaaaagtaatacaaattattgaagagtccatccccgttcaaa

SEQ ID NO: 243300 - DNA, 628 bp, Unknown
  Bacterial polypeptide expressing nucleotide sequence isolated from the Sargasso Sea
acctgatagcaaaagtcaagtaaccatgtcatatgatgggataaatgaaccaaaagacataaaaaaaattgtgtgtagtactcaacatttagagagtattactattgaacagataagggagcaggttgaagaaattatacgagatgagatttctgaatatgacctatcaaagacaaaattcttgataaaccctaccggaagatttgtgattggcggtccggatggtgacactggtgtcacaggaagaaaaataattgttgatacttatggtggctatgcaccgcatgggggaggagcatttagcggcaaagactgctccaaagttgatagaagtgcagcatatatgtccagatatcttgctaaaaatattgtaagctctggaaaagcagataattgcacagttcaattaagttatgctattggggttgttgaaccaacaagtgtctatgtttatgcagatggaaaggtcagaactgatttcacaaattggatcatagataatgttgatctaaccccaaaaggtattattgacagatttggtttatttaatcttgatctaacaatgacaactttatatggtcattttggcaaaagtcacttgcctttcgagaagttagatttatattaa

SEQ ID NO: 243301 - DNA, 825 bp, Unknown
  Bacterial polypeptide expressing nucleotide sequence isolated from the Sargasso Sea
aaaatgactgaaaaaaattacttatttacaagcgagtctgtttctgaaggtcatcctgacaaagtatgcgatagaatatcagacatggtagttgatagttatttatcaaaagatcccttttctagagtagcttgtgaaacattgactacaacaaacaaagttgtcttagcaggggaaatacgtggaccaaatattaataagaatgatattattgaaaaagttagaaattgtataaaagatataggctacgaccaggaaggtttttcatggaaagaccaaactaaaattgagtcccatcttcatgaacagtcaactgatattgctatgggcgttgattcaaaagacaataaagacgaaggtgctggtgatcaaggaataatgtttggatatgcttgtacagagaccgaagacttaatgccagcacctatattttactcgcacaaaattttaagattaatggcgaaagataggaagtctggagtgttaaaaggcattgagcctgattctaaaagtcaagtaactatggaatatcaaaatggaaaaccaatcaaagtaacttcggtcgttatttcaacgcaacattctaaggacttggatcaggaaaaggtaaaagagttaatacttccttatattgatagatctatacctaaagaattaattaatgatttaaaaaaaacggagatttatattaatcctacaggacaatttattatcggaggccctgatggcgacacaggactaactggtagaaaaattattgttgatacttatggcggtgccgccccacatggaggaggagctttttctggtaaagatccaacaaaa

SEQ ID NO: 243302 - DNA, 781 bp, Unknown
  Bacterial polypeptide expressing nucleotide sequence isolated from the Sargasso Sea
gactgtattaaagatattggttatgaccaagaaggttttagttggaaaaaagctaacgtagaaacatttttgcatgaacaatccgctgacattgcaatgggtgttgattcaaaaggcaataaagacgaaggtgcaggtgatcaagggattatgtttggttatgcatgtacagaaaccgaagatttaatgcctgctccaattcatttttcacacaaaattttaagattaatggctgaagatagaaaaaaaggagctttaaaaggaatagaaccagattctaaaagtcaagttacaatgttataccaagacaacaaaccaatgaaagtaacctctgttgtaatatcaacacaacattcaaaagatttaaaccttgaacaagtaaaagaattagttttgccgtacattaaaaagtctattccagaaaaatacgttaaagatttaaattctaaagaaatttacatcaacccaactggtcaatttataattggtggacccgatggagatactggattaactggaagaaaaataattgttgatacttatggtggtgcagccccacatggtggaggagctttttcaggaaaagatcctactaaagtagatagatctgctgcctatgcagctagatacttatctaaaaatattgtatctgcaggtgtttctgagaaatgtttaatacaacttgcctatgctataggtgtttcaaaacctttatctatttttataaaattagcagaaggagatgaggataaagtgaccgaagttaaaaaaattatagata

SEQ ID NO: 243303 - DNA, 655 bp, Unknown
  Bacterial polypeptide expressing nucleotide sequence isolated from the Sargasso Sea
atgagttatatatttacatctgagtctgtttcagagggtcatcctgataaagtttgtgatcaaatttctgatgctattcttgattcttatcttgcacaagatccaaatagtagagttgcttgtgaaacacttattaagaataatacagtcattgttgctggcgaaataacatccagcggcactccagatatcgaagaggtaataagaaataccgttaatgaaatcggttatgatcatgatgatttaggattcaatggaaataactgtgagatacaaaatctgatttcaaaacaatcactagatattgctcagggagttaatgagggtgaaggtgaagacttagatcaaggcgctggtgaccaaggactaatgtttggatatgcgtgctctgagacgccagttctaatgcctaccccaattaatttatctcatgagctcgttttgaaacaatctaaggtaagaaaaaatgaagagcttggctggcttcgaccagatgctaaaagtcaggttagtgttgtctacaaggatgatataaaaactgtagattatgtttctgctattgtcttatcaactcaacatgatgaagatgtttctcaagatgaaattaaggcaaaggtgcgtgaaaaaattattgatcccaataattccaactaga

SEQ ID NO: 243304 - DNA, 529 bp, Unknown
  Bacterial polypeptide expressing nucleotide sequence isolated from the Sargasso Sea
tattcctgagaattttcttgagggttttaatgaggatgagttttatgtaaatccgacaggaaattttgtaattggtggtccagatggagattgtggtttgacaggtagaaaaattattgttgatacttatggtggagctgcacctcatggtggtggtgcattttcaggaaaagatccaactaaagttgatagatcagcagcttatgcagcaagatatattgctaaaaatattgttagttctaaaattgctgaaaaatgtttaattcagttagcttatgcaattggtgtatcaaaaccattatctatatatgttgatttatttgataatgattttgataaaaataaatttgttgtagaaaagattaaagaaaatttcgatttgagccctagaggtataagagaaatgctgaatttaaataaaccgatatatgaaaaaacagctgcttatggtcattttggtaggacaccagaagacaatggttcattttcatgggaaaaaactgataaaactaacgttttttctaaatag

SEQ ID NO: 243305 - DNA, 598 bp, Unknown
  Bacterial polypeptide expressing nucleotide sequence isolated from the Sargasso Sea
ttcacaacactcacctgatattaatcaattggaagtaagagagttgttgaaaccttatatgattaaatctatcccaaaaaaatttcttgagggttttgatgaaagtgaactttatgttaatccaaccggtaattttgtaataggtggacctgatggcgacacaggattaactggaagaaaaattattgttgatacttatggaggagcagcgcctcatggtggtggagctttctcaggcaaagatcccaccaaagttgacagatcagcagcttacgcagcaagatatattgcaaaaaacgtagttgcgtcgaaaatttcagataaatgtctgatccaattagcttatgcgataggtgtatcaaaacctctatcaatctatgttgatttatttgatggtgatgttgaaaaaaataaatttgtagtagaaaaaataaatgaaaattttgatttaagtcctagaggaataagagaaatgttaaatttaaacaaacctatatatgaaaaaacagctgcttatggacattttgggagaagtccagaggaaaatggctctttttcttgggaaaaaacagataaaataaaaactttttttaaatag

SEQ ID NO: 243306 - DNA, 184 bp, Unknown
  Bacterial polypeptide expressing nucleotide sequence isolated from the Sargasso Sea
attgtcatatatttttacatctgaatctgtatcagaaggtcatcctgataagatctgtgaccaaatatcagatgccattttagatgagtgtcttaaacaagatagagagtctagagttgcctgtgagactcttgtcaaaaacaatactatcgttgttgccggtgaaataagctcaaaagcatct

SEQ ID NO: 243307 - DNA, 487 bp, Unknown
  Bacterial polypeptide expressing nucleotide sequence isolated from the Sargasso Sea
atgttcttatttacatcagaatctgtctctgaaggccacccagataaaatatgtgatcaattatcagacacgctattagatgcctttttagcacaagatccgttatcaagagttgcgattgaatgctttattaccactggtatggtggttattggtggtgaggtaacgtccaaagctcaggttaatgtacaagatattgttcgcagtaaattaacagccattggttacaatcatcctgatattggttttgatgcatcatcatgtgcagtattggttgtattaaacaagcaatccgctgatattgcacaaggtgtaaatgaaaacgatggcgcatttgttgagcaaggcgctggtgatcaaggactcacatttgggtatgcatgtgatcaaacaccagaactgatgccattaccaattcaattatctcaacagctaacattaaagttggctcaaattcgaaaggaaaataaactgtcataccttagac

SEQ ID NO: 243308 - DNA, 625 bp, Unknown
  Bacterial polypeptide expressing nucleotide sequence isolated from the Sargasso Sea
attgagcagaactaattttacatttacttcagaatcggtatctgaaggtcacccagataaagtttgtgatcgaatatctgacgcagtgctagatgcttttatctcagaggagcctgaagcaagagtggcatgcgaaacatttgctaccaccaatagggttgttatcggcggcgaagttggtctttctgataaaaatattttaaaagaatacatgggtaggattgaacagattgctaggtcatgcatccaggacataggatacgaacaggaaaaattccatcatcagactgtagaagttacaaatttattgcacgagcaatcagcgcatatagcccaaggagttaacgctggtgcgaataaagatgaaggcgctggcgaccaaggaataatgtttggatatgctaccgacgaaactgaagatttgatgcctgcacctatccaatactcgcacgcaatgctgcgacgtctggcggaagtgagaaaaaatggaactgagccaactttagggcctgatgctaaatcccagttatcagtaaaatatcaagatggaaaaccaactagtgtaacatctattgttttatcaactcagcacattgatgaaaaaatgacctctaaagacgttcgt

SEQ ID NO: 243309 - DNA, 658 bp, Unknown
  Bacterial polypeptide expressing nucleotide sequence isolated from the Sargasso Sea
tcaaataactatagagtacaaagatgggaaaccatcatcagttaagtcagttgttatatctactcaacattcagctgatgtaaaccaatctcaagttagagaattagtaaaaccttatattgaaagagcaatacctaagaatttaattaatggtttagatgatacagagatatatattaatccaactggtaattttgtaattggtggtccagatggagatagtggattaactggaagaaaaattatagttgacacttatggtggagcggcaccccatggaggcggagcattttctggaaaagacccaactaaagttgatagatcagctgcatatgcatctagatatttggcaaaaaatatagttgcttctaaaattgcagaaaaatgtttaatacaattagcttatgcaataggtgtatctaaaccactttcaatttatgttgatctattttcaaatgatgaagaaaaaaacagacatgttgaaaagcttataaatgataattttgatttaagccctagaggcataagagagatgttaggtctaaataaaccaatttatgaaaaatctgctgcatatgggcattttggaagagatcctgaggctgatggtgcattttcatgggaaaaaactgataaagcagacgtttttaataagtaa

SEQ ID NO: 243310 - DNA, 667 bp, Unknown
  Bacterial polypeptide expressing nucleotide sequence isolated from the Sargasso Sea
tctaaaagtcaaattacaatcgaatataaagatggaaaaccagcatcagttaaatcagttgttatttcaacgcaacattcagctgatataaatcaatctcaagttagagatcttgttaaaccttatattgaaaaatcaattccaaaaaatttaataaatggattagatgatacagagatttatgttaatccaacaggtaattttgttataggaggaccagatggagatagtggattaacaggaagaaaaataattgttgatacttacggaggtgccgcacctcacggtggtggagctttctctggaaaagatccaacaaaagtagatagatcagcagcttatgccgcaagatatcttgcaaaaaatgttgtggcctcaaaaattgcagacaaatgtctaattcaacttgcctatgcgataggtgtatctaaaccgctatctatttatgttgacctttttgctaatgatgaagaaaaaaataaacatgtggaaaaattgattaatgaaaattttgatttaagtccaagaggaataagagaaatgttaggcttgaataaagctatatatcaaaaaacagcagcttatggacattttggtagagattctaaatcagatggatctttttcctgggaaaaaactgataaaaaggacgttttttgcaagtaat

SEQ ID NO: 243311 - DNA, 534 bp, Unknown
  Bacterial polypeptide expressing nucleotide sequence isolated from the Sargasso Sea
tacctaatgaattattagagggtcttaaagatgaggaattctatgttaatcctacaggaaactttgtaattggaggtcctgatggtgactctggtttaactggccgtaaaataatagttgatacatatggtggtgcagcacctcatggtggaggagcattttctggaaaagatccatctaaagttgatagatctgcagcatatgcagctagatacttagcaaaaaatgttgttgcagctgatcttgcagatgaatgcactatacagttatcttatgcaataggagtctcaaaacctttatcagtatatgtaaatactaatggaacaaataaagttgatgaacagaaaattgaaaaatctgtgcaagatttatttgatctaagcccaagaggaataagagaacatttaaaactaacaaatgcaatctatgttccaacctctgcttatggccattttggtagacagccaactgacaagggacattttacttgggaaaaaactgatttagttgaagctcttaaaggtattgcataac

SEQ ID NO: 243312 - DNA, 613 bp, Unknown
  Bacterial polypeptide expressing nucleotide sequence isolated from the Sargasso Sea
aatgaaaaaaaactacctatttactagcgagtctgtttcggaaggacatccagataaagtttgtgacagaatttctgatatggtagttgattcttaccttggggccgaacctcagtctagagttgcatgtgaaactttaaccacaacaaataaagttgtacttgctggtgaagtaaggggtcctgaaataaagaaagatgacctcattcaaaaggttagagattgtattaaagatattgggtacgaccaagaaggttttacttacaaagaagcgactaaaatagaaagtcatttacacgcccaatcatcagatattgcaatgggagttgactcctcaggaaacaaagatgaaggagcgggagatcaaggaataatgtttggttatgcctgtaatgagacagacgtgttaatgccagctccaatacattattcacacaaaattttaagacttatggctgaagatagaaaatctggtaagctaaaaaatattgaacctgactctaaaagtcaaataacaattgagtataaagatggaaaaccatctaatgtaaaatctgttgttatatccactcaacattctgcaaatgttaaccagtcgcaagttagagactag

SEQ ID NO: 243313 - DNA, 550 bp, Unknown
  Bacterial polypeptide expressing nucleotide sequence isolated from the Sargasso Sea
catgaaacaaaactatttatttacaagtgagtctgtatcagaaggacatccagataaagtatgcgatagaatttcagatatggtagttgatacttacataggagcagaaccccagtcaagagttgcatgtgagactttaactacaacaaataaagttgtcttggctggagaagttagagggccagaaataaaaaaagaagatttaattcaaaaggtcagagattgtattaaagacataggctatgatcaagatggttttacttacaaagaagcaacaaaaatagaaagtcatcttcattcacagtcagcagatatagctatgggagtagattcatctggaaataaagatgaaggagctggagatcagggaattatgtttggttatgcatgcaatgaaactgatgtattaatgccggcaccaattcactactcacataaaattttgagattaatggcagaagatagaaaatcgggaaaattaaaaaatattgagcctgactcaaagagccaaataactatagaatataaagatggaaaaccttttaatgtt

SEQ ID NO: 243314 - DNA, 888 bp, Unknown
  Bacterial polypeptide expressing nucleotide sequence isolated from the Sargasso Sea
gatgagtaatttaaaaaattatcttttcactagcgagtcagtttctgaaggacacccagataaagtttctgataggatttccgatatggttgttgatacttttatttctagggacccatattccagagtggcttgcgaaacattaaccacgactaataaagttgttttagctggtgaggtaagaggtcctgaaattaaaaaagatgaattaattgagaaagttagaggctgtattaaagatattggttacgatcaagagggctttagctggaaacaagcaactaaaattgaaagtcatttacattctcaatctgtcgatattgccatgggggttgactcctcaggtaataaagatgagggagctggagaccagggtattatgtttggctatgcctgcaatgaaactgaagtattaatgccagcacctattcattattctcataaaattttgagattaatgtctgaggatagaaaatcaggaaaactaaaaaacattgaaccagactctaaaagtcaagtaacgtttgaatatgttgaaggaaaaccatcgaaggtaaaatcagttgttatttcttctcaacattcggcagatataaatcaatcacaagtaagagatttgttaagaccttatttattaaaatctatacctcaaaattttctaaaagattttaatgaagatgagttttatgtaaatcccacaggtaattttgttattggtggcccagatggcgattgtggtttaactggaagaaaaattatagttgatacatatggcggagctgcaccacacggtggaggtgctttttctggtaaagatcctacaaaagttgatagatcagcagcttacgctgcaagatacattgcaaaaaatattgttgggctcaaata

SEQ ID NO: 243315 - DNA, 653 bp, Unknown
  Bacterial polypeptide expressing nucleotide sequence isolated from the Sargasso Sea
aagtcaaattacaatggaatataaatctgatggaactcctctaagaattgatactgtagtaataagtactcagcattctccaaatgttaaccaagagttgataaaaaatgacttaaaagaatatgtttgtaacgaaactatcccttcagaactgattgataataacacaagatttatcttcaacccttcggggcaatttattgtaggaggaccacatggagatgcaggattaacaggcagaaaaattattgttgatacatacggaggtagttgcaggcatggaggtggtgcattttcaggaaaagattgcaccaaagttgataggactggagcatacgcagcaagatgggtagcaaaaaattgtgttgctgctggattagcagaaagaatggaagttcaactttcatacgcaataggtatggctgaaccaatatcaatattagtagatgcacatggaacaaataaagtttctatcgatgaaatcacaaataagataaggaataattttgacctaagccccggaggtataattgagtctcttaatctaaggagacctatatataagcaaacagctgcatacggtcattttggaagaattgatcttgatctgccatgggaaaatttaaataaagtagataatctcagaatttaat

SEQ ID NO: 243316 - DNA, 161 bp, Unknown
  Bacterial polypeptide expressing nucleotide sequence isolated from the Sargasso Sea
aatgagtgattatgtttttacttcagaatctgtttcagagggccatccggataaagtatgtgatgccatatctgatgctatattagataatcttcttgatcaagatcctgaatcgcatgtagcatgtgaaacgttagctactactggcacagttattgttt

SEQ ID NO: 243317 - DNA, 329 bp, Unknown
  Bacterial polypeptide expressing nucleotide sequence isolated from the Sargasso Sea
ttatgcggcaagatacattgctaaaaacgtgtttgcttcaaaaatagcaaacaaatgtttaatacagttagcttatgcaattggcgtttcaaaacctttatcaatttatgttgatttgtttgacaatgatttagataaaaacaagtttgttgttgaaaaaattaatgaaaattttgatcttagtcctagaggaataagagaaatgttaaacttaaatagaccaatatatgaaaaaacagcagcctatggtcactttggtagaacccctgaagatgatggatcgttttcgtgggaaaaaactgataaaattaacgttttttctgaatagt

SEQ ID NO: 243318 - DNA, 470 bp, Unknown
  Bacterial polypeptide expressing nucleotide sequence isolated from the Sargasso Sea
aaattttgttattggcggaccagatggagatgcaggattgactggaagaaaaattatagttgatacttatggtggtgctgcgcctcatggcggtggagcattctcgggaaaagatcctacaaaagttgatagatcagcagcttatgcgtcaagatatttagcaaaaaatatagttgcttcaaaaatttctgatagatgtttgatacagctggcgtacgctattggggtctccaaaccactttctatttatgttaatcttttcactaatgatgaagaacaaaatagacatgttgagaaattaattagagaaaattttgatctaagtcctaggggcattagagaaatgttgagtttaaataaacctatctatcaaaaaactgccgcatatggtcattttggaagagagccagaatcagatggatcattttcatgggaaaaaactgataaatcaaacatatttatcagttaaa

SEQ ID NO: 243319 - DNA, 451 bp, Unknown
  Bacterial polypeptide expressing nucleotide sequence isolated from the Sargasso Sea
aatgagtaaaaataactatttgttcactagcgagtctgtttcagaaggtcatccagataaggttagtgataaaatttctgatatggttgtagacacttatttatcaagagacccctattcgagggtggcatgtgaaactttaacaacaacaaatagagttatcttagctggagagactagaggtcctaaatttgataaagaagaattagtcaccaaagtaagagagtgtatcaaagagattggatacgatcaaaaaggcttcagctggaaaaacgctcagattgaaagttttttacatgaacaatcatctgatatagctatgggagtagactcaaaagaaaacaaagatgacggggcaggtgatcaaggactaatgtttggatacgcttgtgatgaaactgatgaattaatgcctgcacccatacattattctcacaaaatattaagatta

SEQ ID NO: 243320 - DNA, 286 bp, Unknown
  Bacterial polypeptide expressing nucleotide sequence isolated from the Sargasso Sea
atgagtgatttaaaaaattttcgttttacaagtgagtctgtttcagagggacatccagataaagtgtcggataggatatctgatatggtagtagatacctatttatctaacgatccatattcaagagtggcatgtgaaactcttacaactaccaataaagttgtattagctggtgaggttagaggaccagaaattaaaaaagatgatttgatcaataaggtaagagaatgcataaaagatatcggatatgatcaagatgggttttacttggaaagaagctacaaaa

SEQ ID NO: 243321 - DNA, 825 bp, Unknown
  Bacterial polypeptide expressing nucleotide sequence isolated from the Sargasso Sea
gaaataaaaaaagatgaattaatatcaaaagttagaggttgtattaaggatattggttacgaccaagatggctttagttggaaggaaactactaagattgaaactcacttacattctcagtcagcagatatagctatgggagttgactcatcgggaaacaaagatgaaggtgctggtgaccagggcattatgtttggatatgcatgcaatgaaacagatgttttaatgccagctccaattcattattcacatagaattttaagattgatggctgaagatagaaaatctggaaagttaaaaggaatagagccagattcaaaaagtcaaattactattgagtataaagatggtaagcctgcaaatgtaaaatcagtcgtaatatcaactcaacactctaaagatgttgacttagcaaaggttaaagagctttgcactccatatattgagaaatctataccgaagaacttactagggaatcttgatgaaaaagaaatttatataaatcccactggaaattttgttataggtggtccagacggagacagtggattaactggcagaaagataatcgtagatacttatggtggtgcagcccctcatggtggaggtgctttttctggaaaagatccaacaaaagtagacagatccgctgcttacgcttctagatatttagctaaaaatgtagttgcatcaaaaatatctgataaatgtttaatccaactagcttatgctattggtgtttctaaacctttatctatttatgttgatctatttgataatgatgaagaaaaaaatagacatgtagagaagattataaaagagaat

SEQ ID NO: 243322 - DNA, 784 bp, Unknown
  Bacterial polypeptide expressing nucleotide sequence isolated from the Sargasso Sea
agataaagtctctgatcggatttcagatgcagtagttgaccattttattgcaaaagatccatatgcaagagtagcttgcgaaacactcactacgaccaataaggttgttttatcaggtgaaattcgaggcccagttcaagaagataaagatgaaattatctctaaagttagaaacagcattaaagatataggttatgaacaagacggatttcattggcaaaccgcagatattcagtatctacttcatggacaatcagctgatattgcaatgggtgtagactcatcatctgacaaagatgaaggtgctggtgatcagggaataatgttcggatatgcttgtacggaaactccagagttaatgccagccccgatttattattctcacaaaattttagagttaatggctaagggaagaaaagatggaagcatgaagggattggagcctgactctaagagtcaagtaactcttaaatatgttgatggtaaacctaatgctgtaacatcagttgtgatatcaactcaacacgctgatggactttctcctagtgatgtcaaagaaattgtaaatccagctttaaaacaatcaatacctgaagagcttttaaaaaatttagatgatagcgaatattacgtaaatccaacaggtaattttgttatcggaggaccagatggtgatacgggattaacaggaagaaaaattattgtcgatacctatggtggtgcagcaccgcacggtggaggggctttctctggaaaagatcccacaaaagtggatcgctctgct

SEQ ID NO: 243323 - DNA, 405 bp, Unknown
  Bacterial polypeptide expressing nucleotide sequence isolated from the Sargasso Sea
gatgaaaaaaaattttttatttacaagcgagtcagtttctgaaggtcacccagataaagtttgcgatagaatatcagatatggtcgtagatagttatttaggagcagaacctcagtcaagagtagcctgcgagactttaacaacaactaataaagtagttttagctggagaggtcagaggaccagaaattaaaaaagatgatttaattcagaaagttagagaatgtatcaaggatattggttatgaccaagatggttttagttggaaagatacaactaagattgaaactcatttgcacgctcagtcagcagatatagccatgggtgtagactcttctggaaataaagatgaaggtgcaggagaccagggaattatgtttggatatgcatgtaatgaaactgatgt

SEQ ID NO: 243324 - DNA, 470 bp, Unknown
  Bacterial polypeptide expressing nucleotide sequence isolated from the Sargasso Sea
ttatggaggaaaaggtgctcatggcggaggagcatttagcggaaaagaccctactaaagttgatagaagtgcagcatatgcagcaaggcatatatcaaaaaatttagttaaggcaggtgtttcagatgaaattttacttcaacttgggtatgcaataggagtctctaagccggtttcatttaacattaatacatgtggaaaatcaaatttaaaaatttctgatagtaggttatctgaaatgattaatgaaatctttgatttaagaccatttaaaatagaatctagatttaaacttcgggatcctatatattctgaaacttcttcatatggacatatgggaagaaaatctattaaaaaaaccaaatctttttattcaaaatattctgataaaaagaatattgaagttgagttatttccctgggaaaaactagactatatagaacaaatatcaaaaacactaaaattatgaa

SEQ ID NO: 243325 - DNA, 171 bp, Unknown
  Bacterial polypeptide expressing nucleotide sequence isolated from the Sargasso Sea
catgagtaatcttaaaaattatcttttcactagtgagtctgtctctgaggggcatcctgacaaagtatgtgatagaatttcagacatggtcgttgatacatacttaggtatggagccgcaagctagagtagcttgtgagaccttaaccactacaaataaagttgtgttagc

SEQ ID NO: 243326 - DNA, 640 bp, Unknown
  Bacterial polypeptide expressing nucleotide sequence isolated from the Sargasso Sea
aatgagtaatttaaaaaattttctttttacaagtgaatcagtttcagaaggacatccggataaagtttcagatagaatttctgatatggtagttgatagttatctttcaggagatcctttttcaagagtagcttgtgaaacacttacaacaacaaataaagtcgttttagctggtgaggtaagaggtccagaaattaaagaaactgatttgattgaaaaagtaagacactgcataaaagatattggttatgatcaagttggtttcacttggaaagaagctacaaaaatagaaagccatcttcattcccaatcatctgatatagcaatgggtgtagactcttcaggcaataaagacgaaggagctggagatcaaggaataatgtttggttatgcatgcaatgaaacagaagagttaatgccagcacctattcactactcacacaaaattttaagactaatggctgaggatagaaagtccggtaaactcaaaaatattgaaccagactctaaaagccaagttaccttcgagtatgttgatggaaaaccaacaaaagttaaatctgtagttatttcatcacaacattctgcagatgtaaatcaaacacaggttagagacttattaagaccttatatgataaac

SEQ ID NO: 243327 - DNA, 901 bp, Unknown
  Bacterial polypeptide expressing nucleotide sequence isolated from the Sargasso Sea
gatgcataccttgcagaagatccaaatagcagagtggcttgcgagaccatgataaaaaataacatggtatatatagcaggagaaattacttccctaggaagccctgacctcgaacctgttgttcgaaaaacaattaatgatattggctataactcagatgattatggatttaatggagatacgtgtgaattcacgaatcttgtctttgaacaatctccggatatatctcaaggtgttaccgaaggtgaaggagaaaaccttgaacaaggggctggagatcaggggctaatgtttggatatgcatgcaaagaaacagagtcattaatgccacttcccatagatctttctcacagattggtaaaaaaacaagcagatgtaatgaagagtggggatataaaatggctacgacctgatgctaagagtcaagttagtgtaatttattccgatgatggtaaaacaattgaggggttgtctgcggtcgtcctttcaactcaacatgatgaagaagttagtcaggtagaaataaaaactgaggtaatggataaaatcatcaaaccaattgttcctgaggaatggttgctagactctacaaatatatttattaatcccactgggaaatttgttattggcgggcctgtcggtgattgtggtctcactggaagaaaaattattgtagatacatacggaggcatggcaaggcatggtgggggagcattttctggaaaagatccatctaaagtagacagatctgcagcatatgcttcaagatatgttgctaaaaatatagttgctgcaggacttgcagactattgcgaaattcaagtttcatatgctatcggtgtggccgagcctacatcaatacatgtagaaacttttaatagtgagaagatatctaaagaag

SEQ ID NO: 243328 - DNA, 915 bp, Unknown
  Bacterial polypeptide expressing nucleotide sequence isolated from the Sargasso Sea
actgggcgaaataacttcaaaagcaaaagttgactatataaaactagttagaaatgtaattaaagaaattggatatgagagctataaagctggtggctttgacgccaatagttgtgctgttttagtagcccttgacgagcaatctcctgatatatctcaaggggttaatgaagcagatgataccaacgatgatttggaaaacaatactggagctggtgaccaaggaataatgtttggctatgcatgcgatgaaacacctgaattaatgcccttacccattagcttggcacatagattagctattcaacttgctgcagtaagacataaaaaaatccttaattatctcctccctgatggcaaaacgcaagtaagcattgattacaaaaaagggctaccagtttcaataaataccattttaatttcaactcaacataatcctgagatcgatggaataaagaatgaagaagaaattcgtcaaaaaataaaagaagatttatggaagaatgttgtaattcctgctactgaagatttagaaataaaaccaaacattcaagaaacacgattcctagtaaatccaacaggtaaatttgttgtaggcgggcctcagggagatgcagggcttactggcagaaaaatcatcgtagatacttatggcggatatgcaagacatggaggtggtgcattttcaggcaaagaccccacaaaggtagatagatcagccgcttatgcagcacgttatgttgccaaaagtatagttaaggcgcaattagcaaaaaaggttgaagtacaattaagttacgcaattggagttgcaaaaccgatttccattctcgttgaaacttttgatactggagttatttctcaagctaatttgactgaacttattaaagagcactttgatttaagacctgcagc

SEQ ID NO: 243329 - DNA, 805 bp, Unknown
  Bacterial polypeptide expressing nucleotide sequence isolated from the Sargasso Sea
tatgaaaagatcttatttatttacaagtgaatcagtttctgaaggccatccagataaagtttgtgatagaatttcagatatggttgttgatgcttatttatcatctggtgacccacaaacacgcgtagcttgtgagactttaactaccactaataaagtagttttagctggagaagtaaggggtccatcagtttctaaagatcagattatatctcaagttagagattgtattaaagacattggttatgaacaagatggttttcattggcagaattgtgatattgaaagttttcttcacgagcagtcagctgatattgctatgggtgttgattctggcagcaataaagatgagggcgcaggcgatcaaggaatcatgtttggttttgcttgtaaagatactgaatcattaatgccagcaccgatacattattctcatcaaatattatataaaatggcacaagctcgtaaagatggatctgcatccggtcttgaacctgattcaaaaagccaagttacaatgctttatgaaaacggaaaaccaagtaaagttacttctttagtaatttcttcacaacacaaagaaggtttatctcctgaagacgtaaaagaaattgttaaaccttacgtatatgagtgtatacctaataacttattagaaggtcttaaagatgaagaattctatgttaatccaacaggaaactttgtaattggaggccctgatggtgactctggtttaactgggcgcaaaataatagttgatacatatggtggtgcagcgccccatggtggaggcgcattttcagga

SEQ ID NO: 243330 - DNA, 808 bp, Unknown
  Bacterial polypeptide expressing nucleotide sequence isolated from the Sargasso Sea
agttggaaatcagcaaatatagaaactcatttacacgaacaatccacggatatagctatgggagtagactcaaaagacaataaagatgaaggagcaggagaccagggaattatgtttggatatgcatgcacggagacggaagaattaatgccagcgccaattcatttttcacataaaattttaagattaatggctgaagatcgaaaaaaaggaattttaaagggaattgaacctgactcaaaaagtcaagttactatgttatatgaaaataatttgcctataaaagttacttctatagttatttctacacagcatgcaaaagatttaaatcaagaaaaagtaaaagaattagttcttccatatattaaaagatctatcccagaaaattacgttcaagatttaaatcccaatgaaatttatataaatcctactggtcaatttataattggcggtcccgatggtgatactggattaactggaagaaaaattatagttgatacttatgggggggctgcaccccatggaggaggagctttttcaggaaaagatccaacaaaagtagatagatcagctgcttatgcagcaagatacttagcaaaaaatattgtttattcaggtgcttctaaaaagtgtttaattcagttagcttatgcaattggagtgtctaaacctttatctatttttataaaactcgctgaaggtgatgaaaataaaattgatagtgtaaaaaagattattgatcaaaacttcgatttatcaccaagaggaattagagaaatgttaaaattaaataatcccaatatatgaa

SEQ ID NO: 243331 - DNA, 864 bp, Unknown
  Bacterial polypeptide expressing nucleotide sequence isolated from the Sargasso Sea
gagagtcatctacatgctcaatctgctgatattgctatgggcgtagactcctcaggaaataaagatgaaggtgcaggtgaccaaggaattatgtttggttatgcttgtaatgagaccgatgttcttatgcctgccccaattcattattctcataaaatattaagacttatggctgaggatagaaaattgggaaagttaaaaaatatagagccagactcaaaaagtcaaataacaattaaatatgaagatggaaaaccatcatcaataaaatcagtagttatttcaactcaacactcacctgatgtaaatcaagctcaagttagagatttagttaaaccttatattgaaagatcaataccaaaagaactattaagttcattagatgaaaaagaaatttatgtaaacccaacaggaaactttgttattggaggtcctgatggtgatagtggtttgacaggtagaaaaattattgttgatacttatggtggagcagcacctcatggtggaggggcattttcaggaaaagatccaactaaagttgatagatctgcagcttacgcatcaagatatttagcaaaaaatgttgttgcatctaaaattgctaacaaatgcttgatacaacttgcatatgcaattggagtatctaaacctctttctatttatgtcgatttatttgataatgacgatgaaaaaaacaaatatgtagagaaactaatacacgagaattttgatttaagtcccagaggcattagagaaatgctaggcttaaataaacctatctatgaaaaaacggctgcttacggacacttcggaagaattccagatgataaaggttcattttcatggggaaagacagataaatca

SEQ ID NO: 243332 - DNA, 334 bp, Unknown
  Bacterial polypeptide expressing nucleotide sequence isolated from the Sargasso Sea
aatgaataatttaaaaaactatctttttacaagtgagtctgtttctgaaggacatcctgataaagtttctgatagaatctctgatatggtagtagatagttatttatcgaaggatccattttctcgagtcgcctgcgagactttaacaacaacaaataaagttgtcctagcgggagagataagaggtccagaaattaaaaaagatgatttaattcaaaaagttagggattgtattaaagatattggatatgatcaggatggttttacttggaaagaggctactaaaattgagagtcatttacattctcaatctaaagatattgcaatgggtgta

SEQ ID NO: 243333 - DNA, 255 bp, Unknown
  Bacterial polypeptide expressing nucleotide sequence isolated from the Sargasso Sea
tttggcaaaatatttattcacttccgagtcagtaacagaaggtcatccagataaagtttgtgatgcaatatctgatgctatacttgatagtttactttcccaagacaaggaatctcacgtagcctgtgaaactcttgcaacaaatggtctagtggttgtttctggagaggtcaggtcatctgggtcgcttgatgtagagagtattgtaaaaaccaccttagaagatataggatacactgatgaaagcaaaggtat

SEQ ID NO: 243334 - DNA, 835 bp, Unknown
  Bacterial polypeptide expressing nucleotide sequence isolated from the Sargasso Sea
gattcgattttagatgaacttataattatagataaccaagctagagttgggtgtgaagttttcgcaaccactaatcaagtagtggtgggcggggaagttgggcttaaaaataaaataaaaattgaagatttatccgagcttgttgtagaaactgtacgatcaacagttaaaaatattggttatgaacaaaaaggatttcactggaaagacttaaaaattttaaatcttcttcaccagcaatctcctgacattgcacaaggtgttgatagagaaggagctggtgatcaaggcataatgtttggatatgcagttaatgaaacacaggaattaatgcctgctcctcttcaatattctcaagctattttgaaacggctaagtattgcaagaaaaaatgagcttaaagacaaattaggcccagattctaagtctcaattgacagtaaattatattaatggaattcctcaaagtataaaatccattgttgtttctattcaacattttgatgaaatgttaacctcagataatataaaagaaataattaccccttacatttttgagactttacctgatggatggattacaaagaatacaatttggcatgtaaacccgactggaaaatttgttataggtggtccagacggtgatgcaggacttactggcagaaaaataattgttgatacttatggtggagcagctcctcatggtggtggagcattttcgggtaaagatcctacaaaggtagatagatcagcagcctatgctgcaagatatttagcaaaaaacatagtatcatctggtttggcgacaaaatgtgttattcaactttcttatgcga

SEQ ID NO: 243335 - DNA, 440 bp, Unknown
  Bacterial polypeptide expressing nucleotide sequence isolated from the Sargasso Sea
tagtggtttaacaggaagaaaaataatcgttgatacttatggtggagcagccccacacggaggaggagctttttctggaaaggatccaagtaaagttgatagatcggccgcatatgccgcaagatatgttgcaaaaaatgtcgtggcttctaaaattgcaaataaatgcttaatccagttatcttatgcgataggagtttctaaacctctttcaatttatataaatctttttgatggagacgaggaaaaggaaaaacatgtagaaaatttaataaaaagtaattttgatttaagcccaagaggtattagagaaatgttatctttaaacaggcctatttacgagtgtactgcagcttacgggcattttggaagaaaaccagactccaaaggtagtttttcttgggaaaaaactgataaaatatcaatttttcaaaagtaat

SEQ ID NO: 243336 - DNA, 800 bp, Unknown
  Bacterial polypeptide expressing nucleotide sequence isolated from the Sargasso Sea
gttgggccgacaggactacatattcacttctgaatcagtttccgaaggacatccggacaaaatttgtgacagaatttctgacgcagttttagatttttgcatcaaaaaagacagacttgcaagagtagcatgcgagaccttcactacgacaaacactgttgtagttggtggtgaagtagggttttcctcagatgttgatataaaatcatttgagtttgagatagctgaacttgttaaaaatgttgtcaaaaaaattggttatgaacaagaaggatttcactggaacaaactgaatatttcaaactttatccatcaacaatccagtgatatttctcaaggagtagatcgtgatggagctggtgatcaaggtatcatgtttggttatgctgttgacgagacagaagagctaatgcctgctccaattcattattctcatttgatactcaaagctttagcagaagttaggcataaaaaaattgaaacaaatttaggtccggactcaaaatctcaattgaccgtaaagtatgaaaatggaaaacctgttggtgtgcagtctgtagttctatctacgcaacatacagaccctagtttatcatccgaagatgtcaaatcaatcgtcaaaccctacatcattgatattttgccagaacactggattacaaaaaatactgtgtggcatattaaccctactggaaagtttgtaattggagggccagacggagacgcaggattaacaggcagaaaaattattgttgatacttacgggggagccgctccacatggtggaggggcattctccg

SEQ ID NO: 243337 - DNA, 406 bp, Unknown
  Bacterial polypeptide expressing nucleotide sequence isolated from the Sargasso Sea
gctcgtcacggtggtggcgcattctcaggaaaagacccatccaaagtggatcgctccgccgcctacgcagcacgttatgttgctaaaaacgtggtcgccgcgggcttagcatcacgctgtgaagtccaagtatcttacgctatcggcatacccgatccggtttccgtgacagtggacacctttggcaccaacgtcattcccgaagcgcgcatcgagcaactggtagaagcgcactttgatttaagtgtgagcggcatcatcgactcactcgacttactccgccccatctaccgtgaaacggcagcctacggccacttcggtcgcagcaatccccaattcacttgggaaaaaaccgataaggcggagctccttaaagcagaaatcaacagcgcctcttgcgcataac

SEQ ID NO: 243338 - DNA, 301 bp, Unknown
  Bacterial polypeptide expressing nucleotide sequence isolated from the Sargasso Sea
aaatattgttgctgcaggattagcagacaaatgtgaattacaggtctcatatgcgattggagttgcaaaaccaacttctatcagcattgatacttttggaacttcaaaaattgaggaatcaaaaattgtacatattataaaggaagtatttgacttgcgtccttggggcataattaatatgcttaacttactagagccgatatataaaggtacagcagcatacggccattttggtagaagtgatttaaacttaccatgggaaagaatagatcaggtagataaaattaaaagtttattataa

SEQ ID NO: 243339 - DNA, 501 bp, Unknown
  Bacterial polypeptide expressing nucleotide sequence isolated from the Sargasso Sea
aatggccaataaaaattatttatttactagcgagtcagtttctgaaggtcatccagataaagtttgtgacagaatatccgatatggttgtagactcgtatttgtctaaagatcctgtatcgagagtagcttgtgaaacattaacgacaaccaataaagttgtattagcaggtgaaacccgtggaccaaaaactgataaagaagaacttataaatcaaattagaaattgtataaaagatattggttatgatcaaaaaggttttagttggaaaacagcaaatatagaaactcatctacacgagcaatcttcggatattgccatgggagtggactcaaaagaaaataaggaagagggtgcaggcgatcagggaataatgtttggatatgcatgtaaagaaactgaagatttgatgcctgccccaattcattattctcataaaattttaagactgatggctgaagatagaaaaaatggatccttaaaaggaattgagccagattc

SEQ ID NO: 243340 - DNA, 898 bp, Unknown
  Bacterial polypeptide expressing nucleotide sequence isolated from the Sargasso Sea
aaaagagagtatggctaagacaagtttatttacttcagaatctgtctctgaagggcatccagataaggtggccgaccaaatttctgattcaattgttgatgcaatcttcaatgaagacccgtctgcacgcattgcttgtgaaactatgattaatactgggatggtagtgttatctggtgagattacaacatcagcaaatattgattatgaaacagttgctcgcgatacgattcgtgaaattggttacacatcagacgaaataggtttcgattcagataattgtgaggtactaatatcaattgacaaacaatcacctgatattgcacagggtgttaatgaaggccagggaatggatttagatcaaggcgcaggggatcagggtttgatgttcggctatgcttgtgatgagacagatgttttgatgccatgtccaattacctatgcacatttgcttgtcaaaaaacaagctgatattagaaagagtggtgcgcttgaatggttaagaccagacgctaaatcgcaagtaacagttgtctatgaaaatgaaactccagtttcgattgatacaatagttttatctacccaacatgatccagagattgaacatgaagaaatagaaaaagcagttatcaatgaaattattaaacctgttcttcctgaaaatatgattaataatgaaacgcgttttttagtaaacccgactggaagatttgtcataggtggacctgttggtgattgtggtttaacaggacgaaaaattattgttgatacttatggtggaatgtcgaggcatggaggcggtgctttttctggaaaagatccctcaaaagttgatcgatcagctgcttatgcggctcgctatgtagccaagaatgttgttgctgctgggctgctaagc

SEQ ID NO: 243341 - DNA, 692 bp, Unknown
  Bacterial polypeptide expressing nucleotide sequence isolated from the Sargasso Sea
tatgacaaaaaaaacttatttaatgacatctgagtcggttggagaaggccatcctgataagatggctgatcaaatctcagacgcaatactagatgcaattctcacgcaagacaaaggctgcagagttgctgtggaaacccttgtcaaaaccggattggttgttctgggtggagaaataacaactactgctgatgtggattatgaggcaattgcaagacgaaccattaaaagaatcggttatgacaaagaagagttaggatttgatgatcaatcctgtgaggttctagtagcgatcagcaagcaatctccggatattgcgatgggcgtggatcgcgctgatgaaaaagaacaaggcgcaggagaccagggcttaatgtttggttatgcgaccaatgaaacgaaacaattgatgccagctaccattcaattgtctcatcaattggtaaaaagacacgccgatgtcagaagaagtggtgagctcagctggctaaggccggatgcaaaaagtcaggtaaccattctattcgatgacggtaaaccgaaatcaatcgatactgtggttctatcgacacaacatgacgaggatgtctcgatggatgaaattcaagcaggtgttttggagcacatcattaaaccaatacttcctgaagaacttttgactgaaaccactcaatacctcatcaatccaactg

SEQ ID NO: 243342 - DNA, 738 bp, Unknown
  Bacterial polypeptide expressing nucleotide sequence isolated from the Sargasso Sea
catgagcgactattcacttttcacatcggaatcggtgtccgaagggcatcccgacaaaatgtcggatcagatttccgatgccattctggatacctacctgaccaaagaccccgatgcgcgggtcgccgttgaaacgcttgtcaaaaccggcatggtagtggtggcaggagaagtcacaacggcgggtaacgtgacccccggcgagctcgaggaggttattcgccaaaccgtgctcgatattggctttgactcttccgacgtgtgcttcgatggcaatacctgcgccgtgatcaatgccattggtcagcagtcggccgacatcgcgctgggcacccatgaggcggatgaagctaaccagggcgctggggatcagggcctgatgttcggttttgccgcggatgagactgacgtgctgatgccggcgccgattcactactcgcataggttggtggaacggcaggccgagttacgcaaatcgggcgcgctgccctggctgcggcccgacgctaagagtcagctcaccatgcgctacggcgccgatggcaagcccgagcgcgtcgaggcggttgtgctctccacgcagcacgatcccggattcgcacaggaagacctgcgcgaagcagtgcgccgggagattatcgagcccactctgccggccgaatggctacacgccgacacgctcttccatatcaacccaacgggcaattttgtcatcggtggtccgcaaggtgactgcgg

SEQ ID NO: 243343 - DNA, 517 bp, Unknown
  Bacterial polypeptide expressing nucleotide sequence isolated from the Sargasso Sea
tatgctgacctcagacacccgattcctggtgaaccccacggggcgttttgtcattggtgggcctcacggggactgcggactgaccggccgcaagatcatcgtggacacttacggcggctctgcccaccatggcggcggcgccttttccggcaaggatcccagtaaggtcgaccgctccgcagcttatgccatgcgctacgtcgccaagaacgttgtggcagcaggtctcgcagagcaatgtgaggcccaggtggcctacgcgatcggggtcgccgagcctgtctctttaatggtgagcaccaacggcaccgcggctatcgccgaagacaagatcgaagcattgatccgtgagcattttgacctgcggcccaagggcatcattgaagacctggatctgctgcgcccgatttaccgccccaccgctgcctacggccacttcggccgcagcgaagatgggcttttcccttgggagcaaacggacaaggccgacgccctgcgtgccgctgcaggtctgtaa

SEQ ID NO: 243344 - DNA, 475 bp, Unknown
  Bacterial polypeptide expressing nucleotide sequence isolated from the Sargasso Sea
acaggtaattttgttattggtggtccagacggcgatagtggactaacaggtagaaaaattattgttgatacttatggaggtgcagcaccacatggcgggggcgctttctcaggaaaagatcctacaaaagttgatagatcagcagcatatgcttcaagatacttagcaaaaaatgtagtagcttcaaaaattgcagataaatgtttaattcagctggcttatgcaattggggtatcaaaacctttatcaatttatgttgatctttttgacaatgatgaagaaaaaaatagacatgtagaaaaattaattaatgaaaattttgatttgagtccaagaggaattcgagagatgcttgggttaaataaaccaatatatgaaaaaacagcagcctatggtcattttggaagagatgctgagtctaacggagcattttcttgggaaaaaactgataaagttgacgtttttagcaagtaaa

SEQ ID NO: 243345 - DNA, 358 bp, Unknown
  Bacterial polypeptide expressing nucleotide sequence isolated from the Sargasso Sea
tacgctgcgcgctacgtggccaagaacgtggtggcggccggtctggcgcgccaatgccaggtgcaggtcagctacgcgattggcgtggcacgcccgatcaacatcacggtgtacacggaaggcacgggcgtgattccggacgaccagatcgccaagctcgtgcacgagcatttcgacctgcgcccgaagggcatcgtgcagatgctggacctgctgcgcccggtctacgaaaagaccgccgcgtacggccacttcggccgcgaagaaccggagttcagctgggaagccaccgacaaggccctgctgctgcgcgaagcggctggcctgaccggccagccggccaaggcgtttgcctgag

SEQ ID NO: 243346 - DNA, 598 bp, Unknown
  Bacterial polypeptide expressing nucleotide sequence isolated from the Sargasso Sea
tacacaacattccaaagatgttgacttagcaaaagttaaagacctttgtacgccatacattgaaagatctattccaaaaaatttattaggaagtcttgatgaaaaagagatttatataaatcctacaggaaactttgttataggtggccctgatggagatagtggattgactggtagaaagataatagtagatacttatggtggagcagcaccacatggtggaggtgctttttcagggaaagatccaacaaaagttgacagatcagctgcatacgcctcgagatatttagcaaaaaatgtagttgcttcaaagattgcagacaaatgtttaatccagttagcttatgctattggagtttcaaaacctttatcaatttatgttgatctttttgataatgatgaggaaaaaaatagacatgtagaaaaattaattaatgagaattttgatttaagtcctagaggaattagagaaatgcttggtttaaataaggcgatatatgaaaaaactgcagcatatggacattttggaagagaaccagagtcaaatggtgcattttcatgggaaaaaactgataaagcaaatgtttttagtaagtaa

SEQ ID NO: 243347 - DNA, 865 bp, Unknown
  Bacterial polypeptide expressing nucleotide sequence isolated from the Sargasso Sea
aacaactaataaagtagttttagctggagaagtaagaggaccagaaataaaaaaagaggatttaattcaaaaagttagagagtgtataaaagatattggttatgaccaagaaggctttacttggaaagatgcaactaaaatagaaagtcatcttcattctcaatctgcagatattgcaatgggtgtagactcatctggaaacaaagatgaaggagctggagaccaaggaataatgtttggttatgcgtgtaatgaaacagatgtacttatgccagcaccaatacactattcacataaaattttaagactaatggcagaagatcgaaaatctggaaagttaaaaaatattgagcctgactcaaaaagtcagattaccatagagtataaagatggaaagcctactcatgtaaaatcagttgtaatttcaactcaacattcaccagatgtcaatcaatctcaagtaagagaattggttaaaccctatatagaaaaatctattccaaaaaatcttataaatgggttagacgaaagtgaaatttatgtaaaccctacaggtaattttgtaattggtggaccagatggagatagtggattaacaggaagaaaaattattgtagatacttatggaggagcagctccacatggtggaggagctttttcaggaaaagatcctactaaagttgatagatcagcagcatacgcatcaaggtacttggcaaaaaacgtagtagcttcaaaaattgcagacaaatgtttgattcaactagcttatgctattggtgtatcaaagcctttatcaatttatgtagacctttttgataacgatgaagaaaaaaataaacacgtagaaaaattaattagagag

SEQ ID NO: 243348 - DNA, 529 bp, Unknown
  Bacterial polypeptide expressing nucleotide sequence isolated from the Sargasso Sea
tattcctaaaaatttattaggaagtcttaatgaaaaggaaatttacataaatccaactgggaattttgtaataggtggacctgacggggatagtggtttaacaggtagaaaaattattgttgatacttatggtggagctgcaccacatggaggaggtgcattttctggtaaagatccaacaaaagtcgatagatcagctgcttatgcatcaagatatttagcaaaaaatattgttgcatcaaaaatttcagataaatgtttaattcaactagcttacgcaattggagtatcaaagcctctgtcaatatatgtagacttgtttgataatgatgaagaaaagaatatgcatgtagaaaaactcatcaaagagaattttgatttaagcccaagaggtattagagaaatgcttggattgaataaagctatatatgaaaaaacagcagcttacggacactttgggagagtgcctgagagtgatggatcattttcatgggaaaaaactgataaatctgaggtttttagcaagtaa

SEQ ID NO: 243349 - DNA, 888 bp, Unknown
  Bacterial polypeptide expressing nucleotide sequence isolated from the Sargasso Sea
tctgagtattgggcttgatgcaaaatcgtgcgcagttttagtggttttaaaccgtcaatctgctgacattgctcaaggtgttaatgaaggtgaaggtgaattttctgagcaaggtgctggagaccaagggctaacatttgggtatgcatgcaatcaaacggatgagctaatgccattgccaatcatactatctcataaattaatgcaaaaattgactcagcttagaaaaagtggcgaacttacctatttaaggcctgattcaaaggctcaagttacagttgagtatgatgaaaatagacagccaacaaaagttacggctgttgtaatttcaacccagcatcatccatcagttgagcaaaatcaaattaaggcggatattaaatctttagttattgatcaagtaataccaaacgaattaatggaagaagatccaacaatatatattaatcctacaggtcgttttgttgttggtggaccccaaggggatgcgggtttaacaggccgtaaaatagttgtggatacttatggtggatgggtgccgcatggtggtggcgcattttcaggtaaagatccatctaaaattgatcgttcagcagcatatttgtcacgatatgttgcaaagaattgtgtagcagctggtttatgtgaagaaatggaaatacaagctgcatatgctataggagtggcaaagccagtgtcgattaaggtgaatacctttggaacatctgaattatctaacgaaatattattgaagattattaatgacgtgtttgattttaggccaaaagccttaatcgaatcattaaatcttcttcagccaatatatagcaaaacagctgcatacgggcattttggacgttcagatattgagtttccttgggaaacctt

SEQ ID NO: 243350 - DNA, 394 bp, Unknown
  Bacterial polypeptide expressing nucleotide sequence isolated from the Sargasso Sea
ggctatgctccgcatggtggaggtgctttttctggtaaagattcatcaaaggtagaccgtagtgctacttatatggcgaggtacattgcaaaaaatattgtagcagcagatctcgcagatcgatgtgaggtacaattatcttatggcatcggagttgcagagccaacctcattttatgttaagacccaaggtactggtaaaaaagatgatcaaacgcttacagagattgccagagatgtattcccaatcaaacctggagaaatagtcgctcatttagatcttaaaaaaccaagatatagagatacagcagcttatggtcattttggacgagagctggaaaaattcacttgggaaagaaccgatatggttgaaaccctgcttaaaaaattatagg

SEQ ID NO: 243351 - DNA, 415 bp, Unknown
  Bacterial polypeptide expressing nucleotide sequence isolated from the Sargasso Sea
tgatcgctctgccgcttatgcaacaagacatattgctaaaaattgtgttgctgctggcttggcggacaggattctagtacaagtatcttatgctataggagtagctagaccaatgggggtatttgttgacacatatggttccgcaaatgtatcactttcagatggagagattgcgagaaagcttgagcaaatggactgctttgatcttaggcctgcatctattattgatcgactaaaacttaaaactccaatatattctgaaactgctgcatatggacatatgggaagaaactcagaaaacaagacactaacattcaagaaaagcgaaaatgaatttcaagtaaatgttgaaacattcacttgggaaaaacttgattgtgttgataaagtaaaagaagtctttgggctttcttaa

SEQ ID NO: 243352 - DNA, 385 bp, Unknown
  Bacterial polypeptide expressing nucleotide sequence isolated from the Sargasso Sea
aatgtctgaatcaaactatttatttactagtgagtccgtgtctgagggtcatccggacaaggtttgtgatttaatctcagactctattgtcgatcggtacttgagtgaagacccggaggctagggtggcggttgaaacaatggccactacaaatctagttatgattgctggagaaacccgcgggcctgagataagccccgacgaaatcgagcgtgttgcgaggcaggtggtcagggatattgggtacgagcagaagggtttccactggcgggattcaagcgtacaggtgcgccttcacagccagtctgccgatatcgctgttggtgtagacgccgctgaaaacaaggacgagggagctgggggacagggaatgatgtttggttac

SEQ ID NO: 243353 - DNA, 964 bp, Unknown
  Bacterial polypeptide expressing nucleotide sequence isolated from the Sargasso Sea
tgaatcagtttctgaaggtcatccagataaagtgtgtgacagaatatcggatatggttgttgatacctacttatcatcaggcgatccacaaactcgagttgcctgtgaaacacttactaccacaaacaaagtagttttagctggagaagtaagagggccatcaatatcaaaagatcaaattatatctcaggtaagagaatgtattaaggatattggatatgaacaagacggctttcattggcaaaattgtgaaatagattatcatttacatcctcaatcattagatattgccatgggagttgactctggaagtgataaagaagagggagcaggagaccaaggtattatgtttggttttgcatgtaaagatacagaaactttaatgccagctccaattcattattcacatcaaattttatataaaatggctcaagcaagaaaagatggatcagcttctggtttagaaccagattcaaaaagtcaagttacaatgctttatgaaaacggaaaacctagtagaattacctcattagtaatctcatcacaacacaaagaaggattatcacctgcagatgtaaaagaaattgttaaaccttatgtatatgaatgtataccaaatgaattgctcgaaggccttaaagatgaagaattttatgttaatccgactggaaactttgtaattggcggtcctgatggagattctggtttaacaggtagaaaaattatcgtagatacttatggtggtgctgcacctcatggaggaggggcattttcaggcaaagatccatctaaagttgatagatcagcagcatatgcagctagatatttagcaaaaaatgttgtagcagctgatcttgcagatgaatgcacaatacaattatcttatgcaataggagtttcaaaacctttatcagtttatgtaaatactaatggtacaaataaagtcgatgagaaaaaaaattga

SEQ ID NO: 243354 - DNA, 739 bp, Unknown
  Bacterial polypeptide expressing nucleotide sequence isolated from the Sargasso Sea
atggataaagaatatttgtttacaagcgaatctgtctcggaaggtcatcctgacaaggtttgtgatataatatctgattatattgtagatgattttttatcacagccaaattcagaaaattggagagttgctttagagacactagttacaactaatcaagtggttgtttctggtgaagtacgcggaccagatggattccagtgtgactacgagtcattagccagggcagcagtaaaagaaattggttatgagcaagaaaagtttcactgggaaaattttaattttgcatcttttgtacatggacagtccggagatattgcaatgggcgttgatgcaaaagacaataaggatcagggcgcaggagatcaaggtataatgtttggatatgcttgcaaagaaacgccagttttaatgccagctcctatttattattcacatttgatcttaagaaatcttgctgaagcgaggaagaataatacaatcaatgggattcaaccggattcaaaaagtcaagttactttaaaatataatgagtctagtccaattgaatgtactgaagtcgtggtttctactcaacacgataaagaattagaactatctgatgttgaagaaattgttacaccatttattaaagaggctctcccagaaaattggttaaaaaatactcaatttcatattaatccaacaggcagatttgaaactggaggaccagatggtgatacagggcttacaggtagaa

SEQ ID NO: 243355 - DNA, 436 bp, Unknown
  Bacterial polypeptide expressing nucleotide sequence isolated from the Sargasso Sea
cggtcttactggaagaaaattatagttgatacctatggaggtgctgctcctcatggtggtggggctttttcaggaaaagatccaagtaaagtcgatagatcagcagcttatgcggcgagatatgttgcaaaaaatatagtagcatcgaaaatagctgacaaatgtttaattcaacttgcctacgcaattggtgtatcaaaacctctctcaatctatgtaaacctctttgatggtgatgaagaaaaatcaaaaaatgttgagaaaattattaaagataattttgatttaagtcctcggggtataagagaaatgctttctttgaatagacctatttatgagcgtacatcagcatatggtcattttggcagaaaaccaggatccgatggttcattttcatgggaaaaaacagataaagtagatatttttaaaaagtaat

SEQ ID NO: 243356 - DNA, 463 bp, Unknown
  Bacterial polypeptide expressing nucleotide sequence isolated from the Sargasso Sea
tgtaattggaggacctgatggtgattgtggattaacaggtagaaaaattattgtagatacttatggaggtgcagctcctcatggtggaggtgctttttctgggaaagatccaactaaagttgatagatctgcagcttatgcttccagatatattgctaaaaatgtagtagcatcaaaaattgcagataaatgcttgattcaattagcttatgcgattggagtttcaaaacctttatcaatatatgtagatctatttgataatgatttagaaaaaaataaatttgttgaagaaaaaatcaaagaaaattttgatttaagtcctaggggtataagagagatgctgagtcttaataaaccaatttatgaaaagacagctgcatatggccattttggaaggactccagaaactgacggtgcattttcttgggaaaagactgataaagctagtgttttttctagatag

SEQ ID NO: 243357 - DNA, 148 bp, Unknown
  Bacterial polypeptide expressing nucleotide sequence isolated from the Sargasso Sea
atgaattctaataattatttttttacaagcgaatcagtatccgaaggtcatccagacaaagtttgtgatcgaatttcagatatggttgttgatacctacttatctaaagacaacaacgcaagagttgcttgcgaaactcttacaacaa

SEQ ID NO: 243358 - DNA, 733 bp, Unknown
  Bacterial polypeptide expressing nucleotide sequence isolated from the Sargasso Sea
atgtgtaaatatgtttttacatcagaatctgtttctgaaggacaccccgataaggtttgtgatgcaatttctgatgctatattagataatttattagagcaagattctgaatctcatgttgcctgtgagactctagctacaactgggactgtggttgtctcaggtgagattagatcttctggatcaattgatgttgaaaaagtagtaaaagaaactttagatgagattggttatactgataaagcttatggtatggatagtaaagaagttaaagttatatcaatgttagatgatcaaagttcagagattgcacaaggtgttgatgaaggttcaggactacatgaagagcaaggagctggagatcagggtctaatgtttggtttcgcttgtaatgacacaaaagaattaatgcctctacctattcatttatcacaccgtttagtagaacgtatgacagaccttcgtaaaaatggcgaaataccatggttaaggcccgatagtaaatctcaggtatcagtggcttataaagatgacaagcctgtttcaataacaaaagttgttattgccactcaacatgacgatatgttaaataaatttgagaatcaaaatgctgagcatgaatttgttgaaaaagaaataattaaacatgtcattaaacctgttcttgatgaatgtggcttgccatatgatgaatcatttattgttaatggtactggcaggtttgtttttggtg

SEQ ID NO: 243359 - DNA, 662 bp, Unknown
  Bacterial polypeptide expressing nucleotide sequence isolated from the Sargasso Sea
aatgaaaaaaaactatctatttactagtgaatcagtttcagaaggtcaccccgataaagtttgcgatagaatatctgatatggtagttgactcatatctaaagagtgaaccgcaatcaagagtagcttgcgaaacattaacaacaacaaataaagttgttttggctggagaagtaagaggaccagaaataaaaaaaaatgatttaattgaaagggtaagagactgcataaaagatattggatatgaccaagaaggatttacttggaaagaagctactaaaattgagagtcatttgcacgctcaatcttctgatatagctatgggtgtagattcatcaggcaacaaagatgagggagccggtgaccaaggtataatgtttggttatgcttgtactgagactgatgttcttatgccagcgcctatacattattcacacaaaatattaagattaatggcccaagataggaaatctggaaagcttaaaaatatcgagccagattcaaaaagtcagatcaccatcgaatacattgatggtaagccgtcaaaagtaaagtcagttgtgatatcaactcagcattctgctgacgttaatcaatcgcaagtaagagaactagtaaaaccttatattgaaaagtcaattccaaaaaatttattaaacgacc

SEQ ID NO: 243360 - DNA, 331 bp, Unknown
  Bacterial polypeptide expressing nucleotide sequence isolated from the Sargasso Sea
aatgaaaaaaaattatttgtttacaagcgaatccgtttccgaaggtcatccagacaaagtatgtgatagaatctctgatatggtcgtcgatacttatttaggtatggagcctcaagcaagagtggcttgcgaaacattgactacaacaaataaagttgttttagcaggagagactagaggtccagatgttaataaagatgagttaatttcaaaagttaggaattgcatcaaggatattggatatgaccaagatggcttcacttacaaagaagctactaaaaaagaatgccatttacactctcagtcagccgatatagcgatgggagttgac

SEQ ID NO: 243361 - DNA, 315 bp, Unknown
  Bacterial polypeptide expressing nucleotide sequence isolated from the Sargasso Sea
aatgaaaaaagattacttatttactagcgagtcagtatccgaaggtcatccagacaaagtttgcgatagaatttcagatatggttgtagatacatatttggcagctgaacctcaatcaagagttgcctgtgaaactttaacaacaacaaacaaagttgtattagctggtgaagtaagaggtccagaaattaaaaaagaagatttaatagaaaaagtaagacattgcattaaagatataggttatgatcaaaagggatttacctggaaagaggcaacttcagttgaaagtcatttacatgctcaatcttctgatat

SEQ ID NO: 243362 - DNA, 795 bp, Unknown
  Bacterial polypeptide expressing nucleotide sequence isolated from the Sargasso Sea
aataagaggaccaaatattggtaaagatgaaatcatagataaagtaagaaattgtatcaaagatataggttatgatcaggagggtttttcttggaaagaacaaacaaaaatcgagtcccatctgcatgaacaatcaactgatattgcaatgggagtagactctaaagataacaaggatgagggagcaggggatcaaggtataatgtttggttacgcctgtaacgagacagatgatttaatgcccgctccaatattttattcgcataaaattctacgtctaatggcacaagatagaaagtcaggagcacttaaaggaattgaacctgactcaaaaagtcaagtaacaatgttatatgaaaatggaaaaccaaaaaaagtaacttcagtagtaatttcaacacaacactctaaagatttagaccaagaaaaagtcaaagaaataattttgccttacataaataaatctataccaaaagaattattgagtgatctacaaagttcagaaatttatattaatcctacagggcaatttataattggaggtcccgatggcgacactggtttgactggaagaaaaataattgttgatacttacggtggggccgctccgcatggtggaggagcattttcaggaaaagatcctacaaaagttgatcgctcagcggcttatgtatcaagatatttagcaaaaaatattgtagcatctggtataacagaaaaatgcttgattcaattatcttatgcaatcggagtttcaaagccattatcaatatatgtaaaattaggagataaaga

SEQ ID NO: 243363 - DNA, 879 bp, Unknown
  Bacterial polypeptide expressing nucleotide sequence isolated from the Sargasso Sea
tttggcagggagagacagaggtccaaaaattaataatgaagaattaatatcaaaagttagagactgtattaaagacattggttatgaccaagacggttttagttggaaagaaactactaagattgaaactcatttacattctcagtcaacagatatagctatgggagttgactcatcgggaaacaaagatgagggcgctggagatcaaggaattatgtttggatatgcatgtaatgaaactgatgttttaatgccagctccaattcattactcacacaggattttaagattgatggctgaagatagaaaatctggaaaacttaaaggaatagagccagattcaaaaagtcaaattacaattgagtataaagatggtgtgccgaatgctgttaaatcagtggtgatttctacacaacattccaaagatgttaacttagcaaaagttaaagagctttgtatgccatacattgagagatctattccaaaaaatttattaggaaatcttgatgaaaacgagatttatattaatcctacaggaaattttgttataggtggtcccgatggagatagtggattgactggcaggaagataatcgtagatacctatggtggtgcagcacctcatggtggaggagctttttcaggaaaagatccaacgaaagtagataggtctgcagcttatgcttctagatatttagctaaaaatgtagttgcttcaaaaatatctaataaatgtttaattcaactagcatatgcaattggtgtgtctaaacctctgtctatttatgtagatctatttgataacgacgaagaaaagaatagacatgttgaaaagttaattaatgaaaattttgatttaagtccaagaggtataagaga

SEQ ID NO: 243364 - DNA, 559 bp, Unknown
  Bacterial polypeptide expressing nucleotide sequence isolated from the Sargasso Sea
ggcggatctgcgtgaagcggtgatggaagaaatcatcaagccggtgctgcccgaagagtggctgcacaaggacaccctgtaccacgtgaaccccaccgggattttcgtgatcggcggccccatgggcgactgcggcctcaccggccgcaagatcatcgtcgacacctacggcggcatggcccgccacggcggcggcgccttctctggcaaggacccgtccaaggtggatcgttccgctgcttatgccggacgttacgtggccaagaacattgtcgccgcgggcttggccagcaagtgcgagattcaggtgagctatgccattggtgtggccgagcccacgtctatctcggtaaatacctttggcaccggcaaaattagcgatagcgccatcgtcgacctggtacgcgaacactttgatctgcgcccacgcggcattattgaaatgctcgacctacgcaagccgatctatcgccccactgccagctacggccacttcggccgcgaaggcttcagttgggaaaaaaccgacaaaaccgaagcgcttaaagcagcactttaa

SEQ ID NO: 243365 - DNA, 858 bp, Unknown
  Bacterial polypeptide expressing nucleotide sequence isolated from the Sargasso Sea
ctgatattgctatgggagttgattcatctggtaacaaagatgagggagctggagaccaaggtattatgtttggttatgcatgtgatgaaacagacgtactgatgcctgcaccaatttattattctcacaagattctaagattaatggctgaagatagaaaatcgggaaaattaaaaaatattgaaccagactcaaaaagccaggtgacttttgaatatgttaatggaagaccttttaaagtaaaatcagtagttatttcctcacaacattcatccgatgttaaacaatctcatgtaagagaattattaaaaccttatatgataaaatctatacctgaaaattttttaaaagattttaatgaagaagaattttatgtaaaccccaccggtaattttgtgataggaggtcctgatggtgattgtggtttgaccgggcgaaagattattgtagatacctatggaggagctgcccctcatgggggtggagcattttcaggaaaagacccaactaaagttgatagatcagcagcttatgctgcgagatatattgcaaaaaatgttgttgcatcaaaaattactaaaaggtgtttgattcaattagcatatgcaatcggtgtttcgaaacctctttctatttatgttgatctttttgaaaatgatcaagacaaaaatagatttgttgagcaaaaaatccgggagaactttgatttatctcctcggggcataagagaaatgctaaagttaaacaagcctatatatgagaaaactgcagcttatggtcattttggaaggatgcctgaacaggatggctctttttcttgggaaaaaactgataaaaagagtattttttctaaatagt

SEQ ID NO: 243366 - DNA, 829 bp, Unknown
  Bacterial polypeptide expressing nucleotide sequence isolated from the Sargasso Sea
agtagactctgcaggaaataaagatgagggtgctggtgaccagggaattatgtttggttatgcttgtaacgaaacagatgtattgatgccagctccaatccattattcacataaaatattaagattaatggctgaggatagaaagtcaggaaagttaaatggaatagagccagactcaaaaagtcaaattacaattgagtacaaagatggtatgcccgctgctgtaacatcagtagttatttctacacaacattcgaaagatgttagcttagcccaagttaaaaaactttgtatcccttacatagaaagatctatccctaaaaacttattgggtagtcttgatgaaaaagagatttatatcaaccctactggaaactttgtaattggtggtccagacggagatagtggtttaactggaagaaaaattattgttgatacatacggtggagctgcaccacatggtgggggtgcattttctggtaaagatcccacaaaagttgatagatcagctgcttatgcatcaagatatttggctaagaatgttgtagcatcaaaaattgctgataaatgtttaattcaattagcttacgctattggagtgtctaaaccactgtcaatttatgtggatttgtttgataatgatgaagagaagaatttgcatgtagaaaaacttatcaaagaaaactttgatcttagcccaagaggaattagagaaatgttaggtttaaataaacctatttatgaaaaaacagctgcatatggccactttggaagaattcctgagaaggatggctcattttcatgggaaaaaacagataaatctggggtt

SEQ ID NO: 243367 - DNA, 368 bp, Unknown
  Bacterial polypeptide expressing nucleotide sequence isolated from the Sargasso Sea
aatgaaaaaaaattttttatttacaagcgaatctgtatctgaaggtcaccctgataaagtgtgtgacagaatttcagatatggtggttgatacttacttaggaatggaaccgcaagcaagagtagcgtgcgaaacacttacaactacaaataaagttgttttagctggagaaacaagaggacctgacataaataaagatgagttaatttctaaagttagagattgcatcaaagacattggatatgatcaagaaggttttacctggaaagaagcaacaaagattgaaagtcatttacactcacagtctgcagatattgctatgggtgtcgactcttctggaaacaggatgaaggtgctggagaccaggg

SEQ ID NO: 243368 - DNA, 847 bp, Unknown
  Bacterial polypeptide expressing nucleotide sequence isolated from the Sargasso Sea
tatggaatacgaatttactagcgaaagcgtaagcattggtcatcctgataaagtcgctgacttaatttcagattcagttgctacctttcttttatcaaaaaatatttctcatagagccgcaatagagactcttgtaactacaaacatggttacgatagctggtgaatataaaagtaatgatttcgataaagatgaaatagaaaaaataataaggaatgttgtagcaaaaattggatatgagcaagatggtttccatcacgagcgtctaaatatctataatgagctgcatggtcagtctccagatatagccttaggtactgacaattttggtgctggtgatcaaggccttatgtttgggtatgcttgcttagaaactgaaaattatatgccaatggctatctatttatgtcacaaaatattagaacgaattcaagatgaaagagagaatcattcatggatccttcctgacaacaaaagccaagtaactctttcctacagcgatattaataagccagaaaatattaaaaaaatagtttgtagtactcaacatgccgaagatgttgacattgaacatgttagaaaaaaaatagaggaaataattagagatgaaataacagaggatctaagctctacagagtttcttattaatccaactgggaggtttgttgttgggggacctgatggagatactggactaactggtagaaaaataattgttgatacatatggaggttatgctcctcacggaggtggagccttttctggaaaagattgcacaaaagtagatagatctggcgcttatatggcgagatatcttgcaaaaaatatagtttcaagcggtagggct

SEQ ID NO: 243369 - DNA, 444 bp, Unknown
  Bacterial polypeptide expressing nucleotide sequence isolated from the Sargasso Sea
attcaggtttaacaggtagaaaaattattgttgatacttatggtggttcatctcctcatggcggcggtgcatttagtggaaaagatccaaccaaagtggatagatctgcggcttatatatcacgttatatggctaaaaatgtcgtggcagcaaatttagctgaaaaatgtacaattcagctatcatatgccattggagtttcagaacctctttcactatatgttaacacagataacactggtaaaatttctgacgatgagctttcaaaaattcttagaagtgaagttgacttaactccctctggaataagatcctgtttgggtttaaacaattccatttataaaccatctgctgcatatggtcattttggaagagtgccagatgaagaggttaaaggctctttttcatgggaaaaaactgatcttgtatcaaaaatctcctaat

SEQ ID NO: 243370 - DNA, 372 bp, Unknown
  Bacterial polypeptide expressing nucleotide sequence isolated from the Sargasso Sea
cattttctggaaaagatccaaccaaagttgatagatcagctgcttatgcatccagatatttagcaaagaatgttgttgcatctaaaattgctgataaatgtcttatacaattagcttatgcaattggagtatcaaaacctttatctatttatgtcgatttgtttgttaacgacgatgagaaaaataagcatgttgaaaagcttataaatgagaattttgatctaagccccagaggaataagagaaatgcttggtctgaacaaacctatctatgaaaaaacatcagcctatgggcattttggaagaatgcccgatgacatgggatgcttttcatgggaaaagacagataaatcagacatatttagcaagtaaa

SEQ ID NO: 243371 - DNA, 469 bp, Unknown
  Bacterial polypeptide expressing nucleotide sequence isolated from the Sargasso Sea
gaataggaggactgatggagatgcaggtcttacaggtagaaaaattattgtagatacatatggcggagcttgcccgcacggaggcggggctttttcaggaaaagacccttctaaagtagataggtctgctgcctatgcagcaagatatgtagcaaaaaatattgtttatgcaggaatagctgaaaggtgtactatccaattagcttatgcaataggaatggttgagcctttatctgtatatgttaatacttatggaactggaaagttaagtaatatagaaataatagatttaattaataaaacttttgatttaacacctagagggattagagacatgcttaacctctctaatgtgaattatttatctacagcggcttacggacattttggaagagattcaaaaagtagtgaatattttacttgggaaaaaatagataaggctaaattaattttagagtctataagataa

SEQ ID NO: 243372 - DNA, 554 bp, Unknown
  Bacterial polypeptide expressing nucleotide sequence isolated from the Sargasso Sea
tatgacaaatcaaacatatttaatgacatctgagtctgttggagagggtcatcctgacaaaatggctgatcaaatttcagatgcgatcttagacgcaattattgagcaagataaaggctgtagagttgccgttgaaactcttgtaaagacggggctggttgtccttgctggtgagatcacaacaagtgccaatgttgattatgaagccattgcacgaaaaaccattaaaagaatcggctatgacaaagaagaacttggctttgatgatcaatcttgtgaagtcttatctgcaatcagcaaacaatctccggatattgcaatgggcgttgaccgagctgacaaaaaagaacaaggtgctggagatcaaggtctcatgtttggatatgcaaccaatgaaacaaaagaactgatgccagcaacaattcagctatctcatcaactggtcaagaggcatgcagatgtcagaaggagcggtgagctcagttggctgagacccgatgcaaagagtcaagtaaccattctttttgaagatggaaagccaaaatcaatcgata

SEQ ID NO: 243373 - DNA, 953 bp, Unknown
  Bacterial polypeptide expressing nucleotide sequence isolated from the Sargasso Sea
tccgaatcagtaacagaaggtcatccagataaagtttgtgatgcaatatctgatgccatacttgatagtttactatcccaagataaggaatctcacgtagcctgtgaaactctcgcaacaaatggtctagtggttgtttctggagaggtcaggtcatctggttcgcttgatgtagataacatcgtaaaaacaacattagaagatataggatacactgatgaagcaagaggtatggatagtgataatattgaaattcgctctattattcatgaacagagccctgaaattgctcaaggtgtggactcagatgatgttgccgagcagggcgcaggtgatcagggtttaatgtttggttttgcatgcaaagagaccgaggagctaatgcctcttccaattcaaatagcccagcgtctaactgaaaaattagcaagaattagaaaagatggaactcttccttggttgaggccagatggaaagtcacaggtcactgttgagtatgatgggtttacgccagtcagagtaacaaaggtggtaattgcaacgcagcatgacgatatgcttgaagaatatggctctgaagaagatgagttaaaatttgtaaaaaaagaggtaattgatcacatcattattccagtcttggatagctatggtattccctatgagaatgagttcattgttaatggtacaggaagatttgtatatggtggtccagccgctgacacggggcttactggaaggaagatcattgttgatacatacggtggctatgcgccacatggcggaggagctttctctggaaaagatccttcaaaagttgatcgttcagcggcatacatgagcagatatattgcaaaaaatgttgtagctgcagatcttgctgagaggtgcgaggtgcaattgtcatatggtataggagttgctgaacctacttcattctatgttaaaacatttgg

SEQ ID NO: 243374 - DNA, 721 bp, Unknown
  Bacterial polypeptide expressing nucleotide sequence isolated from the Sargasso Sea
atgccttatttatttacttcagaatctgtatcagaaggtcacccagacaaagtttcagaccaaatatcagatgccttaattgataattttttagccttcgacccaagttctaaagttgcctgtgaaacattggtaacaactggtcaagttgttcttgcaggagaagttaaatcttcagcttatttggatgtacaaaaaatagcaagagatgtaataaataatattggatacactaaaggggaatatatgtttgatggcaattcatgtggagttctatcggctattcacgaacaatcaccagatattaaccaaggtgtggaaagaaaaaacaaagaagagcaaggtgctggagaccaaggtatgatgtttggttacgcaactaatgaaacagacaactacatgccccttcctttagaaatttctcatcttttacttaaagaattggctcaaataagaaaagatggtaaggaaatgacttacttgagacctgattctaaatcacaagtaactattgaatattctgatgacaatcaacctattaaaattgatgctattgtagtttcaactcaacacgatgattttgactctgaagaagctatgcttgaaaccattaaaaatgatgtaatcaatattcttgtcccaagaattaaaaatttattgcctgaacacattcagaatctttttaatgatgacattaattatcatgttaacccaacaggaa

SEQ ID NO: 243375 - DNA, 403 bp, Unknown
  Bacterial polypeptide expressing nucleotide sequence isolated from the Sargasso Sea
aatgagtagatcatatttatttactagtgaatctgtatctgaaggacatccagataaagtttgtgatagaatatcagatatggttgttgatacatatttatcatctggtgatccacaaactcgagtcgcatgtgaaacacttactactactaacaaagtagttttagctggagaagtaagaggaccatcaatatcaaaagatcaaattatatctcaagtaagagattgtattaaggatattggatatgagcaagatggttttcattggcaaaattgtgatgttgatagttttcttcatgaacaatcatcagatatcgcaatgggagttgactctggaattgataaagaagagggagctggagatcaaggaattatgtttggttatgcttgccgtgatacagaa

SEQ ID NO: 243376 - DNA, 751 bp, Unknown
  Bacterial polypeptide expressing nucleotide sequence isolated from the Sargasso Sea
aataacctcactaggcagccctgacctagagcctgttgttagaaaaacgattaatgatattggttacaactcagatgcatacggatttaacggagatacatgtgaatttactaatctagtatttgaacaatctccagatatttctcaaggagttacagaaggcgaaggtgaaaatctagagcaaggtgctggtgatcaaggattaatgttcggatatgcttgcactgaaacagaatctttaatgcccctgcctatagacctttcacataggttagttaaaaaacaggccgatgtaatgaaaagcggagagattaaatggctgaggcccgatgcaaaaagtcaggtcagtgttatttattctgatgatggcaaaacgattgaaggtttgtctgctgttgtactttcaactcaacatgacgaagatgtaacgcaagaagaaattaaatctgaagtaatgaacaaaattattaagcccattgttccagaagagtggatctttgattctacgaatatttttataaatccaacaggaaagtttgtgatcggtggtccggttggtgactgcggtcttacaggaagaaaaataattgtagatacttatgggggaatggcgcgtcatggcggtggagctttttctggaaaagatccatcaaaggtagatagatctgctgcatatgcatctagatatgttgctaagaatattgttgcagccggacttgctgattattgtgaaattcaagtttcttatgct

SEQ ID NO: 243377 - DNA, 955 bp, Unknown
  Bacterial polypeptide expressing nucleotide sequence isolated from the Sargasso Sea
ctgaagaccctaattccccgcgtagcctgcgaaacgcttataaagacagggatggtcgtggtcgctggagaggtccggacttcagccagtccggacatcgaggaaatagtccgcggcacaatcgcagacatcggctacgacgatatggagataggttttgacgcgtcttcctgtacttttgtcaatgcacttggccagcaatccacggacattgcgatgggtgtcgacgagtcagagaaccatgagcaaggtgctggagatcagggactcatgttcggttatgcatcaaatgagactgattctttaatgccagcaccaatagattactcacacaagcttgtaaaaaaacaagcagacgcgaggagaagctctttgccattcttgcgtccagacgccaaaagccagttaacgttttcgtatgactcggaaggaaaaccttctgcgatagaggccattgttctctcgacacagcataatcctgagatatcacaagcggacttaaaagaggctgtgatggaggaaattatcaaaccggttattccggacaactggatgaacaaagatactaacgttttcatcaaccctacagggcaattcattataggcggccccgttggagactgtggcctcacaggaagaaaaataattgtggatacatatggtggaatggccagacatgggggaggggcattttcaggcaaagacccctccaaagtcgatagatcagcggcttacgcgggcaggtatgttgccaaaaacatagtcgcggcaggtcttgctgataaatgtgaactgcaagtcagctatgcaattggggttgctgaacctacctctatcagcgttgagaccttcggcaccggcaaaatagctgatgaaaaaataatcgatttaatccgagaaaacttcgatctcagaccaaaagggctaatagcgatgctcgagctgaagaagccta

SEQ ID NO: 243378 - DNA, 260 bp, Unknown
  Bacterial polypeptide expressing nucleotide sequence isolated from the Sargasso Sea
gatgaaaaaaaattatttatttactagtgagtcagtttcagagggacatccagataaagtttgcgatagaatatcagacatggtggtagatagttacttaggtgcagaaccacaatcaagagtagcttgcgaaactttaacaacaacaaataaggtagttttagctggagaagtaagaggaccagaaataaaaaaagaagatttaattcaaaaagttagagaatgcattaaagacattggttatgatcaagacggtttta

SEQ ID NO: 243379 - DNA, 397 bp, Unknown
  Bacterial polypeptide expressing nucleotide sequence isolated from the Sargasso Sea
atgagtaatttaaaaaattatctttttacaagtgagtcagtttctgaaggacatccagataaagtttctgatagaatttctgatatggttgtagacacttatctctctaatgatccgttttctcgagtagcttgtgagactttaacaaccacaaacaaagttgttcttgctggtgaggtaagaggtccaaaaattaataaagatgatttaattcaaaaagttagagattgtattaaagatattggatatgatcaggatggttttacttggaaagatgccactaaaattgaaagccatttacactctcagtcaaccgatattgcaatgggtgttgattcttcaggtaataaagatgaaggtgctggagaccaaggaaaatcaatgtttggttatgctt

SEQ ID NO: 243380 - DNA, 720 bp, Unknown
  Bacterial polypeptide expressing nucleotide sequence isolated from the Sargasso Sea
gactaatggctgaagatagaaaatcaggaaagctgaatggaatagaaccagactcaaaaagtcaaattactattgaatataaaaatggtatgccatcagcggtaacatcggtagttatttctacacaacattcaaaagatgttagcttagctcaagttaaagaactttgtatgccatacatagagaaatctatacctaaaaacttattgggtagtcttgatgaaaaagagatttatatcaatcctactggaaactttgtaattggtggtcctgatggagatagtggtttaactggaagaaaaatcattgttgatacttacggtggagctgcaccacatggtggaggtgcgttttctggaaaagatcctacaaaagttgacagatcagctgcttacgcatcaagatatttagcaaaaaatgttgtagcatcaaaaattgctgacaaatgcttaattcaattagcttatgctattggagtgtcaaaaccactatcaatttatgtagacttgttcgataacgatgaagaaaagaacatgcatgttgaaaaacttataaaagaaaactttgatttgagtccaagaggaattagagaaatgttaggtttaaataaacctatttatgaaaaaactgctgcctatggtcactttggaagaattccagaggatgatggatcattttcatgggaaaaaacagataaatctggagtttttagtaagtaaa

SEQ ID NO: 243381 - DNA, 848 bp, Unknown
  Bacterial polypeptide expressing nucleotide sequence isolated from the Sargasso Sea
gatgagcgaatactcccttttcacctccgagtccgtgtccgaagggcatccggacaagatcgccgaccagatttcggacgctgtccttgatgccatcatcgcccaggacaaatacgcccgcgtagcctgcgaaaccctggtcaagaccggtgtcgccatcatcgccggcgaagtcactacgtcggcctgggtcgacctggaagacctggtgcgcaaagtcatcatcgacatcggctacaacagttccgacgttggcttcgacggcgccacctgcgccgtgatgaacatcatcggcaaacagtcggtagacatcgcccagggcgtggaccgctccaagccggaagaccagggcgccggtgaccagggcctgatgttcggctatgccagcaacgaaaccgaagtcctgatgcctgcaccgatctgcttctcgcaccgtctggtagaacgccaggccgaggcgcgcaagtccggcctgctgccatggctgcgcccggatgccaagtcgcaggtcacctgccgctatgagaacggcaaagtggtcggtatcgacgccgtggtgctgtcgacccagcacaacccggaggtttcgcagaaagacctgcaagaagccgtgatggagctgatcgtcaagcacaccctgccagccgaactgctgcacaaaggcacccagtaccacatcaacccgaccggcaacttcatcatcggtggcccggtgggtgactgcggcctgaccggccgcaagatcatcgtcgactcctacggcggcatggcccgccacggtggtggcgcgttctccggcaaggacccgtccaaggtcgaccgttccgccgcctacgccggccgctacg

SEQ ID NO: 243382 - DNA, 550 bp, Unknown
  Bacterial polypeptide expressing nucleotide sequence isolated from the Sargasso Sea
atgaaaaaagattatttatttacaagcgagtcggtttctgaaggacatccagacaaagtgtgtgacagaatttcagatatggttgttgatacttatttgtctttggaaccacaagcgagagtagcatgcgaaactttaactacgacaaataaggtagttttagctggtgaaaccagaggtcctgagattaataacgatgaactcatatctaaagttagaggatgtattaaagacataggatatgaccaaagtggttttacgtggaaagaggccacaaaaattgaaagccacttgcactctcaatcagcagatattgcaatgggtgtagactcatcaagtaataaagatgaaggtgctggagatcagggtattatgtttggctatgcatgtaatgaaactgatgttttaatgccagctccaattcactactcacacaaaatattaaggttaatggcagaagacagaaaatctggtaaattacaaaatattgaacctgattcaaaaagccaaattactatagaatataaagatggaaaaccatcttcagtga

SEQ ID NO: 243383 - DNA, 782 bp, Unknown
  Bacterial polypeptide expressing nucleotide sequence isolated from the Sargasso Sea
aatgaaacagactaattatttatttactagcgaatcagtttctgaaggccatcctgataaagtttgtgacagaatatctgatatggttgtagactcatatttatcaaaagatccattttctagagtggcatgtgaaacattaactacaactaataaagtagttttagcgggagagacaagagggccaaaaattaataaagatgaattagttgaaaaagtaaggcaatgtataaaagatataggatacgaccaagacggtttcagttggaagacagctaaaattgacatacatttacatgaacaatcctctgatatagctatgggggtagactctaaagacaataaggatgagggagctggcgatcagggaataatgtttggttatgcatgtagtgaaactgaaaatttaatgccagcaccaatcgatttttcacataaaattttaagattgatggcaacagatagaaaaaatggatctttaataggcattgaacccgattctaaaagtcaagttacaatgatgtatgaaaatggaaagccaaaaagtgttacttccgttgtaatatctactcaacactctaaaaatttaaatcaagaagacgttagaaatttaattgtaccatatataaaaaaaacaattcctaaaaaatatttagaaaagttagacactaaagaaatttatattaatccaacaggtcagtttataattggtggtccagacggagatacaggtttgacaggaagaaaaataatagttgatacttatggtggcgcagcacctc

SEQ ID NO: 243384 - DNA, 388 bp, Unknown
  Bacterial polypeptide expressing nucleotide sequence isolated from the Sargasso Sea
ccgtcatggcggaggcgctttcagtggtaaagatccaagcaaggtggatcgcagtgcggcatatatgggccgttatgtggctaagaacatcgttgcggcgggtttggcggctcgttgtgagatccaatttgcttatgctattggttatcccaagccggtctctgttcacgtcgatacattcggcaccaacacggtggccgagggaaaaattattcgcgcggtcaacaaagtttttcaccttaaaccggccgatatagtgaagcagttgaaactgcttcgacctatatattcgttgaccacgaattacggtcactttggtaaaaaccaaaaagacattacctgggaaaaaaccgacaaagtagctgccttgcagcgtgtgttaaaatag

SEQ ID NO: 243385 - DNA, 354 bp, Unknown
  Bacterial polypeptide expressing nucleotide sequence isolated from the Sargasso Sea
aatgaataacttaaaaaattatctttttaccagcgagtcagtatctgaaggacatccagataaagtgtgtgatagaatatcagatatggttgtggactcttatttgtcagcagaacctcattcaagagttgcgtgcgaaacattaaccaccacaaataaagttgtacttgcaggtgaagttagaggacctgagataaagcaagatgagcttattcaaaaagtaagagaatgtattaaagatattggttatgatcaagatggctttacttggagagaagctacgaaaatagaaagccatctccattctcaatctgccgatatagcaatgggtgttgacgcatctggcaataaaga

SEQ ID NO: 243386 - DNA, 504 bp, Unknown
  Bacterial polypeptide expressing nucleotide sequence isolated from the Sargasso Sea
tatggtatctacttttaatgattcaaatagttttttgtttacatctgaatctgtaactgaaggccatccagataaagtttgtgatcaaatatctgatgctattttagactcagtattagcgcaagaccctaatgcacgagtagcatgtgaaacatgtgtaactacaggattagtaattattatgggtgagatgaccactaaaacgtacgtcgatattcctgatattgtccgctcaacactaaaaaatattggatatactgatgctgaatttggaatagattacaacacatgcggtgtaatggtttcagtaaaagaacagtctccggaaatctcttcagctgtaagtaaatctcttgaagcacgacaatccaaaaatgaaaatgaaaatgaaacaattggggcaggagatcaaggcatgatggtagggtatgcttgtaatgaaactgctgaacttatgccattgccaatttctctagctcataaattaacaagaaaacttgctga

SEQ ID NO: 243387 - DNA, 754 bp, Unknown
  Bacterial polypeptide expressing nucleotide sequence isolated from the Sargasso Sea
atgaattctaataactatttttttactagcgagtcagtatctgaaggtcatccagataaagtttgtgatcgtatttcagatatggttgttgacgcttatatatccaaagacccttattcaagggttgcctgtgaaactcttacaacaacaaacaaagttgtcttagcaggagaaatcagaggtcctgaaataaaaaaagatgcgttaatagaaaaagttcgcggatgtattaaggacataggctatgaacaaaaaggttttcattggaaaaattgtgatattgacgtcaatcttcattctcaatcttctgatatagctatgggagttgactctaaaggaaataaagatgagggagcaggagatcaaggtataatgtttggttatgcatgtaatgaaacagaagttttaatgccagctcctatttactattcacataaaattttagaattaatggccctagacagaaagaaaggtgttgctgataaattagaaccagattcaaaaagtcaggttacaatgaaatatgagaaaggaaaaccagtaaaagttacctcagtagtaatttctacacaacattctccaaagattaatcaaaccgaggttaaagaaattgtgagaccgtatttagaaaaagcaattcctaagatcttgctttcagaattaaaagacgaagagttatatgttaatccgacaggtcaatttatcattggaggtcctgatggtgatactggccttacaggtagaaaaattatgt

SEQ ID NO: 243388 - DNA, 289 bp, Unknown
  Bacterial polypeptide expressing nucleotide sequence isolated from the Sargasso Sea
aatgagtaatttaaaaaattttctttttacaagtgaatctgtttcagaaggtcaccccgataaagtttcggatagaatatctgatatggttgtagatacttatttatcaggagatcctttttctagggttgcttgtgagacacttacaacaacgaataaagttgttttagcaggtgaggttcggggtccagaaattaaaaatgatgacttaattaacaaagtaagaaattgtattaaggatattggatatgatcaagatggctttactggaaagaggcaacaaaaatag

SEQ ID NO: 243389 - DNA, 651 bp, Unknown
  Bacterial polypeptide expressing nucleotide sequence isolated from the Sargasso Sea
tatgacaaataaaacatatttaatgacatctgagtcggttggagaaggccatcctgataagatggcagatcagatctcagacgcaatactagacgcaattctcgcgcaagacaaaggctgcagagttgctgtggaaacgctcgtcaaaacagggctggttgttctgggtggagaaataacaaccactgctgatgtggattatgaagcaatcgccagacgaaccattaaaagaatcggttatgacaaagaagagttagggtttgatgatcaatcctgtgaggttttagtagcgatcagcaagcaatctccggatatcgcgatgggcgtggatcgcgctgatgagaaagaacaaggcgcaggagatcagggtttaatgtttggttatgcgaccaatgaaacgaaacaattgatgccagcaaccattcaattgtcgcatcaattggtaaaaaggcacgccgatgtcagaagaagcggtgagctcagctggctaaggccggatgcaaaaagtcaggtaaccattctattcgatgacggtaaaccgaaatcaatcgatacagtggttctatcgacacaacatgacgaggatgtctcgatggatgaaattcaagcaggtgttttggaacacatcattaggccaatacttcctgaaga

SEQ ID NO: 243390 - DNA, 598 bp, Unknown
  Bacterial polypeptide expressing nucleotide sequence isolated from the Sargasso Sea
tatgagcgaattattatttacttctgaaagtgtaaccgaaggacatcctgataagatttcagatcaaatttctgatgccgtccttgatgctcttatttctaaagatgactcaagccgagttgcctgcgaaactctagtaactactggaatggtagttgtagctggcgaaatttcaacaaaggccgaagtagacatgcagaaagttgtaagagacactattaaatcgattggttactcagactcaaaaatgggatttgattacaagacatgcgctgttttaataagtctagacaaacaatctccaaatattgcacagggggttaatgaaggcgaaggtatgcataaggaacaaggagctggagaccagggacttatgttcggatatgcatgtgacgaaactcctgaattaatgcctcttccaattcaactagctcatcaattaactcaaagactttctgatgttcgtaaaaatggattaatagattacctgagaccagatggtaagtctcaagtaacagtgcgttatgttgacggagaacctaggtttgtagatgcagtagtaattagcactcagcatgcagagggaatagaccaagaa

SEQ ID NO: 243391 - DNA, 849 bp, Unknown
  Bacterial polypeptide expressing nucleotide sequence isolated from the Sargasso Sea
ggctttcattggaaaaattgtgatatagattatcatttacatcctcaatcatcagatattgctatgggagttgattcaggaagcaataaagatgaaggagcaggtgatcaaggtattatgtttggttatgcctgtattgatactgatacattaatgccagcacctattcactattctcatcaaattttgttgaaaatggctgaattaagaaaaaatggaactagaactgagtttgaacctgactcaaaaagtcaagtaactatgctatatcaaaatggtaagccttcgaaagtaacttcagttgtagtttctacccagcataaggaaggcttaactcctaatcaaatcaaagagattgtaaggccaatcgtacacgattgtattcctagtgatttaatgcaggaacttaaagatgaagaattttatgttaatccaactggtaattttgtaattggtggacctgatggtgattctggtcttacgggtagaaaaatcattgttgatacatatggaggcgctgctccacatggcggcggagcattttcaggcaaagaccctagtaaagttgatagatcagcagcttatgctgcgagatatttagcaaaaaatattgttgctgctggactagctgatgaatgtgttattcaacttgcttacgctataggagtatcaaaacccctatcaatttatgtaaatactaacggtacaagcaaagtagatgaaacaaaaatagaaaaacttgttcccgaactttttgatttaagtccaagagggataagggaacacttaaaactaagtaatccaatttatgtaccaacatcagcttatggtcatttttggaagaactcc

SEQ ID NO: 243392 - DNA, 830 bp, Unknown
  Bacterial polypeptide expressing nucleotide sequence isolated from the Sargasso Sea
aaaaaggatgaattaattgaaaaagttagaacttgcataaaggatattggttatgaccaagaaggtttcacatggaaggaagcaaccaaaattgaaagtcacttacattctcagtctgcagatatagcaatgggcgtagattcctctggaaataaagatgaaggagcgggagatcaaggtattatgtttggatatgcatgtaatgaaactgatgtattaatgcctgcacctattcatttttctcataaaattttaagattaatggcggaagatagaaagtctggaaaattaaaaaatattgagccagattctaaaagtcaagttacttttgaatatatagatggtaaaccgtccaaagtaaaatctgttgttatatcttctcaacattcagcagatgtaaatcaagaacaagttagagatttattaagaccttatatgttaaaatctattccaaaaaattttcttgaagattttaatgaagatgaattttatgttaatccaactggcaattttgttataggtggacctgatggagattgtggattaactggaagaaaaattatagttgatacttacggtggcgcagcacctcatggtggaggtgcattttcaggaaaagaccctactaaagtagataggtcagcagcttatgcagctcgatatattgcaaaaaatgttgttgcttcaaaaatatctgataaatgcttgattcaattagcttatgcaataggtgtttctaaaccactatcaatttatgttgatttatttgatggtgatttagataaaaacaaatttattgtagaaaaaattaaagaaaattttgatctgag

SEQ ID NO: 243393 - DNA, 859 bp, Unknown
  Bacterial polypeptide expressing nucleotide sequence isolated from the Sargasso Sea
ccggatattgcgatgggcgtggatcgcgctgatgaaaaagaacaaggcgcaggagaccagggcttaatgtttggttatgcgaccaatgaaacgaaacaattgatgccagctaccattcaattgtcgcatcaattggtaaaaagacacgccgatgtcagaagaagtggtgagctcagctggctgagaccggatgcaaaaagtcaggtaaccattctattcgatgatggtaaaccgaaatcaatcgatactgtggttctatcgacacaacatgacgaggatgtctcgatggatgaaattcaagcaggtgttttggaacacatcattaaaccaatacttcctgaagaacttttgactgaaaccacccaatatctgatcaatccaactggtaattttattattggcggtcccgtaggagactgtggcctgaccggtagaaaaataattgtcgatacatatggtggtatggcgagacatggaggtggtgcattctccggaaaggatccctcaaaggttgaccggtcagctgcatatgctgccaggtatgtagccaaaaatattgttgcgtctggattagccgataggtgtgaaatacaggtctcttatgcaataggtgtggcaaaaccaacctcagtcagagtaaaaacattcggtacagagaaagtttctgaagagaaaattgtgcacttagtgaatgaaaattttgatcttactccatatggaatcatgaatatgcttgatctactccagccgatctatgaaaagtcagctgcgtatgggcactttggaagggaagatgaatcatttccatgggaaaaaactgaccgatctgatgcgttaaaagaacaatctggcttgtaat

SEQ ID NO: 243394 - DNA, 315 bp, Unknown
  Bacterial polypeptide expressing nucleotide sequence isolated from the Sargasso Sea
atattgcaaaaaatatagtcgcctcaaaaatatctaataaatgtttaatacaacttgcatatgcaataggtgtttctaaacctttatctatttatgttgatttatttgatgatgatttgaataagaacaaatttgttgtagaaaaaatcaaagagaatttcgatttaagtccaagaggaattagagagatgttgagtttaaacaaacctatatatgaaaaaacagcagcatacggtcattttggaagaacaccagaagatgatggatcattttcatgggaaaaaactgataaattgagcattttttctaaatagt

SEQ ID NO: 243395 - DNA, 910 bp, Unknown
  Bacterial polypeptide expressing nucleotide sequence isolated from the Sargasso Sea
catttgtgatattggatatgatcataatgaactaggttttaatggaaatgaatgtgagataattacaataattaaccaacaatcacccgatattaaaatgggagttgagcgtaataaaaaagatgatcagggagcaggtgatcagggattaatgtttggttacgcatcgaatgaaactgagcaacttatgccagcaccaatatattattcacatcgacttgtcgaaaaacagactacattattaaaaagtaaaaaggtagattggttattacctgatgctaaaagccagattacttttgtttatgagaacggtcgacctgaaaaaattgatactgttgtattatccactcaacattcgaaagatgtaactcttagtgatgttaaagattttgtgatggaagaaattataaaaacaacaatacctaaaaatttattatcgagtaccactaagattcatattaatccaacaggaaactttgtcattggaggacctaacggcgattgtggtttgactggtagaaaaataatcgttgatacttacggtggtatggcaagacatggtggaggtgctttctctggtaaagatccatctaaggttgatagatctgcggcctatatggcaaggtatatcgcaaaaaatattgtagctactaagcttgcagataaatgtgaaatacaactctcttatgcaattggtgttgctgaaccaacttcaatatctgtagatacttttggaacatcgaagattgagaattctaaaatatcctctgcagtaagtaaggtatttaatctcactccaaaaggtattattgacacactcgaccttctgaacgtaaaatatcaacctaccgcagcttttggacacttcgggagagatgataaaaattttactttgggaacaaaaggataa

SEQ ID NO: 243396 - DNA, 904 bp, Unknown
  Bacterial polypeptide expressing nucleotide sequence isolated from the Sargasso Sea
gagggatttcattgggaaaaattttcttttgattgctcaggagttcatagtcaatccgctgatattgccatgggagttgatgcatcaggtaataaagaccagggtgctggcgatcaaggaataatgtttggatatgcttgcaaagaaacagcttctcttatgcctgctccaatttattattcacataaaatattagaggaaatggcaataagaagaaaaaggggtgaaacgcctggaatccaacctgactctaaaagtcaagttactcttaagtatagtaatggcttaccagaaaaatgtacaaaaatagttgtttctacgcaacatgatgaaaatttagatcaacaaggtgtgagtgaaattatcattccaataatcaaaaatattatgccagatgagtgggtaagtaatgaaactgaaattttaatcaacccaaccggaaaattcgtaattggtggtccagacggagatacaggtttaacaggcagaaaaataattgttgatacatacggaggagctgccccacatggtggtggtgcattttcaggaaaagatccaactaaagttgatagatctgctgcttacattacgagatacattgcaaaaaatattgttgcatcaggcattgctgataaatgcacactacaattagcctatgcgattggagtttcggaaccgctctcaatttatgttgatacacacggtacatctaatatttcagatgaagaacttataaaaaaaataaattctaatattgatcttacccctcgaggaattagagatcacttaaacttacacaaaccaatatataaaaaaagtgctgcttacgggcattttggaagagatgcagaaagtgacggatctttttcttgggaaaaaatcgatttagctaacaaactataaa

SEQ ID NO: 243397 - DNA, 973 bp, Unknown
  Bacterial polypeptide expressing nucleotide sequence isolated from the Sargasso Sea
actagtgaatcagtatcagaaggacatccagataaggtttgtgatagaatttcagatatggttgtggatagttttttagcttccgagccagaagcaagagtcgcttgtgaaactttaacaacaactaataaagttgtattagcgggggaagttagaggtccgcagcttaatgaagatgaattaatttcaaaggttaggaattgtattaaggacattggttatgatcaagatggattttcttggagagaacaaacaaaaattgagacacatttacattctcaatcagcagatattgcaatgggagtagactcttcaggaaataaggatgaaggtgctggagaccagggaattatgtttggttatgcttgtaatgaaacagaggaattgatgccggctccaattcattattcacataaaatattaagactaatggctcaggatagaaaatcgggacagctagatggaatagagccagactccaaaagccaaattacgataaaatatgctgatggtaaaccttctgcagtgacatcagtagttatctctactcaacattcaaaagatataagcttggcaaaagtaaaagaaatttgtatgccttacatagaaaaatctatacctaaaagcttgttaggaagccttgatgaaaaagagatttatataaatcctaccggaaactttgtaattggaggtccagatggtgatagcggtcttacaggaagaaaaattattgtagacacatatggaggagccgcaccacatggtggaggtgcattttcgggaaaagacccaacaaaagttgatagatcagctgcttatgcatcaagatatttagctaaaaatgttgtagcatccaaaattgctgacaagtgcttaattcaattagcctatgctattggggtatcaaaacctttatctatctatgtagacttgttcgacaatgatgaggaaaaaaacatgcatgtagaaaaac

SEQ ID NO: 243398 - DNA, 688 bp, Unknown
  Bacterial polypeptide expressing nucleotide sequence isolated from the Sargasso Sea
atgggagttgactcatcagggaataaagatgaaggagcaggcgatcaaggaataatgtttggttatgcttgcaatgaaacagatgttttaatgccagctccaattcattactctcataaaattctaagattgatggctgaagatagaaaatcaggaaatcttaatggaattgagccagattcaaaaagtcaaattactatagaatataaagatggaaaaccatcagcagttaaatcagtagtaatttctacacaacattctaaagatgttaacttagcaaaagtaaaagagctttgtaccccgtacattgaaaaatctattccaaaaaatttactaggaaatcttgatgaaaatgagatttatataaatcctactggaaactttgtaattggtggcccagatggagacagtggattaactggtagaaaaattattgttgatacatatggaggtgcagcacctcatggtggtggagcgttttcaggaaaagacccaactaaagttgataggtcagcagcgtatgcatcaagatatcttgctaaaaatgttgtagcttcaggaattgctgacaagtgtttaattcaattagcttatgccataggtgtttcaaaacctttatcaatttatgtagatttatttgataatgatgaagaaaaaaatatgcatgttgagaaattgataaatgaaa

SEQ ID NO: 243399 - DNA, 688 bp, Unknown
  Bacterial polypeptide expressing nucleotide sequence isolated from the Sargasso Sea
atgaagaaaaattttttgtttactagcgaatctgtctcagaaggtcatccagataaggtttgtgatagaatttcagacatggttgttgatacatatttgggtttagaaccacaagcaagagtagcatgtgaaactttaacaacaacaaataaggttgttttagcaggggaaactcgaggacctgaaattaaaaaagatgatttaatctctaaagttagagattgtattaaagatattggatacgaccaagaaggtttttcttggaaagaagcaactaaggtagaatgtcatttacactcacagtcttcagatattgcaatgggagtagactcatcaggaaataaagatgagggagctggagatcaaggaataatgtttggatatgcatgtaatgaaacagatgttttgatgccagcaccgatacactattcacataaaattttaaggctcatggcagaagatagaaaatctggtaaattaaaaaatattgaaccagactctaaaagtcaaattacaatagaatataaagatggaaaacctgcttctgttaaatcagtagtaatatcaactcaacattcagctgatgtaaatcaatctcaagtaagagagttagtgaaaccatatatagaaagatctatcccaaaaaatcttgttaatggattggatgatagtgaaatttatattaacc

SEQ ID NO: 243400 - DNA, 571 bp, Unknown
  Bacterial polypeptide expressing nucleotide sequence isolated from the Sargasso Sea
atgaataatttaaaaaattatcttttcacaagtgaatctgtttccgaaggacatccagataaagtttctgataggatttcagatatggttgttgatacatatttatcaaatgatcctttctcaagagttgcctgtgaaactttaacgactactaataaagttgtattagctggtgaagtaagaggacctgaaataaaaaaagatgatttaatacaaaaagtaagaaactgcataaaagacattgggtacgatcaagaaggttttacatggaaagaagcaactaaaatcgaatgtcatcttcattcccaatcagctgatattgcaatgggtgtagactcatctggaaataaagatgaaggtgctggagatcaaggaattatgttcggttacgcatgtaatgaaactgaggaattaatgcctgctccaattcattattcacacaaaattttaagactaatggcccatgaccgtaaatctggtaaattaaagaatattgagcctgattctaaaagccaggtaacttttgaatatgaaaaaggaaaaccaaaaaaagtaaaatctgttgttattc

SEQ ID NO: 243401 - DNA, 138 bp, Unknown
  Bacterial polypeptide expressing nucleotide sequence isolated from the Sargasso Sea
aatgagttacctatttacatctgaatcggtaagcgagggacatcctgataagatcgcagatcaaattagtgatgcattggttgataattttttagcttttgataaaaattcaaaagttgcttgtgaaacccttgtaac

SEQ ID NO: 243402 - DNA, 692 bp, Unknown
  Bacterial polypeptide expressing nucleotide sequence isolated from the Sargasso Sea
agctcggaaagatggatctgcatctggtctagaacatgattcaaaaagccaagttacaatgctttatgaaaatggaaaaccaagcaaagttacatccttagtaatttcttcacaacacaaagaaggtttatctcccgaggacgtaaaagaaattgttaaaccttatctatatgagtgtatacctaataacttgttagaaggtcttaaagatgaagaattctatgtcaatcctacaggaaactttgtaattggaggtcctgatggtgactctggtctaacaggtagaaaaataattgttgatacatatggtggagcagcaccccatggtggaggggcattttctggaaaagatccgtctaaagttgatagatctgcagcatatgcagctagatacttagcaaaaaatgttgttgcagctgatcttgctgatcagtgtactatacagttatcttatgcaataggtgtatcaaaacctttatcagtatatgttaacactaatggaacaaacaaagtcgatgaacagaaaattgaaaaatctgtgcaagatttatttgatctaagtccaagaggaataagagaacatttaaaactaacaaatgcaatttatgttccaacttctgcttatggtcattttggtagagagccaagtgacaagggacattttacttgggaaaataacagatttagttgaa

SEQ ID NO: 243403 - DNA, 532 bp, Unknown
  Bacterial polypeptide expressing nucleotide sequence isolated from the Sargasso Sea
aatgaaaaaagattacttatttactagcgagtcagtatccgaaggtcatccagataaagtttgtgatagaatttcagatatggttgtagatacatatttggctgctgaacctcaatcgagagttgcttgtgaaactttaacaacaacaaacaaagttgtcttagctggtgaagtaagaggtccagaaataaaaaaaaaagatctaatagaaaaagtaaggcactgcatcaaagatattggttatgatcaagaaggatttacttggaaagaagcaacatcagtcgaaagtcatttacactctcaatcagccgatattgctatgggtgtagattcctctggaaataaagatgaaggtgcaggcgatcaaggaattatgttcggttatgcgtgtaatgaaaccgatgtgctgatgccagctccaatacattactctcataaaatattaagacttatggccgaggatagaaaatctggcaaattaaaaaatatagaaccagactcaaaaagcccaattacaattgaatataaagag

SEQ ID NO: 243404 - DNA, 700 bp, Unknown
  Bacterial polypeptide expressing nucleotide sequence isolated from the Sargasso Sea
atgaaaaaaaattatttatttactagtgaatcagtttcggaaggtcatccagataaagtttgtgatagaatttctgacatggtagtagacacatatttaggaatggaacctcaagctagagtagcatgtgaaacgctaacaacaacaaataaagtagttttggctggagaaacaagaggtccagaaattcataatgatgaattaatatcaaaagtaagagattgtattaaagatattggttacgatcaaagtggatttagctggaaagattcaacaaagattgaaacccaccttcattctcaatctgcagatatagcaatgggagttgactcatctggaaataaagatgaaggcgcaggtgaccaaggaattatgtttggatatgcatgcaatgaaacagatgttctaatgccagctccaattcattactcacatagaatattaagattaatggccgaagatagaaaatctggaaaacttaaaggaattgagcctgactcaaaaagtcaaataacaattgaatataaagacggattaccaaattcggtaaaatcggttgtgatatcaacacaacactctaaagatgttgatttgttaaaagttaaagaactttgtatgccatatatagtgagatctattccaaagaatttattgggaaaccttgatgaaaaagggatttacataaatccaacggggaact

SEQ ID NO: 243405 - DNA, 450 bp, Unknown
  Bacterial polypeptide expressing nucleotide sequence isolated from the Sargasso Sea
actttcaacccaacacgatgaagatgttacacaagatgaaattaaagaaggagtaatggaaaatattattaagccaattgttcctcaagaatggatactagattcaacaaagatatatatcaatccaacaggtaaatttgtaattggtggtccagttggtgattgcggtcttactggaagaaaaattattgtagatacctatggcggtatggcaagacatggtggtggtgcattttcaggaaaagatccatcaaaagttgatagatcagcagcctatgcagcaagatatgtagctaaaaatattgttgcagccgggcttgcagattattgtgaaattcaagtttcatatgcaattggagtagctaagcctacatcaattaatgtaaatacgtttgatagcgaaaaagtatcaaaagaggctattgaaaaaatagttgaggaaaaatttga

SEQ ID NO: 243406 - DNA, 446 bp, Unknown
  Bacterial polypeptide expressing nucleotide sequence isolated from the Sargasso Sea
tgtagatacttatggaggatatgcaagacatggaggaggggcattctccggtaaagatcccacaaaagtggatagatcagccgcatatgcagctcgttatgtcgctaaaagtatagttaaagcaaaattagcaaaaaaggcagaagtacaattaagttatgcgattggagttgcaaaaccgatttccgttctagttgaaacttttgatactggtattatttcgcaggcaaatatgactaagcttattaacaagtactttgatttaagacctgcagcaattataaaagaatttaacttaagaaatctaccaaaaaaaatgggtggcaattttttcagaaagactgcatcctatggacattttggaagaagagatcttgacctaccttgggaaaatgtagaagaaaaagcatccaaattagtagaggcctcaaaagtatttttataga

SEQ ID NO: 243407 - DNA, 878 bp, Unknown
  Bacterial polypeptide expressing nucleotide sequence isolated from the Sargasso Sea
tcatcttcattctcaatctgcagatatagcaatgggagtagactcatctgggaataaagatgagggagctggagatcaaggaattatgtttggatatgcttgtaatgaaactgacgtactgatgccagcaccaattcattattcacataaaattttaagattaatggctgaggatagaaaatctgggaagcttaaaaatattgagccagattctaaaagtcaaataactattgagtataaagatggaaaacctgctaatgttaaatcagttgtgatatcaactcaacattccgctgatgtaaatcagtctcaagtaagagagttagtcaaaccgtatattgagagatctattccaaaggaacttttgaatggattagatgagaaagaaatttatgtaaatccgactggtaattttgtaataggaggaccagatggggatagtggattaactggtagaaaaataattgttgacacttatggaggagctgcgccgcatggaggtggggcattttctggaaaagatccaaccaaagtagatagatcagctgcttatgcatcaagatatctggcaaaaaatgttgtagcctctaaaattgctgaaaagtgtttaattcaattagcatacgcaattggagtatctaaacctttatcaatttatgttgatctttttgataatgatgaagaaaaaaatagacatgtagaaaaattgataagtgaaaattttgatctaagccctaggggtattagagagatgcttggattaaataaaccaatatatgaacaaactgctgcgtacggtcattttggtagagatcacggggcgaacggctcattttcatgggaaaaaactgataaagctaatgtttttaataagtaaa

SEQ ID NO: 243408 - DNA, 298 bp, Unknown
  Bacterial polypeptide expressing nucleotide sequence isolated from the Sargasso Sea
attgtcgctgctgggctagctcaaaaatgtgaaattcagatttcttatgcaattggagtagccgaaccaacttcaattagcattgatacctttggcacagcaacgattgacgaagcaaagattgtacatataatagatgaggtttttgacttgcgtccatggggcataaccaatatgcttaatcttttaaatccaatatacaaagatactgcctcttacggtcattttggaagagttgatttagatctttcttgggaaaaaactgataaaattgaaaacattaaaagtttgatataat

SEQ ID NO: 243409 - DNA, 412 bp, Unknown
  Bacterial polypeptide expressing nucleotide sequence isolated from the Sargasso Sea
ggtggagcatcacctcatggtggaggtgcgttttctggtaaggatccaacaaaagttgataggtctgcagcttaccttaccagatatttagcaaaaaatgttgttgcttcagaacttgcttcaaaatgtactattcaaatatcatatgcaattggagtttcaaaaccactttcattgtatgttaatacagagggtactggtaaaattaatgataatgaaatagaaaaaattctaacaaatcttgttgacatgtcaccaagagggattagacagcatttaaaattaaacaaacctatttatgttccaacttcagcctacggtcactttggaagacttcctaatgagtttgttgaaggctcttttacatgggaaaaaactgatcttgtagactgtatcttaaaagaaacctaaa

SEQ ID NO: 243410 - DNA, 136 bp, Unknown
  Bacterial polypeptide expressing nucleotide sequence isolated from the Sargasso Sea
catgaaaaaaaattttttatttacaagcgagtcagtttcagaaggacatccagataaagtatgtgacagaatttcggatatggtcgttgatacatatttaaatttagaaccacaagcgagagtagcttgtgaaact

SEQ ID NO: 243411 - DNA, 592 bp, Unknown
  Bacterial polypeptide expressing nucleotide sequence isolated from the Sargasso Sea
gcattctgaggatgttagccaggaaaagcttcatgcggacataaaaagcaaaattataaatgaggttattccctccgagtacttgaatggttctccaaagtttcatatcaatccaaccgggctttttgtaattggcggaccacagggagattgtggactgacaggaagaaaaataattgttgatacatacggaggaatgggaagacatggcggtggagcattttccggtaaagatgcttcaaaggttgatcgttctgctgcttatgctgcacgtcacgtggcaaagaacgttgttgcagcaggactggcatctcgctgtgaggttcagttggcttatgcaattggagtagcggaaccagtctctatttcggttgatacctttagtacgggtagaatagaagaagaaaaaatcataaatttaattcgtaacaattttgaacttaagcctgcagggctaataagctatcttaaactgatgcgtccgatctaccgtaaaacatctgcatatggacacttcggaagagagattcctgaatttacttgggaatcaactgaaaaagctgatgatctcagatcacaggcaggattataa

SEQ ID NO: 243412 - DNA, 363 bp, Unknown
  Bacterial polypeptide expressing nucleotide sequence isolated from the Sargasso Sea
aatgaaatcaaataaatatttttttactagcgagtctgtatcggagggtcacccagataaagtttgtgatcgcatttcagatatggttgttgatacatatctatctaaagatccttattcgagagtggcttgcgaaacccttacaacaacaaacaaagttgttttagctggagagactagaggtcctgaaattaaaaaagacgatataatagaaaatgtaagaaattgtattaaagatattggttatgagcaaaaagggtttcattggaaaaattgtaatattgatgttcatcttcattctcaatcgtctgacatagctatgggagtcgactccaaagataacaaagatgaaggagcgggcga

SEQ ID NO: 243413 - DNA, 738 bp, Unknown
  Bacterial polypeptide expressing nucleotide sequence isolated from the Sargasso Sea
ttgatctttctcatagactagtacgacaacaagcagaagttatgaaaagcaatgggctttcatggctaagacctgatgcaaaaagccaggtaagtgcaatttactcagacgacggaaagacgattgagggtctttcagcaattgtactttcaacccaacacgatgaagatgttacacaagatgaaattaaagaaggagtaatggaaaatatcattaagccaattgttcctcaagaatggatactagattcaacgaagatatatatcaatccaacagggaagtttgtaattggtggtccagttggtgattgcggtcttactggaagaaaaattattgtagatacctatggcggcatggctagacatggtggtggtgcattttcaggaaaagatccatcaaaagttgatagatcagcagcctatgcagcaagatatgtagctaaaaatattgttgcagccgggcttgcagattattgtgaaattcaagtttcatatgcaattggagtagctaaacctacatcaattaatgtaaatacatttgatagcgaaaaagtatcaaaagaggctattgaaaaaatagttgaagaaaagtttgatcttaggcctaaaagtcttataaatatgcttgatctcaaaagaccaatctatcttccaacagcggcttatggtcattttggaaggactgatattgatctttcatgggaaaagactgataaagcatcagaaatttcacaataaa

SEQ ID NO: 243414 - DNA, 797 bp, Unknown
  Bacterial polypeptide expressing nucleotide sequence isolated from the Sargasso Sea
tatcatgtttggatacgcttgtaatgaaacggatgttttaatgccagcgccaattcattattctcataaaatcttaagattaatggctgaagatagaaaatctggaaaattaaaaaatattgaaccagattcaaaaagtcaggtaacattcgagtatgttgatggaaaaccatcaaaagtaaaatctgtagttatatcttcacagcattcaccagatgttaatcaatcgcaagtcagagatttacttagaccttatatgttaaaatctattcctgagaattttcttgatggttttaatgaggacgagttttatgtaaatccgacgggaaattttgtaattggtgggccagatggagattgtggcttgacaggtagaaaaattattgttgatacttatggtggagcagcacctcatggtggtggagctttctctggaaaagatccaactaaagttgatagatcagcagcttatgctgcaaggtacattgctaaaaatgttgttggttctaaaattgctgagaaatgtttaattcagttagcttatgcaattggtgtatcaaaaccattatctatctatgttgatttatttgataacgacctagataaaaataaatttgttgtagaaaagattaaagaaaattttgatttaagccctagaggtatcagagaaatgttaaatttaaacaaacctatatatgaaaaaacagctgcctatggtcattttggtagagcaccagaagaaaatggttcattttcatgggaaaaaactgataaaactaactttttttctaaatagt

SEQ ID NO: 243415 - DNA, 417 bp, Unknown
  Bacterial polypeptide expressing nucleotide sequence isolated from the Sargasso Sea
aatgagtgacaactatttatttacttctgaatctgtatcagaaggacacccagataaaatatgtgatcaaatatccgatgctgttgttgacttatatttaaaaaatagtgatcaaaaagatcaggttagagtagcttgtgagactatggttacaacaaacaaagttattatagccggagaagttagaggacctgatataagtaatgcagaaatagaaaatattactagagaagttgttaaagatataggctatgagcaagataactttcactggaaaaattttgattttaattgttttttgcatgcgcaatctgtagatatagctcaaggtgtagatgcaaataatataagaactgaaggggctggagaccaaggaattatgtttggttatgcatgtaccgaaactaaaaagtttat

SEQ ID NO: 243416 - DNA, 460 bp, Unknown
  Bacterial polypeptide expressing nucleotide sequence isolated from the Sargasso Sea
aatgaagaaagattttttatttacaagtgagtcggtttccgaaggtcacccggataaagtgtgtgacagaatttcagatatggttgttgatacctacttaggtatggagcctcaagctagggtagcttgtgaaactttaacaaccacaaacaaagttgtattggctggagaaacaagaggacctgacattaataaagacgaattaatatctaaagtaagagactgtattaaggatattggttatgatcaagaaggttttacttggaaagaagctactaagatagaaagccaccttcattctcaatctgctgatatagcaatgggagtagactcatcaggaaataaagatgaaggagcaggagaccaaggaataatgtttggttatgcttgcaatgaaacagatgttttaatgccagctcctattcattattcacataaaatttttaaggttgatggctga

SEQ ID NO: 243417 - DNA, 433 bp, Unknown
  Bacterial polypeptide expressing nucleotide sequence isolated from the Sargasso Sea
ggtggatatgcaagacatggaggtggtgcattttctggcaaagaccccacaaaagttgacagatcagcagcttatgccgctcgatatgtagccaaaagtattgttaaagcaaaattagcaaaaaaagtcgaagtacaattaagttatgcaattggagttgccaaaccgatttccattcttgttgaaacttttgatagcggtgttatttctcaagcaaatttaactgaacttattaaaaagcactttgatttgagacctgcagcaataataaaagaatttaacttaagaaatcttccaaaaaaaatgggtgggaattttttcagaaagactgcatcatacggacattttggtagaagagatcttcagctcccatgggaaaatgtagaagaaaaagcagcccaattagaagaagcatctaaagtatttttgtaaa

SEQ ID NO: 243418 - DNA, 241 bp, Unknown
  Bacterial polypeptide expressing nucleotide sequence isolated from the Sargasso Sea
aatgagtaattatttattaacatcagaatctgtaactgaaggtcatcctgataaaatgtgcgatcaggtttctgattcaattttagatgcaataatgtctcaagatccatttgcaagggtagcatgtgaaaccgcaacaacaacaaatcttgttgttttattaggcgagataactacttcagctaaggttgattatgaaaagattgctagaagatactattttatctattgggtacgatag

SEQ ID NO: 243419 - DNA, 524 bp, Unknown
  Bacterial polypeptide expressing nucleotide sequence isolated from the Sargasso Sea
gatgaaaaaaaattttttatttactagcgagtcagtttcagaaggtcacccagataaagtttgtgatagaatatcagatatggtcgtagatagttatttaggagcagaacctcagtcaagagtagcctgtgaaaccttaacaacaactaataaagttgttctagcaggagaagttagaggaccagaaataaaaaaagaagatttaattcaaaaagttagagattgcattaaagacattggttatgaccaagagggttttagttggaaagatactactaagattgaaactcatttacacgctcagtcagcagatatagccatgggtgtggattcatccggaaataaagatgaaggtgcaggagatcagggaattatgtttggatatgcatgcaatgaaactgatgttttaatgccagctccaattcattactcacatagaatcctaagattaatggctgaagatagaaaatctggaaatttaaaaggaatagaaccagactcaaaagccaaattacaattgaata

SEQ ID NO: 243420 - DNA, 256 bp, Unknown
  Bacterial polypeptide expressing nucleotide sequence isolated from the Sargasso Sea
tccctgaacaccttcggcaccggcaagatcagcgacgacaagatcatcgagctggtacgcgcgcacttcgacctgcgcccgtacgcgatcaccaacatgctggacctgctgcacccgatgtaccgcgccacagcagcctacggccacttcggccgtgatccgtacgagatgaccgttggcggcaagaccttcaccgcgttcccatgggagaagactgaccgcgctgcggctctgaaggatgctgcaggtatctgac

SEQ ID NO: 243421 - DNA, 817 bp, Unknown
  Bacterial polypeptide expressing nucleotide sequence isolated from the Sargasso Sea
atggcaaattatttttttacatctgaatcagtatctgaaggtcatccagataaaatgtgtgatcagatttcagacgcaattcttgatgaatgttttagacaagataaatttagtagagtcgcatgtgagactgcagttggtgggcaacatggagaaggctttgctatggtttttggtgaaataacaacaaacgcaaatcttgattatacaaaaatcattaaagacacagtaaaaaatattgggtatacaaaagatgagtatggatatactcctgatagtataaaaattttaaataatatcggaaaacaatctcaggatattaaggcaggtgtagataattctttggaaactagaggagaaagtgctggagattctaatcagcaaggagctggtgatcaagggatgatgtttggttatgcttgtgatgaaactgatgaaaaaatgcctttagcaattactttggctcatgacctattgaaaagattaagtgatgcaagaaaaaatggtgaaataagttatttaaggcctgattctaaaagccaagtcacattagagtacgaccaaaatcacaacgtggtaagagttgacacaattgttgtttcaactcaacatgacgataacgtttctaatcaagaaattgaaaaagatattaaggaaaaaattatagatggagttataaaagatgatttgttggataaaaacacaaaaatcatcattaatccatcaggaagatttgtaataggtggtccagtaggagatgcaggattaaccggacgtaaaattatagtagatacttacggaggagctgctaaaaaag

SEQ ID NO: 243422 - DNA, 640 bp, Unknown
  Bacterial polypeptide expressing nucleotide sequence isolated from the Sargasso Sea
agagacggtatgcctgcagcagtaacatcagtcgttatttctacgcaacattcaaaagatgttaacttagctcaagttaaagaactatgtatgccttatatagaaagatcaattcctaaaaatttgttaggtagacttgatgaaaaagaaatttacattaacccaacaggaaattttgtaattggtggtcctgatggagatagtggtttgactggtagaaaaattattgttgatacatatggtggagctgcaccacacggtggtggagcattttctggcaaagacccaacaaaagtagacagatcagctgcttatgcttcaagatatttagctaaaaatgttgttgcatcaaagattgctgataaatgtttaatccagttagcttatgcaattggagtatcaaagcccttgtcaatctatgtggatttatttgataataacgaagaaaagaatttatatgtggaaaaactaataaaggaaaattttgatttaagtccaagaggcattagagaaatgcttggtttaaacaaaccaatatatgaaaaaacagcagcttatggtcactttggaagaattcctgaaagtgatggttcattttcatgggaaaaaacagataaatttgccgtttttagcaagtaaa

SEQ ID NO: 243423 - DNA, 805 bp, Unknown
  Bacterial polypeptide expressing nucleotide sequence isolated from the Sargasso Sea
agctggtgatcaggggttaatgtttggatttgcatgtgatgaaactgatggtcttatgcctgctccaatatattatgcacataaaatacttaaagaaatggctaaattaagacataatgataaaaattgtattatccttcctgacagcaaatcacaagtaacattagaatacagggatggtaaaccaataaaagctagatctattgttgtgtctacccaacatgtaaaaggttgttcccaagatgatataaaggctttagttaaaagtattgtgaataatgttttgccaaatggttggatgtgtcatgaggatgaattttatgttaatccaacaggtatctttgaaataggaggaccagacggagatgctggtttaacaggaagaaagattatagttgatacatatggaggtgcctccccccatggtggtggtgcattttccggaaaagatccaacaaaagtggatagatctgcagcttatttaacaagatatttagccaaaaacgttgttgcagcaaaacttgcttccagatgtaccatacaaattgcatatgcgattggagtgtctaaacctctttcattgtatgttaatacagatggaactggaataattgaagatcaaaaaattgaaaaaattcttaccgacttaattgacatgtctcccagggggattagagagcatttaaatttaaataatcctatatatgttcctacttcagcctatggacattttggaagagagccagatgaaatcattcaaggctcattttcttgggaaaaaaccgacattgctgatttattttag

SEQ ID NO: 243424 - DNA, 202 bp, Unknown
  Bacterial polypeptide expressing nucleotide sequence isolated from the Sargasso Sea
aatgactaaaaaaaattatctgtttactagtgagtctgtatcagagggccatcctgataaagtatgcgatagaatttctgatatggtggtggatagttatttatcaaaagatccttttgctagagtagcttgtgaaactttaaccaccactaataaagttgttcttgcaggagaaatacgaggaccaaacataggcaaacat

SEQ ID NO: 243425 - DNA, 589 bp, Unknown
  Bacterial polypeptide expressing nucleotide sequence isolated from the Sargasso Sea
atgagtaatttaaaaaattatcttttcacaagtgagtctgtttcagagggtcatccagacaaggtttcagatagaatttctgatatggtcgttgatagctacatttctgctgatccattttcaagagtagcttgtgaaacattaacgacaacaaataaagttgttttagcaggtgaagtaagaggccctaaaataaagacagatgatctaattaataaagttagaaattgtataaaagatattggttatgatcaggatggttttacttggaaagatgcaacaaaaattgaaagtcatctacattcccaatctaaagatattgcaattggagtagactcttccggtaacaaagatgagggagctggagatcaaggtataatgtttggctatgcttgtaatgaaactgaagttttgatgcctgcaccaattcattattctcataaaattttaaggctgatggcagaagatagaaagtctggtaaattaaggaatatagagccggattctaaaagccaggtaacctttgaatatattgatggcaaaccatcaaaagtgaagtctgtagttatttcttcacaacatcagcaga

SEQ ID NO: 243426 - DNA, 340 bp, Unknown
  Bacterial polypeptide expressing nucleotide sequence isolated from the Sargasso Sea
tctgcagcatatgcagcaagatatgtagccaaaaatgtcgtggctgcagggttggcagatagatgtgaaattcaagtctcatatgccattggtgttgcaaaaccaacctctgttagaataaaaacttttggcacagaaaagatttcagaagaggaaattgtgcatttggtgaatgaaaattttgatttaactccttatggaatcatgaacatgctagacctgctccagccaatctatgagaagtcagcagcatatggtcattttggcagagaggatgaagaattcccttgggaaaaaaccgatcgatccgatgcgctaaaggagcaatctggcttgtaat

SEQ ID NO: 243427 - DNA, 279 bp, Unknown
  Bacterial polypeptide expressing nucleotide sequence isolated from the Sargasso Sea
tatggcatatttatttacctccgaatctgtatcagaaggccacccagataaagtagctgatcaaatttctgatgctttaattgataattttcttgcttttgactctaactcaaaagttgcttgtgaaacattagtaactactggacaggttgtcttagccggagaagttaaatctaaagcatatttagatgttcaaaaaattgccagagatgtaattaataaaataggatacactaaaggtgattacatgtttgatggaaattcttgcggagtattatc

SEQ ID NO: 243428 - DNA, 742 bp, Unknown
  Bacterial polypeptide expressing nucleotide sequence isolated from the Sargasso Sea
atgaaaaaaaattttttatttacaagtgaatcagtttcagaaggacatccagacaaagtatgcgatagaatatcagacatggttgtagattcatatttaggcgcagaacctcaatccagagtagcctgcgaaactttaactacaacaaataaagtggtattggctggagaagtaagagggccagaaattaaaaaagacgatttaattcaaaaagtaagagaatgcattaaagacattggctacgatcaagacggttttagctggaaagatacaactaagattgaaactcatttacactctcagtcagcagatatagccatgggagtagactcatccggaaataaagatgaaggtgcaggagaccaaggaattatgtttggatatgcatgtaatgaaactgatgttctaatgccagctccaattcactattcacatagaattctaagattaatggctgaagatagaaaatctggaaaattaaaaggaatagaaccagattcaaaaagtcaaattacaattgagtataaagatggcgtccctaatgcggtaaaatcagtagtgatctctacacaacattccaaagatgttgatttagcaaaagttaaagaactttgtattccatatattgacagatctattccaaaaaatttattaggaaatcttgatgaaaaggagatttatataaacccaacaggaaattttgttataggtggtcctgacggagatagtggattgactggca

SEQ ID NO: 243429 - DNA, 382 bp, Unknown
  Bacterial polypeptide expressing nucleotide sequence isolated from the Sargasso Sea
ggtggtggagcgttttcaggaaaagacccaactaaagtagataggtcagcagcttatgctgcaagatatatagcaaaaaatatagttgcttcaaaagttgctagtaaatgcttaattcaattggcctatgctattggtgtttcaaaacccctgtcaatctatgttgatctatttgataatgatttagaaaaaaataaatttgttgttgaaaaaataaattcaaattttgatttaagcccaagaggaattagagaaatgttaaacttaaataaacctatatatgaaaaaacatcagcttatggacattttggcagaatcccagatgaaaatggctctttttcttgggaaaaaacggataaattgagtgttttttcgagatagt

SEQ ID NO: 243430 - DNA, 625 bp, Unknown
  Bacterial polypeptide expressing nucleotide sequence isolated from the Sargasso Sea
atgaagaaaaattttttatttactagtgagtcagtgtcagaaggacacccagataaagtttgtgacagaatttcagacatggttgtggacagctttttagcttctgaaccccaagcaagagttgcctgtgaaacattaacaacaacaaataaagttgtattagctggagaagtaagaggtccagaactaaaagaagaagaattaatttcaaaagtaagagaatgtattaaagatataggttatgaccaagacggtttttcttggagagatcaaaccaaaattgagacacatttacactctcaatcagcagatattgcaatgggcgtagattcagctggaaataaagatgagggtgcgggagatcaaggaattatgtttggttatgcttgtaatgaaacagatgttttaatgccagctccaattcattattctcacaaaattttaagactgatggctgaggatagaaaatcaggaaagttgaatggaatagagccagactcaaaaagtcaaattactattgaatataaagatggtatgccttctgctgtaacatctgttgttatttctactcaacattcaaaagatgttaacttggctcaagttaaagaacttttttaccatacat

SEQ ID NO: 243431 - DNA, 635 bp, Unknown
  Bacterial polypeptide expressing nucleotide sequence isolated from the Sargasso Sea
cggtgtacctaatgctgtaaaatcagtggtgatctctacacaacattccaaagatgttgacttaccaaaagttaaagaactttgtatgccatatattgagagatctgttccaaaaaatttattaggaaatcttgatgaaaatgagatttacataaatcctacaggaaattttgttataggtggtcctgatggagatagtggtttgacaggaagaaaaataattgtagatacatacggaggtgcggcgccacatggtggtggagctttttcaggtaaagatcctacaaaagttgacagatcagcagcgtatgcatcaagatatttggcaaaaaatgttgtagcttcaaagatagcagataaatgcctaattcaacttgcttacgcaattggtgtatcaaaacctttatcgatttatgttgatctatttgataatgatgaggaaaaaaatagacatgtggaaaaattgattaatgacaactttgacttaagcccaagaggaataagagaaatgctaggtttaaataaaccaatatacgaaaaaacagcagcatatggtcactttggaagagatccaggtgctgatggctcgttttcatgggaaaaaacagataaagcagatgtttttaataagtaat

SEQ ID NO: 243432 - DNA, 664 bp, Unknown
  Bacterial polypeptide expressing nucleotide sequence isolated from the Sargasso Sea
aaaagtccaaattacaattgagtataaagatggtgtacctaatgcagtaaaatcagtggtgatctctacacaacattccaaagatgttgatttagcaaaagttaaagaactttgtatgccatatattgagagatcaattccaaaaaatttattaggaaaccttgatgaaaaggagatttatataaatcctacaggaaattttgttataggtggccctgatggagatagtgggttaacaggaagaaaaattattgtagatacttatggaggagcagcaccacatggtggtggagctttttcaggaaaagatccaacgaaagttgacagatctgcagcctatgcatcaagatacttagcaaaaaatgttgtagcttcgaagatagctgataaatgtttaattcaacttgcttatgcaattggagtatcaaaacctctatctatttatgtagatctatttgataatgatgaggaaaaaaatagacatgtagaaaaattaattaatgataactttgatctaagtccaagaggaataagagaaatgttgggtttgaataaaccaatatatgaaaaaacagcagcatacggacactttgggagagatcctggtgctgatggctcgttttcatgggaaaaaacagataaagcagatgtttttagcaagtaa

SEQ ID NO: 243433 - DNA, 354 bp, Unknown
  Bacterial polypeptide expressing nucleotide sequence isolated from the Sargasso Sea
ctagtaaagtagatcgatctgcagcctatgctgcaagatatgttgcaaaaaatattgttgcctcaaaaattgcaaaaaagtgtgaaatccaattatcttatgccattggtgtttcaaagccactatctatttatgtaaatctttttgacggagatttggaaaaagaaaagtatgttgaaaaattaataacaaataattttgacctaagcccaagaggtataagagaaatgttaaatctaaataggcccatatatgagtctaccgctgcatacggacattttggaagaaaaccaagagaagacggttcattttcgtgggaaaaaactgataaaatatctatttttaaaaagtagc

SEQ ID NO: 243434 - DNA, 281 bp, Unknown
  Bacterial polypeptide expressing nucleotide sequence isolated from the Sargasso Sea
aatgaagaaaaattttttatttacaagtgagtcagtgtcagaaggacacccagacaaagtttgtgacagaatttcagatatggttgtggatacatttttagcatctgaacctcaagcaagagttgcatgtgaaactttaacaacaacaaataaagttgtattagcaggagaagtaagaggaccagaacttaaagaagatgagttaatttcaaaagtaagaggttgtattaaagatataggctatgatcaagatggcttttcatggaaagaacaaactaaaa

SEQ ID NO: 243435 - DNA, 850 bp, Unknown
  Bacterial polypeptide expressing nucleotide sequence isolated from the Sargasso Sea
cgaaaccttagtaaaagataacttagttgttcttgccggagaaataacaagtagatctgaaccaaacttagaagccctcacaagaaaggttattctcgatataggctatgacagcttagatgttggctgtgatggaaacacatgtgaggtagttaatgccatcggcaagcaatctcaagatattgctcaaggtgttaacgagggtgaaggtgaggatttagagcaaggtgctggagaccaaggcataatgttcggctatgcaacaaatgaaacagaggtattaatgccagctccaattacatactctcatagacttgttgagcaacaagcctttattagaaaaagtaataaattatcgtggctaagaccagacgctaaaagccaagtaagttttgtttacggggaagatagcaaacctcaatctatttctgcagttgtattgtcaactcagcacgatcctgatgtttctcaagatgatcttaaagaaggtgtaatggaagaaattatcaaacctatccttccttctaattggttaaatgaagatacaaaatatttcattaatccgacaggaaagtttgaaataggtggtccagtaggagactgtggactcactggaagaaaaattatcgttgatacctatggtggtatggccagacatggaggaggtgctttttcaggaaaggatccttctaaggtggataggtctgctgcttatgccggaagatatgtagcaaaaaatatcgttgctgctggcttggctgatagatgtgagattcaggtatcgtacgcaatcggcgttgctgaaccaaactcaataagtgttaatacattcggaacatctaaaataaag

SEQ ID NO: 243436 - DNA, 580 bp, Unknown
  Bacterial polypeptide expressing nucleotide sequence isolated from the Sargasso Sea
ttgaatcaagaacaaattagagaattaattattccttacataaaaaaatcaattcctgaaaagttaatcgatgaattgagtcaaaaagagatttatattaatccaacaggacaatttataattggtggtccagatggggatacgggtctaactggaaggaaaattatagttgatacttatgggggtgcagcgcctcatggaggtggagctttttctggaaaagaccctacaaaagtagacagatctgcagcttatgcctcaagatatttagcaaagaatatagtatcttctggagcttctgaacaatgtttaatccaattagcttatgctataggagtatcaaaacctttatcgatattcataaaactagcagatggagacgaacaaaaaattggtaaattaaaaaaaattatagttgataactttgatttatcaccaagaggaattagagaaatgttaaaacttaataatccgatatatcaaactacgtcagcttacggtcactttggaagaaaaccaacggataaaggtgaattttcttgggaaaaaacggataaagctgatttatttaaattgtaat

SEQ ID NO: 243437 - DNA, 529 bp, Unknown
  Bacterial polypeptide expressing nucleotide sequence isolated from the Sargasso Sea
aattccaaaaaaactattatcaggtttaaaagaggaggagttttatgttaatccaacaggccaatttataatcggtggtccagatggagatagtggtctaactggtagaaaaatcatagtagatacttatggcggtgctgctccacatggtggaggagctttttctggaaaagatccaagtaaggtagatagatcagcggcttatgcagcaagatatgttgcaaaaaacgtagtagcatcaaatattgcagataaatgtttaatccaactagcatatgcgattggtatttcaaagcctctatctatatatgtgaatctttttgatggcgatgaagaaaaatcaaaaaaagttgaaaatctaataaaagataattttgatttaagccctagaggcataagagaaatgttgtccctaaacaaacctatttatgagtgtacagctgcctatggtcattttggaagaaaacctggaccagatggctctttttcttgggaaaaaatcgacaaaacagctgtttttaaaaagtag

SEQ ID NO: 243438 - DNA, 304 bp, Unknown
  Bacterial polypeptide expressing nucleotide sequence isolated from the Sargasso Sea
aatgagtaatttaaaaaattatctttttacaagcgaatctgtctccgaaggacacccagacaaagtatctgataggatttcagatatggttgttgatagtttcatttctggagacccatattctagagttgcctgcgaaacactaaccacaacaaataaagttgttttagctggagaagtaagagggcctgaaataaaaaaagaagagttaatcgaaaaagtaagaaattgtataaaagatattggctatgacccagaaggctttacctggaaagaagctacaaaaattgaaagtcatttacat

SEQ ID NO: 243439 - DNA, 618 bp, Unknown
  Bacterial polypeptide expressing nucleotide sequence isolated from the Sargasso Sea
taaaatctgtggttatatcgactcagcactcgcctgaagtaaatcaagctcaagttagagaattggttaaaccttacattgagaaatcaataccaaaagaactattaagttcattggatgaaaaggaaatatatgtgaacccaacaggaaactttgtaattggaggtcctgatggtgatagtggtttgactggtagaaaaattattgttgatacttatggcggtgctgctccccatggtggaggtgcattttcaggaaaagatccaactaaggtagatagatcggcagcttatgcatcaagatatttagcaaaaaatgttgttgcatctaagatcgctgataaatgtttaatccagcttgcttacgcaattggagtatcaaaaccattatcaatttatgtggatttatttgacaatgatgatgaaaaaaataaacatgtggaaaatcttatacgtgaaaattttgatttaagtccaagaggtattagagaaatgcttggtttaaataaaccaatctacgaaaaaacagctgcttatggacattttggaagaattcctgacgacaaaggatcattttcctgggaaaagacagataaatcaaacgtatttagtaagtaaa

SEQ ID NO: 243440 - DNA, 350 bp, Unknown
  Bacterial polypeptide expressing nucleotide sequence isolated from the Sargasso Sea
aaaagtagatagatcagcagcttatgcatcaagatatttggcgaaaaatattgttgcttctaaaattgctgataaatgtttaattcaacttgcgtatgcaataggagtttctaaacctttatcaatttatgttgatctttttgataatgatgaagaaaaaaataggcatgtagaaaaattaattaaagaaaattttgatttaagtccaagaggtataagagaaatgttaggtttaaataaaccaatttatcaaaaatcagccgcatatggtcatttcgggagagatccagagtcagacggatcattttcatgggaaaaaactgataaatcacaggtatttaataagtaaa

SEQ ID NO: 243441 - DNA, 634 bp, Unknown
  Bacterial polypeptide expressing nucleotide sequence isolated from the Sargasso Sea
tggcaaaccagcaaatgttaaatcagtggttatctccactcagcattctgcagatgtcgatcaatcccaagtgcgaaaattagtaatgccatatattgaaaaatctataccaaaaaatctccttaataatttagatgaaaaagaaatctatattaatccaacaggaaattttgttattggtggacctgacggagatagtggtcttactggtagaaagattattgttgatacatacggtggtgctgcgccacatggtggtggagctttttctggtaaagatccaactaaagttgatcgatcagccgcttatgcttcaagatacttagcaaaaaatgttgtagcttcaaaaatcgcggacaagtgtttaatacaacttgcctatgcaatcggagtatccaaaccattatctatctatgttgatttattcgacaatgatgaagagaaaaacaaacacgtggaaaaattgataagtgaaaactttgatttaagtcctagaggtataagagaaatgttaggtttaaataaaccaatttatgaaaaatcagctgcctatggtcattttggaagagaaccagaaggagatggctctttttcttgggaaaaaacagataaaaaatcagtattttctaagtaa

SEQ ID NO: 243442 - DNA, 743 bp, Unknown
  Bacterial polypeptide expressing nucleotide sequence isolated from the Sargasso Sea
aatgagtaacctaaaaaattttctttttacgagtgagtctgtatcagaaggacatccagataaagtttcagatagaatttcagatatggtggttgatagttatctttctggagatcctttttcaagggttgcatgtgaaacattaacaacaaccaacagggttgtcttagcaggtgaagtaagaggtcctgaaattgaaaaagatgaattaattgaaaaagtaagagtttgtattaaagatattggttatgatcaagaggggtttacttggagagaagctactaaaatagaaagtcatcttcattctcaatcagctgatatagctatgggtgtagattcatcaggtaataaagatgagggagcaggcgatcaaggtctaatgtttggctatgcttgcaatgaaacagaagaacttatgccagcacctttacactactcacataaaattttaagactcatggcagaagatagaaaatctggaatgttaaaaaatatagaacctgataataaaagccaaattacttttgaatacataaatggaaaacctactaaagttaagtctgttgtaatttcttcacaacattcacctgatattagtcaatctcaagtaagagatttattaagaccttatatgattaaatctattccaaaaaaattccttgagaattttgatgatagtgaactttatgttaacccaactggtaattttgtcattggtggaccagatggtgatacaggattaa

SEQ ID NO: 243443 - DNA, 928 bp, Unknown
  Bacterial polypeptide expressing nucleotide sequence isolated from the Sargasso Sea
ggataaagtttgtgacagaatttcagatatggtagttgatagttatctaggggcagagtcccaatcaagagtggcatgcgagactttaacaactactaacaaagtagttttggcaggtgaagtcagaggaccggagattaaaaacgatgatttaattcaaaaagtaagagagtgtattaaagatattggttatgatcaaaaaggttttacttggaaagatgctactaagatagaaagtcatcttcatttgcaatctgccgatatagcaatgggagtagattcatctggaaataaagatgaaggtgctggagatcaagggataatgtttggttatgcatgtaacgaaacagaagttttgatgccagccccaatacattattctcataaaattttgagactaatggctgaagatagaaaatcgggtaaattaaataatattgaacctgattcaaaaagccaaatcacaatagaatataaagatggaaaacctgcaaatgtgaagtcagttgtcatttcaacacaacactctgcagatgtaaatcaatctcaagtaagagaattggtaaaaccatatattgaaagatctatcccaaaaaatcttttaaatggattagatgataatgaaatttacgttaatccaacaggtaattttgttattggaggacctgatggagatagtggattaacaggaagaaaaataattgtagatacatatggaggtgcagcacctcacggtggtggagctttttctggcaaagatcctactaaagttgatagatcagctgcttacgcatcaagatatctagcaaaaaatgttgttgcttcaaaaatatctgataaatgcttaattcaacttgcttatgcgataggggtatcaaagccatttatcatttacgtagatctttttgatatgatgaggaaaaaatag

SEQ ID NO: 243444 - DNA, 712 bp, Unknown
  Bacterial polypeptide expressing nucleotide sequence isolated from the Sargasso Sea
gctgaggatcgtaaatcttggaaaattaaaaaatatcgagcctgattctaaaagtcaaattacaatagagtataaagatggtaaacctgctaatgttaaatcagttgtaatttcaacccaacactcagcagaagtaaatcaatctcaagttagagaattggtcaagccttacatagaaaaatcaatcccaaaatcattattatcaaatcttgatgaaaatgaaatttatgtaaatccaactggaaattttgttattggtggacctgatggggatagtggattaacaggtcgaaaaataattgtagatacatacggtggtgcagcaccacacggtggtggtgctttttctggtaaagatccaactaaggttgatagatctgctgcttacgcatcaagatatttagcaaaaaatgtagttgcttcagggattgctgaaaaatgtttaatccaattagcttacgcaattggagtttcaaaaccgctatcaatttatgttgatttatttgataataatgaggaaaaaaatagtcatgttgaaaaattgattagcgaaaattttgatttaactcctagaggaattagggaaatgctaggtttgaataagccaatatatcaaaaaacggctgcttatggacattttggtagagatcctggatcagatggatccttttcttgggaaaaaactgataaatcagctgtttttaaaaagtaa

SEQ ID NO: 243445 - DNA, 253 bp, Unknown
  Bacterial polypeptide expressing nucleotide sequence isolated from the Sargasso Sea
atgagtaaaaaatcgtatttgtttacaagtgagtcagtatcagaaggtcacccagacaaggtctgtgatcgtatttcagatatggttgttgatacttatttaagcaaagaaccatttgcgagagttgcttgcgaaactttaaccaccacaaacaaagtagttttagcaggagagaccagaggaccagaaataaaaaaagaagatttaattcaaaaagtaagaagttgtattaaagatataggttatgaacaaa

SEQ ID NO: 243446 - DNA, 667 bp, Unknown
  Bacterial polypeptide expressing nucleotide sequence isolated from the Sargasso Sea
aaatctcagcttacagtaaatacaaaaaatggaagccctgtaagcgttaaatcaattgttttatctactcagcatcttgatcccttgctttcctcccacgatgtacaggaaatagtagagccttatatcttggaggtaattccggatgagtggatctccaaggatactgtttggcatataaaccctactggaaagtttgtaatcggaggtccagatggagacgcgggtttgacaggtagaaagattattgtggatacttatggaggcgctgccccgcacggtggcggagcattctctggtaaggaccccacaaaggtggatcgatcagcagcttatatttctaggtatttagctaaaaatattgtagctgccgaggttgcaccgaagtgtcttattcaactttcttatgcaattggggttgcagagccgttatcaatttatgtagatacttatggtacaggtactaagtatgaaaaaaaattagaggaaattttaccaaaaatagtagatttgtctcctaagggaataatcgaaaaactaggcttaagagagcctatttatgaacgaacagcagcttatggacattttggaagaacgcctgagactgatggaggtttttcttgggaaaaaacagatcttgtagatcatttaacaaaacatctttaat

SEQ ID NO: 243447 - DNA, 676 bp, Unknown
  Bacterial polypeptide expressing nucleotide sequence isolated from the Sargasso Sea
tgacagcaaatctcaagtaacattagaatacagagatggtaaaccaataaaagctagatctattgttgtttctacccaacacgtaaaaggctgttcccaacaggatattaaggctttagttaaaggtattgtgaataatgttttgccaaatggttggatgtgtcctgaggatgagttttatgttaatccaacaggtatctttgaaattggagggccagacggagatgctggtttaacaggaagaaagattatagtagatacatatggcggagcctctccccatggtggtggtgcattttcagggaaagatccaacaaaagtggataggtctgcagcttatttaacaagatatttagccaaaaacgttgttgcagcaaagcttgcttcaagatgcaccatacaaattgcatatgcaattggagtgtctaaacctctttcattgtatgttaataccgatggaactggaataattgaagatcaaaaaattgaaaaaattcttacagatttaattgacatgtctcctagggggataagagaacatttgaatttaaataatccgatatatgttcctacttcagcttatggacattttggaagagagccaaatgaaatgattcaaggctcattctcttgggaaaaaaccgacatttctgatctaatcttaagaaaatcaggt

SEQ ID NO: 243448 - DNA, 173 bp, Unknown
  Bacterial polypeptide expressing nucleotide sequence isolated from the Sargasso Sea
aatgacatctgagtctgttggagagggtcatcctgacaaaatggctgatcaaatttcagatgcgatcttagacgcaattcttgagcaagataaaggctgtagagttgccgttgaaactcttgtaaagacggggctggttgtccttgctggtgagatcacaacaagtgccaatg

SEQ ID NO: 243449 - DNA, 483 bp, Unknown
  Bacterial polypeptide expressing nucleotide sequence isolated from the Sargasso Sea
aaatatttataaatccaaccggaagatttgtgttgggtggtcccgttggagattgtgggcttactggaagaaaaataattgtagatacctacggaggtatggctaggcatggtggtggtgctttttcaggaaaagatccatcaaaagttgacagatctgcagcatatgcggctcggtatgtagcaaaaaatattgttgctgcaaaaattgcagaaaagtgtgaaattcaaatttcatatgcaattggtgtagcagaaccaacatcaatttttgtagatacttttggtacgtcaacggttgaacagccagaacttgaaaatataattagagaaaatttcgatttaaggcctaaaggtattataaaaatgcttgatttaaagaaaccaatctatcaagatactgctgcatatggacattttggaagggatgataagaccttttcatgggaattgactgataaagctaaaaatcttattacttaaa

SEQ ID NO: 243450 - DNA, 840 bp, Unknown
  Bacterial polypeptide expressing nucleotide sequence isolated from the Sargasso Sea
ttatgagcaaaaaggttttcattggaaaaactgtgatattgatgtccatcttcattctcaatcttccgacatagcaatgggagttgattctaaaggaaacaaggacgagggagcaggcgatcaaggtataatgtttggctatgcctgtgatgaaacagaagttttgatgccagctccaatttattattcacataaaattttggaattaatggctctagacaggaagaaaggtattgctgataaattggagccagattccaaaagtcaggttacaatgatgtatcaaaacggaaaaccagcaaaagttacatcagtagtaatttctacccaacattctccaagtgttaatcaatctcaagttaaagaaattgttagaccgtatctagaaaaagcaattccaaacactctgctttcaggattaaaagaggaagaattttatgttaacccaacaggtcaatttatcattggaggccctgacggtgatactggacttacaggaaggaaaattattgttgatacttatggtggagcagcaccacacggcggaggagctttttccggaaaagatccaagcaaagttgatagatctgcggcttatgcagccaggtatgttgcaaaaaatgtggtggcttccaaaatcgcaagcaaatgtttaattcaattgtcttacgccataggagtttctaagcctttgtcgatttatgttgatctttttgatggcgatgaaaagaaagcaaaacgtgtagaaaaattaatcaaagacaattttgacttaagccccagaggcataagggagatgttgtctttaaataaacctatatacgaatgtacatcagcata

SEQ ID NO: 243451 - DNA, 458 bp, Unknown
  Bacterial polypeptide expressing nucleotide sequence isolated from the Sargasso Sea
cttgtctcgagaaacttacatttttacttcagagtctgtgtctgagggacatcccgacaaagtttgtgatagaatatctgacgctgttttagatgcctttattgctttggaacctgaagcgcgggttgcttgtgaaacttttgcgaccaccaatagagtaatggttggtggagaggttggtctgtctgataaaaatttgttgtcaaaacaaatggatcagattgatgaaattgttagagcttgcataaaagatatcggatatgaacagaaaaaatttcatcatgagactgttgaaataacaaatttgcttcatgagcaatctgcacatattgctcaaggtgttaacgcagacggtgacaaggaggagggagcaggcgatcagggtataatgtttggctatgcaactgatgaaactccagatttaatgcctgcgcctatccatacagtcatgctatttt

SEQ ID NO: 243452 - DNA, 322 bp, Unknown
  Bacterial polypeptide expressing nucleotide sequence isolated from the Sargasso Sea
atgagtaatttaaaaaattatctttttacaagcgagtctgtttctgaaggtcatccagataaggtttctgatagaatttctgatatggttgtagatagttatctgaataatgaccctttctcaagagtagcatgtgagacgttaactacaactaataaagttgtaattgctggtgaggtgagaggccctgaaatcaagaaagatgaattaatccaaaaagtgagagattgtattaaagatataggctatgaccaagatggtttttcctggaaggaaacaacaaaaatagaaagtcatttacattcccaatcagcagatatag

SEQ ID NO: 243453 - DNA, 794 bp, Unknown
  Bacterial polypeptide expressing nucleotide sequence isolated from the Sargasso Sea
aatgaaaaaagattatttattcacaagtgagtcagtttcagagggacacccagataaggtatgcgatagaatttcagatatggtcgttgatacatatttaggcaaagaaccacaggcaagagtagcatgtgaaacattaacaaccacaaacaaagttgttttagcaggtgaaactagaggccctgaaataaacaaggatgaattaatttcaaaagtaagagactgtataaaagatattggttatgaccaatcaggctttacttggaaagatgctacaaagatagatcttcatttacattctcaatcggctgatattgcgatgggtgtagactcagcaggaaataaagatgaaggagctggagaccaaggtattatgtttggttatgcttgtaatgaaacagatgttttaatgccagcgccaattcattactctcataaaattttaagacttatggcggaagatagaaaatctggaaaattaaaaaacattgagccggattcaaaaagtcaaattacaattgagtataaagatggaaaaccttcatcagtaaaatcagttgttatatcgactcagcactcagctgatgttaatcaagctcaagtcagagaattagttaaaccttatattgaaaaatctataccaaaaaatttaataaatggtttagatgatacagaaatttatgttaatccaaccggtaattttgttataggtggaccagatggagatagtggattaacaggtagaaaaattattgtagatacttacggaggtgcagcaccacatggtggtggag

SEQ ID NO: 243454 - DNA, 747 bp, Unknown
  Bacterial polypeptide expressing nucleotide sequence isolated from the Sargasso Sea
attattctcatcaaattttatataaaatggcacaagctcgtaaagatggatctgcgtctggtttagaacctgattcaaaaagccaagttactatgctttatgaaaatggaaaaccaactaaagttacatccttagtaatttcttcacaacacaaagaaggtttgtctcctgaggacgtaaaagaaattgttaaaccttatgtgtatgagtgcatacccaataacttattagaaggtcttaaagatgaagaattctatgttaatcccacaggaaattttgtaattggaggtcctgatggtgattctggtctaacaggtagaaaaataattgttgatacatatggtggtgcagcacctcatggtggaggggcattctctggaaaggatccatcgaaagttgatagatctgcagcatatgcagctagatacttagcaaaaaacgttgttgcagctgatcttgcagatgaatgtactatacagttatcttatgcaataggagtctcaaaacctttatcagtatatgtaaatactaatggaacaaataaagttgatgaacaaaagattgaaaaatctgtacaagatttatttgatctaagtccaagaggaataagagaacatttaaaactaacaaatgcaatttatgttccaacctctgcttacggccattttggaagagagccaagtgacaagggacattttacttgggaaaaaactgatttagttgaatctttaaaaggcattgcataac

SEQ ID NO: 243455 - DNA, 858 bp, Unknown
  Bacterial polypeptide expressing nucleotide sequence isolated from the Sargasso Sea
aatgaaaaagaattttttatttactagtgaatcagtgtcagagggacacccagataaagtttgtgacagaatttcagatatggttgtagatacctttttagcttctgagcctcaagcaagagttgcttgtgaaactttaacaacaacaaataaagttgtattagctggagaagtaagaggcccggaactcaaagaggatgagctaatttcaaaagtaagagattgtattaaagatataggttatgaccaagacggtttttcttggagagaccaaactaaaattgaaacacatttacactctcaatcagcagatattgcaatgggtgtagactcatctggtaataaagatgaaggtgcaggagatcaaggaattatgtttggttatgcttgcaacgaaacagatgttttaatgccagccccaattcattactcgcacaatattttaagattaatggcaactgatagaaaatcaggaaagttaaatggaatagaaccagattcaaaaagccaaattactattgaatacaaggatggaatgcctgctgctgtaacctcggtagtaatttctactcaacattctaaagatgtgagcttggctcaagttaaagagctttgtatgccttatatagaaagatctatacctaaaaatttattaggaagtcttgatgaaaaagagatttatataaatccaacaggaaattttgtaattggaggtccagatggtgatagtggtttaacagggagaaaaattattgttgatacatatggaggtgcagcgccacatggtgggggagcattttctggtaaagatccaacaaaagttgatagatcggctgcctatgcatcaagatatttagc

SEQ ID NO: 243456 - DNA, 751 bp, Unknown
  Bacterial polypeptide expressing nucleotide sequence isolated from the Sargasso Sea
tctcatgaaattttaaaaaagcttgctgaattaaggcattctggtaaggctgattttttaggtccagacagcaaatcacagcttacaattgaatatgataacgaaagaccaatcaaagctcataaaattgtagtttcttctcaacataaagatggcttcaatcaaacagaattgaaagattttattatgtcttttgttaaaagcatacttccagagaaatggatgtgtcataatgatgatttttatgttaaccctacaggaagatttgttattggcggtccagacggtgatacaggattaacaggtagaaaaataatagttgacacatacgggggttcatctcctcacggaggaggtgcattttccggaaaagatccaacaaaagttgatagatcagcagcttatatgacaagatatttagcaaaaaatgtagttgccgctaaattagcaaaaaaatgtactattcaaattgcttatggaataggaatttcaaaaccattatctttttacgtaaatacacaagggacaggtgaaattgaagatttaaaaattcaaaaatgtttagagaaaattgttgatttaactccaaaaggtataagggatcatttggctttaaataatccaatatatgttccatcttcttcttatggacattttggtagacagcctgatgaaaaggttaaaggttccttttcctgggagaaagttgatcttgttgaaaaaattcttaacgaaattaatatgttttgag

SEQ ID NO: 243457 - DNA, 865 bp, Unknown
  Bacterial polypeptide expressing nucleotide sequence isolated from the Sargasso Sea
taagattgaaactcacttacactctcagtcagcggatatagccatgggtgtcgattcttctggaaacaaagatgaaggtgccggtgatcagggaatcatgtttggttatgcatgtaatgagactgatgtactaatgccggctccaattcattactcacatagaattttaagattaatggctgaagatagaaaatctggaaaactaaaagggattgagccagactcaaaaagtcaaattactattgagtataaagatggtgtgccaagtgcagtaaagtcagtggtcatctctacacaacattccaaagatgttgatttaacgaaagttaaagagctttgtatgccatacattgagaagtcaattccaaaaaatttgttaggcaatcttgatgaaaaagagatttatattaatcctacaggaaatttcgtaataggtggtcccgatggagatagtggattaactgggagaaagataatagttgatacttatggtggtgcagcacctcatggtggtggtgctttctcaggaaaagatccaacaaaagtagataggtctgcagcatatgcatctagatatttagctaaaaatgtagttgcatcaaaaatatctgaaaaatgtttaattcaacttgcatatgcaattggtgtttctaaacctctctctatctatgtcgatctatttgataatgatgaagaaaaaaataggcatgttgaaaaattgattaatgaaaattttgatttaagcccaagaggtataagagaaatgttgggtttgaataaacctatttatcaaaaaacagcagcatatggacacttcgggagaaatccagagtcagatggctctttttcttgggaaaaaacagac

SEQ ID NO: 243458 - DNA, 858 bp, Unknown
  Bacterial polypeptide expressing nucleotide sequence isolated from the Sargasso Sea
aacactaaatacttatttaccagcgagtccgtttctgaagggcatccagataaagtatgtgacagaatttcggatatggttgttgactcttatttgtcaaaagatccagtttcaagagtagcttgtgaaacattaactactacaaataaagttgttttagctggtgaaacaagaggaccaaaaattgataaagatgaattaatttctaaggtaagaaattgtataaaagaaattggttatgaccaggatggctttagttggaaaactgcaaacatcgaaacatatcttcatgaacaatcagcagacatagcgatgggcgtagattctaaggataataaagatgaaggtgcgggtgaccaaggaattatgtttggttatgcaactaatgagaccgatgaattaatgcctgctccaattcattactcacataaaattttaagattaatggcagaggatagaaaaaaaggaaatttgaaagggatagaaccagactccaaaagtcaagtaacaatgctttatgaaaataaaaagcccatcaaagtaacctctgttgttatatctacacaacattcaaaagatttaaatcaagaaaatgtgagagaacttattatcccttatattaaaaaatcaattccagaaaattatttaacagaattagatcctaaagaggtttatataaatccaactggacaatttattattggagggccagatggagatactggactaactggaagaaaaattatagttgatacttatggtggtgcagctcctcatggcggaggagcattttcaggaaaagatccaacaaaagtagatagatccgctgcttacgcttcacgttatttagcaaaaaat

SEQ ID NO: 243459 - DNA, 247 bp, Unknown
  Bacterial polypeptide expressing nucleotide sequence isolated from the Sargasso Sea
atgacatctgagtctgttggagaaggccatccagataaaatggctgatcaaatctcagatgcaattttagatgccattctagagcaagataaaggctgcagagttgcggttgaaactcttgtaaagacggggctggttgtccttgctggtgaaatcacaacaactgccaatgttgattatgaggccattgcgcgacgaaccatcaaaaggatcggctatgatagagaagagcttggctttgatgatc

SEQ ID NO: 243460 - DNA, 154 bp, Unknown
  Bacterial polypeptide expressing nucleotide sequence isolated from the Sargasso Sea
aatgaaaaagaattttttatttactagtgagtcagtttcagagggacacccagacaaagtgtgtgacagaatttcagatatggttgtagatacttttttagcttctgagccgcaagcaagagttgcttgtgaaactttaacaacaacaaataaa

SEQ ID NO: 243461 - DNA, 505 bp, Unknown
  Bacterial polypeptide expressing nucleotide sequence isolated from the Sargasso Sea
tctggatgaaaatgaaatctatataaaccccactggaaattttgtaattggtggtccagacggagatagtggtttaactggaagaaaaattattgttgatacgtatggaggtgcagcaccacatggtggtggagctttttctggaaaggatccaacgaaagtagatagatcagctgcttatgcatcaaggtatttagctaagaatgttgttgcatctggaattactgacaagtgccttattcaattagcttatgctattggtgtttcaaaacctttatcaatttatgttgatttatttgataatgatgaagaaaaaaattcacatgttgaaaaattgataaatgaaaactttgatttaagtccaagaggaatcagagaaatgctaggtttaaacaagccgatatatcaaaaaacagcagcttatggtcattttggtcgagaaccaggcaaagatggctctttttcttgggaaaaaactgataaatcatcagtttttaaaaagtaa

SEQ ID NO: 243462 - DNA, 424 bp, Unknown
  Bacterial polypeptide expressing nucleotide sequence isolated from the Sargasso Sea
gaagaaaattattgtcgatacatatggtggagctgcacctcatggaggaggagctttttctggaaaagatccaacaaaagtagatagatctgcagcatatgcatctagatacttagctaagaatgttgttgcatcaaagattgctgacaaatgtttaattcaattagcttatgcgattggagtatctaagccattgtcaatttatgtagatttatttgacaatgatgaagaaaaaaatatgcatgtagaaaaacttataaaagaaaattttgatttaagtccaagaggaataagagaaatgcttgggttaaacaaacctatatatgaaaaaactgctgcctatggacattttgggagaattccagagaatgatgggtcgttttcatgggaaaaaactgacaaatcagaggtttttagtaagtaa

SEQ ID NO: 243463 - DNA, 598 bp, Unknown
  Bacterial polypeptide expressing nucleotide sequence isolated from the Sargasso Sea
atgaaaaaaaattatttatttacaagcgaatctgtttccgaaggtcatcctgataaagtgtgtgatagaatttcagacatggttgtcgatacctatttaggcatggaacctcaagcgagagtagcctgtgagacattgaccacaacaaacaaagttgttttagcaggggagactagaggtcctgaaataaataatgatgaattaatttcaaaagttaggaattgtattaaggatattggatatgaccaagatggcttcacatataaagaagctactaaaattgaatgtcatttacactctcaatcagctgacatagcaatgggagtagactcctcaggtaataaagatgaaggtgctggagaccaagggataatgtttggttatgcatgtaatgagactgatgttcttatgccagccccgatacatttttctcatagaattttaagattgatggctgaagacagaaaatccggaaagcttaaaggaatagaaccagactcaaaaagtcaaattacaattgaatataaggatggtattcctgcaaatgtaaaatcagtagtgatctctacacaacattctaaagatgtaaatctaacaa

SEQ ID NO: 243464 - DNA, 732 bp, Unknown
  Bacterial polypeptide expressing nucleotide sequence isolated from the Sargasso Sea
tatgattaaaaataatatggtttatattgctggtgaaataacatcattaggaagtccagatctagagtcaattgtaagaaaaactattaatgatattggttatgatactgatgaatatggttttaatggcgatacttgtgaatttaataatcttgtttttgagcaatcacctgacatatctcaaggtgtaactgaaggtgagggtgaaaatttagaacagggagctggagatcagggtttaatgtttggctatgcttgtaccgaaactgaatcattgatgccacttccaatagatctttctcatagactagtaaaaaaacaatctgacgtaatgaaaaataatgaattatcttggttaagaccagatgcaaagagccaagttagtgcaatttattcagatgatggtaaatctattgaaggattgtctgcaattgtcctttcaacgcaacatgatgaagatgttacacaggaagatataaaagaaggagttatggaaaaaattataaagcctatagttcctgaagagtggattctggattctacaaatatctttattaatccaactggtaaatttgtcattggaggtcctgttggtgattgtggtctaacaggtaggaaaataattgtagatacatatggtggaatggctagacatggtggtggagctttttctgggaaggatccctcaaaagttgaccgttctgctgcctatgctgcaagatatgttgcaaa

SEQ ID NO: 243465 - DNA, 865 bp, Unknown
  Bacterial polypeptide expressing nucleotide sequence isolated from the Sargasso Sea
tatgagtatattttttacatctgaatcggtctctggaggccatcctgacaaagtttgcgatcaaatctctgatgcgatcttggattcatatttagctgaagaccctaacagcagagttgcatgcgaaaccatgattaaaaataatatggtctttatagctggagagattacgtctttaggaagcccggatcttgagcctattgtaagaaaaacaattaatgatatcggttacaactctgatgaatatgggtttaatggagatacatgcgagtttactaatctcgtctttgagcaatcccccgacatatcccagggcgtcactgagggagaaggtgaaaatttagaacagggagcaggtgaccagggattaatgtttggatatgcctgtactgaaacagactcattaatgccactcccaattgatctttctcacagactggtcaaaaaacaggctgatgtcatgaagagtggagaaattaaatggctgagacctgatgcaaagagtcaggtgagcgtaatttactctgatgatggcaaaaccattgaaggcctctctgctgttgttctctcaactcaacatgatgaggatgtaactcaagaagagatcaaaactgaagtaatggataagattattaaacccattgtacctgaggaatggattcttgattcaacaaatatttttattaatccgacaggtaaatttgttattggtggtcctgttggtgattgcggtctcactggaagaaaaataattgtagatacttatggaggtatggctcgtcatggaggaggtgctttctcgggaaaagatccatctaaagtagatagatctgctgcttatgcttctagatacgttgcaaagaat

SEQ ID NO: 243466 - DNA, 184 bp, Unknown
  Bacterial polypeptide expressing nucleotide sequence isolated from the Sargasso Sea
atgactaaatatagtgtttttacttctgaatcagtatcagaaggtcatcctgataaagtagcagatcaaatttctgatgctattcttgattcaatgcttgttggagatcctgattctagggtagcctgtgaagttcttattaaagataacttagttgttctggctggtgaaattacaagtattt

SEQ ID NO: 243467 - DNA, 502 bp, Unknown
  Bacterial polypeptide expressing nucleotide sequence isolated from the Sargasso Sea
cagagtatttgaacttgtagggagtcatataagcgaggaatatattcttgatttaaatccttcaggatcatttgtcaaaggaggtccagcaggagacacaggccttactggaagaaagattgttgttgatgcttatgggccatctgttccagttggaggaggagcattttctgggaaagacccaagcaaagttgacagatcagctgcttatgcagctagacacttagcaaagaacatagtatctcatggcctatcagacgagtgtctagtaagagtttcctatgcaataggcaaagctgatccatacgaattaacagttgaaacttttggtactgaaaaatcagaaaataaagttttagatgattttacaagcaagtttgatatgaagcctggggcaataattgaaaggcttaaccttcttgaggttgactataaggaggatactttgttttcacactttggtcataatgatagaaattgggaaaaaatagaaaatttatag

SEQ ID NO: 243468 - DNA, 705 bp, Unknown
  Bacterial polypeptide expressing nucleotide sequence isolated from the Sargasso Sea
gcaatcagctgatattgctatgggtgtagattcatctggcaataaagatgaaggagctggagatcaaggtattatgtttggatacgcatgtaatgaaacagatgttttaatgccagcgcctatacattattctcataaaattctaagattaatggctgaagatagaaaatctggaaaattaaaaaatattgaaccagattcaaaaagtcaggtaacattcgagtatgtcaatggaaaaccttcaaaagtaaaatcggtagttatctcttcacaacattcgccagatgttaatcaatcgcaagttagagatttattaagaccttatatgttaaaatctattccaaaaaattttattgaaggttttgacgaaaatgaattttatgtaaatccaacaggcaattttgtaattggtggtccagatggagattgtggccttacaggtagaaaaattattgttgatacatatggtggagctgcaccacatggaggaggagctttttcaggaaaagatccaactaaagttgatagatcagcagcttatgcagcaaggtatattgctaaaaatattgttggttctaaaattgctgaaaaatgtttaattcaattagcttatgcaattggtgtatcaaaaccattatccatttatgtcgatttatttgataatgatatagataaaaataaatttgttttagaaaaaattaaaga

SEQ ID NO: 243469 - DNA, 434 bp, Unknown
  Bacterial polypeptide expressing nucleotide sequence isolated from the Sargasso Sea
tggtttgactggtagaaaaattattgttgacacctatggaggtgcggcacctcatggtggaggagcattttctggaaaagatccaactaaagtagatagatcagcagcatatgcttcgagatatgttgcaaaaaatgttgttgcttcaggaattgctgataagtgcctaattcaattagcatatgccataggcgtgtctaaacctttatcaatttatgtagatttatttgataatgatgaggaaaaaaataggcacgttgagaaattgataaatgaaaattttgatttaagtcctagaggaattagagaaatgttaggattgaacaaagctatataccaaaaaacagctgcatatggtcattttggaagagaacctgagcctgatggttcgttttcttgggaaaaaactgataaatacgatgtattcaaataac

SEQ ID NO: 243470 - DNA, 745 bp, Unknown
  Bacterial polypeptide expressing nucleotide sequence isolated from the Sargasso Sea
aattcatttctcacatagaattttaagattaatggctgaagatagaaaatctgggaaacttaaaggaatagagccagactctaaaagtcaaattactatagagtataaagatggtgtgccaaaagctgtaaaatcagtagtgatttctacacaacattccaaggatgttaatctagctcaagtaaaaaaactttgcatgccatatattgaaagatctataccaaaaaatttattaggaaatcttgacgaaaacgaaatatatattaatccaacaggaaattttgtaattggcggaccggatggagatagtggattaactggaagaaaaataattgttgacacatatggtggtgctgcacctcatggtggtggtgcattttctggtaaagatccaacaaaagtagacagatcagcagcatatgcttcaaggtatttggctaaaaatattgtggcatcaaaaattgctgacaaatgcttaatacaattggcttatgcaatcggtgtatccaaaccattatcaatttatgttgatttattttctaatgatgaagaaaaaaacaaacatgtagaaaaattgattaatgaaaattttgatttaagtcctagaggcataagagaaatgcttgctttaaataaacctatttatgaaaagtcagcagcttatggtcattttggtagagacccagagtcaaatggagcattttcatgggaaaacactgataaagcttcagtatttaacaagtaa

SEQ ID NO: 243471 - DNA, 139 bp, Unknown
  Bacterial polypeptide expressing nucleotide sequence isolated from the Sargasso Sea
gatgaagaaaaattttttgtttacaagtgaatcagtttcagaaggacacccagataaggtgtgtgatagaatttccgatatggtagttgatacatatttgagtttggaaccacaagctagggtggcatgtgaaactttg

SEQ ID NO: 243472 - DNA, 853 bp, Unknown
  Bacterial polypeptide expressing nucleotide sequence isolated from the Sargasso Sea
aatgagtaatttaaaaaattttcttttcactagcgagtcagtttcagaagggcatccggataaagtttcagatagaatttctgatatggtagttgatagttatctttcaggagatccattttcaagagtagcttgtgaaacacttacaacaacaaataaagtcgttttagctggtgaagtaaggggtccagaaattaaagaaaatgatttgattgaaaaagtaagacactgcataaaagatattggttatgatcaagatggtttcacttggaaagaagctacaaaaatagaaagccatctccattcccaatcatctgatatagcaatgggtgtagattcttcaggcaataaagacgaaggagctggagatcaaggaataatgtttggttatgcatgcaatgaaacagaagagttaatgccagcacctattcattactcacataaaattttaagactaatggctgaggatagaaagtctggtaaacttaaaaatatcgaaccagactctaaaagccaagttacttttgagtatgttgatggaaaaccaacaaaagttaaatctgtagttatttcatcacaacattctgcagatgtaaatcaaacacaggttagagagttattaagaccttatatgataaattctattccaaaaaattttttagacggtttcaatgaaggggagttttatgtaaatccaacaggtaattttgttattggaggccctgatggtgattgtgggcttacaggaagaaaaattatagttgatacttatggaggtgcagcacctcatggtgggggagcattttcaggaaaggatccaactaaagttgataggtcagcagcttatgcagca

SEQ ID NO: 243473 - DNA, 619 bp, Unknown
  Bacterial polypeptide expressing nucleotide sequence isolated from the Sargasso Sea
ttggttgcaaaaaattatctctttactagcgagtcagtttccgagggccatcctgacaaggtgtgtgaccagatttcggactctatagtagacttgtatctctcagctgaccctctttctcgggtcgcagttgagacactttgcacgaccaataaggttgttctcgctggggaagttaggggccccaaggaaatttctcatgcagacctggagcagaccgcccgagattgtgtaaaaaaaattggttatgaacaagatggttttcactgggaaacgcttgatgtttccgtttatgttcactctcaatcaaccgatattgcccagggtgttgatgcatcagggggcaaggacgaaggtgcgggagatcagggaataatgtttggctatgcttgcaatgaaacagaggcgcttatgcctgccccaatcttttattctcatgctatattggagcgattatctaaagccagacattctcgtgaggaagttggtttggggccggactcaaaaagccaaattactctggcttatgaaaatgggaaaccagtgagagctcattcaatagtggtttcaactcagcatgcttctgacctaaatcaggaggatgtgcgggaaattgtta

SEQ ID NO: 243474 - DNA, 389 bp, Unknown
  Bacterial polypeptide expressing nucleotide sequence isolated from the Sargasso Sea
attatccttttctcacaaaattctcaaagacctcgcatataaaaggaaaaacaatataattactggaatacttccagactcaaaatctcaattaaccctcttctatgaaaatgataaacctaaatatattgactcaattgttgtttcctctcagcatacagaagaaacaacccaggaatatttacatgaagaaattaataaattatgtaaaaaaattttaccagacgaatggtatacagatgatacaaaacttttagttaatcccacaggtaagtttgttataggcggtcctgttggggatactggtttgactggaaggaaaattattgttgatacttatggaggggcatctcctcatggtggaggagcattttctggaaaagacccca

SEQ ID NO: 243475 - DNA, 805 bp, Unknown
  Bacterial polypeptide expressing nucleotide sequence isolated from the Sargasso Sea
gacactactaagattgaaacacatttacactctcactcagcagatatagctatgggtgtagactcatctggaaataaagatgaaggtgctggagaccagggaattatgtttggatatgcgtgtaacgaaactgatgttttaatgccagctccaattcattactcacatagaattttaagattaatggctgaagatagaaaatctggaaagctaaaaggaatagaaccggactcaaaaagtcaaattacaattgagtacaaagatggcttacccaatgctgtaaaatcagtagtaatctctacacaacattctaaagatgttaatctagcaaaagttaaagagctttgcattccatatattgagagatctattcccaaaagtttattaggaaatcttgatgaaaaagagatttatataaatcctacaggtaattttgtaattggcggaccagatggagatagtggattaacaggaagaaaaataattgttgatacttatggaggcgctgcacctcacggaggaggagccttttctggaaaagatcctacaaaagtagacagatctgcagcatatgcatcaagatatttagcaaaaaatgttgttgcctctaaagttgctgacaaatgtttaattcaactcgcatatgctattggagtatcgaaacctttatcgatctatgttgatctttttgataatgatgaagaaaaaaatagacatgtagaaaaattgataagtgaaaattttgatttaagccctagaggtataagggaaatgctgggattaataaacccatatatgagcaaac

SEQ ID NO: 243476 - DNA, 415 bp, Unknown
  Bacterial polypeptide expressing nucleotide sequence isolated from the Sargasso Sea
aatcgttgatacttatggtggtatggcaagacatggtggaggtgctttctctggtaaagatccatctaaagttgataggtctgctgcctatatggcaaggtatatcgcgaaaaatattgtagctactaagcttgcagataaatgtgaaatacaactctcttatgcaattggcgttgctgagccaacttcgatatctgtagatacctttggaacatcgaagattgagaattctaaaatatcctctgcagtaagtaaggtatttaatctcactccgaagggtattattgacacactagaccttctgaacgtaaaatatcaacctactgcggcttttggacatttcggaagagatgacaaaaattttacttgggaacaaaaggataaggttgatatactaatgaatgaactaggatag

SEQ ID NO: 243477 - DNA, 316 bp, Unknown
  Bacterial polypeptide expressing nucleotide sequence isolated from the Sargasso Sea
tttgggtagagacgattttatttttacttctgagtcagtttcggagggtcatccggataaaatttgtgatagaatttctgacgcaatactggatttttgtctagaaaaagataaattggctagagtggcatgcgagacattttctacaacaaatactgtcgttgtaggtggagaagttgggttttcaacaggcttagagtttaattctctaaagcctgaaatagatgaactcgtgagaaaagttgtaaaagaaattggttatgagcaaaagggatttcattggaaaaatttagagatttctaatttcatacatcag

SEQ ID NO: 243478 - DNA, 757 bp, Unknown
  Bacterial polypeptide expressing nucleotide sequence isolated from the Sargasso Sea
atgagtaatctaaaaaattatctttttactagcgagtcagtttcagaaggccatcccgataaagtttcagacagaatttcagatatggttgtagatagctatctttctaaagatccattttctagagttgcatgtgaaacacttactacaactaacaaggttgttctagctggtgaagttaggggaccagaaattaataaagatgaattaatagaaaaagtaagaaattgtattaaagacattggatatgaccaagaaggtttcacctggaaagatgctacaaatattgaatgtcatttacactctcaatcagcggatattgctatgggagtagactcatcaggtaacaaagatgaaggagctggtgatcaagggattatgtttggatatgcatgtaatgaaacagatgtattaatgcctgcacctatccattattcacataaaattcttaaattgatggcagaagatagaaaatctggaaaactaaaacatattgaacccgactcgaaaagtcaggttacttttgaatatgtgaatggaaaaccaaccaaagttaaatctgttgtgatttcttctcaacactcttcagatgtagatcaagtacaagtaagaaatttattaagaccatatatgcttaaatctataccagaaaatttactcgaaggttttgatgaaaatgagttttatgtcaatccaacaggaaattttgtaattggtggccctagatggagattgtggacttactggaagaaaaatt

SEQ ID NO: 243479 - DNA, 770 bp, Unknown
  Bacterial polypeptide expressing nucleotide sequence isolated from the Sargasso Sea
aactgatgttttaatgcctgcaccaatatattattcacataaaattttagagttaatggctttagatagaaaaaatggtaaggcagataaactagaacctgattctaaaagtcaagttactttaaaatatgaaaatgggacacctactaaagttacagcagttgtgatttcaacacaacattcatcagatgttgatcaagccacagtaaaaaaaattgttagaccttatttagaaaaagcaattccaacaaatttattatccggacttaaagatgaaaatttttatgttaatccaaccggacagtttataattggtggaccagatggagactctggtttgacaggaaggaaaattattgtagacacctatggtggtgcagcccgtcatggtggaggagctttttcaggcaaagatcccagtaaagtcgatagatcagcggcttatgcggccagatatgttgcaaaaaatgttgtcgcatctaaaattgcaaagaaatgtgaaattcaactttcttacgcgatcggagtttcaaaaccactgtcgatatacgttaatctttttgatggagatattgagaaagaaaaacatgttgaggatttaataaaaaataattttgatttaagtcctagaggtattagagaaatgcttaatttgaatagaccgatttacgaatgtacagcagcatatggtcattttggaaggaaaccaggatcagacggtactttttcatgggaaaaaatggataaaacctcaatttttaaaaagtaat

SEQ ID NO: 243480 - DNA, 337 bp, Unknown
  Bacterial polypeptide expressing nucleotide sequence isolated from the Sargasso Sea
gatgaagaaaaattttttatttactagtgagtcggtttcagaaggtcacccagataaagtttgtgacagaatatcagatatggtcgtagatagttatttaggggcagaacctcagtcaagagtagcctgcgaaacattaacaaccacaaataaagttgttttagctggagaggtaagaggaccagaaattaaaaaagatgatttaattcagaaagttagagaatgtattaaggatattggttatgatcaagatggttttagttgggaagatactactaagattgaaactcatttacacgctcagtcagcagatatagccatgggtgtagactcatct

SEQ ID NO: 243481 - DNA, 637 bp, Unknown
  Bacterial polypeptide expressing nucleotide sequence isolated from the Sargasso Sea
atgtctgaatataaattgtttacatctgaatcagtttcagaaggccatccggataaaatggctgaccaaatttctgatgcagttttagatgcgatgctaaaggatgatcccgactccagggttgcctgtgaaactcttgttaaagataatctagttgtacttgcaggtgaaattacaagtagatcagagcctgacttagaagcactaacaagaaaagtaatattagatataggctataacagtttggaagttggttgtgacggtaatacttgtgaagttgttaacgctattggaaaacagtctcaagacattgctcaaggtgtaaacgaaggggaaggtgaggatttagagcaaggtgcaggagatcaggggttaatgtttggttacgctacaaatgaaaccgaagtattaatgcctgctccaattacttattcccataggcttgttgaacaacaggcttttatcagaaaatcaggaaagctttcttggttaagaccagacgcaaagagccaagtaagctttgtgtatggtgaagatggcaaaccagaatctatatcggctgttgttctatcaactcaacatgattccgacgtttcacaaaaagacttaaaagaaaggtgtgatggaagaaaatagt

SEQ ID NO: 243482 - DNA, 751 bp, Unknown
  Bacterial polypeptide expressing nucleotide sequence isolated from the Sargasso Sea
tctgttttatctgccttgcatgagcaatctcaagatatcgctcaaggtgttaatgaaggtgaaggggcctttaaagaagctggcgctggagatcaaggaatgatgtttggttatgcatgtaaacaaactccagaattgatgccacttcctgttttgttgtcgcataaattaatgagagagttaactcgagttcgaaaaaataaggatattccttatttacgaccagatgcgaaagcacaagtaacgattgaatttagcgatgataatacacctcaacgtgttgatgccgttgttatttcgactcaacatgacccagatgtgtctttagaaacgattaaagaagatgtgattgaaaaggttattaagactgttatcccatctcagtatatcgatgaaaatacccgttattttattaatccaacgggtcgttttgtgattggtggtcctcatggagatgccggtttaacaggacgtaaaattattgtagatacatatggaggatggggtgcacatggtggaggcgcattctccggaaaagattcaacaaaggtggatcgatctggtgcatacatggcacgatatgttgctaaaaatattgtagctgctgatttagcagatgaggttgaagttcagctagcttatgcaataggtgttgctgaacctgtttctgttagaataacgacaagtggaacagggaaggtttcggatgaagcattagtaaaacttgtacgagataattttgatttaactc

SEQ ID NO: 243483 - DNA, 433 bp, Unknown
  Bacterial polypeptide expressing nucleotide sequence isolated from the Sargasso Sea
ggtagaaagattatcgttgatacatacggtggtgctgcacctcatggaggaggagcgttctctggcaaagatccatctaaagttgatagatcagcagcttatgcatcaagatatttagctaaaaatattgttgcagctaaccttgctgatgaatgtacaattcagctatcttatgcaattggcgtttcaaaacctttatctgtttacgtaaatacgaatggaacaaataaagttgatgagcaaaaaattgaaaaatcagttcaggatttatttgatttaagtccaagaggaataagagagcatttaaaacttacaaatgctatttatgttccaacttcagcttatggtcattttggaagagaaccaactgatcaaggtcattttacttgggagaaaactgatttagtcgactctttaaaaagtttaatttaaa

SEQ ID NO: 243484 - DNA, 623 bp, Unknown
  Bacterial polypeptide expressing nucleotide sequence isolated from the Sargasso Sea
tttagagcaaggtgccggagaccaaagcttaatgtttggctatgcaacaaatgaaacagaggtattaatgccagctccaattacttactctcatatacttgttgaacaacaagcctttattagaaaaagtaataaattatcgtggctaagaccagatgctaaaagccaagtaagtttcgtttacagggaggatggcaaacctcaatctatttctgctgtcgtattatccactcaacacgatcctgatatctctcaagaagatctaaaggaaggtgttatggaagaaattatcaaacctattcttccttccaattggttaaataaagatacaaaatatttcataaatccgacaggaaggtttgaagtaggtggcccagtcggagactgcagactcactggaagaaaaatcatcgttgatacctacggtggtatggccagacatggaggaggagctttttcaggaaaggatccttctaaagtagatagatctgctgcttatgccggaagatacataacacaaaatattgtatctgctggattatctgatagatgtgagattcaagtatcctatgcaatcggcgttgccgaacctacctcaataagtgttaatacatttggaacat

SEQ ID NO: 243485 - DNA, 449 bp, Unknown
  Bacterial polypeptide expressing nucleotide sequence isolated from the Sargasso Sea
aatgagtaatttaaaaaattatcttttcactagcgagtccgtatctgaaggacacccagataaagtttctgatagaatatctgatatggttgttgatacttatatttctggagatccatattccagagtagcttgtgaaacattaaccacgaccaataaagttgttttggcaggtgaagtaaggggacctgaaataaaaaaagatgaattaattgaaaaagttagaggctgtattaaagatattggttacgaccaagatggctttacttggaaagaagcaactaaaattgaaagtcatttacattctcaatctactgatattgctatgggagttgactcttcaggtaataaagatgagggagctggagatcagggcatcatgttcggttatgcgtgtagtgaaactgaagaattaatgccagcgcctatacattattctcataaaattt

SEQ ID NO: 243486 - DNA, 877 bp, Unknown
  Bacterial polypeptide expressing nucleotide sequence isolated from the Sargasso Sea
tatcttcatgctcaatcagcagacatagcaatgggtgttgattcgtctggaaataaagatgagggagctggggatcagggtattatgtttggttatgcatgtaatgaaactgatgttttgatgcctgcacctatacattactcacacaagattttaagattgatggccgcggatagaaaatctggaaaattaaaaaatattgagccagattctaaaagtcagataaccattgaatataaagatggcaaaccagcaaacgtaaaatctgtagttatatctactcaacattcagcagatgttgatcagacccaggttagaaaattagtaatgccatatattgagaaatccataccaaaaaatcttcttagtaagttagatgaaaaagaaatctacattaatccaacaggaaattttgttattggtggaccagatggagatagtggtttaacaggtagaaaaattattgttgatacatacggaggtgccgcaccgcacggaggtggagccttttcaggaaaagatccaacaaaagttgatcgatcagcagcctatgcttccagatatttagcaaaaaatgttgttgcttcaaaaattgctgacaagtgtttaatacaacttgcttatgctattggagtatcaaaacctttatctatttatgttgatttattcgacaatgatgaggaaaaaaacaaacatgtggaaaaattgataagtgaaaattttgatttgagccccagaggtataagagaaatgttaggattgaataaaccaatttatgaaaaatcagctgcctatggtcattttggaagagaaccagaaggagatggttctttttcttgggaaaaaactgataaaaagttagtattttcaaagtaaa

SEQ ID NO: 243487 - DNA, 938 bp, Unknown
  Bacterial polypeptide expressing nucleotide sequence isolated from the Sargasso Sea
agaggttgtataaaagatattggatatgatcaggaaggttttacctataaggaagcaactaaaatagaatgccatttacactctcaatctgctgatatagctatgggagttgactcatcaggaaataaagatgaaggcgctggagatcaaggaatcatgtttggatatgcatgcaacgaaaccgatgtactcatgccggccccaattcatttttcacatagaatcttaagacttatggctgaagatagaaaatctggaaagttaaaaggaatagagccagactcaaaaagccaaattactattgaatataaagatggcaaaccaaaagctgtaaaatcagttgtgatttctacacaacattcaaaagacgtgaatttagcaaaagtaaaagaactttgtattccgtatattgaaagatctattcctaaaaatttgctagggaacttagatgaaaatgaaatttatattaatccaacagggaattttgtaataggtggaccagatggcgatagtggtttaactgggagaaaaattattgtagacacgtacggaggtgcagcaccccatggcggtggagctttttcaggtaaagatccaaccaaagttgatagatctgcggcttatgcatctagatatttagcaaaaaatattgtggcatcaaaaattgcagataaatgtttgattcaattagcatatgcaataggagtatcaaaacctttatctatttatgtggacttgttcagtaacgatgaagaaaaaaatctacacgtggaaaaacttataaaagaaaattttgatcttagcccacgaggaattagagaaatgctaggattaaataaaccaatatacgaaaaatcagctgcctatggacattttggaagagatccaggcagtgatggatcatttttctgggaaaaaactgataaagcatcagtatt

SEQ ID NO: 243488 - DNA, 811 bp, Unknown
  Bacterial polypeptide expressing nucleotide sequence isolated from the Sargasso Sea
gcaggggatcaaggaattatgtttggttatgcatgcaatgaaactgatgtacttatgccagctccaattcacttttcgcacagaatattaagacttatggctgaagatagaaaatctggaaagcttaaaggaatcgaaccagactcaaaaagtcaaattactattgaatacaaagatggtaagccaaaagctgtaaaatcagtcgtgatttctacacaacattcaaaagacgtgaatttagcgcaagtaaaagatctttgtatgccttatattgaaagatctatcccgaaaaacttactcgggagtcttgatgaaaatgaaatatatattaatcccacaggaaattttgtaattggtggtccagatggggacagtggtttgactggaagaaaaataattgttgatacatatggtggtgcggcacctcacggcgggggagctttttcaggcaaagatccaaccaaagttgataggtctgcagcatacgcttctagatacttagcaaaaaatattgtggcatcaaaaattgcagataaatgtttgatacagttagcttacgcaataggagtatcaaaacccttgtctatttatgtggacttattcagcaacgatgaagaaaaaaatctgcatgttgagaaacttataaaagaaaattttgatctaagtccaagaggaattagagaaatgttaggattaaataaaccaatatatgaaaaatctgctgcctatggacattttggtagggaaccaggcagtgatggatcattttcgtgggaaaaaactgacaaagcatcggtatttcagaagtaaa

SEQ ID NO: 243489 - DNA, 508 bp, Unknown
  Bacterial polypeptide expressing nucleotide sequence isolated from the Sargasso Sea
gatgaacaaagatactaacgttttcatcaaccctacagggcaattcattatcggcggcccggttggagactgcggcctcacaggaagaaaaataattgtggatacatatggtggaatggccagacatggaggaggagccttttctggcaaagacccttcaaaagttgatagatcagcggcttacgctggtaggtatgttgccaaaaatatagtctcggcaggtcttgcagataaatgtgaactgcaagtcagctatgcaattggggttgctgaacctacctctatcagcgttgagaccttcggcactggcaaaatagctgatgaaaaaataatcgatttaatccgagaaaacttcgatctcagaccaaaagggctaatagcgatgctcgagctgaagaagcccatctataagaaaacagcagcttatggccattttgggagaatcgaagacgaattttcttgggaaaaaacagataagaaagaagccttggcttctgcgctgccataa

SEQ ID NO: 243490 - DNA, 607 bp, Unknown
  Bacterial polypeptide expressing nucleotide sequence isolated from the Sargasso Sea
agtaatatcttcacagcattcaccagatgtaaaccaaagtgatgtgaaagagctattaagaccgtatatgttaaaatctattccaaaagaatttatggaagaatttaaagaggatgaattttatgttaacccaacaggaaattttgttattggaggaccagatggggattgtggtctcacagggagaaaaatcattgttgatacttacggaggcgctgcaccacatggaggtggcgctttttctggaaaagatccaactaaagtagataggtcagctgcatatgctgcaagatatattgcaaaaaatgttgtagcgtccaaaattactgagaaatgtttaattcaattagcttatgctattggagtatcaaaaccattgtcaatttatgttgatctttttgatagtgatttggataaaaacaaattcgttgtagataaaattaaagaaaatttcgatttaagcccgagaggtataagagagatgttaggattaaataaacccatatatgaaaaaacggcatgttatggtcattttggaagagttccagaaaaagatggtgctttttcttgggaaaatacagataaaacagaggtttttttaaaatag

SEQ ID NO: 243491 - DNA, 431 bp, Unknown
  Bacterial polypeptide expressing nucleotide sequence isolated from the Sargasso Sea
ttcaaaagcaaaagttgactatataaaactagtcaggaatgttattaaagaaattggatatgaaggctacaaagcaggtggctttgacgcaaatagttgtgccgttttagtagcccttgatgagcaatcgcccgatatttcacaaggagtaaacgaagcagatgatattaacgatgatttggaaaacaatacaggagctggtgatcaaggaataatgtttggttatgcatgcgatgaaacgcctgaattgatgccattaccaattagcttggcgcatagattagccattcaacttgccaaagtaagacatgaaaaagtccttaactatttattacctgatggtaagactcaagtaagcattgattacgaaaagggggttccagtttcaataaataccatcttaatttcaactcaacataatcctgaaattt

SEQ ID NO: 243492 - DNA, 824 bp, Unknown
  Bacterial polypeptide expressing nucleotide sequence isolated from the Sargasso Sea
tatgattcacctacacgagcaatcaccagatattgcaagaggagttgacgctattggtgataattctgaaggtgcaggcgatcaaggaattatgtttggttatgcttgcaatgaaacaaaagaattaatgccggcgacattatcattttcacataaaattctcaaagacctagcagataaaagaaaaagtaatataattactggaatacttccagactcaaaatctcaattaactctcttctatgaaaatgataaaccaaaatatattgattcaattgttgtttcctcccagcatactgaagaaacaactcaggaatatttgtatgaagaaattaataaattatgtaaaaatatcctaccgaatgaatggtatacagctgacacaaaacttttagttaatcctacaggtaattttgttataggtggtcctgtaggagatacaggtttgacaggaagaaaaattattgtcgatacttatgggggagcatctcctcatggaggaggagcgttttctggaaaagatccaacaaaggttgatcgatcggctgcatatgccgcaagatatttgtccaaaaacatagtccatgcaggtatttctgaaagatgtacgattcaattatcatatgctattggaatttctgaaccattatcaatttttgttgatttacatggtaataatagagttgactctaatagagtagaaaaattcattaaggatcgatttgatttatcaccaagaggaattatagacatgcttggtttatgtaatccaattttttctgaaacttcgtcttacggacattttggaagagaccaaacgacaa

SEQ ID NO: 243493 - DNA, 544 bp, Unknown
  Bacterial polypeptide expressing nucleotide sequence isolated from the Sargasso Sea
atgcaaaatagaaaatatttatttacaagtgaatcggtttcagaaggtcatcctgacaaagtttgtgacagaatatctgatatggtagttgactcatatttgtcaaaagatcctgtttcaagagtagcttgtgaaactttaactacaactaataaagtagttatagctggagagacacgaggtccaataattgaaaaagatgaattaatatctaaagtcagagaatgtattaaagacataggttatgatcaagatggttttagttggaagaccgcaaatattgagatactgcttcatgaacaatcagaagatatagcaatgggagtagactcaaaagataataaagatgaaggtgcaggagatcaaggtattatgtttggatatgcttgcaatgaaactcaagagttaatgcctgctccaatttattattctcataaaatattaagacttatggctgaagatagaaaaagcggaaatttaaagggaatagagcctgattctaaaagtcaggttactatgctttatgaaaacgaaaaaccggtta

SEQ ID NO: 243494 - DNA, 433 bp, Unknown
  Bacterial polypeptide expressing nucleotide sequence isolated from the Sargasso Sea
aatgtctgaatcaaactatttatttactagtgagtctgtgtctgagggtcatccggacaaggtttgtgatttaatatcagactctattgttgatcggtatttgagtgaagacccgcaggctcgggttgcggttgaaacaatggctaccacagatctagttatgattgctggagaaacccgtgggcccgagataagcccagacgaaattgagcgcgttgcgaggcaggctgtgagggatattggctacgagcagaagggcttccactggcgggattcaagcgtacaagttcgtcttcacagccagtctgccgatatcgctgttggagtagatgctattggaaacaaggacgagggtgctggcgaccagggaatgatgtttggttacgcttgtcgggaaacagaggcattaatgccggctccaatttttttcagc

SEQ ID NO: 243495 - DNA, 901 bp, Unknown
  Bacterial polypeptide expressing nucleotide sequence isolated from the Sargasso Sea
gcagttttagataacctctttcaacaagatccggaatcacatgttgcctgtgaaacattggccacgactgggactgtggttgtttcaggagaagttagatctaatggtgatgtagatgttgaaaagatagtaaaaaatactttaggtgagataggatatacaaataaagcctatggtatggataataacgaagttaaagttatatctatgctggatgaacaaagtccggaaattgcacaaggtgttgatgaagggtcaggattgcatgaagaacaaggtgctggagatcagggtttaatgtttggatttgcttgcgatgagacaaaagaattaatgcctctaccaatacatttatctcaccgtttagtagaacgtatgactgatctacgaaaagatggtacgataccatggttaaggccagatagtaaatcgcaagtatcagtagcttatgaggaagatagacctgtatcaataacaaaggttgttattgcaactcaacatgatgatatgattgaaaaatttggcaatgaggatgcagaacatgattttgttgaagaagaaattattcacaatgtaattaaacctgttttagatgcatcgggtcttccatatagtgagtcgtttattgttaacggtacgggtcggtttgtgtttggtggacccgaagcagatacaggattaacgggaaggaaaataatcgttgatacatatggtggatatgcacctcacggggggggagctttttcaggaaaagacccatcaaaagtagatcgttctgcagcatatatggcaagatatattgcaaaaaatatcgtagctgctggtgtagcgactaaatgtgaggttcaactatcgtatagtattggagttgctgaaccgacttcattttatgtaaaatctt

SEQ ID NO: 243496 - DNA, 790 bp, Unknown
  Bacterial polypeptide expressing nucleotide sequence isolated from the Sargasso Sea
atggcatctaaaaattatttatttacaagtgagtcggtatctgagggtcacccagacaaagtttgtgatcgaatttctgacatggttgtagacacatatttgggtaaagatcctttttcaagagttgcttgcgaaactctaacaactacgaataaagttgttctagcaggagaaaccagaggaccggaaattaaaaaagataatttgattgaaaaagtaagatcatgcatcaaagatatcggctatgaacaaaaaggttttcattggaaaaattgtagtatagatgttcatttgcattcccaatcctctgacatagctatgggtgtagactcaaaaggaaataaagatgaaggagctggtgatcaaggaataatgtttgggtatgcgtgtaatgaaactgaagttttaatgcctgcacctatttattattcacataaaattctggaattaatggctgcggatagaaaaaatggaaaagctgataaattagaacctgactcaaaaagtcaagttacactaatgtatgaaaatggaaaaccaattaaagttacttctgtagttatttcaacacaacactccccagaagtaaatcaatcgcaggttaaagaaattgtaagaccatatttagaaaaatcaattcccagagaattattatcaggtttaaaagaagatgaattttatgtaaatccaactggacaatttattattggtggtcctgatggagactctggtttaactggacgaaaaattatagttgatacatatggtggagctgctccacacggcggag

SEQ ID NO: 243497 - DNA, 686 bp, Unknown
  Bacterial polypeptide expressing nucleotide sequence isolated from the Sargasso Sea
tttagagcctgattctaaagtcaaagtaacaatgctttatgagaatggtaaaccttctaaagttacttcattagttatttcttctcaacataaggagggtttatcacctgctgatgttaaagaaatagttaagccatatgtttatgaatgcatacctaatgaattgcttgaaggacttaaagatgaagaattttatgtaaatccaactggaaactttgtaattggaggccctgatggtgattctggtctaacaggtagaaaaattattgtagacacgtatggtggtgcagcgcctcacggaggaggagctttttcaggtaaagatccatctaaagttgatagatccgcagcttatgcagccagatatctagcaaaaaatattgttgcagcagatttagctgatcaatgtacaatacaattgtcttatgcgattggtgtttctaaaccactctcagtttatataaatacaaatggtacaaataaagtagatgagcataaaattgaaaaatctgttcaagatttatttgatcttagcccaagaggaataagagaacatctaaaacttactaatgctatttatgttccaacatcatcttatggccattttggcagagaacctagtgatcaaggtcattttacatgggaaaaaactgatttagttgatgcgcttaaaggaattgcataac

SEQ ID NO: 243498 - DNA, 526 bp, Unknown
  Bacterial polypeptide expressing nucleotide sequence isolated from the Sargasso Sea
ccaaaaaatctccttggaaaacttgaagagaatgaaatttatataaatcccacaggtaattttgtaatagggggccctgatggtgatagtggattgactggtagaaaaataattgttgatacttatggcggggctgctccgcatggaggaggagctttttctggaaaagatcctactaaagtagataggtcagccgcatatgcttcaagatatctggcgaaaaatattgttgcttccaaaatagcagacaaatgtctaatccaacttgcttatgctataggagtttctaaaccactttctatatacgttgaccttttttccaataatgaggaaaaaaataaacatgtagaaaaacttatcaaagataactttgatttaagtcctaggggtataagagaaatgcttgggctaaataagcctatttatgaaaaatcagcagcttacggacatttcggtagagacccagagtcaaatggtgctttttcatgggaaaaaacagataaaagtgccattttttcgaagtaat

SEQ ID NO: 243499 - DNA, 520 bp, Unknown
  Bacterial polypeptide expressing nucleotide sequence isolated from the Sargasso Sea
attattaagcgatcttaaagattctgaaatttatattaatcccacaggtcagtttatcattggaggtcctgacggggatactggtctgaccggcagaaaaataattgttgatacttatggtggagccgctccacatggcggaggcgcattttcaggcaaagatccaacaaaagttgatcgttcagctgcttacgtttcaaggtatttagcaaaaaatattgtagcatctggcttaacagacaaatgtttaattcaattgtcttatgctataggagtttctaaaccactctctacatatgtaaaattgggagacaacgatcaagataaaacatctaaagttgagaaaattattaaagaaaattttgatttatctccgagaggaattagagaattactcaatctaaataagccaatatatgagattacatcatcctatggccactttggaaggaaaccaacgaataaaggtgaattttcatgggaaaaaactgataaaacgtcgctttttaaaacggtgtaa

SEQ ID NO: 243500 - DNA, 331 bp, Unknown
  Bacterial polypeptide expressing nucleotide sequence isolated from the Sargasso Sea
aatgaaaaaagattatttgtttacaagtgagtcagtttccgaaggtcatccagataaagtatgtgatagaatttcagatatggtagttgatacttatttaggtttagaacctgaatcaagagtagcctgtgaaactttaacaactacaaacaaggttgtattggcaggtgaaactagaggacctgaaattaagaaagatgaattaatatcaaaagttagagattgtattaaagatattggttatgatcaagagggctttacttacaaggaagcaactaaaattgaatgtcatttacactctcaatcagccgatatagcaatggggagttga

SEQ ID NO: 243501 - DNA, 895 bp, Unknown
  Bacterial polypeptide expressing nucleotide sequence isolated from the Sargasso Sea
gatggctgatcaaatctcagatgcaatacttgatgcaattcttgagcaagataaaggttgtagagttgctgtagaaacactcgtcaaaactggactggttgttctaggtggcgaaataacaacttctgctgatgtggattatgaagcaatcgcaagacgaaccattaaaagaattggttacgacaaagaagagttagggtttgatgatcagtcgtgcgaggttctagtaaagatcagcaaacaatctccggatattgcaatgggcgtggatcgcgctgatgaaaaagaacaaggtgcaggagaccagggcttaatgtttggttatgcgaccaatgaaacaaaacaattgatgccagcaaccatacaattgtcgcatcaattggtaaaaagacatgccgatgtcagaagaagcggtgagctcagctggctgagaccggatgcaaaaagtcaggtaacaattctattcgatgacggtaaaccgaaatcaatcgatactgtggttctatcgacacaacatgacgaggatgtctcgatggatgaaatccaagcaggtgtgatggaacacatcattaaaccaatacttcctgaagaacttttgactgaaaccacccaataccttattaatccaactggtaattttatcattggcggtcccgtaggagactgcggcctgaccggtagaaaaataattgtggatacttatggcggtatggcgagacacggtggaggtgcattctctggaaaagatccctcaaaggttgaccgatctgcagcatatgctgccaggtatgttgccaaaaatattgttgccgctggattagccgataggtgtgaaatacaggtctcttatgcaataggtgtagcgaaaccaacctcagtcagggtaaaaacattt

SEQ ID NO: 243502 - DNA, 353 bp, Unknown
  Bacterial polypeptide expressing nucleotide sequence isolated from the Sargasso Sea
aaaagtagaccgctcagcggcatatatgtcaagatacatagcaaagaatgttgtggctgctgacttagctgaaagatgtgaggttcaattatcatatggtataggcgtggcaaagccaacatccttttatgttaaatcatatggaacagggagattacctgatgaggagcttacaaaaatatgcgccgatatttttcctcttagaccaggagaaattgtcaaacacctagaccttaaaaagccaagatattatgtaacatcttcttatggacattttggccgaaatggtaacaattttacgtgggaattaactgatttagctgaaaaattaagtttagttgcaaaaatttaaa

SEQ ID NO: 243503 - DNA, 862 bp, Unknown
  Bacterial polypeptide expressing nucleotide sequence isolated from the Sargasso Sea
agggattgaagcattagtaacatctaatcttgttttactggcaggtgaaactagccttataaattttcgtgaaaaaatcgatcttgaagatcttgtaagaaattgcattcgtgagattggatatgaagatgaaaattttcattgggaaaagattgaaatcattgataaaattcatgggcagtctggagatattgcccaaggagtcgtggagacagaaaacaaaaatcagggagctggtgatcaaggtattatgtttggttatgcgaccgatgagactgatagctatatgcccgcacccctttattttgcacatcaaattttatcaaaaatatctattgaaagaaaagcgggtaatttgccagaacttggacccgatgcaaaaagtcaggtaaccatgttgtatgaaaatgattaccctctatatgcagataaaattatcgtatcgaaccaacataatgaatccgcagaaaatagccatgtgagagacatacttgtggacgttattttaaccgctttaccggaaggatggataaaaaataataaggatctaataattaatccaacaggcagatttgttattggcggaccggatggtgatgctggactaaccggaagaaaaatcattgttgatacctatggcggggccgcccctcatggtggtggtgcattctcaggaaaagatccatcaaaagttgacagatcagccgcttatatggccagatatattgctaaaaatattgtgcacgcaaaaatagctaagaaatgccaaattcaaatatcttacgctataggcctctcctaccctatgtcattttatttgaaactggataatagtgctaatatagatacaaaaaaactgtct

SEQ ID NO: 243504 - DNA, 413 bp, Unknown
  Bacterial polypeptide expressing nucleotide sequence isolated from the Sargasso Sea
aatgagtaaattaaaaaattatcttttcacaagcgagtctgtttctgaaggtcatccagataaagtatctgacaggatttcagatatggttgttgatagttttatttctggagatccatactctagagttgcttgcgaaacactaaccacaacaaataaagttgttttagctggagaagtaagagggcctgaaataaaaaaagatgaattaattgaaaaagtaagaaattgtataaaagatattggctatgaccaagaaggctttacctggaaagaagctacaaaaattgaaagccatttacattctcaatcagctgatattgctatgggtgtagattcttctggtaacaaagatgaaggagctggagatcaaggtattatgtttggatacgcatgtaatgaaacagatgttt

SEQ ID NO: 243505 - DNA, 757 bp, Unknown
  Bacterial polypeptide expressing nucleotide sequence isolated from the Sargasso Sea
aatgagtaatcttaaaaactatttatttactagtgaatcagtttcagaaggacatcctgataaagtatcagatagaatttcagatatggttgttgatagttatctttcaaacgatcccttttctagagtcgcatgtgaaactttaacaactacaaacaaagtagttcttgctggtgaggttagagggcctgaaattagtaaagatgaaataatacataaagtaagaaattgtataaaggatattggttatgatcaggagggctttacttggagggacgcaacaaaaattgaatgtcatttacatgcgcaatcagttgatatcgctatgggtgtagactcatctggaaataaagacgaaggcgctggtgatcaaggaattatgtttggatatgcatgtaatgagactgatatattgatgcctgctccgatacactattctcataaaattttaagacttatggcagaagatagaaaatcaggaaaattaaaaaatattgaacctgactcaaaaagtcaggttacttttgaatatattgatggaaagccaactagagtaaagtcacttgtaatatcatctcagcatgcatcagatgtgaatcaagcacaagttagagatttacttagaccttacatgttaaaatctatacctaaacattttcttcagggatttgatgagaatgaattttatgtaaacccaacaggcaatttcgttatcggaggcccggatggtgattgtggattaactggaagaaaaata

SEQ ID NO: 243506 - DNA, 484 bp, Unknown
  Bacterial polypeptide expressing nucleotide sequence isolated from the Sargasso Sea
atcgaaccagattcaaaaagccaagttacattcgaatatgttgatggtaaaccaattaaagtaaaatctgttgttatatcatctcaacattcatccgatgtaaatcaagcccaggtaagagatttattaagaccatatatgttaaaatcaattccagaaaaatttcttaaagactttaatgaggaagagttttatgtaaacccaactggtaatttagtaataggtggtccagatggggattgcggtttaacaggaagaaaaattattgtagatacctatggtggagcagcaccccatggaggaggagcattttcaggtaaggatcctacaaaagtagatagatctgctgcttatgcagcaagatatattgcaaaaaatgttgttgcttcaaaaatagcagacaaatgtttgatacaattagcttatgcaataggagtttcaaaacctttgtcaatttatgttgatttgtttgatgatgatttag

SEQ ID NO: 243507 - DNA, 835 bp, Unknown
  Bacterial polypeptide expressing nucleotide sequence isolated from the Sargasso Sea
tgtattaaggaaattggctatgaccaacaaggttttagttggaaaactgcaaatatagaaactcatttacacgctcaatcagctgacatagcaatgggagtagactccaaaggaaataaagatgagggagcaggagaccaaggaattatgtttggatatgcttgcaaagaaacggaagagttcatgcctgcaccaattcatttttcccataaaattttaagacttatggccgaagatagaaaaaaaggatctttaaaaggtattgagccagactcaaaaagccaggttaccatgctctatgaagaaaaaaaacctataaaagttaagtctgtagttatatcaactcaacactcaaaagatttaaatcaggatgatgtaaaaaatttagttataccgtacataaaaaagtctattccagacaaatatttgcaagatctcaagaataacgaaatttatattaatccgacaggtcaatttataattggaggtcctgatggagatactggtcttacagggagaaaaattattgtagatacctatggcggagctgcacctcatggtggaggggcattttctggaaaagatcctactaaagtcgatagatccgccgcttatgcttcaagatatttggcaaaaaatattgtagccgctggtatttcacagaggtgtttgatccaactttcatatgcaattggagtgtctaaaccattatcagtatttattaaactagatgagggaaaagagtcaaaaattgaaaaaataaaaaatattatagataaaaactttgatctatctccaagaggcatacggcaaatgttaaaattaaataatccta

SEQ ID NO: 243508 - DNA, 451 bp, Unknown
  Bacterial polypeptide expressing nucleotide sequence isolated from the Sargasso Sea
actgggaagaaaaattattgtagatacctatggtggtgcttcacctcatggaggaggagctttctcaggtaaagacccaacaaaagttgatagatcagctgcttatttaacaagatatttagctaaaaacgttgttgcctctggcttggcgtcaagatgtacaatacagattgcatatgcaataggagtatctaaacctctttcattatatgttaacactgacggtactggaaagattaacgataataggattgaaaaaattcttactaacttggttgacatgtctccaagaggtgttcgagaacatttaaaactaaataaacctatatatgtgcctacatctgcctatggacattttggtagggatccaaatgaaggtgttgaaggttcatttacttgggaaaaaactgatcttgttgaccttattcttgatgaactaaacaaaagttga

SEQ ID NO: 243509 - DNA, 429 bp, Unknown
  Bacterial polypeptide expressing nucleotide sequence isolated from the Sargasso Sea
tggaagaaaaaattattgttgatacttatgggggagctgcgccacatggcggaggagctttttctggaaaagatcctagcaaagtagatagatctgcagcttatgctgcaagatatgtagcaaaaaacgttgttgcttcaaaaattgctgacaaatgtttaattcaacttgcatatgcaattggtgtttctaaacctttatctatttatgttgatttgtttgatggggatgaggaaaaatctaagcacgtcgaaaaattaataaatgataattttgatttaagccctagaggaattagagaaatgttgtctttaaataaacctatatatgaatgcacatcagcgtacgggcattttggaagaaaacctggatcaaaaggtgaattttcatgggaaaaaactgacaaaattgctgtttttaccaagtaat

SEQ ID NO: 243510 - DNA, 405 bp, Unknown
  Bacterial polypeptide expressing nucleotide sequence isolated from the Sargasso Sea
tatgacgtctaaaaattatttattcactagcgagtcagtatcggaaggccacccagataaagtttgtgatagaatatcagatatggttgttgactcttatttaaaaaaagatccagtttccagagtagcttgtgagactttaacaactacaaataaagtagttttagctggcgaaacaagaggtcctaaaatcagtaaagacgaacttatatcaaaggtgagagagtgcataaaagatataggttacgatcaagaaggttttagttggaagactgcaaaaatagatacttttttacatgagcaatctaaagatattgctatgggtgtagattctaaagataacaaagatgaaggtgcatgcgatcaaggaataatgtttggttatgcttgtaatgaaaccgagga

SEQ ID NO: 243511 - DNA, 961 bp, Unknown
  Bacterial polypeptide expressing nucleotide sequence isolated from the Sargasso Sea
ccatattcaagagttgcatgtgaaactttaacaactactaataaagttgtattagctggagaagtaagaggacctgaaattaaaaaagaagatttaattgagaaagtaagaaactgcataaaagatattggttatgatcaagaaggttttacctggaaagaagcaacaaaaattgaaagtcatttacattctcagtctactgatattgccatgggagtagattcatctggaaataaagatgagggagctggggaccaaggtattatgtttggttatgcttgtaatgaaactgacgtattgatgccagcaccaattcattactctcataaaattttaagattgatggctgaggatagaaaaaaaggaaaattaaaaaatattgaaccggactcaaaaagtcaggtgacatttgagtataaagatggcaagccatctaaagttaaatcagtagttatatcctctcaacattcagctgaggttaatcaaacacaagttagagaattattaagaccatatatattaaagtctatacctgaaaaatttcttgaagattttgatgacaaggaattttatgtaaatccaacgggtaactttgtaataggtggtcctgatggagactgcggtttaactggtagaaaaataatagttgatacatatggtggtgcagcacctcatggtgggggtgctttttcaggaaaagatcctacaaaagttgatcgatcagctgcttacgcagctagatatattgctaaaaatatagttggctctaaaatttctgaaaaatgcttaattcaattagcgtatgctattggtgtttctaaaccattatcaatatatgtggatttatttgataatgatttggataaaaataaatttgtagtagaaaaaattaatgaaaattttgatttaagtccaagaggaatcagagaaatgctcaatttaaataatcctatatacgaaa

SEQ ID NO: 243512 - DNA, 262 bp, Unknown
  Bacterial polypeptide expressing nucleotide sequence isolated from the Sargasso Sea
aatggcaaataatagttatctatttacaagtgagtcagtttcagagggtcatcctgataaagtatgtgatagaatttctgatatggtcgtcgactcttatctctcaaaagatccagtatcgagagttgcttgcgagacactaactacaactaataaagtagtattagcaggagaaactagaggccctagtataaataaagaagatctaataaataaagttagagactgcattaaagatattggttatgaccaaaaaggcttt

SEQ ID NO: 243513 - DNA, 444 bp, Unknown
  Bacterial polypeptide expressing nucleotide sequence isolated from the Sargasso Sea
tgaagattttaatgaggacgaattttatgtgaatccaactggtaattttgtaatcggtgggcctgatggagattgtggacttacaggaagaaaaattatagttgacacttatggtggagcagcaccacatggaggaggagcattttcaggaaaagatccgacaaaagttgatagatcagctgcttatgctgccaggtatattgcaaaaaatattgtgggatcaaaagttgcagataaatgtttaattcaattagcatatgcaattggagtgtcaaaaccattatcaatctatgtagatttgtttgataaagatttagataaaaataaatttgttttagaaaaaattaatgaaaattttgatttgagcccaagagggattagagaaatgctgaatttaaataaaccaatttatgaaaaaacagcagcctatggccattttggaag

SEQ ID NO: 243514 - DNA, 340 bp, Unknown
  Bacterial polypeptide expressing nucleotide sequence isolated from the Sargasso Sea
gatcgctcagcagcttatgcagcaagatatgtagctaaaaatttggtagcagccggtgtcgctgaaaaatgtgagattcaaatttcatatgctattggggttgcaaagccgacatcgataagtgtggatacatttggtacaagtgccagtagtgaagaaaaaattgttaaaataataaatgatgtatttgacttaacaccctggggtataatatctatgttaaatctcttaaaccccttatatagacctactgctgcatatggtcattttggaagagatgatattgatttaccttgggaaaaaacagataaaattgaggctattaaaagcttactctagt

SEQ ID NO: 243515 - DNA, 304 bp, Unknown
  Bacterial polypeptide expressing nucleotide sequence isolated from the Sargasso Sea
aatggttgttgcttcaaagattgcagataaatgtttaattcagttagcatatgcgattggagtttcaaaacctttatcaatatacgttgatttgtttgataatgacgaagaaaaaaatagacatgtagaaaaactaataaacgaaaactttgacttaagtccaagaggaattagagaaatgctaggtcttaataaggccatttatcaaaaaacggcagcctacggtcatttcggaagagaagctgaaaatgatggatcattttcatgggaaaaaacagataaatcaaaggtttttaacaagtaa

SEQ ID NO: 243516 - DNA, 256 bp, Unknown
  Bacterial polypeptide expressing nucleotide sequence isolated from the Sargasso Sea
atgagtaaaaaatcatatttatttacaagcgagtctgtttcagaaggacatccagataaagtatgtgatcgaatatcagatatggtggtagacacctatttatctaaagaacccctagcaagagtggcttgtgaaactttaacaactacgaataaagttgttttagctggagaaacaagaggacctgaaattaaaaaaaatgatctaatagaaaaagttcgtggatgtatcaaagacataggatatgaacagaaag

SEQ ID NO: 243517 - DNA, 643 bp, Unknown
  Bacterial polypeptide expressing nucleotide sequence isolated from the Sargasso Sea
catgtatccaatccgaatcgatactatcgttgtctccacgcaacacgcgccccatgtatccaatgaagaaattcaaacatacatcattgagaagatcattaaacccgaacttcctgatgacctagacaccagtgatatcacataccatatcaacccgactggacgatttgttgttggtggcccacacggggacgctggcttaacgggtcgaaaaatcattgttgatacctacggtggttggggacgccatggcggcggagctttttccggaaaagaccccacgaaagttgaccgcagcgcagcttacatggcccgttacgttgcaaaaaatattgttgcagcaggacttgcagaccgatgcgaagtgcaacttgcatacgcaatcggcgtgacagaacctgtcagcgttcacattgataccgccggaagtggaaaagttgacgacgagcgactatgttcactcgttcgggaacatttcccacttacacctcgtggcattattgaacacctcgacctccgaagaccgatctttcgtcgaactgctgccggcggacatttcggacgagacgaattcccgtgggaaaaaactgacaaagcaaatgccttggcagaagctgcgtctacaacagctgttgcaaactaa

SEQ ID NO: 243518 - DNA, 253 bp, Unknown
  Bacterial polypeptide expressing nucleotide sequence isolated from the Sargasso Sea
accacccgaattaatgccactaccgatcgctttgtcacatcgcatattgaatcgtttagcagacgcacgccttcaagcagatgtcgattggctccggcctgactcgaaaagccaggtgaccgttgagtacgacggtgataaaccaatccgaatcgatactatcgttgtctccacgcaacacgcgccccatgtatccaatccgaatcgatactatcgttgtctccacgcaacacgcgccccatgtatccaatga

SEQ ID NO: 243519 - DNA, 649 bp, Unknown
  Bacterial polypeptide expressing nucleotide sequence isolated from the Sargasso Sea
catagagtataaagatggtaaacctgctcatgtaaaatcagttgtcatttcaacccaacactcagcagatgtaaatcaatcacaagtaagagaattagttaaaccatacatagaaaaatctattccaaaaaatcttataaacggtctagatgaaagcgaaatttatgtaaatccaacaggcaattttgtaattggtggaccagatggagacagtggattaacaggaagaaaaattattgtagatacttatggaggagctgcaccccatggaggaggagctttttctggaaaggatccaactaaagttgatagatcggcagcatacgcatcgagatatttagcaaaaaatgttgtagcatcaaaaatagctgacaaatgtttaattcagcttgcttatgcaattggcgtatcaaaacctttatcaatttatgtagatctttttgataatgatgaagaaaaaaataggcatgtagaaaaattaattaatgaaaattttgatttaagtccaaggggaataagggaaatgttaggtttaaataaaccaatatacgaaaaaacagctgcctacggtcattttggaagagaagtagagtccaatggagcattttcttgggaaaaaacagataaaacaggtgtttttaaaaattaa

SEQ ID NO: 243520 - DNA, 628 bp, Unknown
  Bacterial polypeptide expressing nucleotide sequence isolated from the Sargasso Sea
atgaatagaaattatttatttactagcgagtcagtttctgaagggcatcccgataaggtgtgtgatagaatctctgacatggttgttgatacatatatgtcatcaggagatccacaaactagagttgcatgcgaaacacttacgactactaataaagtagtgttagcaggtgaagttagaggtccatctatatcaaaagatcagattatatctcaagttagagattgcataaaagacattggatatgaacaagatggatttcattggcagaattgtgatattgatagttttcttcacgagcaatctactgatattgcaatgggagttgactctggaagtgaaaaagatgaaggagcgggagatcaaggaattatgtttggttttgcttgcaaagatactgaatctttaatgcctgctcctattcattactctcatcaaattttgtacaaaatggcccaagcaagaaaagatgggtcagcttctggattagaaccagactcaaaaagtcaagtaacaatgctttacgaaaatggacaacctacaaaggttacttctttagtaatctcttctcaacataaagaagggttatccccagcagatgtgaaagaaatagtaaagccttatgtat

SEQ ID NO: 243521 - DNA, 595 bp, Unknown
  Bacterial polypeptide expressing nucleotide sequence isolated from the Sargasso Sea
atgagaaaagattatatttttacttctgagtcagtgtcagagggacacccagataaggtatcagatcgaatttcagatgctgtagttgatcattttatagcaaaggacccctttgctagagttgcatgcgaaacattaactacaactaataaagttgttttatcaggtgaagtaagaggaccagtgcaagaagataaggaagaaattatttcaaaagtaagagattgcatcaaagatataggttatgagcaagatggctttcattggaaaacagcagatatacaatatcttcttcacggacaatctgctgacatagctatgggtgtggactcatcctctgataaagatgaaggggcaggtgaccaaggaataatgtttggttatgcatgtaatgaaacaactgaattgatgccagcacctatattttattctcataaaatcttagagataatggccaagggaagaaaagatggtagcttaaaaggattagagcctgactcaaaaagccaagtaactctgaagtacgttgatggtaaaccaaatgcagtcacatctgtagttatatcaacccagcacgctgatggactctctcctg

SEQ ID NO: 243522 - DNA, 406 bp, Unknown
  Bacterial polypeptide expressing nucleotide sequence isolated from the Sargasso Sea
gcaccgcatggtgggggtgcattttccggtaaagacccaaccaaggtcgatcggtcggcggcttatgcctgtcgttatttggcgaaaaatgtcgtggccgccgggttggctgaaaaatgcaccatccagctagcctacgcgattggcgttgctgaacccgtatcgctctatgcagatacgcataaaaccggcagcattgatgacgccagacttcaagatatattggcacaatcaatgaatctgacgccgcgtggcattcgtcagcatttgtctttgaatgcgccaatttatgcaccatcttcttcatatgggcattttggccgcgacgctggtgaagcgggtgtgggtagctttagttgggaagccaccaatttggtcggtgcgttacaatcagcactggcctagg

SEQ ID NO: 243523 - DNA, 556 bp, Unknown
  Bacterial polypeptide expressing nucleotide sequence isolated from the Sargasso Sea
tttacttagaccttatgtgataaaatctattcctaagaattttcttgatggttttaatgaggatgagttttatgtaaatccgacaggaaattttgtaattggtggtccagatggagattgtggtttgacaggtagaaaaattattgttgatacctatggtggagctgcacctcatggtggtggtgctttttcaggaaaagatccaactaaagttgatagatcagcagcttatgcagcaaggtatattgctaaaaatattgttggttccaaaattgctgaaaaatgtttaattcagttagcttatgcaattggcgtatcaaaaccattgtctatctatgtcgatttatttgataacgatctagataaaaataaatttgttgtagaaaagattaaagaaaattttgatttgagccctagaggtataagagaaatgttaaatttgaataaaccaatgtatgaaaaaacagctgcttatggtcattttgggagagcacctgaagaaaatggttcattttcctgggaaaaaactgataaaattaatgttttttctaaatag

SEQ ID NO: 243524 - DNA, 616 bp, Unknown
  Bacterial polypeptide expressing nucleotide sequence isolated from the Sargasso Sea
accaaataaatgtactaaaattgttgtatcgacccaacatgatgaaaaactagatcaacagggtgtaagtgaaattataattcctattattaaaagaattatgcctcaagagtggatgagcaacgaaactgagatattaataaatccaacaggcaaatttgtaataggaggaccagacggggatacgggactcacgggtagaaaaataattgttgatacttatggtggtgcagcgcctcatggtggtggtgcattttctggaaaagacccaacaaaagttgataggtctgctgcttacatttcaaggtatatagcaaaaaatattgttgcatccgggttagctgataaatgtactttacaattagcttatgctattggcgtgtctgatccactttcaatttatattgatacacatggttcatcgaaattatctgatgatgaattacttaaaaaaattacagcaaacatagatctcactcctcgagggataagagaccacttgaatttgcataaaccaatatacaaaaaaagtgcggcatacggacactttggaagagatcctcagaaagatggctctttttcatgggagaaaatagatatcgcagacaaattctaa

SEQ ID NO: 243525 - DNA, 572 bp, Unknown
  Bacterial polypeptide expressing nucleotide sequence isolated from the Sargasso Sea
aactcaagttaaagatttattgagaccttacatgttaaaatctatccctaagaattttcttgaagaatttaatgaagatgaattttatgtaaatccaacaggtaattttgtaattggtggacctgatggagattgtggtcttactggcagaaaaattattgttgatacatatggtggagctgcccctcacggtggtggtgctttttctggaaaagacccaacaaaagttgatagatcggcagcttatgcagcgagatacattgctaaaaatgttgtaggttcaaaaattgctgaaaaatgtttaattcaattagcttacgcgattggtgtatcaaaacccctgtctatttatgtagatttgtttgataatgatttagaaaaaaataaattcgttgtcgaaaaaattaaagaaaattttgatttaagtcctagagggataagagaaatgttaaatttaaacaaacctatatacgaaaaaacagctgcttatggtcattttggtagagtagcggaagaaaatggttcattttcatgggaaaaaacagataaaactgaagttttttctaaatagt

SEQ ID NO: 243526 - DNA, 650 bp, Unknown
  Bacterial polypeptide expressing nucleotide sequence isolated from the Sargasso Sea
tattatttacaaagataataaaccagtaaatattcattctttagtattatcagttcaacatcattcttcatataaaaatgaggacatcaggaatttagtagcacctttgattgaaaaaacaattccaaaaggatggaaatgctctgctgaaaatatttttatcaatccgacgggaaggtttgaaataggaggacctcatggcgatgctggacttacaggcagaaaaattgtagttgatacctatggaggagtatgtcctcacggaggaggagcattttcagggaaagacccatctaaagtcgatagatctggtgcttatgtggcaagatacatagctaagaatttagtcgctgcaggtgtagcaagaaaatgtacaattcaattagcatatataattggtgtttctgagcctatatctatctttcttaacactcacaacacttcctcattaaataataaaaaaataattggagcaataagagaaatatttgatcttaaacccgcaggtataagaaagatgctagatttagctaggcctatatatcaaaaaactgcatcattcggacattttggaagaaatgcagaaaaagagggatatttttcctgggaaaatttaaacaaggtggaagaattaaaaaaactactataga

SEQ ID NO: 243527 - DNA, 731 bp, Unknown
  Bacterial polypeptide expressing nucleotide sequence isolated from the Sargasso Sea
gtttcagagggacatcctgataaggtatgcgatcgtatatcagatatggttgtcgacacttatatttcaaaagatccattttcaagagtggcgtgtgaaacattaacaacgacaaataaagttattttagctggagaagtgagggggccagaaattaaaaaagatgatctaattcaaaaagtacgaaactgtataaaagatattggttatgaacaaaaaggatttcattggaaaaactgtaatattgatgttcatttacactcacaatcttctgacatagcaatgggagttgactctaaaggaaataaagacgaaggagcaggagatcaaggtattatgtttggttatgcatgtaatgaaactgaagttttaatgccagcaccaatttactattctcataaaattttagaattaatggctttagatagaaaaaaaggtattgcaaaagatttggagccggactcaaaaagtcaagttaccatgttttatgataatggaaggccagtaaaagttaaatctgtagttatttcaacacaacattcatcaaaagttgatcaaaataaagttaaagaaatagtaagaccttatttggagaaatccataccaaaacaattattatctgagttaaaagatgaagaattttatgtaaacccaactggtcagtttataattggaggaccagatggagatagtggcctaactggaagaaaaattattgttgatacctatgg

SEQ ID NO: 243528 - DNA, 729 bp, Unknown
  Bacterial polypeptide expressing nucleotide sequence isolated from the Sargasso Sea
acaggagcctgaaaaagtggcaaacgattatttcttcacgtccgaatccgtctccgaaggccatccggacaaagtcgcggaccaaatctcggacgcgatcctcgacgccatcctcgagcaagacaagtattcgcgcgttgcggcggaaacgctgtgcaacacgggtctcgtcgtcctggccggtgaaatcaccacgacggccaacatcgactacatccagatcgcgcgcgacacgatcaagcgcatcggctacgacaacaccgactacggcatcgactacaagggttgcgcggtgctcgtcgcgtacgacaagcagtcgccggacatcgcccagggcgtcgatcgtgcacacgacgacaacctcgaccagggcgcgggcgaccagggtctgatgttcggttatgcgtgcgatgaaacgccggaactgatgccgctgccgatctacctgtcgcaccgcctcgtcgagcgccaggccagcctgcgccgcgacggccgcctgcaatggctgcgcccggacgcgaagtcgcaggtgacggtccgctacgtcgacggcaagcccgattcgatcgacaccgtcgtgctgtcgacgcagcacgcaccggacatcgagctgccggcgctgcgcgaagccgtgatcgaggaaatcatcaagccgacgctgccggccgacctgatcaagggcgacatcaagttcctggtgaacccgaccggccggttcgtgatcggtgg

SEQ ID NO: 243529 - DNA, 693 bp, Unknown
  Bacterial polypeptide expressing nucleotide sequence isolated from the Sargasso Sea
gtaagttaaaaaatatagaaccagactcaaaaagtcaaataaccatagagtataaagatggagtgcccgctaatgttaaatcagtcgttatatcaacacaacattcagctgatgtaaatcagactcaagttagaaaattagtagagccttatatagaaaaagcaattccaaaaaatcttttaaatggtttaaatgaaaacgaaatttatgtaaatccaacaggaaattttgttattggaggacctgatggcgacagtggattaacaggtagaaaaattattgtagatacttatggtggagcagcaccacatggaggaggtgcattttcaggaaaagaccccactaaagttgatagatcagctgcatatgcttctagatttttagcaaagaatgttgtggcctcaaaaattgcagataaatgcttaattcaattagcatatgctattggagtttcaaaacctttatcaatttatgtagatgtttttgaaaatgatgaagaaaaaaataaacatattgaaaaacttataaatgaaaattttgatttgagcccgagaggtataagagaaatgcttaatctgaataaagctatatatgagaaaacagctgcatatgggcattttggaagggatccagaagaaaatggagccttttcttgggaaaaaactgataaagcaaatatttttaagagttaaa

SEQ ID NO: 243530 - DNA, 518 bp, Unknown
  Bacterial polypeptide expressing nucleotide sequence isolated from the Sargasso Sea
aatgagaccttatttttttactagtgagtccgtatcagaaggacaccctgacaaagtctgtgacagaatatcggatatggttgtcgatacatacttatcatcaggagacccaaatactcgtgttgcgtgcgaaacacttactacaacaaataaagtagttttagctggtgaggtaagaggtccatccatatcaaaagatcaaatcatttctcaagtaagagattgcattaaggatattggttatgaacaagatggttttcattggaaaaattgtgaaatagattatcatttacatcctcaatcatcagatattgcgatgggtgttgactctggaaataataaggatgaaggagcaggagaccaaggtattatgtttggctttgcatgtaaagatacagacacattaatgccagcaccaattcactattctcatcaaattttatataaaatggctgaggctagaaaaaatggatctgcagctggtttagagccagattctaaaagtcaagtaacaatgc

SEQ ID NO: 243531 - DNA, 398 bp, Unknown
  Bacterial polypeptide expressing nucleotide sequence isolated from the Sargasso Sea
ggatgtaactcaagatgacataaaagaaggtgtaatggagcatataattaagccaattgttccaagtgaatggatattagattcaactaaaatatatatcaatccaacaggaaaatttgtaattggtggtccagttggagattgtgggcttactggcagaaaaattattgttgatacctatggaggaatggcgcgtcatggaggtggcgctttctctggaaaagatccttcaaaggttgatagatctgctgcttatgcagcaagatatgttgccaaaaatatagttgcagctggattagctgactattgtgagattcaagtttcatatgcaattggagtagctaagccaacatcaattaatattaatacttttgatagtgagaaaattttcaaagatg

SEQ ID NO: 243532 - DNA, 379 bp, Unknown
  Bacterial polypeptide expressing nucleotide sequence isolated from the Sargasso Sea
ggagcattttcaggaaaagatccatccaaagtagatagatctgcatgttacatgtgtagatacgttgcaaaaaatattgtagccgcagaattggcagatagatgtgaagtacaagttgcatatgcaattggagttgcagaaccagtatcattgatggtaaacacatttggtacaaataaaattgatgaaaagaaaattgaggagttagttagaaagaattttgatatgagacctgcaggaatagtatcagagttagatctaaaaagaccaatttacaaaaagactgcagcatatggtcattttggtagaaatgagcctgaatttaattgggaaaaaacagacaaagctgaaaaattaaagacagagtcaggcatttagt

SEQ ID NO: 243533 - DNA, 331 bp, Unknown
  Bacterial polypeptide expressing nucleotide sequence isolated from the Sargasso Sea
gcatacgcatcaagatacttagcaaaaaatgttgtagcctcaaagattgcagataaatgtttaattcaacttgcttatgcaattggagtttcaaaacctttatcaatttatgtagatctttttgataatgacgaagaaaaaaatagacatgtagaaaaattgattaatgataattttgatttaagtccaagaggcataagagaaatgttaggtttaaataaagctatatatgaaaaaactgctgcatatggacattttggaagagaacctgagtcaaatggggctttttcatgggaaaaaactgataaagcagatgtttttaagaagtaat

SEQ ID NO: 243534 - DNA, 685 bp, Unknown
  Bacterial polypeptide expressing nucleotide sequence isolated from the Sargasso Sea
aaaaatattgaaccggactcaaaaagccaagtaacatttgaatatgtcgatggaaaaccttcaaaagtcaaatcagtagtgatatcttcgcagcattcagctgatgttaatcaagctcaagtcagagatttgttgagaccttatatgttaaaatctattcctgagaattttcttgatggttttaatgatgatgagttttatgtaaatccaacaggtaattttgtaattggtggtcctgatggggattgtggactgacgggtagaaaaattatagttgatacgtatgggggagcagcacctcatggtggtggtgctttttcaggaaaagatccaactaaagttgatagatctgcagcttatgcagcaagatacatcgctaaaaatgttgtaggttcaaaaattgctgaaaaatgtctaattcaattagcttatgcaattggtgtatcaaaacctttatctatttatgttgatctgtttgatagtgatttagataaaaataaatttgttgtagaaaagattaaagaaaactttgatttaacccctagaggtatcagagaattgttaaatttaaataaaccaatatatgaaaaaacagctgcctatggtcattttggtagaacgcctgaggaaaatggttcattttcatgggaaaaaactgataaaactaacgttttttctaaatagt

SEQ ID NO: 243535 - DNA, 771 bp, Unknown
  Bacterial polypeptide expressing nucleotide sequence isolated from the Sargasso Sea
aatgtttggttatgcttgtaacgaaacggatgtattaatgccagcacctattcattattctcacaaaattttaagacttatggctgaagacagaaaatctggaaaactaaaaaatattgaaccagactcaaaaagtcaaattactattgagtataaagatggaaaaccttcatcagtaaaatcagtagttatatcaacacagcattcatcagatgttaatcaatctcaagttagagaacttgttaaaccttatattgaaaaatctattccaaaaaatcttataaatggtttagatgagacagaaatttatgttaatcccactggtaattttgttataggtggaccagatggagatagtggattaacaggtagaaaaattattgtagatacatatggaggtgcagctccacatggaggaggagctttttcaggcaaagatccaactaaagttgatagatcagcagcatatgcatcaagatatttagcaaaaaatattgttgcttcaaaaattgcagataaatgtttaattcagttagcttatgcaattggagtttctaaaccactttcaatttatgtagatctttttgacaatgatgaagaaaaaaataagcatgtagaaaatttaattaatgagaattttgatttaagtcctagaggaattagagaaatgttagggttaaataaaccaatatactcaaaaacagctgcttatggccattttggaagagaaccagagtctgatggctctttttcttgggagaaaacggataa

SEQ ID NO: 243536 - DNA, 439 bp, Unknown
  Bacterial polypeptide expressing nucleotide sequence isolated from the Sargasso Sea
ttgacaggtagaaaaataattgttgatacttatggaggtgcggcacctcatggaggaggagctttctctggaaaagacccttctaaagttgatagatcggcagcttatgctgccagatatttagcaaagaatattgttgcggctgatctagctgatcaatgcacaattcagttatcttacgcaataggagtttcaaagcctttatcagtttacgtaaatactaatgggacaaataaagttgatgaacagaaaattgaaaaatctgttcaagatttatttgatcttagtccaaggggaataagagaacatctaaaattaactaatgcaatttatgttccaacctcagcttatggtcactttggaagagaaccaagtgatcaaggacattttacttgggaaaaaactgatttagtagattctctaaaaaatataatttaaa

SEQ ID NO: 243537 - DNA, 739 bp, Unknown
  Bacterial polypeptide expressing nucleotide sequence isolated from the Sargasso Sea
cacttaattttgagtgatttagctgaattaagaaagtccggaaatgctaaaggtattttgcctgattctaagtcacaagtaactttattatataatcaagataataagccgataggttgtgataatgttgtagtttccactcaacatgaatcaggtatgtctaaaagtaaaatatatgactacctatatcctattatacaaaacatattgccagaagaatggatgcctccagaagaaaaaatatttataaaccctactggaaagtttgaaataggaggacctgatggagatgcaggtcttacaggtagaaaaattattgtagacacatatggcggagcttgtccgcatggaggaggggctttttcagggaaagacccttctaaagtagacaggtctgctgcgtacgctgcaagatatgtagcaaaaaatattgtttatgcaggaatagctgaaaggtgtactattcaattagcttatgcgattggaatggttgagcccttatctgtatatgttaatacttatggaactggaaaattaagtgatacagaaataatagatttaattaataaaacttttgatttaacacctagagggataagagatatgcttaacctctctaatgtgaattatttatcaacagctgcttatggacattttggaagagattcaaaaagtaatgaatattttacttgggaaaaaatagataaggctaaatcaattttagagtctataagttaaa

SEQ ID NO: 243538 - DNA, 376 bp, Unknown
  Bacterial polypeptide expressing nucleotide sequence isolated from the Sargasso Sea
aatgagtgatttcatcttcacttctgaatctgtaactgaaggccatccagacaaaatatgtgaccaaataagtgacgctgttttagatgccttattgacagaagatccagaaagcagagttgcctgcgaaactgtagttaatactggtctttgtttacttactggagaaataacttcaaaagcaaaagttgactatataaaactagttagaaatgtaattaaagaaattggatatgaaggctctaaagcaggtggctttgacgcaaatagttgtgcagttttagtagcccttgacgaacaatcgcccgatatttcacaaggggtcaacgaagcagatgatattaacaatgatttggaaaacaatacaagggctggt

SEQ ID NO: 243539 - DNA, 313 bp, Unknown
  Bacterial polypeptide expressing nucleotide sequence isolated from the Sargasso Sea
gcagcaagatgggttgcaaaaaattgcgttgctgctggattagctgacagaatggaagttcagctttcatacgctattggagtttctgagccaatttcaataatggttgatactcacagaacaaataaaatacctgaaaatgagattgttaaaaaaattaaccaaaattttgatttaagtcctggcggtataattgaaaatcttaatttaagaagaccaatatataagcaaactgcttcatacggtcatttcggaagaaatgatattaatcttccttgggaagaattaaatatggttgaaaaacttcaataat

SEQ ID NO: 243540 - DNA, 905 bp, Unknown
  Bacterial polypeptide expressing nucleotide sequence isolated from the Sargasso Sea
cggctacgacagagattctctagattttaatgggagcacatgtggagtgatggtgactctcgatgagcagtcaccggatatcgctcagggtgtaaacgactccgaagaagttagaagcggcaaagcgggcgaagaagatgctctggaccggcaaggcgcaggtgaccaaggcatgatgtttggttacgcgtgtcgcgaaacagatgctctaatgccattgccaatacatgtagctcacagaatggcggagcaactaaccgaggcacgcaaatcgggtcaagtcccgtatttgagacccgatggtaagacacaggtttcgtttgaatatgaagacggccggccagtgaagttaaaaacagttcttgtttcaacccagcacaatcccggaatcgatagagacggtatgatccgaccggacctaatcgatcatgtgatccgaccagcggtccccgcggaatttgctgacgacgattacgaagtgtttgtaaacccgaccggcaactttgtggttggtggacctgtgggcgactgtggattaacaggtcgtaaaatcatcgttgatacttatggcggatacgcgcgacatgggggaggcgcgttttcaggaaaggacccatcgaaggtagacagatccgcggcatacgcaacacggtgggtagcaaaaaatctcgtggcagcaggagcggcagatcgttgcgaggtgcaggtagcatacgccataggtgtcgcccgcccggtttcagttctagttgaaacgttcggctccgaacatgtcgatccagatcgaattgcctcggcggtcaacgaagttttcgacctacgccctgcagcaatcctcagagacctagatcttcggcgacctatctttcaacccactgcggcttatggccattttggccgagacg

SEQ ID NO: 243541 - DNA, 688 bp, Unknown
  Bacterial polypeptide expressing nucleotide sequence isolated from the Sargasso Sea
agtagattgggttattacctggatgctaaaagtcagattacttttgtttatgagaatggtcggcctcagaaaattgatactgttgtattatccactcaacattcgaaggatgtaactcttagtgatgttaaagattttgtgatggaagaaattataaaaacaacaatacctaaaaatttattatcgagtaccactaagattcatatcaatccaacaggaaactttgtcattggaggaccaaacggcgattgtggtttgactggtagaaaaataatcgttgatacttacggtggtatggcaagacatggtggaggtgctttctctggcaaagatccatctaaagttgacaggtctgctgcctatatggcaaggtatattgcaaaaaatattgtagctactaagcttgcagataaatgtgaaatacagctctcttatgcaattggcgttgctgagccaacttcaatatctgtagatacttttggaacatcgaagattgagaattctaaaatatcctctgcagtaagtaaggtatttaatctcactccgaagggtattattgacacactagaccttctgaacgtaaaatatcaacctactgcggcttttggacatttcggaagagatgacaaaaattttacttgggaacaaaaggataaggttgatatactaatgaatgaactaggatagg

SEQ ID NO: 243542 - DNA, 619 bp, Unknown
  Bacterial polypeptide expressing nucleotide sequence isolated from the Sargasso Sea
atgaaaaaaaattttttatttacaagcgaatcagtttcagaaggtcatccagataaagtatgtgacagaatttcagatatggttgtagattcttatttaggttcagaacctcagtctagagtagcctgcgagactttaacaacaacaaacaaagtagtattagcaggagaagtaagagggccagaaattaaaaaagacgatttaattcaaaaggttagagactgcataaaagatatcggatatgatcaggacggatttacatggaaagaagccactaagatagaaagtcatcttcattctcaatctgcagatatagcaatgggagtagattcttcaggaaataaagatgaaggagctggagaccaaggtataatgtttggttatgcttgcaatgaaacagatgttttaatgcctgctccaattcactattcacataaaattttaaggcttatggccgaagatagaaagtcaggcaaattacaaaatattgaaccagactcaaaaagtcaaattacaatagaatataaagatggaaaacctgcttcagttaaatcagttgtaatatcaacccaacattctgctgatgtaaatcaatctcaagttagagatttggtaaaac

SEQ ID NO: 243543 - DNA, 628 bp, Unknown
  Bacterial polypeptide expressing nucleotide sequence isolated from the Sargasso Sea
aatgacaaaaaatagctatttattcacgagcgaatctgtttctgagggtcacccagataaagtatgcgatagaatatccgatatggttgtagactcttatttatctaaagatccagtttcgagagtagcatgcgaaacacttactactacaaataaagttgttttagctggagaagtaagaggtccaaaaattgaaaacgaagaattaatttcaaaagtaagagattgtattaaagatattggttacgaccaagaaggttttagttggaaaactgcaaatattgaaacatttctacatgaacaatctaaagatattgcaatgggagttgactctaaagataataaagatgaaggagccggagaccaaggaataatgtttggatacgcttgtaatgagacagatgaattaatgccagcgccaatttattattctcacaaaatattaaggttgatggctgaggatagaaaaaaaggaatactcaaggggatagagccagactcaaaaagtcaagtaactatgttatatgaaaatgaaagaccagttaaggttacatcattagttatatcaacacagcattctaaagatttaaatcaagaaaaggtgagagaagctattattccatatatc

SEQ ID NO: 243544 - DNA, 814 bp, Unknown
  Bacterial polypeptide expressing nucleotide sequence isolated from the Sargasso Sea
gaaggggctggagatcaaggaataatgtttgggcatgcctgccgtgaaacagatgtcttaatgcccgcccccattcaattctctcatcaaatattaaaaaacatggccgatgccagaagagctggctccatcaagggcctggggccagactcaaaaagtcaggtaagtttattatacgaaaatggcaaaccaactaaagctacctcaatagtaatttccacccaacacgatgcaaatctggaacaatcagaaatccgcgagatagttagacctttcatcgaacaaacacttccaaaaggttggatgtgtccagagaacgagttttatgtaaatccaactggacgttttgttgttgggggaccagatggcgatgcgggcttaaccggccgtaaaataatagtggacacttatggcggggcggcacctcatggtggtggtgctttttccggaaaagatccttccaaagtagataggtcagcagcctacgctgctagatgggtagcaaaaaacgtagttgctgctggtttagcagaaaaatgtaccatacaactttcttatgcaatcggcgtttcaaaacctctgtcggtttacgtaaatacatatggaacagggactgcaccagaggttaaattgagtgagtacattcaggagaaagtcgatttgtcaccaagaggcataagagaacgccttcaattaaatcaggcaatcttcgctaggaccgctgcatacggacattttgggagagagcctgagatggatggaggcttttcgtgggaaaagctggacttagttgaagagtttcaaaacctctaaa

SEQ ID NO: 243545 - DNA, 785 bp, Unknown
  Bacterial polypeptide expressing nucleotide sequence isolated from the Sargasso Sea
ttatgcatgtaaggagactcctgaattaatgccactgcctattcagctggcacacaggcttacagaacgacttaccgaagtacgcaaaaatgggactctggaataccttcgtccagatgggaaatctcaggtaacagttcgttatgttgatggtgaacctaaatccattgatgcagtagttataagcacacaacattctgaggatgtaagtcaggagaagcttcatgaggacattatcagtaatgttataaataatgttattccttctaagtacttgaatggttctccaagatttcatattaatcctaccggactttttgtaatcggtggacctcagggagattgtggattgacaggaagaaaaatcattgttgatacatacggaggtatgggaagacacggtggcggagcattttccggcaaagacccttcaaaggttgaccgctctgctgcttatgcagcacgtcacgtcgcaaagaacgtagttgctgcaggacttgcatcacgctgtgaggtacagctggcttatgctattggagttgcggaaccagtctctgtctttgttgatacattcgacacaggtaggattgaagaatcaaaaataataaatttgattcgcgataattttgaacttaagcccgcaggactaatcagctatctcaaactgctacgtccaatctaccgaaaaacatctacatatggacactttgggagagaggttcccgaatttacctgggaatcaactgaaaaggctgatgatcttagaacacaggcaggaatttaga

SEQ ID NO: 243546 - DNA, 541 bp, Unknown
  Bacterial polypeptide expressing nucleotide sequence isolated from the Sargasso Sea
ttggcaaaatatttattcacatccgagtcagtaacagaaggtcatccagataaagtttgtgatgcaatatctgatgctatacttgatagtttactatcccaagacaaggaatctcacgtagcctgtgaagctcttgcaacaaatggtctagtggttgtttctggggaggtccggtcatccggatcgcttgatgtagataacatcgtaaaaacaacattagaagatataggatacactgatgaagcaagaggtatggatagtgaaaatattgaaattcgctctattattcatgaacagagccctgaaattgctcaaggtgtggactcagatgatgtttccgagcagggcgcaggtgatcagggtttaatgtttggttttgcatgcaaagagaccgaggagcttatgcctcttccaattcaaatagcccagcgtctaactgaaaaattagcaagaattagaaaagatgggactcttccttggttgaggccagatggaaagtcacaggtcactgttgagtatgatgggtttacgccagcttaga

SEQ ID NO: 243547 - DNA, 577 bp, Unknown
  Bacterial polypeptide expressing nucleotide sequence isolated from the Sargasso Sea
gatgatcaggagagatggcgtgagtcgatggactttcacctcagagtcggtgacagaaggacatcccgacaagatggcggatcagatatctgacgccatccttgatgcgatgctcagacaagacccaaatagccgagtggcatgcgaaaccatggtcaccactggtttggtggtggtagcaggggagatcacgacgagtgggttcgtagatatcgcctctgtggtgcgagagacgatcaacgacattgggtatgaccgagattcgttggacttcaatggaagcacttgtggggtaatggtaagtctcgatgaacagtcgccagacattgcccaaggggtcaatgactcagaggaagtgagaagcggcaaagctggcgaagaggacgaactcgaccgccaaggtgccggggatcaaggcatgatgttcggttacgcttgtcgggaaactgacgttttgatgccgcttccaattcatgtagcccatcggatggctgaacaattaactgaagcccgcaaatccggccaagttccgtacctgaggccagacggaaaaacgcaagtgtcttttgaatatgaa

SEQ ID NO: 243548 - DNA, 499 bp, Unknown
  Bacterial polypeptide expressing nucleotide sequence isolated from the Sargasso Sea
tgaaaaagagatttatataaatcctacaggaaactttgtaataggtggtcccgatggagacagtggattaactgggagaaagattattgttgatacttatggaggtgcagcacctcacggtggtggagctttttcaggaaaagatccaacgaaagtagatagatccgctgcctatgcctctagatatttagcaaaaaatgtagttgcttcaaaaatttctgataaatgtttaattcaactagcatatgcaattggcgtttctaaacctctgtctatttatgttgatctatttgataatgacgaagaaaagaatagacatgttgaaaagttgattaacgaaaattttgatttaagccctagaggtataagagaaatgttgggtttaaataaacctatatatcagaaaacagcagcatatgggcactttggaagagttccagaatctgatggttctttttcatgggaaaaaactgataaatctggggtttttgctaagtaa

SEQ ID NO: 243549 - DNA, 842 bp, Unknown
  Bacterial polypeptide expressing nucleotide sequence isolated from the Sargasso Sea
gttagaggtccaaccatctcaaaagatcaaataatttctcaagtaagagactgtattaaagatattggatacgaacaagacggctttcattggaaaaattgtgaaatagattatcatttacatcctcaatcatcagatattgcgatgggcgttgattcaggaagcaataaagatgaaggagcgggtgatcaaggtattatgtttggatttgcatgcaaagatacagatactttaatgccagcaccaattcactattctcaccaaattttatataaaatggctgaggctagaaaaaatggatctgcacctggtttagagccagattccaaaagtcaagtaacaatgctttatgaaaatggtaaaccaactagagtcacctcactagtaatatcatcacagcataaagaaggtttatcaccaactgacgtaaaagaaattgttaagccttatgtttatgaatgtataccaaatcagttacttgaagaccttaaagacgaagaattttatgttaatccaactggaaattttgtcattggtggtcctgatggtgactctggtttaactggtagaaaaatcattgtagatacttatggaggggctgcgcctcatggaggaggtgctttttcaggtaaagatccctctaaggttgacagatctgctgcttatgcagctaggtatttagctaaaaatattgttgctgctgatcttgcagatcagtgcacaattcaactttcttacgcaattggagtgtcaaaacctatttcagtttatgtaaacactaatggaactaacaaagttgatgagacaaaaattgaaagctctgttcaggatatgtttgactt

SEQ ID NO: 243550 - DNA, 865 bp, Unknown
  Bacterial polypeptide expressing nucleotide sequence isolated from the Sargasso Sea
aatgagttatatttttacatcggaatcagtttccgccggacatccagataaggtctgtgatcaaatttcagatgctgttttagacgcatatttagcagaggatccaaatagtcgagtagcatgcgaaacaatgattaaaaacaatatggtatatatcgctggggagataacttcacttggaagtccagacctagaaccagttgttagaaaaacaattaatgatattggatacgatactgatgaatatggtttcaatggagatacctgtgagtttacaaatcttgtttttgagcaatcacctgatatctcacaaggcgtcactgagggtgagggagaaaatcttgaacagggtgctggagaccaaggtcttatgtttggttatgcgtgtacagaaacagactcgttaatgcccctgcctattgatctatctcatagattagtaaaaaaacaggcagacgttatgaaaagtaacggactagcctggttgagaccagatgctaaaagccaggtaagcgcaatttattctgatgatggaaagactattgaaggattatctgcaatagttctttcaacccaacatgacgaagatgtaacgcaagaagagattaaagaaggggttatggaacaaatcattaaaccgatagtacctgaggaatggattttagactcaacaaaaatttatataaacccaaccggtaaatttgttattggtggtcctgtaggtgactgcggccttacagggagaaaaattattgttgatacttatggtggtatggctcggcatggtggcggagccttctcaggcaaagacccttctaaagttgaccgatctgcagcttatgcagctaggtatgtagcaaagaat

SEQ ID NO: 243551 - DNA, 904 bp, Unknown
  Bacterial polypeptide expressing nucleotide sequence isolated from the Sargasso Sea
aaatatttattcacatccgagtcagtaacagaaggtcatccagataaagtttgtgatgcaatatctgatgctatacttgatagtttactatcccaagacaaggaatcgcatgtagcctgtgaaactctcgcaacaaatggtctagtggttgtttctggagaggtcaggtcatctgggtcgcttgacgtagagagtattgtaaaaactaccttagaagatataggatacacagatgaagcaagaggtatggatagtgataatattgaaattcgctctattattcacgaacagagccctgaaattgctcaaggtgtggactcagatgatttatcagagcagggtgcgggtgatcagggtttaatgtttggtttcgcatgcaaagagactaaggagctaatgcctcttccaattcaaatagcccagcgtctaactgaaaaattagcaacaattagaaaagatggtactcttccttggctgagaccagatggtaaatcacaggtcactgttgagtatgatgggtttacgccagtcagagtaacaaaggtggtgattgcaactcagcatgatgatatgcttgaagaatatggctctgaagaagatgagttaaaatttgtaaaaaaagaggtaattgatcacatcattattccagtcttggatagttatgatattccttatgagaatgagtttatcgttaatggtacaggaagatttgtatatggtggcccagccgctgacacagggcttactggaaggaagatcattgttgatacatatggtggctatgcgccacatggcggaggagctttctctggaaaagatccttcaaaagttgatcgttcagcggcatacatgagcagatatattgcaaaaaatattgtagctgcagatcttgctgagaggtgcg

SEQ ID NO: 243552 - DNA, 931 bp, Unknown
  Bacterial polypeptide expressing nucleotide sequence isolated from the Sargasso Sea
aaaaactctagagtagctgtagaaacttttctaacagggactgaaaaaggcgggctcgttgtagtaggtggtgaaattagtgagattgctaatatcacagacgaagctgttgtgagcattgtaaaagaagctctagaaaaaacaataaaaacaagttttccagattttgatttagataatctaactatccagaacgaactcactcctcaatctgaggaaataagagcagctgttgaggacgatcaagaccaaggcgctggggaccaaggcattatggtaggttatgctataaatgaaacagaatctcttatgcctccaacttttgataaatcgcgtaacattcaacaggctttgtgggagatgcaacactctgatgagatgttagacctagattcaaaagtacaggttacgacaggcggagacaaaactaaagttgttgtatccacccagcatcaaaaggaaattgatattgacgatttatattctagagtatttgaacttgcgggaggttatgtaaaagaggaatatactcttgatttaaatccttccggatcattcgttaaaggaggcccagcaggagacactggtcttactgggaggaagattgtggttgatgcctatggtccatctgttccagttggtgggggcgcattttcaggcaaagacccaagtaaagtagacagatctgcagcttatgcagcgagacatttagcaaagaatatagtctctcatggtttagcagatgaatgcctagttagggtttcatatgcaattggtaaagctgaaccatacgaactaacagttgaaacttttggcagtgaaaaatcagaaaacaaagtattagttgactttataagtaagtttgatatgaagcctggatcaataattgaaaggcttaaccttcttgaagttaactataaagaagatacct

SEQ ID NO: 243553 - DNA, 831 bp, Unknown
  Bacterial polypeptide expressing nucleotide sequence isolated from the Sargasso Sea
tcattcacgagttgcatgtgaaaccatgataactacaggcatggttgttcttgcaggagagataacctcgaaatcaattgtagactttcaagaagtcgtaagaaaaaaagttttagatattggttatgatgattcagcaaaagggtttgatggaaatacttgttctgttttagttagcctcgataaacagtcacctgatatagctcagggcgttaatcagggcgagggatcatataaagagcagggcgcaggtgatcagggtttaatgtttggttacgctgttaacgagactaagtcttatatgcctttgacgattgatttatctcatcaactatccaaaaagctaactgacgttaggaaaaatggaattattccagaactgagaccagatggaaagactcaggtttcagcggaatatgctaatggaactcttaaaagaatagaagccattgttgtttcctcacaacactctgaaaacttttctttaaagcaggttcaagaatctataagagaggaagttattaataagactgttcctgctgagcttatggatgaaaaaacaaaaatttatattaatccaactggtaaatttgtcattggtggtccgatgggagattgtgggttaacgggaagaaaaattattgtagacacttatggaggccatggagcccatggcggaggagcattttctgggaaggacccttcaaaggtcgatcgctctgctgcttatgctgctcgtcaggtggctaagcatgtcgtagctgctggcttagctgataaagctcttgttcaggttgcctatgccataggcgttgcagagccaatgtcatt

SEQ ID NO: 243554 - DNA, 358 bp, Unknown
  Bacterial polypeptide expressing nucleotide sequence isolated from the Sargasso Sea
aatgaataaaaataactatttattcactagcgagtctgtttcagaaggtcatccagataaggtaagtgataaaatttctgatatggttgtggacagttatttatcaagagacccctattcgagggtggcttgcgaaactttaacaacaacaaatcgggttatcttagctggagaaactagaggtcctaaatttgacaaagaagaattagttaccaaagtaagagagtgtattaaagagattggatacgatcaaaaaggcttcagttggaaaaatgctcagattgaaagttttttacatgaacaatcaactgatatagctatgggagtagattcaaaagaaaacaaagatgacggcgca

SEQ ID NO: 243555 - DNA, 922 bp, Unknown
  Bacterial polypeptide expressing nucleotide sequence isolated from the Sargasso Sea
aattgcagatcagatctcggattctgtactcgacgccatgctcatggactatccaaaaagcagggtggcctgtgaaactttagtcaccaccggaatggcctttgtggcaggagaagtaaccaccaaagcccaggttgattttcaaagaattgtcagagataccatccgtgaaatcggatacaccgattcaaaaatggggtttgattgtgatacctgtgccgtcatggtcagcctggacaaacaatccccaaatatcaaacagggtgtggataatgaccctgaaaaaagcaaagaacagggagcaggagaccaagggttgatgtttggctacgcctgcgatgaaaccccagaactgatgccgcttcccatcaatatgtcacaccgcttgacggaaaaactttcactggtccgtaaaaatggaaccatgcctgaacttagacccgacggaaaatctcaggtcacggtcaaatacgtcaacggcaaaccggtcgaagtcacagccgttgtaataagtacccaacacaaagaaggacaggaccagggtcaattgaaaaagaacatcatcgaaaatgtcattcgtccagtgatccctgctgaatttctcactgatacgactgatttccacatcaacccgactggaatctttgaaattggagggccccagggagattgtggattgacgggacgcaaaatcatcgttgacacctatggaggaatgggacgtcatggaggtggggcattttcaggaaaggatccttcaaaggtggatcgttccgctgcctatgctgcaagacacgttgccaaaaacgtcgttgcagctggtctggccagccgctgtgaagtccaggtcgcttatgccattggtgttgcggatccggtatccgtttccgtcgatacttttgggacagccattgtcgatgag

SEQ ID NO: 243556 - DNA, 325 bp, Unknown
  Bacterial polypeptide expressing nucleotide sequence isolated from the Sargasso Sea
gcaagatatgtagccaaaaatgttgttgctgcagggttggcagatcgatgtgaaattcaagtctcatatgccattggtgttgcaaaaccaacctctgtaagaataaaaacttttggcacagaaaaagtttcagaagaggaaattgtgcatttggtaaatgaaaattttgatttaactccttacgggatcatgaacatgctgaacctgctccaaccaatttatgagaagtctgcagcgtatggtcattttggcagagaagatgaagaattcccttgggaaaaaaccgatcgatccgatgcactaaaggagcaatctggcttgtaat

SEQ ID NO: 243557 - DNA, 688 bp, Unknown
  Bacterial polypeptide expressing nucleotide sequence isolated from the Sargasso Sea
ctaaatggaatagagccagattcaaaaagtcagattactattgaatataaagatggtgtacctactgcagtaaaatctgtagttatctctacacaacattctaaagatgttaatctagcacaagttaaagagctttgtgtgccatatattgagagatctattccaaaaaatttattaggaaatcttgatgaaggtgagatttatataaatcctactggaaactttgtaattgggggcccagatggagacagtggtttaacaggtagaaaaattattgttgatacatatggtggagctgcaccacatggaggaggcgcattttctggtaaagatccaacaaaagtagatagatctgcagcatatgcttcaagatatttagcgaaaaatgttgttgcatctaaaattgctgacaaatgtttaattcaattagcttatgcgattggtgtatctaaacctttatcaatttatgtagacttatttgacaatgatgaagaaaaaaatatgcatgtagaaaaaattattaaagaaaattttgatctgagtccaagaggaattagagaaatgcttggtttaaataaacctatttacgaaaaaacagccgcatatggtcacttcggtagaacccctgagagtgatggatcattttcatgggaaaaaacagacaaatcggatgtttttagtaagtaaa

SEQ ID NO: 243558 - DNA, 335 bp, Unknown
  Bacterial polypeptide expressing nucleotide sequence isolated from the Sargasso Sea
tatgaaaagatcttatttattcactagtgaatcagtatctgaaggccatccagataaagtttgtgatagaatttcagatatggttgttgatacttatttatcatctggtgacccacaaacacgtgtagcttgtgagactttaactaccactaataaagtagttttggctggagaagtaagggggccatcagtttctaaagatcaaattatatctcaagttagagattgtattaaagatattggttatgaacaagatggctttcattggcagaattgtgatattgaaagttttcttcatgagcagtcagctgatattgctatgggtgttgattctg

SEQ ID NO: 243559 - DNA, 799 bp, Unknown
  Bacterial polypeptide expressing nucleotide sequence isolated from the Sargasso Sea
aatgaattcaaaaaactatttatttacaagcgagtcagtttcagaaggacatccagataaagtttgtgaccgtatatcagatatggtagttgatacttacatttcaaaagatccattatccagagtagcgtgtgaaacattaacaacaacaaataaagtcattttagctggggaggttcgaggcccagaaactaaaaaagaagatatagaaactaaggttagagattgcataaaagatattggatacgagcaaaaaggttttcattggaagaattgcagtatagacgtccacctacatgctcaatcttctgatattgctatgggtgtcgactctaaaggaaacaaagacgagggagctggagatcaaggaattatgtttggttacgcgtgtaatgaaactgatgttctaatgcctgcaccaatttattactcacataaaatcttagagttaatggctgaggacaggaaaaaaggaatttcgaaagatctagagcctgactctaaaagccaagttaccatggaatatgaaaacggaaaaccagtaaaagttaaatcaatagtaatatcaacccaacactcacctgaagtggatcaaaaaaaagtaaaagaaattgttagaccttatttagagaaatctataccaaaaaaactactcaaagaattaaaagaagaggaattttatgttaatccaacaggtcaatttataattggtgggcctgatggagatagcggtcttaccggaagaaaaattatagtcgataattatggaggcgcagctcctcacggtggtggagcattt

SEQ ID NO: 243560 - DNA, 721 bp, Unknown
  Bacterial polypeptide expressing nucleotide sequence isolated from the Sargasso Sea
tcaaaacaatcgccagatattgctcaaggcgttaatgagggtgagggtgaagacttagatcaaggtgctggtgaccaagggcttatgtttggatatgcatgttctgaaactccagttctaatgcctgccccaattaatttatctcatgagctcgtcttaaaacaatccgaagtaagaaagaaaggtgaactaagctggcttagaccagatgctaaaagtcaagttagtgttgtttataaagatgatagaaaaactgtagattatgtttctgctattgttttatcaactcaacatgatgaagatatttctcaagatgaaattaaagcaaaagtacgcgagaaaattattaatccgataattccaactgaatggattaaagaggatacaaaaatatatataaatccaactggtaagtttgtaattggtggtcctgtcggtgattgtggcctaactggaagaaagattatcgtcgatacttatggaggaatggcaagacacggtggtggtgcattttcaggaaaagatccatcaaaggtagacaggtctgctgcttatgcttgcagatatgttgcaaaaaatattgttgctgctggtcttgctgaaagatgtgaagtacaagtttcttatgcgataggtattgctgaaccgacatcaattactgttgatactcttggaacaggtaacttgtctgaaaatgagatttcacagattgttagagaca

SEQ ID NO: 243561 - DNA, 355 bp, Unknown
  Bacterial polypeptide expressing nucleotide sequence isolated from the Sargasso Sea
atgtctgaatataaattgtttacatctgaatcggtctcagaaggccatccggataaaatggctgaccaaatttctgatgcagttttagatgcgatgctaaaggatgatccagactccagggttgcttgtgaaactcttgttaaagataatctagttgttcttgcaggtgaaattacaagcagatcagagcctgacttagaatcactaacaagaaaagtaatattagacataggctataacagtttggaagttggttgtgatggtaacacttgtgaagttgttaacgctattggaaaacagtctcaagacattgctcaaggtgtaaacgaaggggaaggtgaagatttagagcaag

SEQ ID NO: 243562 - DNA, 388 bp, Unknown
  Bacterial polypeptide expressing nucleotide sequence isolated from the Sargasso Sea
aatgacatctgagtcggttggagaaggtcatcctgataagatggcagatcagatctcagacgcaatactagatgcaattattgagcaagataaaggctgccgagttgctgtggaaacactcgttaaaaccggattagttgttctaggtggagaaataacaactactgctaatgtcgattatgaggcaatcgcaagacaaaccattaaaagaattggttacgacaaagaagagcttgggtttgatgatcagtcgtgtgaggttttagtagcaatcagcaagcaatctccagatattgcgatgggagtagatcgctctgacgaaaaagaacaaggtgcaggagatcagggtttaatgtttggttatgcgaccaatggaaacaaaacaatg

SEQ ID NO: 243563 - DNA, 571 bp, Unknown
  Bacterial polypeptide expressing nucleotide sequence isolated from the Sargasso Sea
atgacaaataaaacttatttaatgacatctgagtcggttggagaaggtcatcctgataagatggctgatcaaatttcagatgcaatactagatgcaattctcgcgcaagataaaggctgcagagttgctgtggaaacgctcgtcaaaacagggctggttgttcttggtggagaaataacaaccactgctgatgttgattatgaggcagtcgcaagacgaaccattaaaagaattggttacgacaaagaagagcttgggtttgatgatcagtcgtgtgaggttctagtagcgatcagcaagcaatctccggatattgcgatgggagtggatcgtgctgacgagaaacaacaaggcgcaggagaccaaggcttaatgtttggttatgcgaccaatgaaacaaaacaattgatgccagcaaccattcaattgtcgcatcaattggtaaaaagacacgccgatgtcagaagaagcggtgagctcagctggctgagaccggatgcaaaaagtcaggtaacaattctattcgatgacggcaaaccgaaatcaatcgatactgtgttctatcaacaca

SEQ ID NO: 243564 - DNA, 855 bp, Unknown
  Bacterial polypeptide expressing nucleotide sequence isolated from the Sargasso Sea
tgatttgatagaaaaggtaagacactgcataaaagatattggatatgatcagaatggttttacatggaaagaagcaactaaaattgaaagccatctacatgctcaatcagctgacattgctatgggagttgactcatcaggcaataaagatgagggagctggagatcaaggcattatgtttggttatgcatgtaatgaaactgatgttttaatgcctgcaccaattcattactctcataaaattttaagactaatggctgcagatagaaaatctggaaaattaaaaagtattgagccagactctaaaagccagataaccattgaatataaagatggcaaaccttcaaatgttaagtctgtggttatatccacccaacattctgcagatgttgatcaagctcaagtgagaaaattagtaatgccatacattgaaaaatctataccaaaaaatcttctaaataatttagatgaaaaggaaatttatattaatccaacaggcaatttcgttattggcgggccagacggtgatagcggtcttacaggtagaaaaattattgttgatacatatggtggtgccgcacctcacggaggtggtgctttttcaggaaaagatccaactaaagtcgatcgatcagctgcctatgcttcaagatacttagcaaaaaatgtcgttgcttctaaaatcgccgataagtgtttaatacaacttgcttatgctattggagtttcaaagcctttatctatctatgttgatttattcgacaatgatgaggaaaaaaacaaacatgtggaaaaattgataagtgaaaattttgatttaagtccgagaggtataagagaaatgttaggtttaaa

SEQ ID NO: 243565 - DNA, 520 bp, Unknown
  Bacterial polypeptide expressing nucleotide sequence isolated from the Sargasso Sea
cctatactacctcaaaactggcttaatcaaaacacaaaatacttcataaatcctaccggaagatttgagattggtgggccggtaggagattgcggtttaaccggaagaaaaataattgtcgatacttatggcggaatggcaagacatggaggaggcgctttttctggtaaagatccttcgaaggttgacagatcagctgcttatgctggaaggtacgttgcaaaaaatatagttgctgcaggtttagctgataggtgcgagatacaagtttcatacgctataggtgttgcagaacccacatcaataagtgtgaatacttttggcacctctaaaattgatgaaaacaaaatttcagaattaattagagagcactttgatttaagacccagacaactaattaaaatgcttgaccttaaaaggccaatttaccaagcaacggctgcttatgggcatttcggaagagaagaaaatgctttcacttgggaaaaaacagataagattgaagctctaaaaggataaa

SEQ ID NO: 243566 - DNA, 334 bp, Unknown
  Bacterial polypeptide expressing nucleotide sequence isolated from the Sargasso Sea
atgagttatttattcacatctgaatctgttagtgagggacatccagataaaatagctgatcaaattagtgatgctattttggataattttcttgcttttgatcccatgtctaaggttgcttgtgagacaatggttactacaggacaggttattctgtctggagaggtaaaatcaaatacttatatagatgttcagaaaataacaagagatgtaataaagaaaattggatattcaaagagtgattacaagtttgattacaagtcttgtggtattctatcaatgatacatgaacaatctgaggatatctcacgaggtatagtcaaaaaaaacgatg

SEQ ID NO: 243567 - DNA, 661 bp, Unknown
  Bacterial polypeptide expressing nucleotide sequence isolated from the Sargasso Sea
aagtcaggttacaatgttatatgatgatgataaaccagttaaagttacttctgttgtaatttctactcaacattctaaagacttaaatcaagatcaagtaaaagaattaattattccatatattaaaaaatctattcctgaaaagtatctaaaagatttaaatcaaaaggaaatttatataaatccaactggacaatttataatcggagggccagatggggatacaggtctgacaggaagaaaaataatagttgatacttacggaggagcagcacctcatggaggtggcgcgttttcaggaaaagatcctacaaaagtagacagatccgcagcctatgcttcaagatatttagctaagaatattgtatcgtcgggagtttctgaaaaatgtttaatacagcttgcctacgctattggagtttctaaacctctttctgtatttattaaattagctgaaggagatgaaggtaaagtagataaggtaaagaaaataattaatgaaaatttcgatttatctccaaggggcataagggagatgttaaaacttaacaatcccatctaccaggtcacatcagcatatggtcactttggaagaaaaccaacaaataaaggtgaattttcttgggaaaaaacagataaagcaaacttattcaaattgtaa

SEQ ID NO: 243568 - DNA, 762 bp, Unknown
  Bacterial polypeptide expressing nucleotide sequence isolated from the Sargasso Sea
gatcaaaccgaagaattaatgcctttgccgattgttttatcacataaattaatacaggaattaattttgttgagaaaatcaaatcagttaacatatctaaggccagattctaaatctcaagtaaccgttgaatataacaataatagggaggctgtaagggtgtcagccgttgttatttcaactcaacatagtccagaagtaagtcaagaacaaattagaaaagacattaaagagatattaattgataaggttatcccttctcatttattaaatggagagccacctaaaatatatattaatccaacaggtcggtttgtaactggaggtcctcaaggggatgccggattaactggacgaaaaattgttgttgatacatatggaggatgggtgccacatggtggtggtgcattttcaggtaaagatccatctaaaatagatcgttcagcagcctattttgggagatatgttgcaaagaattgtgttgcagcgggtttgtgtaaagagatggaaattcagattgcatatgcaatcggagttgcagaacctgtttcaattaaagtaaatacatttggaacatcggaatattcaaatgaacagttgttagaaattataaatcaagtatttaaatttaagccaaaagacattgtggatggattaaatttattaactccaatttatgaggaaacctctgtttgtggtcactttggacgttctgatgttgagctaccttgggaagctcttgataaagttcaacaattaaaa

SEQ ID NO: 243569 - DNA, 276 bp, Unknown
  Bacterial polypeptide expressing nucleotide sequence isolated from the Sargasso Sea
tgagggtgagggtgaagatctagatcaaggcgctggtgaccaagggcttatgtttggatatgcatgttctgaaactccagttctaatgcctgccccaattaatttatctcatgagctcgtcttaaaacaatccgaagtaagaaagaggggtgaactaagctggcttagaccagatgctaaaagtcaagttagggttgtttataaagatgaaagaaaaactgtagaatatgtttctgctattgttttatcaactcaacatgacgaagaaatttctca

SEQ ID NO: 243570 - DNA, 790 bp, Unknown
  Bacterial polypeptide expressing nucleotide sequence isolated from the Sargasso Sea
tttggttatgcttgtaatgaaacggaagttttaatgcctgcacctatttattattctcataaaattttagaattaatggctgcggatcgaaaaagtggtaaagcaaataaattggaaccagactcaaaaagtcaagttacaatgcagtatgaaaacggaaagccagtaaaggttacatcagttgttatttctacccaacattcccctgatgtaaaccaagcacaagttaaggaaattgttagaccatatttagaaagatctattcctaaaaatttattagcaagtttaaaagatgaagaattttatgtaaatccaacaggtcaatttattattggtggaccagacggcgactcaggtttaacaggtagaaaaattatagttgatacctatggtggagcagcgccgcatggcggtggtgcgttttcgggaaaagatccaagcaaggttgatagatctgctgcatatgcagctaggtatgttgctaaaaatgttgttgcttctaaaatagctgataagtgtttaattcagctggcgtatgcaattggtgtttctaaaccgttatctatctacgtagatctttttgacggcgatgaagaaaagtctaaacatgtagaaaaattaataaatgaaaactttaacttaagcccaagaggaattagagaaatgttgactttaacaagaccaatatatgagtgtactgctgcctatggacactttggaagaaaaccaggatcagatggctctttttcttgggaaaaaactgataaaacagcagtttttaaaaagtaga

SEQ ID NO: 243571 - DNA, 676 bp, Unknown
  Bacterial polypeptide expressing nucleotide sequence isolated from the Sargasso Sea
aatgaaaaagaattttttatttactagtgagtcagtgtcagagggacacccagataaagtgtgtgacagaatttcagatatggttgtagatacttttttagcttctgagccacaagctagagttgcttgtgaaactttaacaacaacaaataaagttgtattagcaggagaagtaagagggccagagctaaagcaagacgaattaatttcaaaagtaaggcattgcattaaagatattggttacgatcaagatggtttttcttggaaagaacaaactaaaattgaaacacatttacactcacaatcagctgatattgctatgggagtagactcagctgggaataaagatgaaggtgctggagaccaaggaataatgtttggttacgcgtgcaacgaaacagatgttttgatgccagcaccaattcattattctcataaaatcttaaggctaatggctgaggatagaaaaacagggaacttaaaggggatagaaccagactcaaaaagtcaaattaccattcaatataaagatggtatgcctgcagcggtaacatcagtagttatttctacacaacattctaaagatgttaacttagcccaagttaaagatctttgcttgccctatatagaaagatctatacctaaaaatttattaggaagtcttgatgaaaaagga

SEQ ID NO: 243572 - DNA, 437 bp, Unknown
  Bacterial polypeptide expressing nucleotide sequence isolated from the Sargasso Sea
aatgagtaatttaagaaattatcttttcacaagtgagtcagtttcagaaggccatccagataaagtgtctgataggatttcagatatggttgttgatagttatatttctgaagatccatattctagagttgcttgcgaaacactaactacgacaaataaagtggttttagctggagaggtaagaggaccagaaattaaaaaagatgaattaattgaaaaagtaagaaattgtataaaagatattggttatgaccaagaaggatttacttggaaagaagctacaaaaatcgaaagtcatttacattcgcaatcagctgatattgctatgggagtggactcatcaggaaataaagatgaaggagctggagatcaaggtattatgtttggatacgcatgtaatgaaacagatgttttaatgccagcaccaattcattatt

SEQ ID NO: 243573 - DNA, 911 bp, Unknown
  Bacterial polypeptide expressing nucleotide sequence isolated from the Sargasso Sea
agtagaggttttatcaaaacttcatgagcagagccctgaatttgctcaaggagtggattcaactgatttaacggagcaaggtgcaggagaccaaggactcatgtttggttttgcttgtaaagagacaccagagttgatgcctgtgcccattcaaatagctcacagattaaccgaaagactgaccaaattgagaaaagatggcacacttccttggctaaggccagatgggaaatcacaagtatctgtcaaatatgatgataaacaacctatttcaatagataagacggtcattgctactcagcatgatgatatgattgctgaatatggaaacgaagcaagtgaattagaatttgttaaatctcaggtcatagagcatgtcataaggcctatactggactcctatgaatatgattatgaggataattttattgttaatggaactggaaggtttgtctatggaggcccagaagctgacaccgggcttacaggaagaaagataattgtagatacctatggtggttatgcgcctcacggaggtggagccttttcaggaaaggactcttccaaagtggaccggagtgcaacttatatggctagatacattgcgaaaaatcttgttgctgcagaccttgcagaacgttgcgaagtacaactttcatatggaataggtgttgcggagcctacctctttctatgtgaaaactcagggtactgggaagaaagatgacgatgaactcacaaagcttgcaagagatgtttttccaataaaacctggggaaattgttgcgcatttagatttaaagaagcctcgatatagacaaacggctgcatacggccattttggacgagaacttgatcaattcacatgggaaaagaccgacatggtcgaaaacctattaaataaattatagg

SEQ ID NO: 243574 - DNA, 835 bp, Unknown
  Bacterial polypeptide expressing nucleotide sequence isolated from the Sargasso Sea
gttgtggatagttttttagcatcagaaccacaagcaagagttgcttgtgaaactttaacaacaacaaataaagttgtattagctggagaggtaagaggtccagagcttaaagaggatgaattaatttctaaagttagagattgcattaaagatattggctatgatcaagatggtttctcttggagagaccaaactaaaattgaaacacatctacactctcagtcagctgatattgcaatgggagtagactcggcaggtaataaggatgaaggtgctggagatcaaggaattatgtttggatatgcatgcaatgaaacagatgtgttgatgccagctccgatacattattcacataaaattttaagattgatggccgaagatagaaaatcgggaaagttaaatggaatagagccagattcaaaaagtcaaattactattcaatataaagatggtatgcctgctgctgtaacatcagttgtaatttcaacacaacattccaaagatgttaatttagcgcaagttaaagaactttgcataccttatatagaaaaatctatacccaaaaatctattaggaagtctggatgaaaaagagatttacatcaatcctacaggaaattttgtaattggaggtccagatggagatagcggtttaactggaagaaaaattattgttgatacatatggaggagccgcacctcatggaggaggtgcattttcaggtaaagatccaactaaagtagatagatcagcagcatacgcatcaagatatttagctaaaaatgttgatgcatctaaaattgctgacaaatgtttaattcaacttagcttatgca

SEQ ID NO: 243575 - DNA, 318 bp, Unknown
  Bacterial polypeptide expressing nucleotide sequence isolated from the Sargasso Sea
tttgactatagataaattctgtgacattgtttctgatgccgtacttgatgcatgtttgcaacaagatcctgaatccaaggttgcttgtgaaacttgctgtaaaactggaatggttatgatttttggtgaaatcaccaccaaggcaaccgtcaactacgaacaagttattcgagatgctatcaaaggaattggatacgatgatgcagaaaaaggatttgactacaagtctgcaagtgttgttgttgctattgaagaacaaagtcctgatattgcacaaggtgtacatatcggaaaaaaagttgaagaaattggtgctgg

SEQ ID NO: 243576 - DNA, 513 bp, Unknown
  Bacterial polypeptide expressing nucleotide sequence isolated from the Sargasso Sea
gatgtttggctatgcctgcaaggagaccccagaatttatgccattgcctattgcattggctcataaactgatgcttaaacatgctgaagttagaaaaactagagggctaggcttaagaccagacgcaaaatcgcaagtttctatagaatacaattcaaattatcagccaaaacgaattgattctattgttctgtcagcacaacatagtgatgatctagatttggaagacttaagaaaaattgttaaaacacaaattattgaaacatgtttacctaaaaaacttatagataatgaaacaaaatacctaattaatcctgctggtcgttttgtaataggaggtccagttggtgactgtggtttaactggtcgaaagatcattgtggacacctatggcggtatggctagacatggtggcggaggcttttcatggaaagatccaacaaaagttgatcgctcagctgcttatgggcttaagcaagtggcgaaatcattagtaaagaatgatctttgtga

SEQ ID NO: 243577 - DNA, 799 bp, Unknown
  Bacterial polypeptide expressing nucleotide sequence isolated from the Sargasso Sea
catgtttggttttgcttgcaaagacactgaatcattaatgccagctccgatacattattctcaccaaattttatataaaatggctcaagcacgtaaagatggatctgcatctggtctagaacctgattcaaaaagccaagttacaatgctttatgaaaatggaaaaccaagcaaagttacatccttagtaatttcttcacaacacaaggaaggtttatctcctgaggacgtaaaagaaattgttaaaccttatgtatatgagtgtatacctaataacttattagaaggtcttaaggatgaagaattctatgtcaatcctacaggaaactttgtaattggaggtcctgatggtgactctggtctaacaggtagaaaaataattgttgatacgtatggtggggcagcaccccatggtggaggtgcattttcaggaaaagatccatctaaagttgatagatctgcagcatatgcagctagatacttagcaaaaaatgttgtcgcagcggatttagctgatgagtgtactatacagttatcttatgcaataggagtatcaaaacctttatcggtatatgttaataccaatggaacaaataaagttgatgaacagaaaattgaaaaagctgtgcaagatttatttgatctaagcccaagaggaataagagaacatttaaaactaacaaatgcaatctatgttccaacctctgcttatggccattttggtagagagccaagtgacaagggacattttacttgggaaaaaactgatttagttgaagctctaaaaggtatttcataa

SEQ ID NO: 243578 - DNA, 601 bp, Unknown
  Bacterial polypeptide expressing nucleotide sequence isolated from the Sargasso Sea
aatgagtaaatttttatttacatctgaatcagtcacagaaggacacccggacaaagcatgtgatgctttctctgatgcaatcttagatgaaattctatcaaaggacaataatgcacatgtagcatgtgaatcattagccactaaaggcctcgtggttatatccggagaggtgagaacctatgcatcatttgatgtagataaggtagtaaaagatactatacgtaccataggctatgataagagtaatagtggtattgaccccgaggatgtagaagttttgtcaaaacttcatgagcagagcactgagatagctcagggagtagactctgatgatgtagctgagcagggtgcaggtgatcagggtttgatgtttggttttgcatgtaaggaaacacctgaattgatgcctcttccaattcaaatagcacaaagattgacagaacggcttaccacactacgaaaagaaggcacgcttccctggctgagacctgatggcaagtcgcaggtatctgtgaagtataatgatacgctaccaatatctattgaaaaaacggtcattgcaacccagcacgatgatatgcttgataaatatgggcaatga

SEQ ID NO: 243579 - DNA, 1177 bp, Unknown
  Bacterial polypeptide expressing nucleotide sequence isolated from the Sargasso Sea
atgataaatgatttcttttttacctcagagtctgtttctgaaggtcacccagataaaatttgtgatagaatatcagacgcagttgtagatttaatgttaagtaaatatcctgaagcaagagttgcatgtgagacgttggtgtcaacaaatagaacaattttagcaggagaatatagacttccagaaggcattaatattactgatgacgaaatcgaacaactagttagaagaacagttcgtgacataggttatgaacaagaaggttatcactgggaaaatatgcactttgaatgtcatcttcactctcaatcttcaaacatagctattggagtagacaaatctggtaacaaagatgaaggagctggagaccaaggtttgatgttcggttatgcctctaatgaaacagaagttctaatgcctgccccaatttattatgctcatgagatattaaaagaattggcaactataagacatgaaaacaaaaactctattttattaccagatagtaaatcacaaataacactagaatacaaagatggtaaacccgttaaaacaagttctgttgttgtttctactcaacataaaaaaaattgttcgcaagatgatattcgtgaaattgtaagagaagttgtaattaaaactttaccagatgactggatgtgtttagaagacgagttttatgttaacccaacaggtatttttgaaataggtggtcctgacggagatgctggtcttactggaagaaaaataattgtagatacatatggaggagcttcacctcatggtggaggggctttttcaggtaaagaccctacaaaagtagataggtcagctgcttatctaaccagatatttagcaaaaaatgttgttgccgcaggacttgcttctaaatgtacaatacaaattgcatatgcaattggtatctctaaacctctttcattatatgtaaatactgaaggaacaggaaaaatagatgatagtaaaattgaaaaagttcttttaaatttagtcgacatgtctccaagaggtataagagaacatttaaatttgaataaaccaatttacgttccaacttctgcttatggtcattttggaagaattccaaatgaaaaaattgatggctctttttcatgggaaaagacagatcttgttgaaagcattctaaaggaaatttaaa

SEQ ID NO: 243580 - DNA, 1153 bp, Unknown
  Bacterial polypeptide expressing nucleotide sequence isolated from the Sargasso Sea
catggcaaagctgtttacttccgagtcggtctccgaaggccatcccgacaagattgcggaccagatctccgatgcggtcctggacgccatcctcaagcaagacaccaaggcccgtgtcgcctgcgagactctggtcaagaccggcatggtcatggtggccggtgaagtaaccaccaccgcctgggtagacatcgagcagatcgtgcgcgacaccgtgcgcgacatcggctacacccactccgacatgggcttcgatgccgactcctgcgccgtgctgaatgccatcggcaagcagtccccggacatcaaccagggtgttgaccgcagcgatccgctggaacagggcgcgggcgaccagggcctgatgttcggctacgccaccaacgaaaccgacgtgctgatgccggcccccatcacctactctcacctgctggtgaagcgtcaggctgaagtgcgcaagaacggcaccctgccgtggctgcgcccggatgccaagagccagctgaccttcgcctacgacgacgccggcaagatcatcggtgtggacgccgtggtgctctctacccagcacgccgaatccatcagccacaaggatctggtggaagcggtgcgcgaagagatcatcaagccggtgctgccggccgagtgggtcaacaaggacaccaaatacttcatcaacccgaccggccgtttcgttatcggcggcccgatgggtgactgcggtctgaccggtcgcaagatcatcgtcgacacctacggcggcatggcccgtcacggtggtggcgccttctccggcaaggatccgtccaaggttgaccgctccgccgcctacgccgcccgctacgtggccaagaacatcgtcgccgccggtctggccgatcgctgtgaaatccagatctcctacgccatcggcgtggccgagccgacctccatcagcgtcgaaaccttcggcactgccaaggtggctgaggatctgctggtcaagctggttcgcgagcacttcgaactgcgtccgtacggcctgatccagatgctggatctgaagcgcccgatctaccaggctactgccgcctacggtcactttggtcgcaacgagttcccgtgggagcagaccgacaaggccgaactgctgcgttccgccgccggtctgtaa

SEQ ID NO: 243581 - DNA, 1095 bp, Unknown
  Bacterial polypeptide expressing nucleotide sequence isolated from the Sargasso Sea
agtttgtgacagaatttcagacatggttgtagactcatatttgtctaaggatcctttttctcgagtagcttgtgaaactctcacaacaacaaacaaagtagttctagctggagaaatcagaggtccaaaaattgaaaaagatgaaataattagcaaagttagagaatgtataaaagatattggttatgatcaaaaggggtttagttggaaaactgcctctattgaaacattcttacatgaacagtctgctgatattgcaatgggagtagactccaaaaataataaagatgaaggagccggagatcaaggtattatgtttggttatgcttgtaatgagacagatgacttaatgcctgcaccaatttttttttctcataagattttaagactaatggcggaagatagaaaaaaaaaatctttactaggtatcgagccagattctaaaagccaagtatctatgctttatgaaaataataaaccagttaaagtaacttctgttgttatatctactcaacattcaaaagatttaaatcaagaaaaagtaaaagatttagtaataccttatataagaaagtctataccagaagaatttgttaaagatttagacccgaaagaaatttacattaatccaacaggtcaatttataattggaggacctgatggggatactggcttaaccggtagaaaaataattgtagatacttacggaggagctgcgccacatggaggaggagctttttctggaaaagatccaactaaagtagatagatctgctgcttacgtagcaagatatcttgctaaaaatattgtctctgcaggtgtatcagaaaaatgtttgatacaattagcctatgctataggggtatctaaacctctctctatttttattaaacttgcagaaggagatgaagacaaagtaaatagtgtcaaaaagataatcgatgagaattttgatttatctccaagaggcattagagaaatgctaaaaatgaacaatgcaatttatgagataacttcttcctacggacattttggaagaaaacctacaaataaaggtgaatttacttgggaaaaaacagataaagcagaattatt

SEQ ID NO: 243582 - DNA, 745 bp, Unknown
  Bacterial polypeptide expressing nucleotide sequence isolated from the Sargasso Sea
ctatagccatttaattttgagtgatttggctaaattaagaaagtctggcaatgctaaaggcattttgcccgattctaaatcacaagtaacgttattatataatccagataataagcctataggttgtgataatgttgtggtttccactcaacatgaaccagatatgactaaaagtaaaatatttgattgtatatatcctattatacaaaacatattgccagatgaatggatgcctccagaagaaaaaatatttattaaccctactggaaagtttgaaataggaggacctgatggagatgcaggtcttacaggtagaaaaattattgtagatacatatggcggagcttgcccgcacggaggaggggctttttcaggaaaagacccttctaaagtagataggtctgctgcttatgctgcaagatatgtagcaaaaaatattgtctatgccggaattgctgaaaggtgcactattcaattagcttacgctataggaatggttgagcctttatctgtatatgttaatacttatggaactggaaagttaagtgatatagaaataatagatttaattaataaaacttttgatttaacacctagaggtattagagatatgcttaacctctctaaagttaattatttatctacagctgcttatggacactttggacgagattcagaaagtagtgaatattttacttgggaaaaaatagataaggctaaatcaattttagagtctataagctaa

SEQ ID NO: 243583 - DNA, 1055 bp, Unknown
  Bacterial polypeptide expressing nucleotide sequence isolated from the Sargasso Sea
gatgaagaaaaattttttatttactagtgagtcagtttcagaaggtcacccagataaggtttgtgatagaatatcagatatggttgtagatagttatctaggagcagaacctcagtcaagagtagcttgcgaaacattaacaacaactaacaaagttgtcctagctggagaggtaagaggaccagaaattaaaaaagatgatttaattcagaaagttagagaatgtatcaaggatattggttatgaccaagatggctttagttggaaagatactactaagattgaaactcatttacactctcagtcagcagatatagccatgggagtagactcatccggaaataaagatgaaggtgctggagatcagggaattatgtttgggtatgcatgcaatgaaactgatgtcctaatgccagctccaattcattactcacatagaattttaagattaatggctgaggatagaaaatctggaaagctaaaaggtatagagccagattcgaaaagtcaaattacaattgaatacaaagacggtgtacctaatgcagtaaaatcagtagtgatatctacacaacattctaaagatgttgatttagtaaaagttaaagaactttgtacgccatatattgaaagatctattccaaaaaatttattaggaagtcttgatgaaaaggagatttatataaatcctacaggaaactttgttataggtggccccgatggagatagtggattgactggtagaaagataattgtagatacttatggtggagcagcgccacatggtggaggtgctttttcaggaaaagacccaacaaaggttgatagatcagctgcatacgcttcgagatatttagcaaaaaatgtagttgcttcaaagattgcagacaaatgtttaatccagttagcttatgctattggagtttcaaaacctttatcaatttatgttgatctttttgataatgatgaggaaaaaaatagacatgtagaaaaattaattaatgagaattttgatttaagtcctagaggaattagagaaatgcttggtttaaata

SEQ ID NO: 243584 - DNA, 1084 bp, Unknown
  Bacterial polypeptide expressing nucleotide sequence isolated from the Sargasso Sea
aatgtataaaactgctgaaactgtttctccgggacaccctgataaaatagcagacctaatatctgactatgttttgacagaagcactttcaaataataaaaaatccagggtagctgttgagacttttctaacagggacatcttacggagggttagttgttgttggtggtgagataagtgaaattgccaatattgatgatgaaactataaataaaatagttaaagaggcattatctaaaacaataaaaacaagttttgaggattttcaactagataatttaaaaatacaaaatgaattaactcctcaatctgaagagataagatctgcagtcgaagatgataaagatcttggagctggtgatcaaggcattatggtcggctatgccacaaatgagacaaaatcacttatgcctcagacatttgatatcagtagaaatatacaaatgtccttatgggatattcaaaataatgatgaaagtcttgacttagattcaaaagtacaagtaactactggtggaaaaaaaaccaaagttgtaatttctacacaacacaaaaaagatattgatattgacggtttaagaaataatctagaggaaatgattggagaattagtaaacaatgatttccaatttgatttgaatccttccggatcatttgtaaagggtggacctgcaggtgatacaggtttaactggtagaaaaattgttgttgatgcttatgggccaacggtacctgtaggagggggagctttttctggaaaagatccttcaaaggttgatagatcagcagcatacgcagcaagacatttagcaaaaaatattgttgctcataaattggcagaaatatgtcaagttagagtagcttatgcaattggaaaagcagaaccttatgaattatctattgaaacatttgatacatcaaaaaaagatgatttagttctaaatgattttgtctctaagtttgatatgatgccaggaatgatcatcgaacgcttagatttattaaatgtaaattataaaaaagatacactgttttctcattttggtcatgatgatcgcaattgggaaaaaattgaagatctataa

SEQ ID NO: 243585 - DNA, 1165 bp, Unknown
  Bacterial polypeptide expressing nucleotide sequence isolated from the Sargasso Sea
atgaaaaaagattttttatttaccagtgagtcagtttccgaaggtcatccagataaggtttgtgatagaatatcagatatggttgtagactcttatttgggggcggagtcacagtcaagagtagcttgtgaaactttaacaacaacaaataaagttgttttagctggtgaagtaagaggtcctgaaataaaaaaagaagatttaattcaaaaagttagagaatgtattaaggatattggttatgatcaaaaaggttttacatggaaagaagctactaaaatagaatgtcatcttcattcacagtcagctgatattgcaattggagttgattcatcaggaaataaagatgaaggagcgggtgaccaaggaataatgtttggctatgcatgcaatgagacagatgtactaatgccagcaccaatacattattctcataaaattttaagacttatggctgaagacagaaaatctggtaaattaaaaagtatagaaccagactcaaaaagccaaatcacaattgagtataaagatggaaaacctgctaaagttaaatcagttgtcatttcaacacaacactcagtagatgtgaatcagtctcaagtaagagaactagttaaaccatatattgaaaaatcaattccaaaaaatcttttaaatggattaaaagaaaatgaaatatatgtaaatccaacaggaaattttgtaatcggtggtccagatggtgatagtggactaacaggaagaaaaataattgttgatacttatggaggtgctgcaccacatggtggtggagctttttcaggaaaagaccctacgaaagttgataggtctgcagcatatgcctctaggtatttagcaaaaaatgtagttgcttcaaaaattacaaataaatgcttaattcaattagcatatgctattggagtttcaaaacctttatcaatttatgttgacctttttgataatgatgaagaaaagaacaggcatgttgaaaaacttataaatgaaaattttgatttaagtcccagaggaataagagagatgttaggtttaaataaaccaatatatgaaaaaactgcagcatatgggcattttggaagagatccaggaaatgatggatcgttttcttgggaaaaaaccgataaaaaagacatttttagtaagtaaa

SEQ ID NO: 243586 - DNA, 718 bp, Unknown
  Bacterial polypeptide expressing nucleotide sequence isolated from the Sargasso Sea
aatgagtgattttattttcacttcggaatccgttactgaaggtcatcctgacaaaatatgtgatcaaattagtgacgctgttttagatgctctattgacagaagatccagaaagcagagttgcatgcgaaactgtagtaaatacaggtctttgtttacttactggagaaataacttcaaaagcaaaggtcgattatataaaacttgttagaaatgaaattaaagaaattggatatgaaggctatagagcaggtggttttgacgcaaatagttgtgctgttttagtagcacttgacgaacaatcaccggatatttctcaaggagtaaacgaggcggacgatattaacgatgatttagaagataataccggagctggtgaccaaggcataatgttcggctatgcatgtgatgagacgcctgaattaatgcccttacctattagcttagctcatagattagccattcaacttgccaaagtgaggcatgaagaagtccttaattatctactccctgatggcaaaactcaagtaagcattgattacaaaaaaggtttaccagtctctattaatacaattttaatttcaactcaacataatcctgagatagatgggatgacaaatgaagaagaaattcgtcaaagaataaaagaagatttatggacccatgttgtaattcctgctactgaagatttagaaatcttcctgctactgaagatttag

SEQ ID NO: 243587 - DNA, 880 bp, Unknown
  Bacterial polypeptide expressing nucleotide sequence isolated from the Sargasso Sea
aatgaagaaaaatttcttatttacaagtgagtcagtgtccgaaggacacccagataaggtttgtgacagaatttcagatatggttgtggatacttttttagcatcagagccccaagcaagagttgcttgtgaaactttaacaacaacaaacaaagttgtattagctggagaagtaagaggacctgaacttaaagaagatgaactaatttcaaaagtaagagattgtattaaagatataggctacgatcaagatggcttttcttggaaagaacaaacaaaaattgagactcatttacattcacagtcagctgatattgctatgggtgtagattctgcaggaaataaagatgaaggtgctggagaccaaggaattatgtttggttacgcttgtaatgaaacagatgttttaatgccagccccaattcattactcacataaaattttaagattgatggctgaagatagaaaatcagggaagctaaatggaatagaacctgactcaaaaagtcaaattactattcaatataaagagggtatgcctgcagctgtaacatcggtagttatatctacccaacattctaaagatgttagcttagcacaagtcaaagagctttgtatgccttacatagaaagatctattcctaaaaatttattaggaagtcttaatgaaaaggaaatttacataaatccaactgggaattttgtaataggtggacctgacggggatagtggtttaacaggtagaaaaattattgtagatacttatggtggagctgcaccacatggaggaggtgcattttctggcaaagatccaacaaaagtcgatagatcagctgcttatgcatcaagatatttggcaaaaaatattgttgcatcaaaa

SEQ ID NO: 243588 - DNA, 1156 bp, Unknown
  Bacterial polypeptide expressing nucleotide sequence isolated from the Sargasso Sea
atgagttatatttttacgtcggaatctgtttccgcaggacacccagataaagtctgtgatcaaatttcagatgcagttttagacgcatacctagccgaagatccaaacagtagagttgcatgtgaaacaatgatcaaaaataacatggtttatattgccggtgaaataacatcattaggcagtccagatttagagcctgttgttagaaaaactattaatgatattggttatgacactgacgaatatggttttaatggcgatacttgtgaatttactaatcttgtttttgaacaatcaccggatatatctcaaggtgtaactgagggtgaaggagaaaatcttgagcaaggggctggagatcaaggattaatgtttggctatgcttgtactgaaactgattcattaatgcctcttccaattgatctttctcatagactagtaaaaaaacaagctgatgtaatgaaaagtaacgaattatcttggttaagaccagatgcaaaaagccaagttagtgcaatttattcagatgatggtaaatctattgaaggtttatcagcaattgtactttcaacacaacatgatgaagatgtaacccaagaagaaattaaagaaggggttatggaaaaaattatcaagcctatagttcctgaagagtggatcttagattctacaaaaatctatattaacccaactggtaaatttgtgattggaggacctgttggagattgtgggctaactggaagaaaaataattgtagatacatatggcggaatggctagacatggtggaggagccttttctgggaaagatccatcaaaagtggatcgttctgctgcttacgctgcaagatatgttgcaaagaatattgttgctgctggcttagccgattattgtgaaatacaagtttcttacgccattggtgtagcaaagcctacatcaataaatgttaatacttttaatagcgaaaagatatctaaagaagcaattgaaaaaattgttgaagagaagtttgatttacgaccaaagagtcttatcaacatgcttgatctaaaaagacctatttatcttccaacagctgcatatggacactttggaagaacagatattgatctttcatgggagagaactgataaggcttcagaaatttcacaataaa

SEQ ID NO: 243589 - DNA, 814 bp, Unknown
  Bacterial polypeptide expressing nucleotide sequence isolated from the Sargasso Sea
aggtgctggagacaagggattatgtttggatatgcttgtaatgaaactgatgttctaatgccagccccaattcattactcacatagaattttaagattaatggctcaagatagaaaatctggaaagttaaaaggaatagagccagattcaaaaagtcaaattacaatcgaatataaagatggtgtacctaatgctgtaaaatcagtggtgatctctacacaacattcaaaagatgttaacttggcaaaagttaaagaactttgtatgccatacattgagaaatctattccaaaaaatttattaggaaatcttgatgaaaaagagatttatataaatccaacaggtaattttgtaattggcggtccagatggtgacagtggattaacaggaagaaaaattatagtagacacatacggaggagcagcaccacatggaggaggagctttttcaggaaaagatcctacaaaggttgatagatcggcagcttatgcatcaagatacttagcaaaaaacgtagttgcatctaaaattgcagacaaatgtttaattcaattagcatatgctattggagtttcaaaacccttatcaatttatgttgatctttttgataatgacgaagaaaaaaatagacatgtggaaaaattaattaatgaaaattttgatttaagcccaagaggaattagagaaatgttgggtttgaataaagcaatatatgaaaaaacagcagcttacggtcactttggaagagatcctgagtcaaatggtgcattttcttgggaaaaaacagataaagctggtgttttcaataagtaaa

SEQ ID NO: 243590 - DNA, 820 bp, Unknown
  Bacterial polypeptide expressing nucleotide sequence isolated from the Sargasso Sea
aatgcccttaccaataagcttggcacatagattagctattcaacttgctaaagttaggcatgaagaagtccttaattatctactccctgatggtaaaactcaagtaagcattgattacgaaaaaggagtgccggtttctattaatacaattttaatttcaacgcaacataatcccgagattgatggggtaacaaatgaagaagaaattcgtcaaagaataaaaaaagatttatggacaaatgttgtgattcctgctactgaagatttagaaatcaaaccaaacattcataaaacaagatttctagtaaatcctacgggaaaatttgtcgtaggaggtcctcaaggagatgctgggcttactggcagaaaaattattgtagatacttatggtggatatgctagacatggaggaggagcattttctggtaaagatcccacaaaagtagatagatcagccgcttatgctgcacgttatgtagctaaaagtatagtcaaggcaaaattggcaaaaaaagcagaagtacaattaagttatgcaattggagtagcaaaaccaatttcgattctcgtggaaacttttgatactggtgttatttcgcaagctaatttgactcggcttattaaagagcactttgatttaagacccgcagcaataataaaagaatttaacttaagaaatctacccaaagaaatgggaggtaaatttttcagaaagaccgcatcctatggacattttggcagaagagatctagatcttccttgggaaaatgtagaagaaaaagcagcccaattagcagaggcttccaaaatctttttataa

SEQ ID NO: 243591 - DNA, 784 bp, Unknown
  Bacterial polypeptide expressing nucleotide sequence isolated from the Sargasso Sea
atgtttggttacgctactaatgaaactgaagtcttaatgcctgcccctataacttattctcatagactagttgagcaacaagcatttataagaaaatctggaaaactttcttggttaagaccagatgctaaaagtcaagtaagctttgtatatggagatgacggaaagcctgagtccatttcggcggttgttttatctacccaacatgatccagaagtttcgcaagaagatttgaaagaaggggttatggaggaaatagtgaaacctatacttccttctaactggcttaatgcaaacactaagtatttcattaatcctactggaaggtttgaaataggtggacctgttggagactgtggacttactggaagaaaaataattgttgatacttatggtggtatggctagacatggaggaggtgctttttctggaaaagacccttcaaaggttgataggtcagctgcttatgcaggaagatatgttgcaaagaatatagttgctgcgggcttagctgacaggtgtgagatacaaatttcttatgcgataggtgttgcagaacctacatctattagtgtaaacaccttcggaactgctaagattgatgaaaataaaatttcagatctaatcagagaacattttgatttaaggcctagacaactcattaatatgctagatctgaaaaggccaatctatcaagctacagcagcttatggtcattttggcagagaagagagtgcttttacttgggaaaaaacagataaagctgatgctttgaaaggataag

SEQ ID NO: 243592 - DNA, 1171 bp, Unknown
  Bacterial polypeptide expressing nucleotide sequence isolated from the Sargasso Sea
atgaaaagagattatatatttacaagtgagtcagtatctgaagggcatccagataaagtttgcgatagaatatctgatatggtcgtagatagttatctggcatctggtgacccacaaactcgagttgcatgtgaaacacttactactactaacaaagtagttttagccggagaagtaagaggcccatcaatatcaaaagaccaaatcatatcgcaagtaagagattgcattaaggatataggatatgaacaagatggttttcattggcaaaattgtgaaatagattatcatttacatcctcagtcatcagatattgctatgggagttgattcaggaagtaataaagatgaaggagctggtgatcaaggcattatgtttggttacgcttgtaaagatacagactcattgatgcctgcgcctattcattattcccatcaaattttattgaaaatggctgagctaagaaaaaatggaactagaaatgaatttgaaccagattcaaaaagtcaggttacaatgttgtatcaaaacggaaaaccgtcaaaagttacttcaattgttgtatctacccagcataaagaaggtttaacacctgatcaaattaaagaagtagtaaaacctatagttgatgaatgtatcccaagtcatcttatgcaagagcttaaagatgaagagttttatgttaatccaactggaaattttgttattggaggtcctgatggggattcaggtcttactggaagaaaaattatagttgatacttatggaggggctgctccacatggaggaggagctttctcaggaaaagatccaagtaaagtagatagatcagcagcttatgcggcaagatatttagctaaaaatatagttgcagctgagttagcagatgaatgtgttattcaacttgcgtatgcaattggagtatcaaaacccttatcaatttatgttaatacaaatggaacaaacaaagttgatgaaactaaaatagaaaatttaattcctgaactttttgatttaagtcctagaggtattagagaacatttaaatttaactaacccaatatacgtgccaacttctgcttacggccatttcggaagaaaaccaactacagaaggacattttacttgggagaaaactaatttagttgatagttttaaaagtgctttctagt

SEQ ID NO: 243593 - DNA, 1171 bp, Unknown
  Bacterial polypeptide expressing nucleotide sequence isolated from the Sargasso Sea
atgagtaatcttaaaaattatctttttaccagtgagtctgtatcagaaggacacccagataaagtttcagatagaatttcagatatggttgtagatagctatctttctagagatccattttcaagagtagcttgcgaaacactcactacaactaataaagttgttatagctggtgaagtaagaggtccagaaattaaaaaagatgaattaatagaaaaagttagaaaatgtataaaagatattgggtatgaccaagagggttttacttggaaagaagctacaaaaattgaaagtcatctacattctcaatctgctgatattgctatcggagtagactcttctggaaataaagatgaaggagctggtgatcaaggaattatgtttggatatgcttgtaatgaaactgatgtattaatgccagcaccaattcattattcacacaaaattctaaaactaatggccgatgatagaaaatcaggtaaacttaaaaatattgaaccagattctaaaagtcaggtaacctttgaatatattgatggtaaaccagtaaaaattaagtcagtagttatatcttcgcaacattctaaggatgtaaatcaagctcaagtaatagatttgttaagaccttatatgcttaaagcaataccaaaaaattttcttgatggttttaatgatgaagaattttatgttaacccaactggaaattttgtaattggtggtccagatggagattgcggacttacaggacgaaaaataatagttgatacttacggtggtgccgcccctcatggtggaggtgctttttcaggaaaagacccaactaaagttgatagatcagctgcttatgcagcaagatatattgcaaaaaatattgtagcctcaaaaataagcaacagatgcttaattcagttagcttatgctataggtgtttctaaacctttatcaatttatgttgatttgtttgataatgatttagataggaataaatttgtcattgagaaaattaaagaaaattttgatttaagtcccagaggaattagagagatgcttcaattaaataagcctatatatgaaaaaacctctgcctatggccattttggtagaacacctgaaaacaacggttcattttcatgggaaaaaactgataaattaagcattttttctaaatagt

SEQ ID NO: 243594 - DNA, 934 bp, Unknown
  Bacterial polypeptide expressing nucleotide sequence isolated from the Sargasso Sea
aaaaaaattggttatgaacaagccgggtttcattgggaaacgcttgatgtttccatatatgtgcactctcaatcaactgatatcgcccaaggtgttgatgcatcaggaggcaaggatgaaggtgcgggagatcaaggaataatgtttggctatgcttgtaatgaaacagaggcgcttatgcctgccccaatcttttattctcatgctattttggagcgattatctaaagccaggcattctggtgaggaagttggtttggggccagattcaaaaagccaaattacactggcctatgaaaatgggaaaccggttagagctcattcaatagtggtttcaacccagcatgcttccgatctaaatcaggaggatgtgagggaaattgtaaggccatacgttgctgaagttttgccccaaggatggatgtgtgacgactctgagttttatgtaaaccctacggggagatttgtaataggtggtcctgatggtgacgccggactgacaggaagaaaaataattgttgacacatatggcggagccgcttgccatggtgggggggctttttccggaaaggaccctagtaaagtcgacaggtctgctgcttatgctgcgcgctatttagcaaaaaatgttgtagctgcaaaactcgcagatagatgtagcatacaactctcatatgccattggagtatctaaacctctctcagtatatgtggactgccatgggacggggaaacaagatgaggaaaaaatatctagtcttattcaagaagccctagatttgagtcctcgaggtattagggaacacctgaatttaagccagcccatatatgcccggacagcagcttatggtcattttggtaggccggttgattctgatgggggtttttcatgggaaagcacagatctcgtagaccttttgaagggcttggtttaaa

SEQ ID NO: 243595 - DNA, 814 bp, Unknown
  Bacterial polypeptide expressing nucleotide sequence isolated from the Sargasso Sea
aatgaaaaaaaattatttatttacaagcgaatccgtttctgaaggtcatccagataaagtttgcgacagaatttctgacatggtagttgatacttatttaggtgcagagccacaatcgcgagttgcctgcgaaacattaacaacaactaataaagttgtactcgctggagaagttagaggtccagaaattaaaaaagatgaattaataaacaaggttagagattgtattaaggatattggttatgatcaagagggttttacttggagagaagcaaccaaaattgaaagtcacttacatgcacaatcagctgatattgcaatgggagtagactcgtcaggtaataaagacgagggtgctggagaccaaggaataatgtttgggtatgcttgtaatgaaacagatgtattaatgccagctcctatccattattctcataagattttaagattaatggccgaagacagaaaatcaggaaaacttgaaggaatagaaccagactcaaaaagtcaaattactattgaatataaaaatgggaaaccagcagcagtaaaatcagttgtgatttctacgcaacactcaaaagatgttaatttagctaaagtgaaagaactttgtgttccatatattcataaagctattccaaaaaatttattaggaagtcttgatgataacgaaatttacataaatcctacaggaaattttgtaattggaggtccggatggagacagtggtcttacaggtagaaaaataattgtagacacttatggaggagcagcccctcatggcggaggtgcattttcgggaaaagacccg

SEQ ID NO: 243596 - DNA, 496 bp, Unknown
  Bacterial polypeptide expressing nucleotide sequence isolated from the Sargasso Sea
atggaaggtaattatttatttacatcagaatctgtttctgaggggcacccagataaggtttgtgatattgtatcagacacagttttagatttatgtttatcaaaggatcctcaagctagagttgcttgtgaaactatgacaactactaatagaactgttttggcaggtgaactgcgggttcctgagagttgtatggcaagtgacggtaaagagttatcttctgacttcaaacacgaaatagaaaatgctgtaagacaagcagttaaggatattggctacgaacaagatggatatcattggaaaaacatggttgttgaaaaccatcttcatgggcaatcacctgatattgctatgggtgtagatgcaggagataataaagaagagggtgccggggaccagggaataatgtttggttacgcttgtaaagatacagacgttttaatgcctgcagcaattcattactcacataagatacttcaatcattggcaaatgctc

SEQ ID NO: 243597 - DNA, 1165 bp, Unknown
  Bacterial polypeptide expressing nucleotide sequence isolated from the Sargasso Sea
atgaagaaaaattttttatttacaagtgagtcagtttcagaaggacatccagataaagtatgtgatagaatttcagacatggttgttgatacatacctaggtatggagccacaagctagagtggcttgcgaaactttaacaactacaaacaaagttgtattagctggagaaacaagaggacctgatattaataaagatgaattaatttctaaagttagagattgtattaaagatattggctacgaccaagatggttttacttggagagatgcaactaaaatcgaaagtcatttacattcacaatcagctgacattgcaatgggagtagactcatcaggaaataaagatgaaggtgcaggagatcaaggaataatgtttggttatgcatgtaatgaaactgatgttttaatgccagcgccaattcattactcacataaaattttaagattaatggctaaagatagaaaatctggaaatcttaatggaatagaaccagattcaaaaagtcaaattactattgaatataaagatggaaaaccatcagcagtaaaatcagtagtgatttctacacaacattccaaagatgttaacttagccaaagtaaaagagctttgtatcccatacattgaaaaatctattccaaaaaatttattaggaaatcttgatgaaaatgaaatttatataaatccaacaggaaattttgttattggaggaccagatggagatagtggattaacaggaagaaaaattattgttgacacttatggaggtgcggcacctcatggaggtggagcattttcaggaaaagacccaacaaaagtagatagatcagcagcatatgcttcaagatatcttgcaaaaaatgttgtagcttcaggaattgctgataagtgtctaattcaattagcatatgccataggtgtttcaaaacctttatcaatttatgtagatttatttgataatgatgagcaaaagaatatgtatgttgagaaattgataaatgaaaattttgatttaagccccagaggaattagagaaatgctaggtttaaacaaagcaatatatcaaaaaactgctgcatacggccattttggaagagaacctgaatccgatggttcattttcttgggaaaaaaccgacaaatcagacgttttcaagaagtaaa

SEQ ID NO: 243598 - DNA, 597 bp, Unknown
  Bacterial polypeptide expressing nucleotide sequence isolated from the Sargasso Sea
tatgaacaagaattatatttttacgtctgaatcagttaccgaaggacatcctgacaaggtttgtgacaaagtttctgatgcgattttagacgaatttttaagaggtgatcctgactccagagttgcagtagaaactttgacaacaactggctttgttggtgttgctggtgaagttacatcaaaagctaattttgatattgaacaagtaatcagaaagacaatttctgaaattggatataatgatcctgatttaaaatttgattccaactcctgtgaagtaatgattaaacttgattcacagagttctgatatatcacaaggtgtaacagctaatgaaaataaagagcaaggagctggtgatcaaggtctgatgtttggttatgcatcaaatgaaacagaagagcttatgccattaccaatacttttggctcagaaattaacaaaaaaacttactgatgttagaaaaagtgggcaattatcatgggtcagacccgatggaaaatcacaggtttcagtgagatatgagaatgataagccaacaaaattggaggctgttgttatatcaacacagcattctcctgaaatctcgcaagagga

SEQ ID NO: 243599 - DNA, 553 bp, Unknown
  Bacterial polypeptide expressing nucleotide sequence isolated from the Sargasso Sea
atgagtaatcttaaaaattatctttttacaagcgagtcagtttctgaaggacatcccgataaagtttgcgacagaatttccgacatggttgttgatacttatttaggtatggagccacaagctagagtagcttgtgaaactttgacaactacaaacaaagttgtattagctggggaaacaagaggacctaatatcaataaagacgaattaatatcaaaagtacgagattgtatcaaagatattggttatgaccaagacggttttacctggaaagaagcaactaaaattgaaagtcatttacattcacaatcagccgatattgctatgggagtggactcatctggtaataaagatgagggtgctggagaccaaggaattatgtttggttatgcttgcaaagaaacagaagcattaatgcctgctccaatttattattctcataaaattcttaggttgatggctcaagatagaaaatctggaaatcttaatggaatagaaccagactcaaaaagtcagatcactattgaatataaagatggtaaaccatcagctg

SEQ ID NO: 243600 - DNA, 679 bp, Unknown
  Bacterial polypeptide expressing nucleotide sequence isolated from the Sargasso Sea
attgagccggactctaaaagtcaaataacaatagaatataaagatggaaaaccttttaatgtaaaatctgtcgtaatatcaacccaacattccgcagacgtaaatcaatctcaagttagagatttagttaagccttatattgaaaaatcaattcctaaagaattactaaaaaatttgtccgataaagaaatttatgtcaatccaacaggaaattttgttattggtggtcccgatggagacagcggtctaacaggcagaaaaataatagtcgacacttatggtggagctgcaccacatggtggaggagctttctcaggaaaagatcccacaaaagttgatagatcagctgcatatgcatcacgatatcttgcaaaaaatattgtagcttcaaaaattgcagataagtgtttaattcaattagcatatgctattggtgtgtcaaagccactttcaatctacgtagatttatttgataacgatgaagaaaagaacaaacatgtagaaagcttaatacagaaaaattttgatttaagtcccagaggcattagggagatgttaggattaaataaacctatatatgaaaaatctgcagcatatggacactttggtagagatccaggacctgatggctctttttcatgggaaaaagttgataaaaaagacatattcagtaagtaat

SEQ ID NO: 243601 - DNA, 1171 bp, Unknown
  Bacterial polypeptide expressing nucleotide sequence isolated from the Sargasso Sea
atgagtaatttaaaaaatttcctatttactagcgagtcagtttcagagggacatccagataaagtatcagatagaatttctgatatggttgttgatagttatatttctggagatccttattcaagagttgcttgtgaaactttaacaacaacaaacaaagttgtgcttgcaggtgaagtaagagggcctgagattaaaaaagatgatttaatcgaaaaagtaaggaattgcataaaagatattggatatgatcaggaaggatttacctggaaagaagcaacaaaaatagaaagtcatttgcattctcaatctgctgatattgcaatgggtgtagactcatctggaaataaagatgagggtgcaggagaccaaggtataatgtttggttatgcatgtaatgaaacagatgtatttatgcctgcaccaattcattattcgcataaaattttaagacttatggccgaggatagaaaatctggtaaattaaaaaatattgaacctgactcaaaaagccaagttacattcgaatatgttgatggtaaaccaactaaagtaaaatctgttgttatatcatctcaacattcttctgatgttaatcaagcccaggtaagagaattattaagaccgtatatgttaaaatcaattccagaaaaatttcttaaagactttaatgaggaagagttttatgtaaacccaactggtaattttgtaataggtggtccagatggggactgtggtttaacaggaagaaaaattattgtggatacctatggtggagcagcaccccatggaggaggagcattttcaggtaaggatcctacaaaagtagatagatctgctgcttatgcggcaagatacattgctaaaaatgttgttgcttcaaaaatagcagataaatgtttgatacagttagcttatgcaataggagtttcaaaacctttatcaatttatgttgatttgtttgataatgatttagataaaaacaaatttgttgttgaaaagattaatgaaaattttgatctcagtcctagaggaattagagagatgttaaaccttaatagacctatatatgaaaaaacagcagcctatggtcactttggtagaactccaggagatgatggatcattttcgtgggaaaaaactgataaaatcaacgttttttctaaatagt

SEQ ID NO: 243602 - DNA, 821 bp, Unknown
  Bacterial polypeptide expressing nucleotide sequence isolated from the Sargasso Sea
aatgagttatatatttacttcagaatctgtttcggcaggacatccagataaggtctgtgatcaaatttcagatgctgttttggatgcatatttagcagaagatccaaatagtagagttgcatgcgagactatgattaaaaataatatggtttttattgctggcgaaataacttcaactggaagccctgatttggaacctgtagtaagacaaaccattaatgatattggatacgataatgatgaatatggatttaatggagatacatgtgaatttacaaacttagtttttgaacaatctccagacatttctcaaggagttacggaaggagaaggcgaaaacctcgaacaaggcgctggagatcaaggacttatgtttggttatgcctgtactgaaactgaagcacttatgcctcttccaattgatctttctcacagactagtccgacaacaagcagaagttatgaaaagcgatgggctttcatggctaagaccagatgcaaaaagtcaggtaagtgcaatttactcagatgacggaaagacgattgaaggtctttcagcaattgtactttcaacccaacacgatgaagatgtttcacaagatgaaattaaagaaggagtaatggaaaatatcattaagccaattgttcctcaagaatggatactagattcaacaaagatatatatcaatccaacagggaagtttgtaattggtggcccagttggtgattgcggtcttactggaagaaaaattattgtagatacctatggcggtatggcaagacatggtggtggtgcattttcaggaaaagatccatcaaaag

SEQ ID NO: 243603 - DNA, 1165 bp, Unknown
  Bacterial polypeptide expressing nucleotide sequence isolated from the Sargasso Sea
tatgagcgaaatgttattcacttcagaaagtgtcacggaaggacatcctgacaagatgtcagatcaaatttctgatgccatacttgacgcattactcgaacaggattcttcaagtagagtagcctgcgaaacacttgttacaaccggcatggttgtagtggcaggggaagttacctcaaaagccacagtagacatgcagaaagttgtaagaaataccatagaagaaatcggttatctagactccaacatgggttttgatttcaatacatgcgctgtcttgatcagccttgataaacagtcagaaaatattgctcagggagtaaacgaaggtgaaggggcacacactgaacagggtgctggagaccagggattaatgtttggttatgcatgtaaggagactcctgaattaatgcctctgcctattcagctggcacacaggcttacagaaaggcttaccgaagttcgcaaaaatgggactctggaataccttcgtccagatggtaaatctcaggtaacagttcgttatgttgatggtgaacctaaatccattgatgcagtagttatcagcactcagcattcggaagatgtaagccaggagaagcttcatgaggacattatcaataatgttatcaataatgttattccttccaagtacttgaatggttctccaaaatttcatattaatcctaccggactttttgtaatcggtggacctcagggagattgtggacttacaggtagaaaaatcattgttgatacatacggaggtatgggaagacatggcggcggagcattttccggcaaagacccttcaaaggttgaccgctctgctgcttatgcagcacgtcacgtggcaaagaacgtagttgctgcaggacttgcatcacgctgtgaggtacagctggcttatgccattggagttgcggaaccagtctctgtctctgttgatacattcagcacaggcaggattgaagaatcaaaaataataaatttgattcgcaataattttgaacttaagcccgcaggactaatcagctatctcaaactgctacgtccaatctaccgaaaaacatctgcatatggacactttgggagagaattcccagaatttacttgggaatcaactgaaaaggctgatgatcttagaacacaggcaggaatttag

SEQ ID NO: 243604 - DNA, 751 bp, Unknown
  Bacterial polypeptide expressing nucleotide sequence isolated from the Sargasso Sea
atgtcatatctttttacatcagagtctgttagtgaaggacacccggataaaatagcagatcaaattagtgatggtattttagaccattttcttgcatttgatccaaatagtagagttgcaattgagactttggttactactggtcaggttattttatcaggagaggtttcaagctctgcatacattgatgttcaaaatattgctagagatataatctcatcagtgggttataataattcagaatataaatttactggtgagtcatgtgcggttatgtctttaattcatgaacaatctgaagatatttctcgagggattattaatgataaaaaagaagaacaaggtgctggtgatcaaggaatcatgtttggatatgcatgcaatgaaactgaaaatgcgattcctcttactcttgaaatatcaaatgaaattttgaaagaactttctctacttagaaaagaaaaaatactagactatttaagaccagattcaaaatcacaggttaccatagaatatgatgataatgataatccaattgcaattcacacaattgttatctccactcaacatgatgaatttgataaagatgaaaataggatgctttcattaatcaaagatgatatgataaaaaaattaatgcctagagtaatagataagttccctgatagaattaaaaaattgttcagcgaaaaaataaaatattttattaatccaactggaaaagtttgttattgggggccctcatggtgat

SEQ ID NO: 243605 - DNA, 638 bp, Unknown
  Bacterial polypeptide expressing nucleotide sequence isolated from the Sargasso Sea
caaggtggtaattgcaacgcagcatgatgatatgcttgaaaaatatggctctgaagaggatgagttaaaatttgtaaaaaaagaggtaattaatcacatcattattccagtcttggatagctatggtattccctatgagaatgagtttattgttaatggtacaggaagatttgtatatggtggtccagcggctgatacggggcttactggaaggaagatcattgttgatacatacggtggctatgcgccacatggtggaggagctttctctggaaaagatccttcaaaagttgatcgttcagcggcatacatgagcaggtatattgcaaaaaatgttgtagctgcagatcttgctgagaggtgcgaggtgcaattgtcatatggtataggagttgctgaacctacttcattctatgttaaaacatttggaacaagtacgatgagcgatcaagaattgacgtcactatgctctgaaatatttccgcttcgaccaggagaaattgtcaaacatttagacttaaaaaatccgagatattatgttacatcttcctatggacattttggacgtgatggtgacacttttacttgggaaaaaacagacttatcagatctacttagatctaaagcaaataattaaa

SEQ ID NO: 243606 - DNA, 978 bp, Unknown
  Bacterial polypeptide expressing nucleotide sequence isolated from the Sargasso Sea
aatggcggaatacgatattttcacttctgaatctgtatcagagggccatcctgacaaagttgctgaccaagtttctgacgcaattgtcgatgcaatgatagaacaggaccccgattctcgagtcgcctgcgaaacaatgataaagaccgggatggtcgctgtcgccggagagactcgcagtcaatcgaaaatcaacgtcgaagagatcgtcagaaaaacagtggctgatataggttatgacaatgaagaggttggctttaatgccaatgactgcaccgtcatcaatgcactggggatgcaatcaacagacatcgcgatgggtgtcgatgaatcgggagcccatgaacagggcgccggcgaccaaggtctgatgtttggatatgcaaccaacgaaactgacactctcatgcctgcaccaatccattacgctcatcggctagttgaaaaacaagcagaagtaagaagaacaaaattagattttcttcggcccgacgcaaaaagccagctaacttttaagtatgatgccgacggaaaacccgctcaaatagacgccgttgtcttatcaacacaacactcagctgacatctcccaagaagaactcagagcaaaggttttgtcagacattattgagcccattcttccttctaactggctttcttccgagaccaaaatattcattaaccctactggccaatttattatcggtggtcccgttggtgattgcgggctaaccggccgaaaaataatagtcgacacctatggcggtatggctcgacatggaggaggagcattttccggcaaagacccttccaaggtagatcgcagtgcggcctacgctgggagatatgtagcaaaaaatattgtagccgcaggtctcgcagaacgctgtgagattcaaattagttacgcgatcggaatcgcagaacccacgtccatcagtcttaacaccttcggcacgggcaagatacctgataaaga

SEQ ID NO: 243607 - DNA, 1018 bp, Unknown
  Bacterial polypeptide expressing nucleotide sequence isolated from the Sargasso Sea
atgagcaaatttacatttacttccgaatcagtaactgaaggtcatccagataaagtttgtgatgccatatcagatgctatagttgatagccttttgcatgaagataaagattctcacattgcttgtgaaactttagcaacaaaaaatttggtagttgtttctggtgaagtccgatcaaaaggtaatattgatgttgaaaatattgtaagagatactctagaagatattggatacactgatagtaatagaggaatggataataagtctgttgatataatgataaaagttcaagagcaaagtacagaaattgctcaaggtgtcgatcaatcagaagaccatgaacaaggggctggagatcaaggattaatgtttggatatgcttgtaatgaaacagcagaattaatgccaatgccaatttatttggctcatagattaactgaacgtctttcaatattaagaaaagacggaacgcttccttggcttggtcctgatggaaaatcccaagtatcagttgattatgttaatggtattccaacatctatttcaaaggtagttattgcaactcaacatgatgatatgttagaaaaatttggcacagaggaattagagcacagatttgtacaagaagaagtgattgaaaaggtaattaagcctattattgaaaaatctggattgaagacttcagatagttttattgttaatggaacaggaagatttgtatttggtggcccagatgctgatactggcttaacaggtagaaaaattattgttgatacgtatgggggatatgcaccacatggaggaggtgctttttctggaaaagatccttctaaagtagatagatcagctgcttatatggctcgatatattgctaaaaatatagtagctgctgatcttgcttctaaatgtgaggtacagttttcatatagtattggtgttgctgagccaacttcattttatgttaaatcatttaatactggtaagatatccgatgaagaattaacagatttagcaaaaa

SEQ ID NO: 243608 - DNA, 400 bp, Unknown
  Bacterial polypeptide expressing nucleotide sequence isolated from the Sargasso Sea
atgagcgactattcacttatcacttcagaatccgtatccgaaggccaccccgacaaaatgtcggatcagatttccgatgccattctggatacctaccttaccaaagaccccgatgcgcgggtcgccgttgagacgcttgtcaaaaccggcatggtggtggtggcaggagaagtcacaacggcgggtaacgtgacgcccggggagctcgaggatgttattcgccaaaccgtgctagatattggctttgactcttccgacgtgtgcttcgatggcaatacctgcgccgtgatcaatgccatcggtcagcagtcggccgacatcgcgctgggcacccatgaggcggatgaagccaaccaaggcgcgggagatcagggcctgatgttcggttttgcctcggatg

SEQ ID NO: 243609 - DNA, 106 bp, Unknown
  Bacterial polypeptide expressing nucleotide sequence isolated from the Sargasso Sea
aatggcacaacacatttttacctctgaatctgtttctgagggacatccggataaaatcgctgatcagatctctgatgcagtgctggatgcaattgtagaaacagat

SEQ ID NO: 243610 - DNA, 670 bp, Unknown
  Bacterial polypeptide expressing nucleotide sequence isolated from the Sargasso Sea
cctgactcaaagagtcaaattacaatagaatataaagatggaaaacctgcttcggttaagtcggttgtagtttcaacacaacattctgcagatgttaatcaatcgcaagtaagagatttggtaaaaccctatatagaaaaatctattcctaaaaatcttattaatggtttagatgataatgaaatttatgttaacccgacaggcaattttgttatcggtggaccagatggagatagtggattaacaggaagaaaaattatcgtggacacttacggaggagctgcccctcatggaggaggcgctttttcaggaaaagatcctactaaagttgatagatcagcagcttacgcatcaagatatttggctaaaaatgttgtagcttcaaaaattgcagataaatgtttaattcaacttgcttatgcaattggagtttcaaaacctctatcaatttatgttgatctttttgataatgatgaagaaaaaaatagacatgttgaaaagttaattaatgaaaactttgatttaagtcctagaggaataagagagatgcttggtttaaataaaccaatctattcaaaaactgctgcttatggtcattttggtagagaagcagaatcaaatggttcattttcttgggaaaaaactgataaatcacacattttcacttagt

SEQ ID NO: 243611 - DNA, 874 bp, Unknown
  Bacterial polypeptide expressing nucleotide sequence isolated from the Sargasso Sea
aatgaatcttaaaaattatttatttactagtgaatctgtttcagagggtcatccagacaaagtttgtgatcgtatctccgatatggttgttgacacttatatttcaaaagacccttattctagagttgcatgcgaaaccttaacaacaaccaacaaagtagttttggctggagagactagaggcccagatattaaaaaaaatgatttaatagaaaaagttcgaaactgtattaaagatataggttacgaacaaaaaggttttcattggaaaaattgcaatattgatgttcatcttcattcgcagtcttcagatatagctatgggtgtcgactcaaaagaaaataaagacgaaggagctggagatcaaggtatcatgtttgggtatgcttgtgacgaaacagaagttttaatgcccgctccaatttactattctcataaaattctagaattaatggctgaagatagaaaaaatggtaaagcaccaaaactagaaccagactctaaaagtcaagttactttaaggtatgaaaatgggataccagttaaggttactgctgtagtaatttcaacacaacattccccagatgtaagtcaaacccaagtaaaagaaattgttagaccttacctggaaaaagcaattccaaaacaattattgtctgagctaaaagatgaaaatttttacgttaatccaacaggtcagtttataattggtggtcctgatggcgattctggacttactggaagaaaaattatcgttgatacatatggtggtgcagcacgtcatggcggaggtgctttttctggaaaggatccaagcaaagttgatagatccgctgcttatgcagcaagatatgtagctaaaaatattgtggct

SEQ ID NO: 243612 - DNA, 1102 bp, Unknown
  Bacterial polypeptide expressing nucleotide sequence isolated from the Sargasso Sea
aatgagtaatttaaaaaattatctttttactagtgaatctgtatcagaaggtcaccctgataaagtttcagacagaatttcagatatggttgtagatagttatctatctaatgatccttattctagagttgcatgtgaaactttaacaacaacaaataaagttgtgttagcaggtgaagttagaggcccagaaattaaaaaagatgaactaattcaaaaagtaagagattgtattaaagatattggttatgaccaagaaggttttacttggaaggatgcgactaaaattgaatgtcatttacattctcaatcagcagatatagctttgggtgtagattcttcaggaaataaagatgaaggagcaggcgatcaaggtattatgtttggatatgcatgcaaagaaacagatgaattaatgccagcacctatttattattcacataaaatattgagattaatggctgaggatcgtaaatctggaaaattaaaaaatatagaaccagactctaaaagccaagtgacttttgaatatgaaaatggtaaaccgaaaaaagttaaatccgtagtcatatcttctcaacactcagctgatataaatcaaactcaagtaagggatcttttaagaccatacatgttaaattctattccaaatttttttttagagggttttaatgaagatgagttttatgtaaatccaacaggaaactttgtaattggtggtcctgatggtgattgtggcttaacaggaagaaaaattattgtggatacttatggaggtgcagctcctcatggtggaggagctttttcagggaaagatccgactaaagttgatagatctgctgcttatgcttccagatacattgctaaaaatgtagtatcatctaaaattgcagataaatgtttgattcaattagcttatgcgattggagtttcaaaacctttatcaatctatgtagatttatttgataatgatttagaaaaaaataaatttgttgaggaaaaaattaaagaaaattttgatttaagtcctagaggtataagagagataatgggtcttaataaaccaatttatgaaaagacagcagcatatggtcatttggaa

SEQ ID NO: 243613 - DNA, 997 bp, Unknown
  Bacterial polypeptide expressing nucleotide sequence isolated from the Sargasso Sea
aatgagtaacttaaaaaaatatctttttacaagtgagtctgtatccgaaggtcatccagataaagtttctgatcgaatttcagatatggtagtagataattatttatctcatgatccttattctagagttgcatgtgagactttaacaacaacaaataaagttgttttggctggtgaagttagaggtccagaaatcgataaagaggaattgatccaaaaagtaagaaattgtattaaagacattggatatgatcaggatggatttacttggcgtgatgcaactaaaattgaatgtcatttacattcccaatccacagatattgctatgggagtagactcatctgggaataaagatgaaggagctggtgatcagggcatcatgtttggatatgcatgtaatgaaacagaagaattaatgcctgcaccaattttttattctcataaaatattaagattaatggcagaagaccgcaaatcaggaaatttaaataacatagaaccagattcaaaaagccaagtaacttttgaatatgaaaatggtaaaccaaaaaaagttaaatctatagtaatatcttctcaacatacttcaaatgtgaatcaaactcaggtgagagaacttttaagaccatatatgttaaaatctattccagaaaattttttggatggatttaaagaggatgaattttatgtaaatccaactggaaattttgtaattggcggtccagatggagattgcggattaacaggtagaaaaattattgtagacacttatggtggcgcagcgcctcatggtggtggtgccttttcaggaaaagacccaactaaagttgatagatcagcagcttatgcgtctagatatatcgctaaaaatgtagttgcatcaaaaattgcaaataaatgtttaatacaattagcctatgcaattggagtctcaaaacctttatcaatttatgtggatctatttgataatgatttagaaaaaaataaatttgttgaa

SEQ ID NO: 243614 - DNA, 536 bp, Unknown
  Bacterial polypeptide expressing nucleotide sequence isolated from the Sargasso Sea
tctgatcaagggcgacatcaagttcctggtgaacccgactggccggttcgtgatcggcggcccgcaaggcgattgcggtctgacgggccgcaagatcatcgtcgatacgtacggcggcgctgcgccgcacggcggcggcgcgttctcgggcaaggatccgtcgaaggtcgaccgttcggcggcgtatgccggccgttatgtcgcgaagaacatcgtggcggccggtttggcgtcgcgctgcctgatccaggtctcgtacgcaatcggcgtggctcagccgacttcggtgatggtgaataccttcggcacgggccgcgtgtcggatgcaacgatcacgaagcttgtgcaggagcatttcgacctgcgtccgaagggcatcatccagatgctcgacctgctgcgcccgatctacgagaagagcgcggcttatggtcacttcggccgcgaagagccggaattcacgtgggaagccacggacaaggctttggcgctggctgaagctgccggtaccgaaccggtcgccgcgctcgcctgat

SEQ ID NO: 243615 - DNA, 778 bp, Unknown
  Bacterial polypeptide expressing nucleotide sequence isolated from the Sargasso Sea
tatgtcgtatctatttacgtctgaatctgttagtgaagggcaccctgataaagtctcagatcaaataagtgatggaattcttgacagtttcttagcttttgatcctaatagtaaagttgcttgtgaaacactagtaactactggccaagtaatactttctggagaggtatcaagtaatacttatttagatgttcaagagatagccagacacatcataaaagatataggatataataatgatcagtataaattttctggagagtcatgtgcagtaatgtctttaattcatgagcagtcagaagatattcttcgaggagttgaaagaaacataaaagaagaacaaggagctggtgatcaaggaataatgtttggttatgcatgtaatgaaactgaaaattcaatccctctaactttagatatcgcaaatagacttttactagagctctctaaactaagaagatctaaagaaattccatatttaaggccagattcaaaatctcaagtgaccattgaatatgataataatgatatcccaataagaatagatacaattgttgtttcaactcaacatgatgaattcgatagtaacgatgagaaaatgttaaataaaattagggaggatataatcaaaattttaatcccaatagtaagagatacatatgcacctgaaattcaaaaattatttaataataatataaaattctatgtaaatccaacaggaaaatttgttattggaggtccacatggtgatacaggtttgactggtcaaaaaatataa

SEQ ID NO: 243616 - DNA, 442 bp, Unknown
  Bacterial polypeptide expressing nucleotide sequence isolated from the Sargasso Sea
tttgactggaaggaaaattattgttgatacttatggaggggtatctcctcatggaggaggagcattttctggaaaagaccccaccaaagttgatagatcagctgcatatgctgcaagatatttgtctaaaaatatagttcatgcaggtatttctgaaagatgtacaattcaattatcatatgcaattggagtacctgaaccattgtcaatttttgttgatttacatgatacaaataatgttgacacaaatagagtagaaaaatttattagggataggtttgatttatcaccaagaggaattatagacatgcttggtttaagcaatccaattttctcagagacttcatcttatggtcattttggaagagaaccaaacgacaaaggatgttttacatgggaaaatttagacatatctagtgaatttaaaaatgaattactctga

SEQ ID NO: 243617 - DNA, 1159 bp, Unknown
  Bacterial polypeptide expressing nucleotide sequence isolated from the Sargasso Sea
atgacaaaaaattatctatttacatctgaatctgttactgaaggtcatccagacaaagtatgtgatatgatatcagattcaattttagatgagtatctaaaaggtgatccaaattcaagagttgcagtagagactatgacaacaactgattttgtaggtgttgcaggagaagttacatcaaaagcaagttttgatatcgaaagtgttgtcagaaaaacaattacagaaattggttatgataatccagacttgaaattcgattcacactcttgtgaagtaatggtaaaactagatccgcaaagcccacatatttctcaaggagtcaccggaactgatgaaaaagaacaaggtgcaggagatcaaggcttaatgtttggatatgcaagtaatgaaacagaagagctcatgccattaccaatccttttggctcataaattaacaaaaaaattaacagatgttagaaaaaataatcaattaccatgggcaagacctgatggaaaatcccaggtatcaatcagatatgaagatgataaaccgaaagcaattgaagcaattgttctttctacacaacattccccagaaataacaaatgaagagatttcatcacaattaattgaacatgttatcaaaccagtctgtggagatctttggaatgagaacattaagattcacgtaaacccaacaggcaaatttgagattggtggaccacatggagatgctggtttaactggaagaaaaattattgttgatagttacggaggaatgggtcgacatggtggcggagcattttcaggaaaagatccatcaaaagtagatagatcagcatgttacatgtgcagatatgttgcaaaaaatattgttgctgcaggtttagccgacagatgtgaagtacaagttgcatatgcaatcggggttgcagaaccagtttctttaatggtaaatacatttggtacaaataaaatttcagaggataaaattgaagagttagtgaataataatttcgatatgaggccagcaggaattgtagcacagctggatttgaaaagaccaatttacaaaaaaactgcagcatacggtcattttggtagaaatgagccagaatttaactgggaaaaaacagacaaggctcagaaattaaaagaagaatcaggcatttaat

SEQ ID NO: 243618 - DNA, 478 bp, Unknown
  Bacterial polypeptide expressing nucleotide sequence isolated from the Sargasso Sea
atgagttatatatttacatctgaatctgtttcagaaggccatcctgataaagtttgtgatcaaatttctgatgccattcttgattcttatcttgcacaagatccaaatagtagagttgcctgtgaaacacttattaaaaataatacagttatcgttgccggtgaaataacgtccaatgggatgccaaatatcgaggaagtaataaggaataccattaatgaaattggttataaccatgatgatttggggttcaatggaaataactgtgagatacaaaacctaatttcaaaacagtcaccagatattgctcaaggagttaatgagggtgagggtgaagacctagatcagggcgctggtgaccaagggctaatgtttggatatgcatgctctgaaactcctgttctaatgcctgctccaattaatttatcccatgagctagtcttaaaacaatctgaagtaagaaagaatggcgagctaa

SEQ ID NO: 243619 - DNA, 1165 bp, Unknown
  Bacterial polypeptide expressing nucleotide sequence isolated from the Sargasso Sea
aatgaaaaaaaattttttatttacaagtgaatctgtctcagaaggacatccagataaagtttgtgatagaatttccgacatggttgtcgacacatatttaagtttggaaccacaagcaagagtggcatgtgaaactttaacaacaacaaataaggtagttctagctggagaaactcgaggacctgaaattaaaaaagatgatttaatttccaaagttagagattgtataaaagatattggatatgaccaagatggattttcttggaaagaagcaacaaaggtagaatgtcatttacattcacagtcttcagatattgcaatgggagtagactcatcaggaaataaagatgagggagctggagaccaaggaataatgtttggatatgcatgtaatgagacagatgttttgatgccagctccaattcattattcacacaaaattttaagacttatggcagaagataggaaatctggtaaattaaaaaatattgaaccagattctaaaagtcaaattacaatagagtataaagatggaaaacctgaatctgttaaatcagtagtgatatcaacacaacattcagctgatgtaaatcaatctcaggttagagaattagtaaaaccatacatagaaagatctataccaaaaaatcttgttaatggattggatgataatgaaatttatattaatcctacaggcaactttgtaattggtggtcccgatggagacagtggtttaacaggaagaaaaattatagtagatacatatggaggagctgcacctcatggtggaggcgctttttcaggaaaagatcctacaaaagtagatagatcagcagcgtacgcatcaagatatttggcaaaaaatattgttgcttctaaaattgctgacaaatgtttaattcagcttgcttatgcaataggagtttcaaaacctctatcaatatatgttgatctttttgataatgatgaagaaaaaaatagacatgtagaaaaattaattaaagaaaattttgatttaagcccaagaggcataagagaaatgttaggtttaaataaaccaatttatcaaaaatcagctgcatacggacactttgggagagatcccgagtcagatggatcattttcatgggaaaaaacagataaatcagaggtatttaataagtaa

SEQ ID NO: 243620 - DNA, 563 bp, Unknown
  Bacterial polypeptide expressing nucleotide sequence isolated from the Sargasso Sea
cctgttcacttcggaatcagtatcggagggtcatcccgacaaactctgcgatatgatatcggacgccatcttggacgagtgcctatccatagaccccggagcaagggttgcagtggagacgatggtaaagggaaccgactctcgaagctatattttcatcggtggagaggtgaccatagcctccaacaaggccgtagattacgagcgagtagcgagaagaacggcccgtgagataggatacgatgaccactcagtcgggatggatgctgctagtgaagatctctgtcaggtagtagttagaataacccagcaatctccagacatctcgcaaggagttgaccaaggcaagggccttcatctggagcagggagcaggcgaccagggcctgatgtttggtttcgcctctaacgaaaccgagggattcgaagacctagagggcatgttcatgccccttccagcggctttagcccaattgctaacctccaagatgtcggcctcgatgaaggatgggtccctcccatgggcccgacccgactcaaaaagtcaggtcaccatacgatatg

SEQ ID NO: 243621 - DNA, 944 bp, Unknown
  Bacterial polypeptide expressing nucleotide sequence isolated from the Sargasso Sea
tatgaaaagatcttatttatttacaagtgaatcagtttctgaaggccatccagataaagtttgtgatagaatttcagatatggttgttgatacttatctatcatctggtgacccacaaacacgtgtagcttgtgagactttgactactactaataaagtagttctagcaggagaagtaaggggtccatcagtttctaaagatcagattatatctcaggtgagagattgtattaaagatattggttatgaacaagatggctttcattggcagaattgtgatattgaaagttttcttcatgagcaatcggcagatattgctatgggtgttgattctggaagcaataaagatgagggcgcaggtgatcaaggcatcatgtttggttttgcttgtaaggacactgaatcattaatgccagccccgatacattattctcaccaaattttatataaaatggctcaagctcgtaaagatggatctgcatctggtctagaacctgattcaaaaagccaagttacaatgctttatgaaaatggaaaaccaagcaaagttacatccttagtaatttcttcacaacataaggaaggtttatctcctgaggacgtaaaagaaattgttaaaccttatgtatatgagtgtatacctaataccttgttagaagatcttaaagatgaagaattctatgtcaatcctacaggaaattttgtaattggaggtcctgatggtgactctggtctaacaggtagaaaaataattgttgatacatatggtggagcagcaccccatggtggaggggcattttctggaaaagatccatctaaagttgatagatctgcagcatatgcagctaggtacttagcaaaaaatgttgttgcagctgatcttgctgatgagtgtactatacagttatcttatgcaataggtgtatcaaaacctttatcagtat

SEQ ID NO: 243622 - DNA, 1120 bp, Unknown
  Bacterial polypeptide expressing nucleotide sequence isolated from the Sargasso Sea
aatgaaaaaagattatttgttcactagtgaatctgtatcagagggtcacccagataaagtttgtgatagaatttcagacatggttgtagatacctatttaggcatggagccccaagcaagggtggcatgcgaaacattaacaaccacgaacaaagttgttttagcaggagaaacaagaggacctgacatcaaaaaagatgagttaatctcaaaagtaagaggttgtataaaagatatcggttatgatcaagaaggttttacttacaaggaagcaacgaaaatagaatgccatttacactctcaatctgctgatatagcaatgggagttgactcttctggaaataaagatgaaggcgctggagaccaaggaataatgtttggctatgcatgcaacgagacagatgtgcttatgccagctccaattcatttttcacatagaattttaagactaatggctgaagatagaaaatctggaaagctaaaaggaattgaaccagactcgaaaagtcaaattactatcgaatataaagatggagtaccaaaagctgtaaaatcagttgtaatttctacacaacattcaaaagatgtgaacttagcgcaagtaaaagaactttgcatgccctatattgaaagatctattccaaaaaacctacttggtaatcttgatgaaaatgaaatatatataaatcccactgggaattttgtaattggaggacccgatggagacagcggtttaactggaagaaaaataatcgtagacacatatggcggtgccgcacctcatggcggtggagctttttcaggtaaagatccaaccaaagttgatagatcagctgcttacgcatcaagatacttagcaaaaaatatcgtggcatcaaaaattgcagataaatgtttgatacaattagcttacgcaataggagtatcaaaacctttatcaatatatgtagatttatttagcaatgatgaagaaaaaaatcttcacgttgagaaacttataaaagaaaatttcgatttaagtcctagaggaattagggaaatgcttggcttaaataagccaatctatgaaaaatctgctgcctatggacactttggaagagatccagggaaagatggttca

SEQ ID NO: 243623 - DNA, 1156 bp, Unknown
  Bacterial polypeptide expressing nucleotide sequence isolated from the Sargasso Sea
atggcaaaacacctttttacgtccgagtccgtatcagaagggcatcctgacaaaatcgctgaccaaatctctgacgccgtactggacgcaatcctcgagcaggatccgaaagcacgcgttgcctgcgaaacctacgtcaaaaccggtatggttttagttggcggtgagatcaccaccagcgcatgggttgatatcgaagagatcacccgtaatacggttcgcgaaattggctatgtgcattccgacatgggctttgacgccaactcttgtgcggtactgagcgcgattggtaaacagtctccggacatcaaccagggtgttgaccgcgccgatccgctggaacagggtgctggcgaccagggtctgatgtttggttatgcaaccaacgaaaccgacgtgctgatgccagctccaattacctatgctcaccgtctggtgcagcgtcaggctgaagtgcgtaaaaacggcactttatcctggctgcgtccggatgcaaaaagccaggttaccttccagtatgacgacggcaaaatcgtcggtattgatgcggttgttctgtcgactcagcactctgaagacatcgatcagaaatcgctgcaagaagccgttatggaagagatcatcaagccggtactgccgactgaatggctgactgcttcgaccaagttcttcatcaacccaaccggtcgtttcgtaatcggcggtccaatgggcgactgtggactgacaggtcgtaaaatcatcgttgatacctacggcggcatggcgcgtcacggcggcggtgcattctctggtaaggatccgtctaaagttgaccgttccgcagcctatgcagcccgttacgtcgcgaaaaacattgttgccgctggtctggctgatcgctgtgagattcaggtttcctacgcaatcggcgtggctgaaccgacctctatcatggtggaaacgtttggtactgaaaaagtgccttctgagcaactgaccctgctggtgcgcgagttcttcgacctgcgcccgtatggtctgattcagatgctggatctgctgcacccgatttacaaagaaaccgctgcttacggtcactttggtcgcgaacatttcccatgggaaaaaaccgacaaagccgctctgctgcgtgaagctgccggtctgaagtaat

SEQ ID NO: 243624 - DNA, 410 bp, Unknown
  Bacterial polypeptide expressing nucleotide sequence isolated from the Sargasso Sea
aatgagtaatttaaaaaattttcttttcactagcgagtcagtttcagaaggacatccggataaagtttcagatagaatttctgatatggtagttgatagttatctttcaggagatccattttcaagagtagcttgtgaaacacttacaacaaccaataaagtcgttttagctggtgaagtaagaggtccagaaattaaagaaaatgatttgattgaaaaagtaagacactgcataaaagatattggttatgatcaagatggtttcacttggaaagaagctacaaaaatagaaagccatcttcattcccaatcatctgatatagcaatgggtgtagattcttcaggcaataaagacgaaggagccggagatcaaggaataatgtttggttatgcatgcaatgaaacagaag

SEQ ID NO: 243625 - DNA, 1171 bp, Unknown
  Bacterial polypeptide expressing nucleotide sequence isolated from the Sargasso Sea
aatgagtaacctaaaaaattttctttttactagtgagtctgtatcagaaggacatccagataaagtttcagatagaatttcagatatggtggttgatagttatctttctggagatcctttttcaagggttgcatgtgaaacattaacaacaaccaacagggttgttttagcaggtgaggtaagaggtcctgaaattcaaaaagatgaattaattgaaaaagtaagagtttgtattaaagatattggttatgatcaagaggggtttacttggagagaagctactaaaatagaaagtcatcttcattcccaatcagctgatatagctatgggagtagactcatcaggcaacaaagatgagggagcaggcgatcaaggccttatgtttgggtatgcttgcaatgaaacagaagaacttatgccagcacctatacactactcacataaaattttaagactgatggcagaagatagaaaatctggaatattaaaaaatatagaacctgataataaaagccaaattacttttgaatacataaatggaaaacctactaaagttaagtctgttgtaatttcttcacaacattcacctgatattagtcaatctcaagtaagagatttattaagaccttatatgattaaatctattccaaaaaaattccttgagaattttgatgatagtgagctttatgttaacccaactggtaattttgtcattggtggaccagatggtgatacaggattaactggaagaaaaattatagtagatacctatggtggagcagcgcctcatggtggtggagctttttcaggtaaagatcctacaaaagtagacagatcagcagcctatgcagcaagatatattgcaaaaaatgtagttgcgtcgaaaatttcagaaaaatgcttgattcaaatagcttatgcaataggtgtatcaaaacctctatcaatctatgttgatttatttgataacgatattgaaaaaaacaaatttgttgttgaaaaaattaatgagaattttgatttaagtcctagaggaattagagaaatgttaaatctaaataaacctatatatgaaaaaacagcagcgtatggacattttggaagaagcccagaagaaaatggctctttttcatgggaaaaaacagataaaataaatgcttttttaaaatag

SEQ ID NO: 243626 - DNA, 1174 bp, Unknown
  Bacterial polypeptide expressing nucleotide sequence isolated from the Sargasso Sea
aatgagaaaaaattacatttttacatctgagtcagtgtctgaggggcacccagataaagtttctgatcgaatttctgatgcggttgtcgatcattttatctccaaagacccatttgctagagtcgcttgtgaaacactaacaacaaccaacaaagttgttttatccggtgaagtaagagggccagttcaagaagacaaagatgaaattatttcaaaagtaagggagtgtataaaagatatcggctatgagcaagatggttttcattggcaaaccgcagatattcaatatttacttcacggacaatctgcagatattgcaatgggtgtagactcatcatctgacaaagatgagggggcgggtgatcaaggaattatgtttggatacgcttgtacggaaacacctgagctgatgccggcaccaattttttattctcataaaatcttagagataatggctaagggaagaaaagatggtagcttaaaaggattagagcctgactcaaaaagccaagtaactcttaaatacgttgatggtaaaccaagtgcagttacatctgtcgtgatatcaacacaacatgctgatggattgtctcctgctgatgttaaagaaatagtaaacccagcattaaaagagtctatccctgaagagttattaaaaaatttagacgataaagaatactacgtaaatccaacaggtaattttgttatcggaggaccagatggtgatacgggattaacaggaagaaaaattattgtcgatacctatggtggtgcagcaccgcacggtggaggggctttctctggaaaagatcccacaaaagttgaccgctctgctgcttatgcctcacgttacttagcaaaaaatattgttgctgctggtttatgtgatcagtgtactatccagttgtcttatgcaattggtgtagccaagccgttgtcaatttatgtgaacactcaaggcactaataaaatagatgaagcaaaaattgagtctgcaatacctgacattatgaatctttctccaagaggtatcagagagaaattacagttaaataagccaatttacgaacaaacagcagcttatggtcattttggtagaatatatgatagttcctcaggagctttttcatgggaagctctagatttagtgtccgatttcaaatcgctagcttaa

SEQ ID NO: 243627 - DNA, 1028 bp, Unknown
  Bacterial polypeptide expressing nucleotide sequence isolated from the Sargasso Sea
aatgactaaagaatatttatttacaagtgaatctgtttcagaaggccatcctgacaaagtgtgtgatataatttcagactcaatagttgatgattttttatcacaagaaaatccggagaatgctagggttgcaatggaaacattggttactactaataaagtagttattgctggtgaagttcgtggtcctgaagggtacaattgcaactatgaggaattagcgagaaacgcagtaaaagaaattggatatgaacaagatggatttcattggaaaaacttgtcctttgattcgtcgggtgttcatagtcaatctgcagatatagcaatgggtgttgatgcgtccggaaacaaagatcaaggtgcgggagatcaaggaataatgtttgggtacgcatgtaaagaaactccatctttaatgccagcaccaatatattattcccataagatacttgagttaatggcatcagagcgaaaatctgggaatactattggaattcaaccagactcaaaaagtcaagttacattaaaatataaaaatggtgagcctgaaatttgtactaaaatagttgtttctactcaacatgatgccgaacttgatcagcaagccgttagtgatctggtaattccattaattaaaactgtaatgcctcaagaatggatggataataatactgagatactaattaatccaactggaaagtttgtgatcggcggcccagatggcgatactggattaactggaagaaaaatcattgttgatacttatggtggcgctgctcctcatggtggtggagctttttctggaaaagacccaacaaaagttgatagatctgcagcatacatttcaagatatatagctaaaaatatagttgcagctggattagctgacagatgcacactccaacttgcatatgctattggtgtttccgaaccattatcaatttatgtagatacccatggaacatctcaaataaaggacgatgacttaataaaaaaaataactgataatattgatttatctcctagag

SEQ ID NO: 243628 - DNA, 1165 bp, Unknown
  Bacterial polypeptide expressing nucleotide sequence isolated from the Sargasso Sea
tatggcagaaatgctgttcacttctgaaagcgttacagaaggacatccagacaaaattgcagatcagatctcggattctgtactcgacgccatgctcatggacgatccaaaaagcagggtggcctgtgaaactttggtcaccaccggaatggcctttctggctggagaagtaaccaccaaagcccaagttgattttcaaaggattgtcagagataccatccgtgaaatcggttacaccgattcaaagatggggttcgattgtgatacctgtgccgtcatggtcagcctggacaaacaatccccaaatatcaaacagggtgtggataacgatccagaaaaaagcaaagaacagggagctggagaccaggggttgatgtttggctatgcctgcgatgaaactccagaactgatgccgcttcccatcaatatgtcacaccgcttgacggaaaaactttcacaggtccgtaaaaatggaaccatgcctgaactcagacccgacggaaaatctcaggtcacggtcaaatacgtaaacggcaaaccagtcgaagtcacagccgttgtgatcagcacccaacacaaagagggacaagaccagggtcaattgaaaaagaacataatcgaaaatgtcattcgtccagtgatccctgcagaatttctcactgatactactgatttccacatcaacccgactggaatttttgaaattggaggaccccagggagattgcggattgacaggacgcaaaatcatcgttgacacctatggaggaatgggacgtcacggaggtggggcattttcaggaaaagatccctcgaaggtggatcgttccgctgcctacgctgcaagacacgttgccaaaaacgtcgttgctgctggtctggccagccgctgtgaagtgcaggtcgcatatgccattggagttgcggatccggtttctgtttctgtcgacacttttgggaccgccattatcgaagaggaaaagatctccatgctgatccaggaaacttttgacctcaaaccagcaagtatcatccagagactcaacctgcttcgccccatataccgtcaaacggctgcctatgggcatttcggcagggaattggaggattttacctgggaaaaaaccgactatgccggggaactcaggaaaaaagccgggatttaa

SEQ ID NO: 243629 - DNA, 1054 bp, Unknown
  Bacterial polypeptide expressing nucleotide sequence isolated from the Sargasso Sea
atgggttatatatttacatctgaatctgtttcagaaggacatcctgacaaagtttgtgatcaaatttctgatgctattcttgattcttatcttgcacaagatccaaatagtagagttgcttgtgaaacacttattaaaaacaatacagttattgttgctggcgaaattacatccaatggcacgccaaatatagaagaggtaataagaaataccgttaatgaaattggttataatcatgatgatttaggcttcaatggaaataactgtgaaatccaaaacctaatttcaaaacaatcgccagatattgctcaaggtgttaatgagggtgagggtgaagacttagatcaaggcgctggtgatcaagggctaatgtttggatatgcatgctctgaaacctcagttcttatgcctgcaccaattaatttatctcatgagctagtcttaaaacaatctgaggtaagaaaaaatgctgagttagattggcttaggccagatgctaaaagtcaagtgagtgttgtctataaagatgatagaaagactgtagattatgtttctgctattgttttatcaactcaacatgatgaagatatttctcaagatgaaattaaagcaaaggtccgcgagaagattattaacccaataattccaactgaatggattaaagaagatacaaaaatatatataaatccaactggtaaatttgtaattggtggtcctgttggtgattgtggcctaacaggaagaaagattatcgtagatacatatggcggaatggcaagacatggtggtggtgcattttcaggaaaagacccttcaaaggtagataggtctgctgcttatgcttgcagatatgttgcaaagaatattgttgctgctggccttgctgaaagatgtgaagtacaagtttcttatgcgataggtattgctgaaccgacatcaattactgttgatactcttggaacaggtagcttgtctgaaaatgagatttcacagattgtaagagacaattttgatctaagaccaaagaacctaatcaatcttcttgatttaaaga

SEQ ID NO: 243630 - DNA, 1168 bp, Unknown
  Bacterial polypeptide expressing nucleotide sequence isolated from the Sargasso Sea
atgaaaagagattatttgtttacaagtgaatctgtttcagagggccatcctgataaagtatgtgatagaatttctgatatggttgttgatacttatttatcaaaagaccctttatcaagagtagcttgcgaaactcttactacgaccaataaagttgttttggctggagaaattagaggcccttcaattaataaagaagaaattatttcacaagtaagagaatgcataaaagatattggatatgaacaagacggatttcattggaaaaattgtaacattgattatcacttacatgagcaatcttctgatatagctatgggagttgactcagggagtaataaagatgagggcgcaggagatcaaggaattatgtttggttttgcttgtaatgatactgacactttgatgccagcaccaattcattattctcatcagatattattaaaaatggctgagttaagaaaagatggtagtagaaaagagtttgagcctgactcaaaaagccaaatcacaatgcaatatcaaaatggaaaacctacaaaagtaacatctgtagttgtttccactcaacataaagagggtttaaccccttctcaaataaaagaagtagtcaaaccaattgttaatgactgcatcccttctgaattgatgcaagaacttaatgacgaagagttttatgtaaatccaacaggaaactttgtaattggtggaccagatggagattcaggccttactggtagaaaaattatagtagatacatatgggggagcagctcctcatggtggtggcgcattttctggaaaggatcctagcaaagttgatagatcagcagcttatgcagcaagatatttagcaaaaaatatagttgcagctggtttatcagatgagtgtataattcagctatcttatgcaataggcgtatcaaaaccactttcaatttatataaatacaaatggaactaataaagttgatgagaaaaaaattgaaaaaattattcctgaattatttgatttaagtccaagaggtattagagagcatttaaaattaagcaatcctatttatgtgccgacttctgcttatggacactttggaagaatgccaactcaagaaggtcattttacttgggaaaaaactgatttaattgaggaatttaaaaaagcattctagt

SEQ ID NO: 243631 - DNA, 559 bp, Unknown
  Bacterial polypeptide expressing nucleotide sequence isolated from the Sargasso Sea
atgaaaagatcttatttatttacaagtgaatcagtatctgaaggccatccagataaagtttgtgatagaatttcagatatggttgttgatacttatttatcatctggtgacccacaaacacgcgtagcatgtgagactttgactactactaataaagtagttctagctggagaagtaagaggaccatcagtttctaaagataagatcatatctcaggttagagattgtattaaagatattggttatgaacaagatggctttcattggcaaaattgtgacgttgaaagttttcttcatgagcaatcagctgatattgctatgggtgttgattctggaagtaataaagatgagggcgcaggtgatcaaggaatcatgtttggttttgcttgtaaggacactgaatcattaatgccagctccgatacattattctcaccaaattttatataaaatggctcaagctcgtaaagatggatctgcatctggtctagaacctgattcaaaaagccaagttacaatgctttatgaaaatggaaaaccaagcaaagttacatccttag

SEQ ID NO: 243632 - DNA, 1243 bp, Unknown
  Bacterial polypeptide expressing nucleotide sequence isolated from the Sargasso Sea
atgagtgattttattttcacttcagaatcagtaactgaaggtcatcctgacaaaatatgtgatcaaattagtgacgctgttttagatgctttattgacagaagatccagaaagcagagttgcatgcgaaactgttgttaataccggtctttgcttacttactggagaaataacttcaaaagcaaaagtcgattatataaaacttgttagaaatgtaattaaagaaattggatatgaaggctatagagcaggtggttttgacgcaaatagttgtgcaattttagtagcacttgacgagcaatcaccagatatttctcaaggagtaaacgaagcagatgatgttaacgatgatttggaagataatacaggagctggcgaccaaggcataatgttcggctatgcatgcgatgagacgcctgaattaatgcccttaccgattagcttggctcatagattagccattcaacttgctagggtaaggcatgaaaacgtacttaattatctactccctgatggtaaaactcaagtaagcattgattacgaaaaaggtttaccagtctctattaatacaatcttaatttcaactcaacataaccctgagatagatgggttaacaaatgaagaagaaattcgccaaagaataaaagaagatttatggaagcatgttgtaattcctgctactgaagatttagaaatcaaaccaaacattatcaaaacaagatttctagtgaatcccacgggcaaatttgtcgtaggggggcctcaaggagatgccggacttactggaagaaaaattattgtagatacttatgggggttatgcaagacatggaggaggggcattttcgggtaaagatcctacaaaagtggatagatcagctgcttatgcagcacgttatgtagccaaaagtatagttaaggcaaaattagcaaaaaaggcagaagtacaattaagttatgcaattggagttgcaaaaccgatttccattcttgttgaaacttttgatactagcgttatttcacaagctaatttgactgagcttattaaaaagtactttgatttaagaccagcagcaattataaaagaatttgatctaagaaatctaccccaaaaaatgggtggtacatttttcagaaagactgcatcctatggacattttggcagaagagatctaaatctcccttgggaaaaggtagaagaaaaatcagcccaattagcggaggcttccaaagtatttttataaa

SEQ ID NO: 243633 - DNA, 1285 bp, Unknown
  Bacterial polypeptide expressing nucleotide sequence isolated from the Sargasso Sea
ctgcccggtcctggtaatccgctaaagcgtcgccgcttcaggcccaacgaagctggctacgtgaaaccaaccgtaaccacacaggagcctgaaaaagtggcaaacgattatttcttcacgtccgaatccgtctccgaaggccatccggacaaagtcgcggaccaaatctcggacgcgatcctcgacgccatcctcgagcaagacaagtattcgcgcgttgcggcggaaacgctgtgcaacacgggtctcgtcgtcctggccggtgaaatcaccacgacggccaacatcgactacatccagatcgcgcgcgacacgatcaagcgcatcggctacgacaacaccgactacggcatcgactacaagggttgcgcggtgctcgtcgcgtacgacaagcagtcgccggacatcgcccagggcgtcgatcgtgcacacgacgacaacctcgaccagggcgcgggcgaccagggtctgatgttcggttatgcgtgcgatgaaacgccggaactgatgccgctgccgatctacctgtcgcaccgcctcgtcgagcgccaggccagcctgcgccgcgacggccgcctgcaatggctgcgcccggacgcgaagtcgcaggtgacggtccgctacgtcgacggcaagcccgattcgatcgacaccgtcgtgctgtcgacgcagcacgcaccggacatcgagctgccggcgctgcgcgaagccgtgatcgaggaaatcatcaagccgacgctgccggccgacctgatcaagggcgacatcaagttcctggtgaacccgaccggccggttcgtgatcggtggcccgcagggcgactgcggcctgaccggccgcaagatcatcgtcgacacctacggcggtgccgcaccgcacggcggcggcgcgttctcgggcaaggatccgtcgaaggtcgaccgttcggccgcatacgcaggccgctacgtcgcgaagaacatcgttgccgccggcctcgcgtcgcgcgcgctgatccaggtgtcgtacgcgatcggcgtggccgagccgacctcggtgatggtcaacacgttcggcacgggccgcgtgtcggatgcggtgatcacgaagctcgtgcgcgagcatttcgacctgcgtccgaagggcatcatcaagatgctcgacctgctgcgcccgatctacgagaagaccgctgcttacggccacttcggccgcgaagagccggaattctcgtgggaagcgaccgacaaggcgctcgccctggccgaagcggccggcgtcgagccgacggcacgcgtcgcgtaag

SEQ ID NO: 243634 - DNA, 421 bp, Unknown
  Bacterial polypeptide expressing nucleotide sequence isolated from the Sargasso Sea
tatgacaaataaaacatatttaatgacatctgagtcggttggagaaggccatcctgataagatggcagatcagatctcagacgcaatactagatgcaattctcgcgcaagacaaaggctgcagagttgctgtggaaacgctcgtcaaaaccggattggttgttctgggtggcgaaataacaaccactgctgatgtggattatgaggcaatcgccagacgaaccattaaaagaatcggttatgacaaagaagagttagggtttgatgatcaatcctgtgaggttttagtagcgatcagcaagcaatctccggatatcgcgatgggcgtggatcgcgctgatgagaaagaacaaggcgcaggagatcagggtttaatgtttggttatgaaaccaatgaaacgaaacaattgatgccagcaacc

SEQ ID NO: 243635 - DNA, 986 bp, Unknown
  Bacterial polypeptide expressing nucleotide sequence isolated from the Sargasso Sea
aggacctgaaacttcaaaagaggatttgataggcaaagtaagagaatgcattaaagatattggctatgaacaaaaaggttttcactggaagaattgtaatatcgatgttcatcttcattcacaatcatcggatatagctatgggagttgactcaaaaggaaataaggatgaaggagctggggatcagggaataatgtttggatatgcgtgtaacgagaccgaagtactgatgcctgcaccaatatattactcgcataaaattttagaattgatggcttcggatagaaaaaaaggtattgcaaagaatctagaacccgactcaaaaagtcaagttaccatgctctatgaaaatggaaaaccaattaaagtaaagtcagtagtgatttcaacacaacactcatcgaaagtagaccaaaaacaagtaaaagaaatagttagaccatacttagaaaaagcaataccaaaaaaattattgtctgaattaaacgaagaagaattttatgtaaatccaacaggtaaatttgtaattgggggacctgatggtgacagtggtcttactggtcgaaaaattatagtagatacttatggtggagccgcacctcatgggggaggagcattctcaggcaaagaccctagtaaagttgacagatctgcagcctatgctgcaagatatgttgctaaaaatgtagtagcatcaaaaattgctgacaagtgtttaattcagttagcttatgcaattggggtttcaaaaccgctatcaatttacgtaaatctttttgatggggatgaagaaaaatcaaaaaaagttgaaaaacttataaaaaataattttgacttaagcccacgtggaattagagaaatgttatctttaaataaacctatctatgagtgcacttctgcgtatggtcattttggtagaaaacctgggtctgatggttcattttcttgggaaaaaacggataaaattgaagtttttaaaaagtagt

SEQ ID NO: 243636 - DNA, 661 bp, Unknown
  Bacterial polypeptide expressing nucleotide sequence isolated from the Sargasso Sea
taagcctatttctatttctaaagttgttattgctacccagcatgatgatatgctagataaatttaaagatgaaactgcagagcataaatttgtagaaaaagaaataattgatcatattattaaaccagttttagatgaatcaggccttccttatggtgacgattttatagttaatggtacgggacgttttgtttttggtggcccagaagcagatacaggtctaactggaagaaaaattattgttgatacatatggtggctatgctcctcatggcggcggcgctttttctggaaaagatccatccaaagttgataggtcagccgcttatatggcccgatacattgcaaaaaatattgtagcagcaaagcttgctgataaatgtgaagttcagttttcctacagtattggcatagctgaccctacatctttttatgtaaaaacatttggtacaggcatcatgtctgatgaaaaattaactgaactagctcggtcgatttttccattgaagcctgctggaattattgatcatttaaatcttaaacacccaagatatcgacaaactgctgcatatggtcactttggccgcgaagaagaattatttacttgggaacaaaccgatatggttgataagttacaattaatagcaaatgaaaggaaataa

SEQ ID NO: 243637 - DNA, 1159 bp, Unknown
  Bacterial polypeptide expressing nucleotide sequence isolated from the Sargasso Sea
tatgagtaacaagtatctttttacaagtgagtcagtttcagaaggtcacccagataaggtatgtgatattatttcagattcagttgttgatgattttctttctcaagaaaatcctgaaaattctagggttgcaatggaaacgttagtaacaacaaataaagtagtgatggctggagaagtaagaggtccagaaaattataagtgtgattacgagacgcttgcaagaaatgcagtgaaagagattggatatgaacaagaaggttttcactgggaaaagttttcttttgattgttcaggtgtacacagtcaatctgctgatatagcaatgggagttgatgcatcaggaaataaagatcaaggtgcgggtgatcaaggaatcatgtttggctatgcttgcaaagaaacaccgtcattaatgcctgcaccaatatactactcacataaaattttagaagaaatggcatttaaaagaaagaaaggcgaaacaccaggaatacaacccgactctaaaagtcaagttacgcttcaatataataatggctcaccagagaaatgtactaaaatagtagtttctacacagcatgatgaaaatcttgatcaacgaggagtgagtgaaattattattcctataataaaaaatattatgcctgaagagtggattagtaatgaaactgaaatattaattaatcctactggaaagtttgtaataggtggtcctgatggagatacaggactgacaggaagaaaaataatagttgatacttacggtggagcggccccacatggtggaggtgcattttcaggaaaagatcctactaaggttgatagatcagcagcatatatcacaagatatattgctaaaaatgttgttgcgtctgggattgcagataaatgtactcttcaacttgcgtatgcaattggcgtctcagacccgctttcaatctatgtagacacacatggaacttctcagatatcagatgaagatcttattaaaaaaattacatccaatattgaccttactcctagaggtattagggatcatcttaatttacataaaccgatttataaaaagagtgcagcatatggtcattttggaagagaagcagagagtgatggatcattttcttgggaaaacattgacctagcaaaaaaactttag

SEQ ID NO: 243638 - DNA, 313 bp, Unknown
  Bacterial polypeptide expressing nucleotide sequence isolated from the Sargasso Sea
catgagccgttacgtcttcacatctgaatcggtcacggagggacatcccgacaagatctgtgatcaggtcagcgatgcggtgctggatgctctgctggcccaggaccccagcagtcgggtggcctgcgaaacggtggtgaacaccgggctgtgcatgatcaccggcgaggtgacctccaaagcgcaggtggatttcattcacctggtgcgcaacgtgatcaaagaaatcggttacagcggagctcgagccggtggattcgatgccaacagctgcgcggtgctggtggccctcgaccagcagtctccagacatt

SEQ ID NO: 243639 - DNA, 1156 bp, Unknown
  Bacterial polypeptide expressing nucleotide sequence isolated from the Sargasso Sea
tatgagttatatatttacatcggaatcagtttctgcaggacatccagataaagtgtgcgatcaaatatcagatgctgtcttggatgcttatctagcagaagatccagatagcagagttgcatgcgaaacaatgataaaaaataatatggtttacattgcaggtgaaattacctcactaggttcacccgatttagaaccgattgtaagacaaaccattaatgatattggttataacactgatgaatatggatttaatggtgatacatgtgaatttacaaacttagtttttgagcaatcccctgatatttctcaaggggttacagagggcgaaggagaaaatttagaacaaggagcgggggatcaaggattaatgtttggatatgcatgtacagaaacagaatcgcttatgcctctacctattgatctttcccataggcttgtaaaaaaacaggcggatgttatgaagagtggtgagctggaatggcttcgaccagacgctaagagtcaagttagtgcaatttattcagatgatggaaaaacaattgagggtttgtcggcgattgttttatccacgcaacatgatgaagatgtaacgcaggaagaaatcaaagaccaagtcatggaaaaaattattaagcctattgttcctaatgaatggatactcgaatcaacaaatatatacataaatcctactggaaagtttgttatcggtggtccagtaggtgactgtggactaactggtagaaaaattattgttgatacctatggcggaatggctagacacggtggaggagcattttctggaaaagacccctcaaaagttgatcgttcagctgcatatgcagcaagatatgtagcaaaaaatatagttgctgctggtcttgctgattattgtgaaattcaagtttcttatgcaattggtgttgccaagccaacctcaataaatgtaaatacttttaatagcgaaaagatatctaaagaagcaatcgaaaaaattgtagaagataactttgatttaagaccaaaaagtcttataaacatgcttgatttaaaaaggcctatctatctcccaactgcagcttatggtcattttggaagaactgacatagatttgtcatgggaaaaaacagataaagcttcagaaatttcacaataa

SEQ ID NO: 243640 - DNA, 519 bp, Unknown
  Bacterial polypeptide expressing nucleotide sequence isolated from the Sargasso Sea
atttgtttgagtcaattccaaaaaattttttagatgaatttaatgaaaaagaattttacgtaaatcctactggaaattttgttataggtggtccagatggtgattgtgggttaacaggcagaaaaattattgttgatacttatggtggagctgcacctcacggcggtggagctttttctggaaaggatcctactaaagttgaccgatctgctgcatatgcctcaagatatattgcaaaaaatattgtttcatcaaaaatttcagacaaatgtttaatccaacttgcttatgcgatcggtgtttcaaaaccactttcgatttatgtaaatttatttgataatgatctagaaaaaaataaatttgttgaggaaaaaataaaagaaaattttgatttaagtccgagaggaattagagaaatgctgagtcttaataaaccaatctatgaaaaaacctcagcttatggccattttggcagatctccagaaagcgatggttcatttttcttgggaaaaaactgat

SEQ ID NO: 243641 - DNA, 1165 bp, Unknown
  Bacterial polypeptide expressing nucleotide sequence isolated from the Sargasso Sea
atgaagtctaacaattatttttttactagcgagtcagtgtctgagggccatccagataaagtttgcgatcggatttcagatatggttgttgatacctatatatctaaagatccatattctagagttgcatgtgaaacccttacgacaactaataaagtagttttggcgggagaaacaagaggacctgatataaaaaaagatcatttaatagaaaaagttagaaattgtattaaggacataggttatgagcagaaaggttttcattggaaaaattgtgatgtcgacgttcatcttcactctcaatcttctgatattgccatgggagtagattcaaaaggaaataaggacgagggagcaggcgaccagggtataatgtttggttatgcctgtgatgagacggaagttttgatgccagccccgatttactattcacataaaattttagaattgatggcaatagatagaaaaaaaggtgttgctaacaaattagaaccagactcaaagagccaagttacaatgaaatacgagaacggaaaaccgacaaaaataacatcagtagtaatttccactcagcattcatcagacgtaaaccagtctcaggtaaaagaaattgtaagaccatatttagaaaaagcagttccaaaaaatctactttcagaattaaaagaagaagaattttatgtaaatccaactggacaatttataattggtggtcctgatggggatacaggacttacaggaagaaaaattatagtagatacttatggtggagcagcaccacatggagggggagctttttcaggaaaggatccaagcaaagttgatagatctgcagcttatgcagccagatatgttgcaaaaaatattgtggcctctcaaattgccaaaagatgtctaatacaattatcttacgcaattggggtttcaaagccattatcgatttatgtagatctttttgatggcgatgatgaaaaagccaaacatgtagaaaagttgattaaagataattttgatttgagcccaagaggaataagagaaatgttatctttgaataagccaatatatgagtgtacagcagcctatggacattttggaagaaaacctgataacaaaggcagtttttcttgggaaaaaactgataaaagtcaaatttttaaaaagtaat

SEQ ID NO: 243642 - DNA, 421 bp, Unknown
  Bacterial polypeptide expressing nucleotide sequence isolated from the Sargasso Sea
atgagttatatatttacatcagaatctgtgtcggcaggtcatccagataaagtttgcgatcaaatttcagatgctgtgctagacgcatatttaagtgaagatccaaatagcagggttgcgtgtgaaacaatgattaaaaataatatggtttttatcgcaggcgaaattacatcttcaggaagtcctgatttagaaccggtagttagaaaaacaattaatgacattgggtatgacactgatgattatgggttcaatggggatacttgtgaatttacaaaccttgtttttgagcaatcgcctgatatctctcaaggtgtcactgaaggcgaaggtgaaaacttagagcagggtgcaggtgaccagggcttaatgtttggatatgcatgtactgaaacggaatcattaatgccccttccaatcg

SEQ ID NO: 243643 - DNA, 1132 bp, Unknown
  Bacterial polypeptide expressing nucleotide sequence isolated from the Sargasso Sea
atgaagaactatttatttacatctgaatccgtcacagaggggcatcctgataaagtcgccgatctaatttcagataatgtggcaaattatttaatcaatcaaaatgagagttatagagctgctatcgagacaatggtttcatcgaatatggtaacaattgctggagaagttaaaacaagcttaattgataacactgactcaattgaagaattagttagacaaacggtcaaagatatcggttatgaacaagaaaactttcattggaatacattatcttttaaaaacttaattcataatcaaagtattgacatcgcaaaaggaactgataacttcggagctggtgatcaaggaatgatgtttggatatgcttgtaatgaaaatgattcatttatgccaagtgcaatttactatagccataaaattacgaaagcactctcaattgcaagacgtaatggagaaaactggatgggtccagatggaaaagcgcaagtaacaatcgaatatagtaatgtgaacaaacctttaagaatatcaaacgtcatttgcagcacccaacatagtgaagatttaaaagataatcctgctgaagttcaaaaaagagtagaacgaattattaaaccagaattagatgatatgttcgatgacgatacagtctttcaagtgaatccaactggaaattttattacaggtggaccagatggtgatactggagttacaggtagaaaaattattgttgatacttatggtggctatgctcctcatggaggaggagcatttagcggtaaagactgtactaaggtagatagaagtggcgcatacatggcaagatatttagctaaaaatattgtagcatcaggagtttcacaaaatgctactattcaacttagttatgctataggtgttaaagatcctgtatcgctttacgtttattgtgatggtaaagttagaaatgatatatcagattggatttcacaaaatattgatttgacaccattaggaattattagaaaatttaatttatttaaattaaatctaactgaaacaacaaattatggtcattttggtaaaaaccagcttgcttgggaaaatattgatatggcaaatcaattaaactttaaagaggaaaaatgag

SEQ ID NO: 243644 - DNA, 1171 bp, Unknown
  Bacterial polypeptide expressing nucleotide sequence isolated from the Sargasso Sea
atgagtaatttaaaaaattttcttttcactagtgagtccgtttctgaaggtcatccagataaagtatctgataggatttcagatatggttgttgatagttttatttctggagatccatactctagagttgcatgcgaaacactaacaacaacaaataaagtagttttagctggtgaagtaagaggaccagaaattaaaaaagatgaattaattcaaaaagtaaggaattgtataaaagatattggttatgaccaagaaggatttacttggaaagaagccacaaaaattgaaagtcatttacattcccaatcagctgatattgctatgggagtggactcatcaggaaataaagatgaaggagctggagatcaaggtattatgtttggatacgcatgtaatgaaacagatgttttaatgccagcaccaattcattattctcataaaattttaagattgatggcggaagacagaaagtcaggaaagttaaaaaatattgaaccagactcaaaaagccaagtaacatttgaatatgttgatggaaaaccttcaaaagtcaaatcagtggtaatatcttcacaacattcagctgatgttaatcaagcacaagtaagagatttattaagaccttatatgttaaaatctattcctgagaattttcttaatggtttcaatgaagatgagttttatgtaaatccaacaggtaatttcgtgattggtggtcccgatggagattgtggtttgacaggtagaaaaattattgtcgatacatatggtggtgctgcacctcatggtggtggtgctttttcaggaaaagatccaactaaagttgatagatcggcagcttacgcggcaaggtatattgctaaaaatgttgtgggttcaaaaattgctgaaaaatgtttaattcaattagcttatgcaattggtgtatcaaaaccactttctatttacgttgatttatttgataacgaaatagataaaaataaatttgttgtagaaaagattaaagaaaattttgatttaagtcctagaggcatcagagaaatgttaaatttaaataaaccaatatatgaaaaaacagctgcctatggtcattttggtagggcacctgaagaaaatggttcattttcatgggaaaaaacggataaaactcaggttttttcaaaatagt

SEQ ID NO: 243645 - DNA, 686 bp, Unknown
  Bacterial polypeptide expressing nucleotide sequence isolated from the Sargasso Sea
tgatgagtttgatagtgatgataaaaaaatgctagctaaaattagacaagatataattgaggtattaattcctgtagtaaaagaaagttatcctgaaagtattcaaaaattatttaatgatagtattaaataccatgttaacccgactggaaaatttgttatcggtggaccacacggagatactggcttaactggtcgaaaaataattattgacacctatggaggaagaggagcgcatggcggaggagcctttagtggaaaagatccaagtaaagttgacagaagtgcagcatatgcggcaagacatatatccaagaatttagttaaagcaggtgtgtctgatgagattttaattcaagtaggatatgctattggagttgcagagccagtatcacttaatgtaaatacatgtggtaaatcaaaattaaatatttcagattcaaaactatcgaacattgtcaaagagatatttgacttaaaacctcactcgatagaatcaagatttaagttgagagatccaatatatctcgaaactgcatcatatggacatatgggtagaaaatctgaaaaaaaaatcaaaaaatttaactcaaaatattctggagttaaaaaaatcgaggttgagcttttcccttgggagaagctagaatatgttgaacaaataattaaatcactaaaactatgaa

SEQ ID NO: 243646 - DNA, 1255 bp, Unknown
  Bacterial polypeptide expressing nucleotide sequence isolated from the Sargasso Sea
atgtcgtacttatttacgtctgaatccgtaagtgaaggacatcctgacaaggtctctgaccagattagtgatgggatcttagataattttttagcttttgatccaaattcaaaagttgcctgtgaaacattagttacaactggacaagtagttttatctggagaggttactagctctacatatattgatgtgcagaatgttgctagagaaataatcaaggatataggatataataatgatttgtacaaattttcaggagaatcttgtgcagttatgtcgttgattcatgagcagtcagaagacattttaagaggagtagaaagtgatataaaggaggaacaaggtgcaggagatcaaggaataatgtttggttatgcatgcaatgaaactcaagaaagtattcctcttacgctagatattgctaataaattacttttcgaactctcaagtctaagaagatcaaagataattccatatttaagacctgattcaaaatctcaagttactattgaatatgataaaaatgacaatccgttaagaatagatacaattgtaatctcaactcaacatgatgattttgatagcgatgataaaaaaatgttggataaaataagacaagatataattgagttattaattccaatagtaaaggaaagttaccctgaaagtattcaaaaattatttaataatagtattaaataccatattaatccgaccggaaaatttgttattggtggaccacacggagatacaggtttaactggacgaaaaataattattgacacctatggaggaagaggagcgcatggtggaggagcctttagtggaaaagatccaagtaaagttgatagaagtgcagcatatgctgcaagacatatatccaagaatttagtcaaagcaggtgtgtctgatgagattttaattcaagtaggatatgctattggagttgctgagccagtatcacttaatgtaaatacatgtggtaaatcaaaattaaatatttcagattcaaaactatcgaaaattgtcaaagagatatttgacttaaaacctcactcgatagaatcaagatttaagttgagagacccaatatatcttgaaactgcatcatatggacatatgggtagaaaatctgaaaaaaaaatcaaaacttttaactcaaaatattctggagttaaaaaaatcgaggttgagcttttcccttgggagaagctagaatatgttgaacaaataattaaatcactaaaactatgaa

SEQ ID NO: 243647 - DNA, 1159 bp, Unknown
  Bacterial polypeptide expressing nucleotide sequence isolated from the Sargasso Sea
tatgtctgaatataagttatttacatctgaatctgtgtcagaaggacatccagacaagatggctgatcaaatttctgatgctgttttagatgccatgctaaaagacgatcctgaatctagggttgcctgtgaaactttagttaaagataacttagttgtgctcgctggggagataacaagtgcatcagaaccggatttagaggcattaactagaaaagttatcttagatataggttacaacagtttagacgttgggtgtgatgggaatacctgtgaagttgtaaatgcaattggaaagcaatcccaagacatagcgcaaggtgtcaatgaaggtgaaggagaaagtttagaacaaggggcaggagatcaaggtttaatgtttggttatgcaacaaatgagaccgaggttttaatgcctgcacccataacttactctcacagacttgttgaacagcaagcttttattagaaaatctggaaagctttcttggttaaggccagatgccaaaagccaagttagctttgtgtatggagatgatggcaaaccagaatcaatttctgcagtagttttatcaacccaacataaccctgatgtctctcaaaaggatttaaaagaaggagttatggaagaaatcgtaaaacctatactgccttcaaactggcttaatcaaaacacaaaatacttcataaatcctaccggaagatttgagattggtgggcctgtgggagattgcggtttaaccggaagaaaaataattgtcgatacttatggcggaatggcaagacatggaggaggcgctttttctggtaaagatccttcgaaggttgacagatcagctgcttatgctggaaggtatgttgcaaaaaatatagttgctgcagatttagctgataggtgcgagatacaagtttcatacgctataggtgttgcagaacccacatcaataagtgtgaatacttttggcacctctaaaattgatgaaaacaaaatttcagaattaattagagagcactttgatttaagacccagacaacttattaaaatgcttgaccttaaaaggccaatttaccaagcaacggctgcttatgggcatttcggaagagaagaaaatgctttcacttgggaaaaaacagataagattgaagctctaaaaggataa

SEQ ID NO: 243648 - DNA, 1084 bp, Unknown
  Bacterial polypeptide expressing nucleotide sequence isolated from the Sargasso Sea
atgtataaaacagctgaaaccgtctctcctggacatccagataaaattgctgatttaatttcagactacgttttgaccgaagccctttcaaacaatagtaaatcaagagttgcggtagaaacattcttaactggtacaacttatggtggattagttgttgttggtggagaaattagtgatattgcaaaaatagatgataaaggtattgaaaaaatagttaaagatgcactagcaaaaacaataaagacaagctttgaggattttcaattagatagtttaaaaattcaaaatgaattaactccacaatctgaggagataagatctgcagttgaggatgacgaggaccttggagcaggagatcaaggcattatggttggctatgctactaacgaaactgaatcttttatgcctccaacctttgatatcagtagaaatattcagatggctctttgggaaattcagaataatgatgaaaaactcgatttagattctaaagttcaggttacaacaggtggagaagaaacaaaagttgttatatccacacagcataaaaaagatatagatattgatgaactaagaatcaaccttgaagatatgatagcgaaatacgttaatggaaaataccagtttgatcttaacccgtctggttcatttgttaaaggtggccctgctggagatactggactgacaggtagaaaaatcgttgttgatgcatatggaccaactgtgcccgttggtggcggtgcattttctgggaaagacccatccaaagttgatcgttctgcagcatatgcagctagacatttagcaaagaatattgttgctcataatttggcagataaatgtcagataagagttgcctatgcaataggtaaagcagagccctatgaattatcggttgatacatttggttctcaaaaagaaaaagattctgtcgtaaatgattttgtatcaaggtttggcatgaagcctggagtaattattgagcgattagatttattaaatgtaaattatagggaagatacattgttttctcattttggacatgagaacagaaactgggagaaaatcgaggatatttaag

SEQ ID NO: 243649 - DNA, 1159 bp, Unknown
  Bacterial polypeptide expressing nucleotide sequence isolated from the Sargasso Sea
aatgtttcaccaagattttatctttagttctgaatctgttactgaaggtcacccagataaagttgcagatcaaatttcagatgctgttctggactctattattaaagatgatccaaattgtagagtcgcatgtgagacgttaataactagaaatagagttatattatctgctgaaattaagtctacaatatctccagattttgagagaattattaaagatacattgttatcaattggctatgatgatgaatctaaagggttcgatgcaaataattgtgacatagatttatatatagaggaacaatctgctgatatttctatgggtgttgataaaatagattcagaaataataggagctggtgatcaaggccttatgtttggctatgcaacaaaagaaaatgataatcttatgccctaccccatacttttagcacacaaattaacccatcaactggcaaaaaaaagaaagtctggtcagttagattttcttagaccagatgggaaatcacaggtttcaataaaatatgaagaaaataaaccatcttatgttgacacggttgtaatctcaactcaacactctgaagatgtttctgattcagatttaaaggaagctgtgatagaagaaataataaaaaaagagattccaagccatttactttccaaggaaacaaaatttttaattaatccaactggaagattcgttatcggtggcccccaaggagatactggtctcacaggtaggaaaattattgttgatacctatggaggttgggcaaaacatggtggtggtgccttttcaggaaaggacccatccaaagttgatagaagtgcatgctatatggcaaggtatattgcaaagaacattgtagcgtctggtttgttgcctgactgtgaaatccagcttgcatatgcaataggaaaagctgagcctgtttcaataaatcttacaagtacactaaatgttgatcaaaaaattatagataagcttactgaagaagtttttaaaatttttgattgcacaccaaaaggtattattgaatcattagatttattaaatccaatttatcaaaaaacatctacctatgggcattttggtagagataatttaggttttaattgggaaaacatagacaagagagacgaaataaaaaagctttag

SEQ ID NO: 243650 - DNA, 1168 bp, Unknown
  Bacterial polypeptide expressing nucleotide sequence isolated from the Sargasso Sea
atgaataacgaatatctatttacatcagaaagcgtatcaccaggacatcctgataaattaagcgatcaattatcagacgctgtactcgattatgtttttgatactgacaaaaatgctcgtgtagcatgtgaagtgttgactaaaggtaaaaaagattcagcaggttcaatagtagtagcgggagaaataacttctacaaacccattagattttgataagaaacttagagaggtaatctgtgacattggttataaatctaatgaattgggttttaatgggaatgaatgtgaaatagttaggcttataaatcaacaatcatcggatattaaaatgggtgttgatcgccaagataaaaaaagccagggcgctggagaccaaggtctcatgtttggatatgcatcaaatgaaacagaagtgcttatgcctgcacctatatattactcacataggttgatggaaaaacaagctgaaattttaaaacaaggcaatgaaagttggttaagacctgatgcaaagagtcaggttacttttgtttataaagatggcaagccagtttctattgatactatcgtgctatcaacacaacatgacgaatcaataacgttagaaaaaattaaagaatttgttgttgaagaaataattaaaccaacgatcccctcacattatcgaaataatacaaaaatatttgttaatcctactggaaattttattgatggtgggccaatgggagattgtgggctaactggtagaaaaataatagtagatacctatggaggcatggcaagacatggtggtggtgctttttcaggcaaggacccatcgaaagttgatagatctgcagcatatatatcaagatatgtagcaaaaaatattgtagcagcaggtattgcggaaaaatgtgaaattcagttatcatatgctattggtattgctcagccgacatccatatctgtcaatacctttggaactggcaaaaaaaatgatattgaaatatctgaaataattagtgatgtttttgacctaacgccatatggaataacaaacacgttagatcttctaaatagaaaatatcagccaactgctgctttcggtcactttggtagaagtggggataactttacatgggagcatacaaacaaaattgatatactcaaggaaagagtttaat

SEQ ID NO: 243651 - DNA, 1003 bp, Unknown
  Bacterial polypeptide expressing nucleotide sequence isolated from the Sargasso Sea
atgagttatatatttacatctgaatccgtttcagaaggtcatcctgataaagtttgtgatcaaatttctgatgctattcttgattcttatcttgcacaagatccaaatagtagagttgcttgtgaaacacttattaaaaataatacagttattgttgctggcgaaattacatccaatggcacgccaaatatagaagaggtaataagaaataccgttaatgaaattggttataatcatgatgatttaggcttcaatggaaataactgtgaaatccaaaacctaatttcaaaacaatcgccagatattgctcaaggtgttaatgagggtgagggtgaagacctagatcaaggcgctggtgaccaagggcttatgtttggatatgcatgttctgaaactccagttctaatgcctgccccaattaatttatctcatgagctcgtcttaaaacaatccgaagtaagaaagaatggtgaactaagctggcttagaccagatgctaaaagtcaagttagtgttgtttataaagatgatagaaaaactgtagattatgtttctgctattgttttatcaactcaacatgacgaagatatttctcaagatgaaattaaagcaaaagtacgcgagaaaattattaatccgataattccaactgaatggattaaagaggatacaaaaatatatataaatccaactggtaagtttgtaattggtggtcctgtcggtgattgtggcctaactggaagaaagattatcgtcgatacttatggaggaatggcaaggcatggtggtggtgcattttcaggaaaagatccatcaaaggtagacaggtctgctgcttatgcttgcagatatgttgcaaaaaatattgttgctgctggtcttgctgaaagatgtgaagtacaagtttcttatgcgataggtattgctgaaccaacatcaattactgttgatactcttggaacaggcagcttgtctgaaaatgagatttcaccagattgttaga

SEQ ID NO: 243652 - DNA, 1057 bp, Unknown
  Bacterial polypeptide expressing nucleotide sequence isolated from the Sargasso Sea
tatggcagaaatgctgttcacttctgaaagcgttacagaaggacatccagataaaattgcagatcagatctcggattctgtactagacgccatgctcatggacgaccctaaaagcagggtggcatgtgaaactttggtcaccaccggaatggcctttctggctggagaagtaaccaccaaagcacaggttgattttcaaaggattgtcagagaaaccattcgtgaaatcggatacaccgattcaaaaatggggttcgattgtgatacctgtgccgttatggtcagcctggacaaacaatccccaaatatcaaacaaggtgtggataacgatccagaaaaaagcaaagaacagggagcaggagatcaggggttgatgtttggctacgcttgcgatgaaaccccggaactgatgccgcttcccatcaatatgtcacaccgcctgacggaaaaactttcacaggtccgtaaaaatggaaccatgcctgaactcagacccgacggaaaatctcaggtcacggtcaaatacgtcaacggcaaaccggtcgaagtcacagcagttgtaatcagcacccaacacaaagagggacaagaccagggtcaattgaaaaagaacatcatcgaaaatgtcattcatccagtgatccctgcagaatttctcactgatacgactgatttccacatcaacccgacaggaatctttgaaattggaggaccccaaggagattgtggattgacaggacgcaaaatcattgttgacacctatggaggaatgggacgtcatggaggtggtgcattttccgggaaagatccctcgaaggtggatcgttccgccgcttacgctgcaagacacgttgccaaaaacgtcgttgctgccggtctggccagccgctgtgaagtccaagtcgcttatgccattggtgttgcggatcctgtttccgtttctgtcgatacttttgggaccgccaatatcgaagaggaaaagatctccatgttgatccaggaaacctttgatctgaaacctgcgagtatcatccagagactcaacctgttcgcccca

SEQ ID NO: 243653 - DNA, 1165 bp, Unknown
  Bacterial polypeptide expressing nucleotide sequence isolated from the Sargasso Sea
ttgaagtctaattatctttttacaagcgaatcagtatcggaaggacatccagataaagtatgtgatcgaatttcagatgctgtggttgacgcttatctcgatgcagatagtctctctcgtgtagctgtcgagactcttaccaccaccaacagaatcgtaatcgcgggagaggtgagaggacctgaggagattggttcagatacaatagagaaagttgctagaagggcagtgaagagtattggttatgagcaggacggtttccattgggaaaaagcacaggtttctgtctatgtacacaaacaatcggtagatattgcgcagggtgttgatgcaggtgctagcaaagatgagggggcaggcgatcagggtataatgttcggttatgcttgtaaggagacagattctttgatgccagctccgattttttattcgcatagaattctggaagaattagctaaggcgcgccattcaggcgatgtgaagggattggggcctgattctaaaagtcaggttaccttagagtatgcagatggcgaaccagtgagagctaagtccatagttgtttctacgcagcactcagaggaattgagtcaagaagacgtcagagatattgtgaggccttttgtgactagttctcttccacaaggttggatgtgcgaagatagcgagttctatgtgaacccgactggtcgattcgtgataggtggtccagatggggatgcagggctcacaggaaggaaaattattgttgatacctacgggggagcggctcctcacggagggggcgctttttctgggaaggatccttctaaggtagatagatctgccgcctatgctgctagatatttagctaaaaatgttgttggtgctggcttagccagtaagtgcactattcagttagcctatgctattggcgtatcaaagcctctgtctgtatatgttgatcttcatgacactggatcggaacacgaatcgaaaatctcggaagcgctgcagaaatgtatggacctcagcccaagagggatcagagagcatttgggcctgagtaagcctatttacgagagaaccgcggcatatggacactttgggagggagccaaattcagacggagggttttcatgggaaaagctagacctggtggaaccattgaaacaaacaatctagg

SEQ ID NO: 243654 - DNA, 718 bp, Unknown
  Bacterial polypeptide expressing nucleotide sequence isolated from the Sargasso Sea
atgagttacatttttacatccgaatctgtttcaggaggtcatcctgataaagtttgcgatcaaatatccgatgccgttttagatgcatatctagcagaagatccaaatagcagagtggcttgcgagacaatgataaaaaataacatggtatatatagcaggtgaaataacttcgctaggaagtcctgacctcgaacctgttgttcgaaaaacaattaatgatattggctataactcagatgattatgggtttaatggaaatacatgtgagttcacgaatcttgtctttgaacaatcgccggatatatctcagggtgttaccgaaggtgagggagaaaaccttgagcaaggggctggagatcagggtcttatgtttggatatgcatgcaaagaaacagaatcattgatgccacttccaatagatctttctcacagattggtaaaaaagcaggcagatgtaatgaagagtgaagatataaaatggctgcggcctgatgctaagagtcaagtaagtgtgatttactccgatgatggtaaaacaatcgaaggcttgtctgcagtcgtactttcaactcaacacgatgaagaagttagtcaagaagaaataaaaactgaggtgatggataaaattatcaaaccaattgttcctgaggaatggttgcttgactccacaaatatatttattaatcccactgggaaattcgtcatcgggggacctg

SEQ ID NO: 243655 - DNA, 1195 bp, Unknown
  Bacterial polypeptide expressing nucleotide sequence isolated from the Sargasso Sea
tatgaaaggtaattatttatttacttcggagtctgtttctgaaggacatccagataaagtatgcgatataatttcagatacagttttagatctctgtttgtcaaaagacccccaggctagggttgcttgtgagacaatgacaacaactaatagaactgtgttagctggtgaactcagagtaccagaaaattgtatgtctaatgatgggaaaaaattatctgatgattttaagcatgaaatcgaggatgcagtaagaaatgctgttaagtctattggttatgagcaagaagggtatcattggaaaaatatggttgtggaaaatcatcttcatggtcagtcacctgatatagcaatgggcgttgatgctgctgacaataaagaagaaggagcaggtgaccagggaataatgtttggatttgcttgtagagatacagatgtattaatgccagctgcaattcattattcacacaaaatattacaatcactagctattgcaaggcataatggtgaagctagtattttaggtccagatagtaaatcacaaattactttagaacatattgatgggaagcccgtaaaagcaacttctgtggtggtttcaacacaacatattgaggaagcatctcaatctgaaataagagaactagttagaaaacatgttgaaaatgttctacctgatggatggatgtgtccggaggaaagattttttgtaaatccaactggtaattttgttgttggaggtcctgatggagattcaggtttaacaggtagaaaaattattgttgatacttatggtggttcatctcctcatggcggtggcgcatttagtggaaaagatccaaccaaagtggatagatctgcggcttatatatcacgttatatggctaaaaatgttgtggcagcaaatttagctgaaaaatgtacaattcagctatcatatgccattggagtttcagaacctctatctctatatgttaacacagataacactggaaaaatttctgacgaagagctttcacaaattcttagaagagaggttgatttaactccctctggaataaggtcctgtttgggtttaaataattccatttataaaccatctgctgcatatggtcattttggaagagtgccagacgaagaggttaaaggctctttttcatgggaaaaaactgatcttgtatcaaaaatctcctaa

SEQ ID NO: 243656 - DNA, 156 bp, Unknown
  Bacterial polypeptide expressing nucleotide sequence isolated from the Sargasso Sea
aaaattttgatttaagaccaaagagtcttataaacatgcttgaccttaaaaggccaatatatcttccaactgctgcttatgggcattttggaaggactgatattgatctttcttgggaaaaaactgataaatcttcagagatctcacaactataat

SEQ ID NO: 243657 - DNA, 790 bp, Unknown
  Bacterial polypeptide expressing nucleotide sequence isolated from the Sargasso Sea
gtttggatatgcttgcaatgaaactgatatgttaatgccagcaccaattcattattctcacaaaattttaaaactaatggctgaggatagaaaatcgggtaaacttaaaaatattgaaccagactctaaaagccagataacgtttgaatatattgatggtaagccagtaaaagttaagtctgtggttatatcttctcaacactctaaggatgtaaatcaagctcaagttaaagatttattaagaccgtatatggttaaagcaataccaggaaattttctttatggttttaatgaggacgagttttatgttaacccaactgggaattttgtaataggtggtccagatggagattgtggattaacaggaagaaaaataatagttgatacttatggtggagctgccccgcatggtggaggggctttttcaggaaaagatccgactaaagttgatagatcagcggcttatgcagcaagatatattgcaaaaaatattgtagcttcaaaaataagtaatagatgcttaattcaattagcttatgccataggtgtttccaaacctttatcaatttatgttgatttgtttgataatgatttggataagaataaatttgtcgtagaaacaattaaagaaaattttgatttaagtccaagaggaattagagaaatacttaaattaaataatcctatatatgaaaaaacatctgcttatggccattttggcagaataccagaaaataatggttcattttcatgggaaaaaactgacaaattaagcattttttctaaatag

SEQ ID NO: 243658 - DNA, 379 bp, Unknown
  Bacterial polypeptide expressing nucleotide sequence isolated from the Sargasso Sea
aatgaaaaaaaattatctttttacaagtgaatcagtttccgagggccatccagataaagtttgtgatagaatttcagacatggttgttgatacatacttaagttcggaacctcaatcaagagtagcctgcgaaacattaacaacaactaacaaagtagttttagctggcgaagtaaggggaccagatgttaaaaaagatgatcttatagaaaaagttagaaattgcattaaagacattggttatgatcaagaaggtttttcgtggaaagatacaactaaaatagaaagtcatcttcacgcacaatcagccgatattgcaatgggagttgactcatcaggaaataaagatgagggtgctggagatcaaaggtataatgtt

SEQ ID NO: 243659 - DNA, 889 bp, Unknown
  Bacterial polypeptide expressing nucleotide sequence isolated from the Sargasso Sea
atagaaactcatttacatgctcagtcagcagatatagccatgggtgtagactcatctggtaataaagatgaaggtgctggtgatcagggaattatgtttgggtatgcatgtaatgagaccgacgttttaatgccagctccaattcattattcacatagaattttaagattgatggctgaagatagaaaatcaggaaagttaaaaggaatagaaccagactcaaaaagtcaaattacaattgagtataaagatggtttgcctaacgcggtaaaatcagtggtgatatctacacaacattctaaagatgttaatcttacaaaagttaaagaactttgtatgccatatattgagagatctataccaaaaaatttattaagtaatctcgatgaaaaggagatttatataaatccaacaggtaattttgtaattggtggaccagatggggacagtggattaacaggaagaaaaattattgtagatacttatggaggagcagctccacatggtggaggagctttttcaggaaaagatcctactaaagttgatagatcagccgcatatgcttcaagatatcttgcaaaaaatgttgttgcgtcaaaaattgctgacaaatgtttaattcaacttgcatacgcaatcggagtatcaaaacctttgtctatctatgtagatctttttgataatgatgaagataaaaatagatacgttgaaaagttgataaacgaaaattttgatttaagcccaagaggaataagagaaatgttaggtttaaacaaagcaatatatgaaaaaactgctgcatacggacattttggaagagaaccagagtctaatggggcgttttcttgggaaaaacagacaaagcagatgtttttaagaagtaattaaa

SEQ ID NO: 243660 - DNA, 396 bp, Unknown
  Bacterial polypeptide expressing nucleotide sequence isolated from the Sargasso Sea
cttatggaggaatggctagacatggaggtggcgtcttttctggaaaagacccatccaaagttgataggtctgcagcttatgcatccagatatgttgcaaagaatatagttgcagcaggtttagccgatttttgtgaaattcaagtatcctatgcgattggtgttgcaaaacctacctcgatcttcgtggaaacattcaacagtgaaaaagttgcgaaagaggttattgtcaaattagttgaagaagaatttgacttgaggcccaaaagtattatcgaaatgctggatttaaaacgtccaatttatcaacaaacagctgcctatggtcattttggaagaactgacattgaactcagttgggaaaaaacggatagagctgaaaaattaaaaaaataat

SEQ ID NO: 243661 - DNA, 421 bp, Unknown
  Bacterial polypeptide expressing nucleotide sequence isolated from the Sargasso Sea
agaaaaatcattgttgatacatacggaggcgcagcaccacatggtggtggagcattttcaggaaaagatccaacgaaagtagatagatcagcagcatatgcttcaagatatcttgcaaaaaatgttgtagcttcaggaattgctgataaatgtttaattcagttagcatatgccataggtgtttctaagcctttatcaatatatgtagatttatttgataatgatgaggaaaaaaatatgcatgttgaaaaattgataaatgaaaattttgatttaagccctagaggaattagagaaatgttaggtttaaacaaagcaatatatcaaaaaacagctgcatatggccattttggaagagaaccagagtctgatggttcattttcgtgggaaaaaacagataaatctggggtttttaaataat

SEQ ID NO: 243662 - DNA, 870 bp, Unknown
  Bacterial polypeptide expressing nucleotide sequence isolated from the Sargasso Sea
aatgaaaaaagattatttatttaccagcgagtcagtttctgaaggtcatccagataaagtttgtgatagaatttcagatatggttgtagatacatatctggctgctgaacctcaatcgagagttgcttgtgaaactttaacaacaacaaataaagttgtcttagctggtgaagtaagaggtccagaaattaaaaaagaggatttgatagaaaaagtacgacattgcatcaaagatataggttatgatcaagacgggtttacttggaaagaagcaacatcagtcgaaagtcatttgcattctcaatctgctgatattgcaatgggtgtagactcctctggaaataaagatgaaggtgcgggtgaccaaggaattatgtttggttatgcttgtaacgaaacggatgtccttatgccagcaccaatacattattctcacaaaatattaagactaatggcccaagatagaaagtctggaaaattaaaaaacatagaaccagactcaaaaagccaaattacaattgagtataaagatggaaaaccatcatcagtcaaatcagtcgtaatatcaactcagcactctcctagtataaatcaagctcaagtaagagatctagttaaaccttatattgaaaaatcaatacctaaagatttattaaattcattggatgaaaatgaaatttatgtaaatcctacaggaaattttgtaatcggcggcccagacggcgatagtggtttgacaggtagaaaaattattgttgatacatatggtggagctgctcctcatggtggaggtgcattttcaggaaaagatccaactaaagtagataggtcagcagcttatgcatcaagatatctagcgaaaaacgttgt

SEQ ID NO: 243663 - DNA, 992 bp, Unknown
  Bacterial polypeptide expressing nucleotide sequence isolated from the Sargasso Sea
aacaatggtttcatcgaatatggtaaccattgctggagaagttaaaactgacttaatgtacaataaagaaaccatagaagaattagtagggcaaacggtcaaagatattggttatgaacaagaaaactttcattgggatacattatcttttaaaaacttaattcataatcaaagtatcgatattgctagaggtaccgataacttcggtgcaggagatcaaggaatgatgtttggttatgcatgtaatgaaaatgattcattcatgccaagtgcgatcttctatagccataaaattaccaaagcactctcagttgcaagacgtaatgaagaaaattggatgggtcctgatggaaaagcacaagtaacagttgaatatagcaatgtgaatgaacctgtaagaatatcaaacgttatttgcagtacccaacatagtaaagatttgaaagatagtcctggtgaagttcaaaaaagaatagaggaaattatcaagccagagttaagcgatatgcttgatgataatactatctttcaagtaaacccaactggtaattttgtaacaggtggaccagacggtgatactggagtcacaggaagaaaaatcattgtagatacatatggtggctatgcacctcatggtggaggagcatttagtggaaaagactgtacaaaagtcgatagaagcggcgcatacatggcaagatatctagctaaaaatattgtagcttcaggagtttcacaaaatgctactattcaacttagttacgctataggagttaaagagcctgtatcactttatgtctattgtgatggtaaagttaggaatgatatatcagattggatttatcaaaatattgatttgacacctttaggtatcattaggaaatttaatctatttaaattagacctaacagaaactacaaattatggtcatttcggtaaaaaccatcttgcttgggaaaatactgatatggcaaatcaattaaacttttaag

SEQ ID NO: 243664 - DNA, 1243 bp, Unknown
  Bacterial polypeptide expressing nucleotide sequence isolated from the Sargasso Sea
aatgagtgatttcatcttcacttccgaatctgtaactgaaggtcatcctgacaaaatatgtgatcaaataagtgatgctgttttagatgctttattaacagaagatccagaaagtagagttgcctgcgaaactgttgttaatacaggtctttgtttacttactggagaaataacttcaaaagcgaaagtcgattatataaaactagttaggaatgtaattaaagaaattggatatgaaggctataaagcaggtggttttgatgcaaatagttgtgctgttttagtagcacttgatgagcaatcaccagacatttcacaaggagtaaatgacgcagatgatgttaacgatgatttggaagacaataccggagctggtgaccaaggcataatgtttggctatgcatgcgacgagacgcctgaattaatgcccttaccgattagcttagctcatagattagccattcaacttgccaaagtgaggcatgaagaagtccttagttatctacttcctgatggtaaaactcaagtaagcattgattacgaaaaaggtttaccagtttctattaatacaattttaatttcaactcaacataatcctgagatagatgggataacaaatgaagaagaaattcgtcaaagaataaaagaagatttatggacccatgttgtaattcctgctactgaagatttagaaatcaaaccaagcattagccaaacaagatttctagtaaaccccacgggaaaatttgtcgtaggagggccacaaggagatgcgggtctcactggcagaaaaattattgtagatacttatggtggatatgcaagacacggaggaggggcattttctgggaaagatcccacaaaagtagacagatcagccgcttatgctgcacgctatgtagctaaaagcatagttaaggcgaaattggcaaaaaaagcagaagtacaattaagttatgcaattggagtagcaaaaccaatttccatactagtggatacttttgatacaggtgttatttcacaagctaatttgactgagctaattaaagagcactttgatttaagacccgcagcaataataaaagaatttaacttgagaaatctaccaaaaaaaatgggcggcaaattttatagaaagactgcatcttatggacattttggcagaagagatcttgagctcccatgggaaaatgtagaaaaaaaagcagcccaattagcagaggcttccaagatttttaaataa

SEQ ID NO: 243665 - DNA, 889 bp, Unknown
  Bacterial polypeptide expressing nucleotide sequence isolated from the Sargasso Sea
taagattgaaactcatttacactctcagtcagcagatatagctatgggagtagactcatctggaaataaagatgaaggtgctggagatcagggaattatgtttgggtatgcatgtaatgaaactgatgttctaatgccggctccgattcattactcacatagaattttaagattaatggctgaagatagaaaatctggaaagctaaaaggtatagagccagattcaaaaagtcaaattacaattgagtataaagacggtgtacctaatgcagtaaaatcagtggtgatatctacacaacattccaaagatgttgacttagcaaaagttaaagaactttgtatgccgtatattgaaagatctattccaaaaaatttattaggaagtcttgatgaaaaagagatttatataaatcctacaggaaactttgttataggtggacccgatggagatagtggattgactggtagaaagataattgtagatacttatggtggagcagcaccgcatggtggaggtgctttttcaggaaaagacccgacaaaggttgatagatcggccgcatacgcttcgagatatttagcaaaaaatgtggttgcttcaaagattgcagacaaatgtttaattcagttagcttatgctattggagtttcaaaacctttatcaatttatgttgatctttttgataatgatgaggaaaaaaatagacatgtagaaaaattaattaatgagaattttgatttaagtcctagaggaattagagaaatgcttggtttaaataaggcgatatatgaaaaaactgcagcatatgggcattttggaagagaaccagagtcaaatggtgcattttcatgggaaaaaactgataaagcaaatgtttttagtaagtaa

SEQ ID NO: 243666 - DNA, 605 bp, Unknown
  Bacterial polypeptide expressing nucleotide sequence isolated from the Sargasso Sea
aatggcacaacacatttttacctctgaatctgtctctgaaggacatccggataaaatcgctgaccagatctctgacgcggtactggatgccattttagaacaagatccaaaagcccgtgttgcttgcgaaaccttcgtaaaaacaggcatggtgttagtaggtggtgaaatcacaacctcagcctgggtcgatatcgaagagatcactcgcaacacgatccgtgacattggttacgtgcattcagatatgggttttgatgccaactcgtgcgctgtgttaagtgcaattggtaaacaatcacctgatatcaaccaaggtgtggataaaaaagatccaagcgaacaaggtgcaggcgatcagggtttaatgtttggttatgccagcaacgaaactgacgtattaatgcctgctcctatcacttattctcaccgtttagtgcagcaacaagccaaagtgcgtaaagatggtactttgaactggttacgtcctgatgcgaaatctcagctgagttttgtttacgaaaacggcaagccagtgggcatagatgcagtagttttatccactcagcactgtgacactatctctacagcggatctgcgtgaag

SEQ ID NO: 243667 - DNA, 1186 bp, Unknown
  Bacterial polypeptide expressing nucleotide sequence isolated from the Sargasso Sea
ttgagcagaaacaattttgtatttacatctgagtcggtatctgaaggacacccagacaaggtttgcgatcaaatatctgactctgtgctagatgcttttatctcagaggaaccagaagcaagagtggcatgtgaaacatttgcgaccaccaatagggtcgttgtaggaggtgaagtcgggctttctgataaaaaaattttgcaagactacatgggtcaaattgatcagattgccaggtcatgtatcaagaatataggatacgaacaggaaaaatttcatcatcaaactgtagaagttacaaacttattgcacgaacaatcagcgcatatagctcagggagttaacgctggagcaaataaagatgaaggtgctggcgatcaagggataatgtttggatatgctaccgacgaaacggaagatttgatgcctgctcctatccaatattcacacgcaatacttcgacgtctcgcagaagtaagaaaaaatggaactgagccaactttagggcctgatgctaaatctcagttatcagtaaaatatcaatatggaataccaactagtgtaacatctattgtattatcaacgcagcaccttgatgagaaaatgacctcagcagatgttcgctcagttgttgaaccatacattagagaaattttacccgaaaattggatatcaaatgaaactaaatggcatgtaaacccaacaggaaaatttgttatcggaggccctgatggagatgcaggtttaacgggccggaaaataattgttgatacgtatggaggcgcagcgccacatggaggaggggcgttttcaggaaaggatccaacaaaagttgatcgttcggcagcctatgctgcaaggtatttggccaaaaatatagttggcgccgatctagctaaaaagtgttcaatacagttaagctatgcaattggtgtggcaaaacccctttctatttatgcagatacatttggtactggcattgtttccgaagaagcaatggaaaatgctattgcctcttgtatggatttaacaccaaagggaataaggatgcatcttggactgaacaaacctatatatcaaagaactgcagcttacggacactttggccgtaagcctgaggaagacggtggatttagttgggaaaaactagatttggtagatgaacttaaagccaagtgtaagtaga

SEQ ID NO: 243668 - DNA, 219 bp, Unknown
  Bacterial polypeptide expressing nucleotide sequence isolated from the Sargasso Sea
caattaatgttaatacttttgacagtgagaaaatttcaaaagatgcaattgagaaaatagttgaggagcattttgacttgaggccaaagagccttattaatatgcttgatttaaagaggcctatatacctcccaactgctgcctatggacattttggaagaacagatattgacttatcatgggaaaaaacagataaagcttcagaaatttcgcagtaaa

SEQ ID NO: 243669 - DNA, 1114 bp, Unknown
  Bacterial polypeptide expressing nucleotide sequence isolated from the Sargasso Sea
attgtcatatatttttacatctgaatctgtatcagaaggtcatcctgacaagatttgtgatcaaatctcagatgcaatattagatgaatgtcttaagcaggataaacaatctagagttgcatgtgaaacgctggttaaaaataatactgtcgttcttgctggcgaaataagttcaaaagcatctattgatcacgaaaaaatagctagagatgttgtcaaaaatattggttatgtagatcaggagcttggttttagttgcgaaagttttaagtttattaatcttttatcccagcaaagtgcagatatagcaaaaggtatatccaacttaggttcgggtgatcaagggttaatgtttggttatgcctgtaaagagactaaagagcttatgcctttacctatatcactagctcataaactaacaatgaaacatgctgaagtcagaagaagttctgataatggcttattgccagatgccaaatcacaagtttcagtagagtacaattcaaactacagcccaaaaagaattgattcaattgttttctcatctcaacattcaaaggatctaagcttaaataaacttagagagttaattagagaggagataattaataagtcattacctacagatttattggatactgaaacaaagtatctcattaatccagcaggcgaatttaacataggtggtccagttggagattctggattaacaggaagaaaaattattgttgatacttatggcggaatggctcgtcatggtggaggatgtttttctgggaaagacccaactaaagtagacagatcggcagcctatgctcttcgccaagttgcaaaatcactggtacatgccggtctttgtaattattgtgaagtgcagtcttcatatgcaattggagtagtggagccaacatcaatatttatcaatacttttgaatctgaacaaaagcctattggggagataaaggaaatagtagatgcatctttcgatttaactccagctggtataattgataatttaaatcttttagaaccgatctatcaaaaaactgcaagttatggtcactttgggcgagaagatcaaggttttagttgggaagatgtcaaaggtctatga

SEQ ID NO: 243670 - DNA, 379 bp, Unknown
  Bacterial polypeptide expressing nucleotide sequence isolated from the Sargasso Sea
ggaggagctttttcaggaaaagatcctacaaaagttgatagatcggcagcttatgcatcaagatatttagcaaaaaatgtagtggcatcgaagatagcagataaatgtttaattcaattagcatatgcaattggtgtatcaaagcctttatcaatttatgttgatctatttgacaatgatgaggaaaaaaatagtcatgtagaaaaattaattaatgataattttgacttaagtccaagaggaataagagaaatgttaggtttaaataaaccaatatatgaaaaaacatctgcatatggccattttggaagagagccagggtctgatggctcattttcatgggaaaaaacagataaagcagatatatttaggaagtaat

SEQ ID NO: 243671 - DNA, 407 bp, Unknown
  Bacterial polypeptide expressing nucleotide sequence isolated from the Sargasso Sea
tacttatggaggtgcagcacctcatggtggtggagcattttcaggaaaagatccaacaaaagtagatagatcagcagcatatgcttcaagataccttgcaaaaaatgttgtagcctcaggaattgctgacaagtgcctaattcaattagcatatgccattggtgtttcaaaacctttatcaatttatgtagatctatttgataatgatgagcaaaaaaatatgcatgtagagaaattgataaatgaaaattttgatttaagccctagaggaattagagaaatgctaggtttaaacaaagcaatatatcaaaaaacagctgcatacggtcattttggaagagaaccagagtctgatggttcattttcatgggaaaaaactgacaaatcagaggttttcaagaagtaaa

SEQ ID NO: 243672 - DNA, 592 bp, Unknown
  Bacterial polypeptide expressing nucleotide sequence isolated from the Sargasso Sea
aatgaaaaaagattatttgtttacaagtgagtcagtttcagaaggccatccagataaagtatgtgatagaatttcagatatggtagttgatacttatttaggtttagaacctcaatcaagagtagcctgtgaaactttaacaactacaaacaaggttgtacttgcaggtgaaactaggggacctgaaattaaaaaagatgaattaatatcaaaagttagagattgtattaaagatattggttatgatcaggagggttttacttacaaggaagcaactaaaattgaatgtcatttacactctcaatcaacggatatagcaatgggagtcgattcctctggaaacaaagatgaaggtgctggggaccagggaataatgtttggttatgcatgtaacgagactgatgtacttatgccagctccaattcatttctcacatagaattttaagattaatggctgaagatagaaaatctggaaagcttataggaatagagccagattctaaaagtcaaattactatagaatacaaagatggcgctccaaaagctgtaaaatcagtagtgatttctactcaacattccaaagatgttaat

SEQ ID NO: 243673 - DNA, 1072 bp, Unknown
  Bacterial polypeptide expressing nucleotide sequence isolated from the Sargasso Sea
atgaaaaaagattttttatttacaagtgagtcagtttctgaaggacacccagataaagtatgtgacagaatttcagatatggttgttgatacatatctaggtatggagccacaagctagagtagcttgtgaaactttaacaaccacaaataaagttgtattagctggagaaacaagaggaccagatattaataaagacgaattaatttctaaagttagggattgtattaaagatattggttatgaccaagaaggctttacttggagagatgcaactaaaattgaaagtcatttacattcacagtcagctgatattgcaatgggagtggactcatcaggaaataaagatgaaggagcaggtgatcaaggaataatgtttggttatgcttgcaatgaaacagatgttttaatgccagcccctattcattattctcataaaattttaagattgatggcacaagatagaaaatctggaaaccttaatggaatagagccagattcaaaaagtcaaattactattgaatataaagacggtaaaccatcagcggtaaaatcagtagtaatttcaacacaacattccaaagatgttaatttagcaaaagtaaaagagctttgtatgccatatattgaaaaatctattccaaaaaatttattaggaagtcttgatgaaaaagagatttacataaatcctactggaaattttgtaattggtggtcctgatggggacagtggcttaactggtagaaaaattattgttgacacatatggaggtgcagcacctcatggtggtggagcattttcaggaaaagatccaacaaaagtagatagatcagcagcatatgcatcaagatatcttgcaaaaaatgttgtagcttcaagaattgctgacaagtgtttaattcaattagcatatgctataggtgtttcaaaaccgctatcaatatatgtagatttatttgataatgatgaagaaaaaaacatgcatgttgaaaaattgattaatgataattttgatttgagtcctagaggaattagagaaatgctaggtttaaacaaagcaatatatcaaaaaa

SEQ ID NO: 243674 - DNA, 615 bp, Unknown
  Bacterial polypeptide expressing nucleotide sequence isolated from the Sargasso Sea
tcaaacctacaaaccaaaaaagaatcgattcagttgttttttcatctcaacattcaaaggatcttggcctagataagctaagggatttaattagagaagaggtaatcaataaatcattacccctagatctgctagacaataaaacaaaatatcttattaatcctgcaggtgaatttaacataggtggtccagttggtgattctggattaacaggcagaaaaattattgttgatacttatggtggaatggcacgtcatggtggaggaagtttttctggtaaagatccaactaaagtagatagatcagcagcttatgctcttcgccaagttgcaaaatcattagttaacgcagatctatgtgattattgtgaagtccaatcttcttatgcaattggagtagtagagccaacatcaatatttattaatacttttgaatcagaaagaaaacctattggagagatacaagcgatagtagatgaatcttttgatttaactccagctggcatcattaataatttaaatcttttagagccaatttatttaaaaactgcaagctatggtcactttggtcgagaagatcaaggatttagctgggaagatacaaaagatctatgaa

SEQ ID NO: 243675 - DNA, 289 bp, Unknown
  Bacterial polypeptide expressing nucleotide sequence isolated from the Sargasso Sea
aaaatttctaacaaatgtttgattcaattatcatatgcaattggtgtttcaaaacctctatcaatttacgtaaacctttttgatggggatttagaaaaatcaaaatatgtcgaaaaaataattcaagaaaattttgatttaagtccgagaggaataagagaaatgttatctttaaacaaaccaatatacgagtgcaccgcagcatacggtcattttggtagaaagccaggatctaacggttctttttcttgggaaaaaactgacaaatcctcaatttttaaaaagtagc

SEQ ID NO: 243676 - DNA, 277 bp, Unknown
  Bacterial polypeptide expressing nucleotide sequence isolated from the Sargasso Sea
aatgaaaagagattatatttttacaagtgagtcagtgtctgaaggacacccagataaagtttgtgatagaatttcggatatggttgttgacagctatttatcatcaggtgatccacaaactcgagttgcttgcgaaacacttactactactaacaaagtagttttagctggagaagtaagaggcccatcaatatcaaaagatcaaataatatctcaagtaagagactgtattaaggatataggatatgaacaagatggttttcattggcaaaattgt

SEQ ID NO: 243677 - DNA, 1086 bp, Unknown
  Bacterial polypeptide expressing nucleotide sequence isolated from the Sargasso Sea
ctgacatggttgttgatagttatctagcaaaagatccatatgcaagagttgcttgtgaaactttgacaactacaaataaagttgtgttagctggggaagtaagaggacctaaaattgaaacagaaaatttaattcaaaaagtaagagaatgtattaaagatataggttacgatcagtcaggttttagctggagatcagccaaaatagaaagccatcttcatgaacaatctgctgatatagcaatgggggttgatgccaaagggaacaaagatgagggagctggcgaccaaggtataatgtttggttttgcttgtaacgaaacaaaagatcttatgccggcaccaatttattattcccataaaattttgagattaatagcagaagatagaaagaatggtaaattaattgggattgaaccagattctaaaagtcaaatttccatgatgtatgagaattataaacctaagaaagtcacatcagtagtaatttcaactcaacactctcaagatttggaccaaaaaagagtaagagaattgattataccatatataaaaaaagcaatacctgaaaatttaataagtgatcttaaggatgatgaaatttatataaatccaactggccaatttattattggtggtcctgatggtgactctggacttaccggtagaaaaatcattgtagatacttatggaggcgctgctcctcacggtggaggcgctttttctggaaaagaccctactaaagttgatcgttcggctgcttacgttgcaagatatttagcaaaaaatatagttgcagcaggaatatctgataaatgtttaatccaactagcttacgccataggtgtttcaaaacctttatcaatttatataaaattatcagagggtgatgaagataaggtaaaagatttagagggtttagtagaaaaaaattttgatctatcaccccgaggtattagagaattattaggactcaacaaaccaatttatgaagttacatccgcatacggtcattttggcagaattcctcaaaataatggtcaattttcatgggaaaaaactgataaaatcaaaatttttaaataga

SEQ ID NO: 243678 - DNA, 903 bp, Unknown
  Bacterial polypeptide expressing nucleotide sequence isolated from the Sargasso Sea
gatgtattattttacatctgaaagcgtatcaccagggcatccagataaattatgtgatcacttatcagacgccattttagatcatgttctctcacaagataaagaatcacgtgtcgcatgtgaaacttttgtgaagggtaaatctgatgatgctgggactgttgtcgtgggtggagagataactactcaagcaaatctcgatatagatgaacttataagagaaactattctagaaataggatacaactcaaatgaactcgggtttaatgggaatgaatgcaacattatcaaattactaacaaaacaatctcctgatatacaaatgggggttgatcgagaagagaaaaaaaatcaaggagcaggtgatcaaggtctaatgtttggttatgccacaaatgagactgagtttcttatgccatcaccgatatattactctcatcgtttggttgagaaacaaacaaagcttttgaaaactggagctgtgagttggttgaggcctgatgccaaaagccaagttacatttcaatatgagaaggataagcctacattcgtggatactgttgttttatcaacacagcactcatgtgatataaatttggaagatcttagagagtatgtaaaaaaagaaatcatatttgatgttattcccgaaaatttgattaacgataatacaaggatttttataaatcctaccggtaattttgttgaaggtggaccgctaggtgattcaggattgacaggtaggaagatcattgttgacacatacggcggtatggcaagacatggtggaggggcattttcaggcaaagatccctcaaaagtcgataggtctgcagcgtatgcagcaagatatatgcaaaaaatattgttgcagctggactcgctgatagatgtgaaatcaaa

SEQ ID NO: 243679 - DNA, 1177 bp, Unknown
  Bacterial polypeptide expressing nucleotide sequence isolated from the Sargasso Sea
atgggaaaatatttattcacctctgagagtgttacagaaggtcatccagataaagcatgtgatgctttctctgatgcaatattagattctattttaacacaagataatgaatcgcatgtagcttgtgaatcgcttgctacaaaaggattggtggttatttcaggagaggttcgaactaatgcaaatattgatacagagaaggttgtcaaggacaccataaaagaaataggatataataaaagtaatagtggtgtggacccaagtgacatagaggtattatcaaaactacattctcaaagtccacaaattgctcaaggtgttgattctgaagatttagctagccaaggtgctggagaccaaggccttatgtttggatatgcttgtaaagaaactccagaattaatgcctcttccaatacaaattagtcaccgtttaactgaaaaattaaccgatcttagaaagtctggtgacttacagtggcttcgacccgatggtaaatctcaggtttcagtagcatatgaaaatgggaatcctattagtatagaaaagactgttatcgcaacccagcataatgatatgataaaagaatatggatctgaagaatctgagttaaaatttgtcgaacaagaagtaattaaccatgtaattaagcctgtgctagactcctatgggtacccttacagtgaaaatttcattgttaatggtacaggaagatttgtctatggtgggcctgaggcagatacaggactaaccggaagaaaaattatagttgatacatatggtggttacgcacctcatggtggtggagccttttctggtaaagatccttcgaaggttgataggagtgcaacatatatggctcgttatatagcaaagaacattgtagctgctgatttagctgatcactgtgaagttcagttatcatatggaattggagttccagagccaacttcattttatgttaaaacgaatggttctggtaagaaagatgatgagttcctcacagagttagctagagatattttcccgcttcgtcctggtgaaattgtagctcatttagatttaaaaaaacctagatacaggaaaacagctgcttatggtcattttggacgagagcttgaagaatttacatgggagaaaacagatatggttgaatcccttctttccaaaatatagg

SEQ ID NO: 243680 - DNA, 1165 bp, Unknown
  Bacterial polypeptide expressing nucleotide sequence isolated from the Sargasso Sea
atgaaaaagaattatttatttactagcgagtcggtttcagaaggacatccagataaagtttgtgatagaatatcagatatggttgtagatagttacttaggtgcagaacctcaatcaagagtagcttgtgaaactttaacaacaactaataaggtagttttagctggagaagtaagaggaccagaaataaaaaaagaagatttaattcaaaaagttagagagtgtataaaagatattggctatgaccaggaaggctttacttggaaagatgcaactaaaatagaaagtcaccttcattctcaatctgcagatattgcaatgggtgtagactcatctgggaataaagacgaaggagctggagaccaaggaataatgtttggttatgcgtgtaatgaaacagatgtacttatgccagcaccaatacattattcacataaaattttaagattaatggcagaagatcgaaaatctggaaagttaaaaaatattgagcctgactcaaaaagtcaaattaccatagagtataaagatggaaaacctactcatgtaaaatcagttgtaatttcaacacagcattcagcagatgtcaatcaatctcaagtaagagaattggttaaaccctatatagaaaaatctattccaaaaaatcttataaatgggttagacgaaagtgaaatttatgtaaaccctacaggtaattttgtaattggtggaccagatggagatagtggattaacaggaagaaaaattattgtagatacttatggaggagcagccccacatggtggaggagctttttcaggaaaagatcctacaaaagttgatagatcagcagcatacgcatcaagatacttagcaaaaaatgtagtagcttcaaaaattgcagacaaatgtttgattcaactagcttatgctattggagtttcaaaacctttatcaatttatgtagacctttttgataacgatgaagaaaaaaacaaacacgtagaaaaattaattagtgagaattttgatttaagtcctagaggaattagggaaatgctaggtttaaataaagcaatatatgaaaaaactgcagcatacgggcattttggtagagatccagaatctagtggcgcattttcttgggaaaaaacagacaaagcagacatttttagcaagtaat

SEQ ID NO: 243681 - DNA, 1018 bp, Unknown
  Bacterial polypeptide expressing nucleotide sequence isolated from the Sargasso Sea
aataaagtagttttagctggagaagttagaggacctgatataaaaaaagatgatttaatttataaagttagagattgcattaaagatattggttatgatcaagatggattttcctggaaggatgctacaaaagtagaatgtcatctacattcgcaatcttcagatattgcaatgggcgtagactcttcaggaaataaagatgaaggtgccggtgaccaaggaataatgtttggatatgcatgtaacgaaacagatgttttaatgccagccccacttcattattcacataaaattttaagactcatggcggaagatagaaaatctggtaaattaaaaaatattgaaccagactctaaaagtcaaattacaattgaatataaagatggaaaacctgcatccgttaagtcagttgtaatatcaactcaacattctgcagatgtaaatcaatcccaagttagagaattggtaaaaccttatatagaaagatctataccaaagaatcttatcaatggattagatgataatgaaatttatattaatccaacaggaaactttgtaattggaggacctgacggagatagtggattaactggaagaaaaattattgtagatacatatggtggtgccgcaccacatggtggaggtgccttttcaggaaaagatcccacgaaagtcgatagatcggcagcatacgcttcgagatatattgcaaaaaatattgttgcctcaggtcttagcgaaaaatgtttaattcaattagcttatgcaattggagtttcaaaacctttatcaatttatgtagatcttttcgacaatgatgaagaaaaaaataaacatgttgaaagattaataaaagagaattttgatttaagcccaagaggcataagagaaatgctaggtttaaataaaccaatttaccaaaaatctgccgcttatggacattttggtagagatccagagtctgacggggcgttttcatgggaaaaaacagacaaaataaaggtatttaataagtaaa

SEQ ID NO: 243682 - DNA, 391 bp, Unknown
  Bacterial polypeptide expressing nucleotide sequence isolated from the Sargasso Sea
tatgaataaatacacttttacatcggagtcagtatctgagggtcatccagataaggtttgcgatgcaatatcagatgcgattttagatgaatacttaaatcaagatgctaattcaagagtagcttgtgagacgcttgcaaccactggaacagtttttgtttcaggagaggtaacctcaactggcactgtagacgttcaagcgatagttaagaataccttaaatgatattggatattatgacgaagcatatggtatggatgcgaaaagtgttaaggtaatttctatgcttgataagcaaagtcctgaaattgctcagggtgtaaatgaagggtctggattgcatgatgaacagggagctggtgatcagggtttaatgtttggctttgcctgc

SEQ ID NO: 243683 - DNA, 660 bp, Unknown
  Bacterial polypeptide expressing nucleotide sequence isolated from the Sargasso Sea
gatgcaaaataataaatatttatttactagtgagtctgtttcagaagggcatccggataaagtctgcgatagaatttcagatatggttgtagactcttatttgtcccaagatccattttctcgtgtagcatgtgagacacttacaacaaccaataaagttgtattagctggagagataagaggaccaaaaataccaaaagaggaaattatagaaaaagtaagaaattgcataaaagatattggttatgaccaagaagggtttagttggaaaacagctaacatagaaacatttctgcatgagcagtctgctgatatagcaatgggagttgactccaaagataataaagatgaaggcgcaggcgatcaggggattatgtttggttatgcttgtaaagaaacagaagatttaatgccagcaccaattcatttttcacataaaattttaagactaatggccgaagatagaaagaaaaaagcattaaaaggcatagaacctgactctaaaagtcaagttacgatgttatatcaagacaataaacccataaaagttacttcagtagttatatcaactcagcattcaaaagatctgaaccaagaaaaagttaagaatttggttttgccatatattaaaaaatctatacctgaaaaatatttaaaaga

SEQ ID NO: 243684 - DNA, 975 bp, Unknown
  Bacterial polypeptide expressing nucleotide sequence isolated from the Sargasso Sea
aaaaagatgaactaattgaaaaagttagaaattgtataaaagacattggttatgaccaagaaggttttacttggaaggaagctacaaaaatcgaaagtcatctgcactcacaatcatctgatattgctatgggagtagactcttcaggaaataaagatgaaggagctggggatcaaggtataatgtttggatatgcttgtaatgagacagatgttctaatgccggcaccaattcactattctcataaaattttaagattaatggctgaagatagaaaatcaggaaaattaaaaaacattgaaccagattcaaaaagccaagtaactttcgagtatgttgacggaaagccttcaaaagtaaaatcagtagtcatttcttcacaacattcagctgatgttaatcaagctcaagtcagagatttattaagaccatatatgttaaaatccatacctgagaattttcttgaggattttaatgaagacgaattttatgtaaatccaactggcaattttgtaattggtggacctgatggagattgtggtttaactggtagaaaaattatagttgatacatatggtggagctgctcctcatggtggaggtgctttttctgggaaagatccaactaaagttgatagatcagcagcttatgcagcaagatatattgcaaaaaatgtcgtaggttcaaaaattgcagaaaaatgtttaattcaattagcttacgcaatcggtgtttcaaaacctttgtctatttatgtagatttatttgataacgatttagaaaaaaataaatttgtagtagaaaaaattaaagaaaattttgatttaagcccaagaggcattagggaaatgttgaatttaaataaacctatatacgaaaaaacagctgcttatggccattttggtagagcacctgaagaaaatggttcattttcatgggaaaaaacaaataaaaccaacattttttctaaatagt

SEQ ID NO: 243685 - DNA, 611 bp, Unknown
  Bacterial polypeptide expressing nucleotide sequence isolated from the Sargasso Sea
ggtagttatatctacacaacatgcaaaagacttaaatcaagagaaggtaagagatttagttatcccatatataaataaatctattccaaaagactatcttgaaggtcttgatcctaaggaaatttatattaatccaactggtcaatttgtaattggaggtccagacggagacactggtttaacaggaagaaagattatagtagatacttatgggggtgcagcaccacatggaggaggagctttttctggtaaagatccgacaaaagttgatcgttcagctgcatatgcttctagatatttagcaaagaatatcgtttcggcaggtgtttcggaaaaatgtctgatccaactagcttacgctataggtgtctctaagccattatcaatttttattaaacttgacgatgacgatgaagcaaaagtggaacacataaaaaaaataattaatcaaaattttgatctttcacctcgtggaataagagaaatgctgaacttaaacaatcctatttatgaagttacatctgcttatggtcattttggaagaaaagctacaaataagggtgaatttacatgggaaaaaacagataaagttgaattatttaaacagtaat

SEQ ID NO: 243686 - DNA, 919 bp, Unknown
  Bacterial polypeptide expressing nucleotide sequence isolated from the Sargasso Sea
atgagatcatatttatttacaagtgaatcagtatctgaggggcacccagataaagtttgtgacagaatatcagacatggttgttgatagttatttatcatcaggtgatccacaaactagagtcgcatgtgagacacttactaccaccaataaagtagtgttagctggtgaggtaagagggccatcaatatcaaaagagcaaatcatatctcaagtaagagactgtattaaggatatcggatatgaacaagaggggtttcattggcaaaattgtgaaatagattatcatctacatcctcagtcatcagatatagccatgggagttgactctggtagcgataaagaagagggcgcgggtgaccaaggtattatgtttggttttgcatgcagagatacagaatctttaatgccggccccaattcattattcgcatcaaattttgtataagatggctcaagcaagaaaagatggatcagcttctggcttagagccagattcaaaaagtcaagtaactatgctttatgaaaatgggaagcctactaaagttacttctttagtaatttcatcacaacataaagaaggattatcacctgaagatgtaaaagaaattgttaaaccttacgtttatgaatgtattccacatgagttacttgaggggctcaaagatgaagaattttatgttaatcctactggaaactttgtaattggtggccctgatggtgactctggcttgacaggtagaaaaatcattgttgatacttatggtggtgctgcacctcatggaggaggagctttctctggcaaagatccgtctaaagttgatagatcggcagcttatgcagccagatatttagcaaagaaaatattgttgccgccgatcttgctgatcaatgcacaatacaactttcttatgcaatagg

SEQ ID NO: 243687 - DNA, 1156 bp, Unknown
  Bacterial polypeptide expressing nucleotide sequence isolated from the Sargasso Sea
atgagttatatttttacttcggaatctgtttccgcaggacatccagacaaagtttgtgatcaaatctcagatgctgttttagacgcatacttagcagaagatcctaatagtagggttgcatgcgaaacaatgattaaaaacaatatggtatatattgctggagaaatcacctctcttggaagtcctgatttagagcctattgtaagaaaaactattaatgatattggctacaatactgacgaatatggatttaatggagatacatgcgaattcactaatcttgtgttcgagcaatcgcctgatatctctcaaggcgtcactgagggtgaaggagaaaacttagaacaaggtgctggcgatcagggtttgatgtttggttatgcatgtactgaaacggattcactaatgcctcttccaatagacctctctcatagacttgtaaaaaaacaggctgatgtaatgaaaaataatgagttaccatggctaaggccagatgctaaaagtcaagtaagtgcaatttattcagatgatggaaaaaaaatagaaggtttatccgcaatagtgctttcaacgcaacatgacgaagacgtcagtcaggatgagattaaagaaggagttatggagaatattattaagccaatagttccaaaagaatggattttagattccactaatatttatattaatccaactggtaaatttgttattggtggacctgttggagactgtggtcttactggaagaaaaattattgttgatacatatggaggaatggcaagacatggtggtggagctttctctggaaaagatccttccaaggtagaccgatctgcagcctatgctgcaagatatgttgcaaaaaatatagttgctgcaggtctcgctgattactgtgaaatacaagtttcatatgctattggggttgcaaagccaacttcaataaatgtaaacacatttaatagcgaaaaaatttctaaacaagctattgagaaaattgttgaagaaaaatttgatttaagacccaagagtctaatcaatatgcttgatttaaagaggcctatttatcttccaactgcagcttatggacactttggaagaacagatattgatctttcatgggaaaaaactgatagagcctcggaaatatcacaataaa

SEQ ID NO: 243688 - DNA, 359 bp, Unknown
  Bacterial polypeptide expressing nucleotide sequence isolated from the Sargasso Sea
cattttctggcaagacccatcaaaagttgaccgatcagctgcttatgctggcagatacgtagcaaaaaacattgtctctgcaggactggcagagaaatgtgagattcaagtttcctatgccattggcattgcagaacccacttcaataagtattaatacttttggttccaataccattccagaagaagaaattgctcaacttgttgccaacaacttcgaacttaaacccaaagaattgatccaaatgttggatctaaagaaaccgatttatcaaaaaaccgcagcttatggtcattttggtcgtgaagacgaagatttttcatgggaatcgactgctaaagctgacaaaattaaataat

SEQ ID NO: 243689 - DNA, 589 bp, Unknown
  Bacterial polypeptide expressing nucleotide sequence isolated from the Sargasso Sea
ttgtcatatatttttacatctgaatctgtatcagaaggccatcctgataagatctgcgaccaaatatcagatgccattttagatgagtgtcttaaacaagatagagattctagagttgcctgtgagactcttgtcaaaaacaatactgtcgttgttgccggtgaaataagctcaaaagcatccattgattatgaaaaaatagctcgggatgttgtaaaaagtattggttatattaatgaagaacttggttttagctacgacagttttaagtttattaatcttctttctcagcaaagtgcagatatagcaaaaggtatatccaacttagggtcgggtgatcaagggttaatgtttggttatgcctgtaaagagacaaaagaacttatgcctttacctatatcattggctcataaactgacaatgaaacatgctgaagttagaagaagttctgataatggcttattacctgatgctaaatcacaagtttcagtagaatacgattcaaactacaggccaaaaagaatcgattcagttgttttttcatctcaacactcaaaggatcttaacctagataagctaagggatttaa

SEQ ID NO: 243690 - DNA, 295 bp, Unknown
  Bacterial polypeptide expressing nucleotide sequence isolated from the Sargasso Sea
gatgatcaggagagatggcgtgagtcgatggactttcacctcagagtcggtgacagaagggcatcccgacaagatggcggatcagatatctgacgccatcctcgatgcgatgctcagacaagacccaaatagtcgggtggcctgcgaaaccatggtcaccaccggcttggtagtagtggcgggagagatcactacaagtggattcgtggacatcgcctcggtagtccgagaaacaatcaacgacattgggtatgaccgagattcgttggacttcaacggaagcacttgtggagtg

SEQ ID NO: 243691 - DNA, 1156 bp, Unknown
  Bacterial polypeptide expressing nucleotide sequence isolated from the Sargasso Sea
atgagttatatatttacttcggaatcagtatcagcaggtcatccagacaaagtatgtgatcaaatatcagatgctgtccttgatgcatatctaacggaagatccaaacagtagagttgcatgtgaaactatgatcaaaaacaatatggtttacatcgctggtgaaattacatctacgggcagcccagatttagaaccaattgtaagaaagactattagtgatattggctatgatacagatgattatggttttaatggagaaacttgtgaatttaccaacttagtatttgagcaatcaccagacatatctcaaggagtaacagagggagaaggtgaaaatcttgaacaaggtgctggagatcaaggtttaatgtttggatacgcatgcacagaaactaattctttaatgccgcttccaattgatttatctcatagactagtaaaaaaacaagctgacgttatgaaagaaggcggcctatcttggttaagaccagatgcaaagagtcaagttagtgcaatatattcagatgacggaaaaactatagaaggactttcagctattgtgctttcaacacaacatgatgaggatgtaactcaagatgacataaaagaaggtgtaatggagcatataattaagccaattgttccaagtgaatggatattagattcaactaaaatatatatcaatccaacaggaaaatttgtaattggtggtccagttggagattgtgggcttactggcagaaaaattattgttgatacctatggaggaatggcgcgtcatggaggtggcgctttctctggaaaagatccttcaaaggttgatagatctgctgcttatgcagcaagatatgttgccaaaaatatagttgcagctggattagctgactattgtgagattcaagtttcatatgcaattggagtagctaagccaacatcaattaatattaatacttttgatagtgagaaaatttcaaaagatgcaattgagaaaatagttgaggagcattttgacttgaggccaaagagtcttataaatatgcttgatttaaagaggcctatatacctcccaactgctgcctatggacatttcggaagaacagatattgatttatcatgggaaaaaacagataaagcttcagaaatttcgcagtaaa

SEQ ID NO: 243692 - DNA, 520 bp, Unknown
  Bacterial polypeptide expressing nucleotide sequence isolated from the Sargasso Sea
cctgtttgttcctgatgagtggatacttgattcaacaaatatatatataaatccgactggtaaatttgttattggtggtccagttggtgactgcggcctaactggtagaaaaattatagtagatacttatggtggcatggctagacacggtggaggagctttctctggaaaagatccttcaaaagtagatcgttcagctgcatatgcagcaagatatgtagcaaagaatattgttgctgcaggtcttgctgattattgtgaaattcaagtttcttatgcaattggtgttgccaagccgacctcaataaatgtaaatacttttaatagcgaaaagatatctaaagaagcaatcgaaaaaattgttgaagataactttgatttaagaccaaaaagtcttattaacatgcttgatttaaaaagacctatctatcttccaactgcagcttatggtcattttggaagaactgacatagatttgtcgtgggaaaaaatagataaagcttcagaaatttcacaataa

SEQ ID NO: 243693 - DNA, 895 bp, Unknown
  Bacterial polypeptide expressing nucleotide sequence isolated from the Sargasso Sea
gctacaaaaattgaaagtcatttacattctcaatctgctgatattgctatgggagtagactcttctggaaataaagatgaaggagctggtgatcaaggaattatgtttggatatgcttgcaatgaaaccgacgtattaatgccagcacctattcattattctcacaaaattctaagactaatggctgaagatagaaaatcaggtaaacttaaagatattgaaccagattctaaaagccaggtaaccttcgaatatatcgatggtaaaccagttaaagttaagtctgtagttatatcttctcaacattctaaggatgtaaatcaagctcaagttatagatttattaagaccttatatgatgaaagcaataccaggaaattttcttgagggttttaatgaggaagagttttatgttaacccaactggaaattttgtaataggtggtccagatggagattgtggattaacaggaagaaaaataatagttgatacttatggtggagcagctccacatggtggaggggctttttcaggaaaagatccaactaaagttgatagatcagctgcttatgcagcaaggtatattgcaaaaaatattgtagcctcaaaaataagtaacagatgcttaattcagttagcttatgctataggcgtttccaaacctttatcaatttatgttgatctatttgataatgatttggataagaataaatttgttgtagaaaaaattaaagaaaattttgatttgagtccaagaggaattagagaaatgcttaaattaaataaacctatatatgaaaaaacatctgcttatgggcattttggtagaacaccagaaaataatggttcattttcatgggaaaaaactgataaattaagtgttttttctaaatagt

SEQ ID NO: 243694 - DNA, 868 bp, Unknown
  Bacterial polypeptide expressing nucleotide sequence isolated from the Sargasso Sea
attggtaaacagtctccagacatcaaccaaggtgtcgaccgtgccgatccaaaagaacaaggtgccggcgaccaaggtttaatgtttggttatgccagcaacgagactgacattctgatgccagcgccaatcacctatgcccacgcattagtgaagcgccaatcagaagtgcgtaaagatggcactctgccatggttacgcccagatgcgaaaagccaagtcaccttcgcttacgaagacaacaaaattgtcggtatcgatgcgatcgtactgtctacccaacacagcccagacatcgcccaagcggatctgatcgaaggcgtgatggaaaccatcatcaagccagttctgccagctcaatggctgaacaaggacactaaatacttcatcaacccaactggccgtttcgttattggtggtccaatgggtgactgtggtttaactggtcgtaagatcatcgtagatacctacggtggtatggcgcgtcacggtggtggtgctttctctggtaaagacccatcaaaagttgaccgtagtgcggcttacgctgcccgttatgtcgcaaaaaacatcgttgctgctggcttagctgaccgttgtgagatccaagtgtcttacgctatcggtgtagccgaacctacgtctatcagcgttgagaccttcggtacaggtaaagtgtctgaagaagtcttaatcaagctagtccgtcaacacttcgacctgcgtccatacggcctgactgaaatgctgaacctggctcgcccaatctatcaagcaaccgccgcttatggtcactttggccgtaacgagttcccatgggaagcgacggataaagctgacgcactgcgcgccgatgcaggtctgtaat

SEQ ID NO: 243695 - DNA, 685 bp, Unknown
  Bacterial polypeptide expressing nucleotide sequence isolated from the Sargasso Sea
acatgatccttttgatgaggatgataaaatgcttttaaaaattaagtcagatattatcaacattgtaattccaagggtttttgaaagtcagcctcagcatattagttctcttatgaataattctatcaagtatcatataaatccaactggtaaatttgttactggtggccctcacggagatacaggtttaactggtcgaaagataattattgatacttatggaggtaaaggggggcatggtggaggagcttttagtggcaaggatccaagtaaggttgacagatcagcagcatatgctgctagacatattgcaaaaaatattgttgctgctggtgtttcagatgaaatgacaattcaattaagttatgcaataggggtttcatctccaacatccataatggttaatacttttggcaaatcaaaagtaaatttatcagattttgagatttcaaaaaaaatatcatcaatatttgatttaactccttttggtattgaggagagattaaaattaagaaacccaatatattctgaaactgcagcttatggtcatatggggcgaaagcccttaaaaatcaataaaatttttgactccccatatagtggaagagtcacaaaacaagtggagttattcacttgggaaaaattagattatgttaaaattattaaagaaaaatttaaattatga

SEQ ID NO: 243696 - DNA, 550 bp, Unknown
  Bacterial polypeptide expressing nucleotide sequence isolated from the Sargasso Sea
atgagtaatttaaaaaattatcttttcacaagtgagtctgtctctgagggacatccagataaagtatctgataggatttcagatatggttgtcgatagttttatttctggagatccatattctagagttgcctgcgaaacactaactactacaaataaagttgttttagctggtgaagtaagaggaccagaaatcaaaaaagatcaattaattgaaaaggtaagaaattgtataaaagatattggttatgaccaagagggatttacttggaaagaagctacaaaaattgaaagccatttacattcccaatcagctgatattgctatgggtgtagattcctctggtaacaaagatgaaggagctggagatcaaggtattatgtttggatacgcatgtaatgaaacagatgttttaatgccagcaccaattcattattctcatcaaattttaagattgatggcggaagacagaaagtcaggaaagttaaaaaatattgaaccagactcaaaaagccaggtaacatttgagtatattgatggaaaaccttcaa

SEQ ID NO: 243697 - DNA, 1177 bp, Unknown
  Bacterial polypeptide expressing nucleotide sequence isolated from the Sargasso Sea
atgagtagatttttattcacatcagaatctgttacagagggacatccagataaggcatgtgatgccttttcagatgcaatcttggataatatattatcaaaggataatgaggcacatgtcgcctgtgaatccttagcaacaaaggggttggtcgtcatttcaggagaaataagaactactgcaaccataaatgttgagaaagttgtcaaagatacaataaaagaaatagggtatcataaaactaatagtggaattgacccagacgaagttgaagttctttctaaattacatgagcaaagccctgaaattgctcaaggtgtagattctgaggatatttctgctcaaggtgctggagaccaaggacttatgtttggttttgcatgtaaggagactcctgagttaatgccgctccccattcaaatttcacataggcttactgaaagattaacacagttaagaaaagatggtaccttaccttggcttagaccagacggtaaatcgcaggtttcggttaactatgaagatggtagacctgtatctattgataaaacagttattgcaactcaacatgatgatatgatcggagaatatggatctgaaaaaaaagaactagaatttgttaacaaagaagtggtagagcatgtgatcaggccagtgctcgattcctatggttatgattataatgagaactttattgtaaatggtaccggtagatttgtttatggagggccagaagcagatactggtcttactggccgtaagataattgttgatacatatggaggttatgctccacacggtggaggtgctttttcgggtaaagatccatctaaggtagatcgtagtgcaacatatatggcaagatatattgcgaagaacattgttgcttcagatttggctgatcgttgcgaggtacaattgtcatatggcataggcgttgcagaaccaacatcattttatgttaaaactcaaggaactggtaaaaaggatgatgaaactctcacaaaattagctcgtgatgtattcccagtaaaacctggagaaatagtagctcatttagacctaaaaaaacctcgctatagagaaactgctgcttatggtcattttggacgagaattagaacaatttacttgggaaagaaccgatatggttgaaaccctgcttaaaaaattatagg

SEQ ID NO: 243698 - DNA, 143 bp, Unknown
  Bacterial polypeptide expressing nucleotide sequence isolated from the Sargasso Sea
tctcaggccaaaaagtcttattaatatgctcgatttaaaaaggcctatctatcttccaaccgctgcatatggtcattttggaagatcagatattgagttatcttgggaaaaaacagacaaagcagctgatatttcggagtaat

SEQ ID NO: 243699 - DNA, 833 bp, Unknown
  Bacterial polypeptide expressing nucleotide sequence isolated from the Sargasso Sea
tgttgatgaaggggcaggcgaagatcttgatcaaggagcgggcgatcaaggtttaatgtttggttatgcaactaatgaaactgaacaactgatgccagcacctattcattactcacatttgttagttaaaaaacaatcggaagtgagaaaaaatggaaaactaaagtggcttagacccgatgcaaaaagtcaattatctttcgattatgatagtaatgggaatccttctgcaattactgcagttgttttatctactcaacatgatggagaagtctcacaagacgatttaaaagaaggtgtgatggaagagattctaaaaccagttttaccaagcaacctagtcaataaagagacaaaattttttataaatcctaccggaagatttgttgttggagggcctgtcggagattgtggcttaacaggcagaaaaatcattgttgatacttatggcggtatggctaggcatggtggaggcgctttctctggaaaggatccttcaaaagttgataggtcagctgcatatgcaggaagatatgttgcaaagaatattgtcgccgctggattggctgataaatgtgaagttcaaatatcctatgctattggaattgctaaacctacctcgatcagtgtcaacacatttggaacagggaaaatttctgaagagcaaatattgagcttaatcagagaaaagtttgatttaagacctaaagggctaatagctatgcttcatttattaaaacctatttatcaagaaacagcagcttatggacattttggaagagaacaattcccctgggaaaaaatcgataaaattgaagagttaaagtcttaaa

SEQ ID NO: 243700 - DNA, 298 bp, Unknown
  Bacterial polypeptide expressing nucleotide sequence isolated from the Sargasso Sea
ctggaaaagtttgttattgggggccctcatggtgatacaggcttaacaggtaggaaaattattattgatacttatggtggaaaaggatctcatggaggtggttcctttagtggtaaagatcctagtaaagttgatagaagtgcagcatatgccgctcgacatatatctaaaaatctagttaaagcaggtgtctctgacgaaattttgcttcaacttggttacgcaattggaatttctagcccagtatcatttaacattaatacatgtggtaaatcaaatttgaaaatttctgatggta

SEQ ID NO: 243701 - DNA, 793 bp, Unknown
  Bacterial polypeptide expressing nucleotide sequence isolated from the Sargasso Sea
aatgtttggttatgcatgcaatgaaacagaagagttaatgccagcacccattcattactcacacaaaattttaagactaatgtctgaggatagaaagtctggtaaactcaaaaatattgaaccagactctaaaagccaagttacttttgagtatgttgatgggaagccaacaaaagttaaatctgtagttatttcatcacaacattctgcagatgtaaatcaaacacaggttagagatttactaagaccttatatgataaactctattccaaaaatttttttagacggtttcaatgaagaggagttttatgtaaatccaacaggcaattttgttatcggaggtcccgatggtgattgtggtctaacaggaagaaaaattatagttgatacttatggaggtgctgcacctcatggtgggggagcattttcaggaaaggatccaactaaagttgataggtcagcagcttatgcagcaaggtatattgcaaaaaatgtagttgcctcaaaaatcgctaacaaatgtttaattcaattagcatatgcaataggtgtatctaaaccattatcaatttatgttgatttatttgataacgatgttgaaaaaaatgaatttgttgtagaaaaaattaatgataattttaacttaagcccaagaggaattagagaaatgttaaatctaaataaacctatatatgaaaaaacagctgcatatggtcattttggaagaagcccagaagaaaatggctttttttcttgggaaaaaacagacaaaataaaagcctttttaaaatag

SEQ ID NO: 243702 - DNA, 955 bp, Unknown
  Bacterial polypeptide expressing nucleotide sequence isolated from the Sargasso Sea
tattgttagaaaaacaattacagaaattggttatgataatccagatttgaaatttgattcacactcctgtgaagtaatgataaagttagatccacagagtccacatatttctcaaggagttaccggaaccgatgaaaaagaacaaggtgcaggagatcaaggtttaatgtttggatatgcaagtaatgaaacagaagagctaatgccattaccaatacttttggctcataaattaacaaaaaaattgacagatgttagaaaaaacaatcaactaccatgggctagacctgatggaaaatctcaggtatcaatcagatatgaagatgataaaccaaaagcaattgaagcaattgttctttctacacaacattccccagaaataacaaatgaagagattacatcacaattaattgaacatgttatcaaaccagtttgtggtgatctttggaatgacaatatcaaaattcatgttaacccaacaggaaagtttgagattggtggaccacacggagatgctggtttaactggaagaaaaataattgttgacagctatggaggaatgggtagacatggcggtggagcattttcaggaaaggatccatcaaaagtagatagatcagcatgttacatgtgtagatatgttgcaaaaaatattgttgctgcaggattagcagatagatgtgaagtacaagttgcatatgcaattggagttgcagaaccagtttctttaatggtaaatacatttggtacaaataaaatttcagaagaaaaaatcgaagaattagtgaataataatttcgatatgagaccagcaggaattgtatcacaacttgatttgaaaagaccaatttacaaaaaaactgcagcatatggtcattttggtagaaatgagccagaatttaactgggaaaaaacagacaaagcccaaaaattaaaagaagaatcaggtatttag

SEQ ID NO: 243703 - DNA, 754 bp, Unknown
  Bacterial polypeptide expressing nucleotide sequence isolated from the Sargasso Sea
tgaagatgatgaagaccaaggagctggggaccaaggaatcatggtagtttatgctataaatgaaacagaatctcttatgcctccaacttttgataagtctcgaaatattcaacaggctttgtgggatatacaacattctgatgaaatgttagatttagattcaaaagtgcaagttactacaggaggagataaaacaaaagttgttgtatctacacaacaccaaagtgaaatcgatattgacgacttacatgcaagagtatttgaacttgtagggagctatataagcgaggaatatactcttgatttgaatccttcagggtcatttgtaaaaggaggtccagcaggagacacagggcttactggaagaaagattgttgttgatgcttatgggccatctgttccagttggaggaggtgcattttctgggaaagatccaagcaaagttgacagatcagctgcttatgcagcaagacacttagcaaagaatatagtttctcatggcttagcagacgagtgtctagtaagagtttcctatgcaataggaaaagctgagccatacgaattaacagttgaaacttttggtactgaaaaatcagaaaacaaagtgttcaatgattttataagcaagtttgatatgaagcctggcgcaataattgaaagacttaaccttcttgaggttgactataaggaggatactttgttctcacactttggccataatgatagaaattgggaaaaaatagaaaatttatag

SEQ ID NO: 243704 - DNA, 1156 bp, Unknown
  Bacterial polypeptide expressing nucleotide sequence isolated from the Sargasso Sea
aatgagttatatatttacttcagaatctgtttcggcaggacatccagataaggtctgtgatcaaatttcggatgctgttttggacgcatatttagcggtagatcctaatagtagagttgcatgcgaaactatgattaaaaataatatggtatttattgctggtgaaataacttcaactggaagccctgatttggaacctgtagtaagacagaccattaaggatatcggatacgataatgatgaatatggctttaatggtgacacatgtgaatttacaaacttagtttttgaacaatctccagacatttctcaaggagttaccgaaggagaaggcgaaaacctagaacaaggtgctggagaccaagggctgatgtttggttatgcctgtactgaaactgaagcacttatgcctcttccaattgatctttctcatagactagtacgacaacaagcagaggttatgaaaagcaatgagctttcatggctaagacctgatgcaaaaagtcaggtaagtgcaatttactcagatgacggaaagacgattgaaggtctttcagcaattgtactttcaacccaacacgatgaagatgttacacaagatgaaattaaagaaggagtaatggaaaatattattaagccaattgttcctcaagaatggatactagattcaacaaagatatatatcaatccaacaggtaaatttgtaattggtggtccagttggtgattgcggtcttactggaagaaaaattattgtagatacctatggcggtatggcaagacatggtggtggtgcattttcaggaaaagatccatcaaaagttgatagatcagcagcctatgcagcaagatatgtagctaaaaatattgttgcagccgggcttgcagattattgtgaaattcaagtttcatatgcaattggagtagctaagcctacatcaattaatgtaaatacgtttgatagcgaaaaagtatcaaaagaggctattgaaaaaatagttgaggaaaaatttgatcttaggcctaaaagtcttataaatatgcttgatctcaaaagaccaatctatcttccaacagcggcttatggtcattttggaaggactgatattgatctttcatgggaaaagactgataaagcatcagaaatttcacaataa

SEQ ID NO: 243705 - DNA, 1141 bp, Unknown
  Bacterial polypeptide expressing nucleotide sequence isolated from the Sargasso Sea
gatgagtagtttaaaaaattttctttttacaagtgagtcagtttcggagggacacccagacaaggtttcggatagaatttctgatatggttgttgatacatacctttcaagcgatccattctcaagagttgcatgtgaaactttaactacaacaaataaagttgttttggcaggagaagtgagaggaccagaaatcaagaaagatgaattaataagcaaagtgagaaattgcataaaagatattggttatgatcaagaaggttttacttggagagaagctacaaaaattgaaagtcatttacactctcaatcttctgatattgcaatgggggtagactcatccggtaataaggatgaaggtgctggtgatcaaggaattatgtttggttacgcttgcaacgagactgatttgttaatgccagctccaattcattattcacataaaattctaagattgatggcagaagatagaaagtcaggaaatctagataatattgaaccagactctaaaagccaagttacattcgagtacatcgacggtaaacccacaaaagtaaaatcaattgttatatcttctcaacattcacatgatataaatcaatcacaggttagagatttattaagaccttacatttcaaaatccatcccagaaaactttttagaagatttcaatgaggataatttttatgttaatccaacaggtaattttgtaattgggggacctgatggagattgtggattaacaggaaggaaaattattgttgatacttatggaggagctgccccacacggaggaggagcattttccggaaaagaccctacaaaggtagatcgatccgcagcttatgcagctagatatattgcaaaaaatattgttgcatcaaaaattgcaaataagtgtttaatgcaattgtcatacgctataggagtttctaagccattatctatttatgttgatttatttgatgatgatttagataaaaacaaatttgttgttgataaaattaaggaaaactttgatttgagtccaagaggtataagagaaatgttaaagttaaataaaccaatttacgaaaaaacatcagcatatggacattttggaagagttccagatgatagtggctcattttcctgggaaaag

SEQ ID NO: 243706 - DNA, 1153 bp, Unknown
  Bacterial polypeptide expressing nucleotide sequence isolated from the Sargasso Sea
atggcaaagcacttgtttacttctgagtcggtctcagaaggtcatcccgataagattgcagatcagatttctgatgctgtgctagacgcgattctggcccaagatcctaaagcgcgcgttgcgtgcgaaacatatgtcaaaactggcatggtattagtaggtggcgaagtgaccacctctgcctgggttgatattgaagagcttacccgaaaaacggttcgtgaaattggttatatccattcagatatgggcttcgatgccgattcttgcgccgtattaaacgcgattggtaaacagtcaccggacatcaaccagggtgttgaccgcgcagatccaaaagagcaaggtgccggcgaccaaggtttaatgtttggttatgccagcaacgagactgacattctgatgccagcacctattacttatgcccacgcattagtgaagcgtcaatcagaagtgcgtaaaaatggcaccctgccatggttacgcccagatgcgaaaagccaagtgaccttcgcctacgaagacaacaagattgttggtattgatgcgatcgtattgtctacccaacacagccctgatatcgctcaagcggatttgattgaaggcgtgatggaaaccatcatcaaaccagttctgccagcacaatggctgagcaaggacactaaatacttcattaacccaactggccgtttcgtgatcggtggtcctatgggtgactgtggtttaaccggtcgtaagatcatcgtggatacctacggtggtatggcgcgtcacggtggtggtgcattctctggtaaagacccatcaaaagttgaccgtagtgctgcttacgctgcccgttacgttgcgaaaaacatcgtagcagcgggtctggcagaccgttgtgagatccaagtgtcttacgctatcggtgtagctgaaccgacttctatcagtgttgagactttcggtacgggtaaagtatctgaagaagtcttaatcaagttagtccgtcaacacttcgacctgcgtccatacggcctgactgagatgttgaacttagctcgtccaatttaccaagcgacagccgcttatggtcactttggccgcagcgagttcccatgggaagcgacggataaagctgacgcactgcgcgccgatgcaggtctgtaat

SEQ ID NO: 243707 - DNA, 772 bp, Unknown
  Bacterial polypeptide expressing nucleotide sequence isolated from the Sargasso Sea
aatgccagcacctattcattactcccacgagattttaaaaaaacttgctgaattaagacattctggggatgcagattttctaggaccagacagtaaatcacaacttacaattgaatatgataatcatagaccgattaaagcccataaaattgtagtttcttctcaacatagggaaggtttaaatcaattagaactaaaagattttattatatcagttgttaaaaccatactcccagaagaatggatgtgtgatgaagataagttttacgtcaatcccactggtaggtttgttataggtggccctgatggagacacaggacttactggaagaaaaataatagttgatacatacggtgggtcttctcctcacggtggaggagcattttctggaaaagatcctacaaaagttgataggtctgcagcctacatgacgagatatttagccaaaaatgtggttgccgcgaaattggcaaaaaaatgtaccattcaaatagcttatggtattggaatttcgaaaccgttatctttttacgtcaacactcaaggtacaggtcaaattgaagatataagaattcaaaaatgtttagaaaaaataattgatttaacaccaaagggtatcagggatcgcttagctttaaataatccaatttatgttccttcggcctcctacggccattttggtagagaacctgacgaaaaagttaaaggttctttttcatgggaaaaagtagatcttgttgaaacaattctaaatgaaataaaaaattattga

SEQ ID NO: 243708 - DNA, 1153 bp, Unknown
  Bacterial polypeptide expressing nucleotide sequence isolated from the Sargasso Sea
tatggcaaagcacttgtttacttctgagtcggtctcagaaggtcatcccgataagattgcagatcagatttctgatgctgtgctagatgcgattctggcccaagatcctaaagcacgtgttgcgtgcgaaacatatgtcaaaactggcatggtattagtaggtggcgaagtgaccacctctgcctgggttgatattgaagagctgacccgtaaaacggttcgtgaaattggttatgtccattcagatatgggcttcgatgccgattcttgcgcagtattaaatgcgattggtaaacagtctccagacatcaaccaaggtgtcgaccgtgccgatccaaaagaacaaggtgccggcgaccaaggtttaatgtttggttatgccagcaacgagactgacattctgatgccagcgccaatcacctatgcccacgcattagtgaagcgccaatcagaagtgcgtaaagatggcactctgccatggttacgcccagatgcgaaaagccaagtcaccttcgcttacgaagacaacaaaattgtcggtatcgatgcgatcgtactgtctacccaacacagcccagacatcgcccaagcggatctgatcgaaggcgtgatggaaaccatcatcaagccagttctgccagctcaatggctgaacaaggacactaaatacttcatcaacccaactggccgtttcgttattggtggtccaatgggtgactgtggtttaactggtcgtaagatcatcgtagatacctacggtggtatggcgcgtcacggtggtggtgctttctctggtaaagacccatcaaaagttgaccgtagtgcggcttacgctgcccgttatgtcgcaaaaaacatcgttgctgctggcttagctgaccgttgtgagatccaagtgtcttacgctatcggtgtagccgaacctacgtctatcagcgttgagaccttcggtacaggtaaagtgtctgaagaagtcttaatcaagctagtccgtcaacacttcgacttgcgcccatacggcctgactgaaatgctgaacctagctcgcccaatctatcaagcaaccgccgcttatggtcactttggccgtaacgagttcccatgggaagcgacggataaagctgacgcactgcgcgccgatgcaggtctgtaa

SEQ ID NO: 243709 - DNA, 1043 bp, Unknown
  Bacterial polypeptide expressing nucleotide sequence isolated from the Sargasso Sea
aatgagtaatttaaaaaattttcttttcactagcgagtcagtttcagaaggacatccggataaagtttcagatagaatttctgatatggtggttgatagttatctttcaggagatccattttcaagagtagcttgtgaaacactcacaacaaccaataaagtcgttttagctggtgaagtaagaggtccagaaattaaagaaaatgatttgattgaaaaagtaagacactgcataaaagatattggttatgatcaagatggtttcacttggaaagaagctacaaaaatagaaagccatcttcattcccaatcatctgatatagcaatgggtgtagattcttcaggcaataaagacgaaggagctggagatcaaggaataatgtttggttatgcatgcaatgaaacagaagagttaatgccagcacccattcattactcacacaaaattttaagactaatggctgaggatagaaagtctggtaaactcaaaaatattgaaccagattctaaaagtcaagtcacttttgagtatgttgatggaaagccaacaaaagttaaatctgtagttatttcatcacaacattctgcagatgtaaatcaaacacaggttagagatttactaagaccttatatgataaactctattccaaaaaattttttagacggtttcaatgaagaggagttttatgtaaatccaacaggtaattttgttatcggagggcctgatggtgattgtggtctaacaggaagaaaaattatagttgatacttatggaggtgctgcacctcatggtgggggagcattttcaggaaaggatccaactaaagttgataggtcagcagcttatgcagcaaggtatattgcaaaaaatgtagttgcctcaaaaattgctaacaaatgtttaattcaattagcatatgcaataggtgtatctaaaccattatcaatttatgttgatttatttgataacgatgttgaaaaaaataaatttgttgtagaaaaaattaatgataattttaacctaagcccaagaggaatagaga

SEQ ID NO: 243710 - DNA, 648 bp, Unknown
  Bacterial polypeptide expressing nucleotide sequence isolated from the Sargasso Sea
ttgaatataaagatggtatgcctgctgcagtaacatcagtagtcatttctacacaacattcaaaagatgttaacttagctaaagtcaaagaactttgcatgccttacatagaaagatctatccctaaaaacttattaggaagtcttgatgaaaaagagatttatatcaatcctactggaaattttgtaattggtggtccagatggagatagtggtttaactggtagaaaaattattgttgatacatatggtggagcagcacctcatggtggtggtgcgttttctggaaaagacccaacaaaagtagatagatcagcagcttatgcatcaagatatctcgctaaaaatgttgttgcatcaaaaattgcggataaatgtttaattcaattagcatatgcaattggagtatcaaagcctttgtctatttatgtagatttatttgacaatgatgaagataaaaacattcatgttgaaaagcttatcaaagagaactttgatttaagtccaagaggaattagagaaatgcttggtttgaacaagccaatatatgaaaaaactgcagcatacggtcactttggaagaataccggaagctgatggatcattttcgtgggaaaaaattgacaaatctggagtatttagcaagtaaa

SEQ ID NO: 243711 - DNA, 1177 bp, Unknown
  Bacterial polypeptide expressing nucleotide sequence isolated from the Sargasso Sea
tatgggtgatcaatcaaggaattatttttttacatctgagtctgtttctgaaggtcatccagacaaaatttgcgatagaatatctgatacaattttagatgcgtacttatctttagataaaaattcccgagtagcagtagaaactctagttactactaatttagttgtaatttctggagaaattagatcaacaaaaaaaatttctgatagtgaaattgaatctttatcaagaaatgcaattaaagaaataggatatgattttggagattttaatcacgaaaatgtaaaaattatgattcaactacatgagcaatcacctgatattgcaaggggagttgatgctgtcggcgacaattctgaaggtgcaggtgatcagggaattatgtttggttatgcctgcaatgaaacaaaagaattaatgccagcgacattatccttttctcacaaaattcttaaagacctcgcatataaaaggaaaaacaatataattactgggatacttccagactcaaaatctcaattaaccctcttctatgaaaatgataaaccaaaatatattgactcaattgttgtttcctctcagcatacagaagaaacaacccaggaatatttacatcaagaaattaatagattatgtaaaaaaatcttaccagacgaatggtatacagatgatacaaaacttttagttaatcccacaggtaagtttgttataggcggtcctgttggggatacaggtttgactggaaggaaaattattgttgatacttatggaggggcatctcctcatggaggaggagcattttctggaaaagaccccaccaaagtcgatagatcggctgcatatgctgcaagatatttgtctaaaaatattgttcatgcaggtatctctgaaagatgtacaattcaattatcatatgcaattggagtatctgaaccattgtcaatttttgttgatttacatgataaaaataatgttgacacaaatagagtagaaaaattcattagggataggtttgatttatcaccaagaggaattatagacatgcttggtttaagtaatccaattttctcagagacctcatcttatggacattttggaagagaaccaaacgataaaggttgttttacatgggaaaatttagacatatctagtgaatttaaaaatgaattactctga

SEQ ID NO: 243712 - DNA, 430 bp, Unknown
  Bacterial polypeptide expressing nucleotide sequence isolated from the Sargasso Sea
ctgggaaggaaaattattgttgatacatatggtggagctgcaccacacggcggaggtgcgttttctggaaaagatcctacaaaagttgatagatcagctgcttatgcatcaagatatttagctaaaaatattgtaatgtcaaaaattgctgataaatgtttaattcaactagcctatgctattggagtttctaaaccactatcaatttatgtagacttatttgataatgacgaagagaagaacatgcatgttgaaaaacttattaaagaaaacttcgatctaagcccaagaggaattagagaaatgttaggtttaaataaacctatttatgaaaaaactgccgcctacggccactttggtagaactccagatgatgatggatcattttcatgggaaaaaacagataaatctggagtttttagtaagtaaa

SEQ ID NO: 243713 - DNA, 760 bp, Unknown
  Bacterial polypeptide expressing nucleotide sequence isolated from the Sargasso Sea
atgaagaaaaattttttatttaccagtgaatctgtgtcagaaggacacccagacaaagtttgtgacagaatttcagatatggttgtggatagctttttagcttcagaaccccaggcaagagttgcttgtgaaactttaacaacaacaaataaagttgtattagctggagaagtgagaggtccagagctaaaagaagaagaattaatttcaaaagtaagagattgtattaaagatataggttatgaccaagacggtttttcttggagagatcaaactaaaattgaaacacatttacactctcaatcagcagatattgcaatgggcgtagactcagctggaaataaagatgagggcgctggagatcaaggaattatgtttggttatgcatgtaatgaaacagatgttttaatgccagctccaattcattattctcataaaattttaagactgatggctgaggatagaaaatcaggaaagttgaatggaatcgagccagactcaaaaagtcaaattactattgaatataaagatggtatgccttcagctgttacatcagtagttatttctacacaacattcaaaagatgttaacttagctcaagtcaaagaactttgtatgccttatatagaaagatcaattcctaaaaacttattgggaagtcttgatgaaaaagagatttatattaatccaactggaaattttgtaattggtggtccagatggagatagtggtttaactgggaaggaaaattattgttgat

SEQ ID NO: 243714 - DNA, 349 bp, Unknown
  Bacterial polypeptide expressing nucleotide sequence isolated from the Sargasso Sea
attgagtgaatataaggtttttacctctgaatctgtatctgaaggtcatccagataaaatagccgaccaaatttctgatgcagttttagatgcgatgttaaaggatgatcctgactctagagtagcttgtgaaacccttattaaagataacttagttgttcttgctggtgaaattacaagcagatcagagcctgacttagaggcattaacaagaaaagtaatactagatataggatacaacagcctagaagttgggtgtgacggtaatacttgtgaagttgttaatgcaattggaaaacaatctcaagatatagctcagggtgtaaacgaaggtgagggtgaagattta

SEQ ID NO: 243715 - DNA, 841 bp, Unknown
  Bacterial polypeptide expressing nucleotide sequence isolated from the Sargasso Sea
tatgcatcaaatgaaaccgaatcatttgccgaattagcaggttcattcatgccactcccggctgcactagctcaacgcctaactactaagatgtctcagtgcatgaagaatggggaattatcttgggcgcgcccagactcaaaaagccaagtaacaatcgagtataacgaggacggaacgatttctggagttgaaacggtagtaattgcaatccagcacgacgatctagcaacagagaggttcgatggagacattggggaagagtacgaattcatagtttctgagattaatgataaggtgatcgatcaagtaatacctgcttctttgattaatgagaaaaccagaaggatcatcaatggcactggacgctttgttcttggcggtccacatgctgatgcaggattgacaggccgaaagataattgtcgatacttatgggggcatgggcaggcatggagggggcgctttcagtggtaaggaccctagtaaggtcgatagatcggcggcatatgcttcacgttgggctgcgaaacatgttgtcgctagtgggatggctgagaagtgcgagattcagctcgcatacgcaattggcgtttcagatcctgtaagcgttttcgtgaacacaatgggaactggtaccgttgcagatcaggaactggccaagagggtcaacgaggcattcgactttaggcctcaagccattatcgaggaactttcacttagacagcctatctactcatctactgcttcaggcggtcacttcggtagaaaatatggggaaaacggagaattctcttgggagaggcttaaccaagaaaaaatagaacttctcaaatcctagt

SEQ ID NO: 243716 - DNA, 1153 bp, Unknown
  Bacterial polypeptide expressing nucleotide sequence isolated from the Sargasso Sea
atgagttatatatttacatcagaatctgtttcagcaggacatccggataaggtatgcgatcaaatttcagatgctgttttagatgcttatttagctgaggatccaaatagtagggttgcttgcgaaactatgattaaaaataatatggtatatattgctggtgaaataacatctcttggcagtccagatcttgaaccagttgttagaaaaacaattaatgatattggttatgacactgatgaatatggttttaatggagatacttgtgagtttactaatcttgtttttgagcaatcgcctgatatatctcaaggtgtaacagaaggtgaaggtgaaaatctagaacaaggggctggtgatcagggtcttatgttcggttatgcttgtacagaaacagaatctttaatgccgcttcctattgacctatctcatagattagttaaaaaacaagctgatgtaatgaaagcaaacggattatcatggttaaggcctgatgctaaaagccaagtaagtgcaatttactcagatgatggtaaaaccatagagggtttatcagcaatagttctctctacacaacatgatgaagatgttactcaggatgatattaaagaaggggttatggaagaaattattaaaccaatagttccagcagaatggattctagattcaaccaagatttatataaaccccacaggtaaatttgttatcggagggccagttggagactgtggtcttaccgggagaaaaattattgttgacacttatggtggaatggctaggcatggtggaggtgccttttctgggaaagacccatctaaggttgatcgatcagctgcttatgctgcaagatatgtggccaaaaatatagtagctgctggtcttgctgattattgtgaaattcaagtttcatatgcaattggtgttgctaaaccaacttcaataaatgtaaatacatttaatagtgaaaaaatttcaaaagaagcgattgaaaaaattgttgaagaaaaatttgaccttagacctaaaagtctaatcaatatgcttgatctcaaaagacctatctatcttcctacagcagcctatgggcattttgggagaactgatatagatctttcttgggaaaaaacagataaagcttcagaaatctcataat

SEQ ID NO: 243717 - DNA, 1165 bp, Unknown
  Bacterial polypeptide expressing nucleotide sequence isolated from the Sargasso Sea
atgaagaaaaattttttatttactagtgagtcagtgtcagaaggacacccagataaagtttgtgacagaatttcagacatggttgtagacagctttttagcttctgaaccccaagcgagagttgcttgtgaaacattaacaacaactaataaagttgtattagcaggagaagtaagaggaccagaacttaaagaagatgagttaatctcaaaagttagagattgcattaaagatattggctatgaccaagatggcttttcttggagagatcaaaccaaaattgaaacacatttacactctcaatcagcagatattgcaatgggtgtagactcagctggaaataaagatgagggtgcgggagatcagggaattatgtttggttatgcttgtaatgaaacagatgttttaatgccagctccaattcattattctcacaaaattttaagactgatggctgaggatagaaaatcaggaaagttgaatggaatagagccagactcaaaaagtcaaattactattgaatataaagatggaatgccttcagctgtaacatcagtagttatttctacacaacattcaaaagatgttaacttagctcaagttaaagaactttgtatgccctatatagaacgatctatccctaaaaatttattgggaagccttgatgaaaaagagatttatatcaaccccactggaaactttgtaattggtggtccagatggagatagcggtttaactggaagaaaaattattgttgatacatacggtggagctgcaccacatggtggaggtgcattttctggaaaagatcctacaaaagttgatagatcagctgcttatgcatcaagatatttagctaaaaatgttgtagcgtctaaaattgctgataaatgtttaattcaattagcttacgctattggagtttctaaaccactatcaatttatgtagatttgtttgataatgatgaagaaaagaacatgcatgttgaaaaacttattaaagaaaactttgatctaagcccaagaggaattagagaaatgttaggtttaaacaaacctatttatgaaaaaactgcagcctatggacattttggaagaattccagaggacgatggatcattttcatgggaaaaaacagataaatctggagtttttagtaagtaaa

SEQ ID NO: 243718 - DNA, 193 bp, Unknown
  Bacterial polypeptide expressing nucleotide sequence isolated from the Sargasso Sea
gaaaagatatctaaagaagcaatcgaaaaaattgtagaagataactttgatttaagaccaaaaagtcttataaacatgcttgatttaaaaaggcctatctatctcccaactgcagcttatggtcattttggaagaactgacatagatttgtcatgggaaaaaacagataaagcttcagaaatttcacaataaa

SEQ ID NO: 243719 - DNA, 946 bp, Unknown
  Bacterial polypeptide expressing nucleotide sequence isolated from the Sargasso Sea
atgtataaaacagctgaaacagtctctcccggacaccccgataaaattgctgatttaatttcagactatgttttgactgaagccctttcaaacaacagtaaatcaagagttgcagtagaaacatttttaactggtacaacttatggtggattagttgttgttggtggagaaattagtgatattgcaaaaatagatgataaaggtattgaaaaaatagttaaagatgcactagcaaaaacaataaagacaagctttgaggattttcaattagatagtttaaaaattcaaaatgagttaacacctcaatctgaggagataagatctgcagttgaggatgacgaagacttaggagcaggagatcaaggtattatggttggctatgctaccaatgaaactgaatcttttatgcctcctacctttgatatcagtagaaatattcagatggctctttgggaaattcagaataatgatgaaaaacttgatttagattctaaagttcaggtgacaacaggtggaggagaaacaaaagttgttatatccacacagcataaaaaggatatagatattgatgaactaagaatcaatcttgaagatatgataacgaaatacgtggatggaaaatttcagtttgatcttaacccatctggttcatttgttaaaggtgggcctgctggagatactggactaacagggagaaaaatcgttgttgatgcatatggaccaactgtgcccgttggtggtggtgcattttctgggaaagacccatcaaaagttgatcgttcagcagcatatgcagcaagacatttagcaaagaatatagttgctcataatttggcagataaatgtcagataagagttgcctatgcaataggtaaagcagaaccatatgagttatcggttgacacatatggttctcaaaaagagaaagattctgtcttaaatgatt

SEQ ID NO: 243720 - DNA, 1006 bp, Unknown
  Bacterial polypeptide expressing nucleotide sequence isolated from the Sargasso Sea
tctagcaggagaagttagaggaccagaaataaaaaaagaagatttaattcaaaaagttagagattgtattaaagatattggttatgaccaagatggttttagttggaaagatactactaagattgaaacccatttacactctcagtcagcagatatagctatgggtgtagactcatctggaaataaagatgaaggtgctggagaccaaggaattatgtttggatatgcatgtaatgaaactgatgttttaatgccagctccaattcattactcacatagaattttaagattgatggctgaagatagaaaatctggaaagctaaaaggaatagagccagattcaaaaagtcaaattacaattgaatataaagatggtgtacctaatgaggtaaaatcagtggtgatctctactcaacattccaaagatgttaacttagcaaaagttaaagaactttgtatgccatacattgagagatctattccaaaaaatttattaggaaatcttgatgaaaaagagatttatataaatcctacaggaaattttgttataggtggtccagacggagatagtggattgacaggcagaaagataattgtagatacttacggtggtgcagctcctcatggcggtggtgctttttcaggaaaagatcctacaaaagttgatagatcagcagcgtacgcatcaagatatttagcgaaaaatgttgtagcctcaaagatagcagataaatgcttgattcaattagcttatgcaattggtgtatcaaaacctttatctatctatgttgatttatttgataatgatgatgaaaaaaacaaacatgtagaaaaattaattaatgataactttgatctaagtccaagaggaataagagaaatgttaggtttgaataaaccaatatacgaaaaaacagcagcatacggacactttgggagagatccaggagcagatggctcattttcttgggaaaaaacagataaagcagatgtttttaataagtaa

SEQ ID NO: 243721 - DNA, 715 bp, Unknown
  Bacterial polypeptide expressing nucleotide sequence isolated from the Sargasso Sea
aatggcagatgatagaaaatcaggaaaattaaaaaatattgaacctgattcaaaaagccaaattactatagaatataaagatggaaaacctgcatcagttaaatcagttgttatttcaactcaacattctccagatgtaaatcaggctcaagtaagagatttggtaaaaccttacattgaaagatctattccaaaaaatcttgtgaatggattagatgaaaatgaaatttatgttaatccaacgggtaattttgttattggaggccctgatggagatagtggtttaactggaagaaagattatcgtagatacttatggtggagctgcacctcatggtgggggagctttttctggaaaggatcctactaaagttgataggtcagcagcgtatgcttcaagatatttggcaaagaatgtagttgcctcaaaaattgctgataagtgtttaattcaacttgcttatgcaataggggtatcaaaacctttatcaatctatgttgatctttttgataatgatgaagaaaaaaatagacatgttgaaaaactgattcaagaaaattttgatttaagcccaagaggtattagagagatgttaggtttaaacaaaccaatttatgaaaaaacttctgcttatggtcattttggtagagatccagagtctaatggttcattttcttgggaaaagactgataaatctgatgttttcaataagtaa

SEQ ID NO: 243722 - DNA, 512 bp, Unknown
  Bacterial polypeptide expressing nucleotide sequence isolated from the Sargasso Sea
aggatttctggatgaaaaagagatttatataaatccaacaggaaattttgttataggtggtcctgatggagatagtggattgactggaagaaagataattgttgatacttatggaggcgcagctcctcacggtggcggtgctttttcaggaaaagatccaacaaaagttgataggtccgctgcctatgcatctaggtatttggcaaaaaatgtagttgcttcaaaaatttctgataaatgtttaattcaactagcctacgcaattggagtttccaagcctctatctatttatgttgatctatttgataacgacgaggaaaaaaataaacatgttgaaaaactgataaatgaaaattttgacttaagccctagaggtataagagaaatgctgggcttaaataaaccaatctatcagaaaacagcagcttacggtcactttggaagagttccagaatctgatggttctttttcgtgggaaaaaactgataaatctgcggtttttgccaagtaat

SEQ ID NO: 243723 - DNA, 433 bp, Unknown
  Bacterial polypeptide expressing nucleotide sequence isolated from the Sargasso Sea
atgagttatatatttacttcggaatcagtatcggcaggccatcctgacaaagtatgtgatcaaatatcagatgctgtccttgatgcatatctagcagaagatccaaacagtagagttgcatgtgaaactatgatcaaaaataatatggtttacatcgctggtgaaattacatctactggcagcccagatttagagccaattgtaagaaaaactattagtgatattggctatgatacagatgattatggttttaatggggaaacttgtgaatttaccaacttagtattcgaacaatccccagacatatctcagggagttaccgagggagaaggcgaaaatcttgaacaaggtgctggagatcaaggtttaatgtttggatacgcgtgcacagaaactgattcattaatgccactcccgattgatttatctcata

SEQ ID NO: 243724 - DNA, 700 bp, Unknown
  Bacterial polypeptide expressing nucleotide sequence isolated from the Sargasso Sea
aatgaaaaaagattacttatttactagcgaatcggtatctgaaggtcatccagataaagtctgtgatagaatttcagatatggttgtagatacttatttagcagccgaaccccaatcgagagtagcttgtgaaacattaacaacaactaacaaagttgtattagctggtgaagtaagaggtccagaaattaaaaaagaggatttaatagaaaaagtaagacattgcatcaaagatataggttatgatcaggaaggatttacttggaaagaagcaacctcaatcgaaagtcatttacatgctcaatctgctgatatagctatgggggtagactcatctggaaataaagatgaaggtgcaggtgaccaaggtattatgtttggctacgcatgtaatgaaactgatgttttgatgccagctcctattcattattcccataaaatattaagacttatggcggaagatagaaaatctggaaaattaaaaaatatagaaccagattcaaaaagccaaataacgattcaatacaaagacggcaaaccatcatcagttaaatctgtagttatatctactcaacattcagcagatgtaaatcaagctgacgtaagagatttagttaaaccttatattgaaagatcaatacccaaagaattattaaattcgttggatgaaaaagaaatttatgtaaatcctacaggaaat

SEQ ID NO: 243725 - DNA, 802 bp, Unknown
  Bacterial polypeptide expressing nucleotide sequence isolated from the Sargasso Sea
tgctggtgaccaagggcttatgtttggatatgcatgttctgaaactccagttctaatgcctgccccaattaatttatctcatgagctcgtcttaaaacaatccgaagtaagaaagaatggtgaactaagctggcttagaccagatgctaaaagtcaagttagtgttgtttataaagatgatagaaaaactgtagattatgtttctgctattgttttatcaactcaacatgatgaagatatttctcaagatgaaattaaagcaaaagtacgcgagaaaattattaatccgataattccaactgaatggattaaagaggatacaaaaatatatataaatccaactggtaagtttgtaattggtggtcctgtcggtgattgtggcctaactggaagaaagattatcgtcgatacttatggaggaatggcaagacatggtggtggtgcattttcaggaaaagatccatcaaaggtagacaggtctgctgcttatgcttgcagatatgttgcaaaaaatattgttgctgctggtcttgctgaaagatgtgaagtacaagtttcttatgcgataggtattgctgaaccgacatcaattactgttgatactcttggaacaggtaacttgtctgaaaatgagatttcacagattgttagagacaattttgatctaagaccaaagaacctaatcaatcttcttgatttaaagaggccaatatataaaaatactgcctcctatgggcattttggtagggaaaataaagatttttcatgggaaaatactgatatctcaagccaaattaaataa

SEQ ID NO: 243726 - DNA, 1159 bp, Unknown
  Bacterial polypeptide expressing nucleotide sequence isolated from the Sargasso Sea
tatgtctgaatataaaatatttacttctgaatctgtatcggaaggacacccagataaaatggcagatcaaatttctgatgccgtccttgatgcaatgctcaaagacgatgctgaatcaagagttgcctgcgaaacgttagtcaaagataacttagttgtccttgctggagaaataacaagtagatctgaaccggacttagaagccctcacacgaaaagttattcttgatataggctatgacaatatagatgttggctgcgatggaaatacatgtgaggtagttaatgccatcggcaagcaatctcaagatattgctcaaggagttaacgaaggtgaaggtgaggatttagagcaaggtgctggagaccagggcttaatgtttggatatgcaacaaatgaaacagaggtattaatgccagctccaataacttactctcacagacttgttgaacaacaagcctttattagaaaaagtaataaattatcctggctcagaccagatgctaaaagccaagttagtttcgtttacggtgaagatggcaaacctcaatctatttctgctgttgtactgtcaacacagcatgatcctaacgtttcacaagaagatctaaaagaaggtgtcatggaagaaatcatcaaaccaattcttccatctaattggttaaatgaagatacaaaatatttcatcaatccgacaggaaggtttgaaataggtggtccagtaggtgactgtggactcactggaagaaaaatcatcgttgatacctatggcggcatggccagacacggaggtggtgctttttcaggaaaggatccttctaaagtagacagatctgctgcttatgccgggagatacgtagcaaaaaacatcgtagctgctggcttggctgatagatgtgagattcaggtatcgtatgcaatcggcgttgctgaaccaacctctattagtgttaacacatttggaacaagtaaaattgatgaagaaaaaatttctgatctaattagagaacattttgacctgaggcctatgcaattaatcaatatgcttaatcttaaaagaccgatttaccaatctacagccgcctatggtcactttggaagagaagaagctgcatttacttgggaaaaaacagataaagttgaagcattaaaaggataa

SEQ ID NO: 243727 - DNA, 242 bp, Unknown
  Bacterial polypeptide expressing nucleotide sequence isolated from the Sargasso Sea
aatgagtgattttatcttcacttctgaatctgtaactgaaggccatcccgacaaaatatgtgatcaaattagtgacgctgttttagatgcacttttgacagaagatccagaaagtagagtagcttgtgaaactgtagtgaatactggtctttgcttactaactggagaaataacatcaaaagcaaaagttgattacataaaactagttaggaatgttattaaagaaataggatatgagggct

SEQ ID NO: 243728 - DNA, 901 bp, Unknown
  Bacterial polypeptide expressing nucleotide sequence isolated from the Sargasso Sea
atggaagataataaatatttgtttactagtgagtctgtatcagaaggtcatccggataaggtctgtgatagaatttccgatatggttgttgactcttatctgactctcgatcctttttctcgagtagcttgtgaaactcttactacgaccaataaagttgttttagctggagagattagagggcctaaaatagaaaaagaggaaatcataaaaaaagttagagagtgtattaaggatattggctatgatcaaaagggatttagctggaagacagctaatatagaaacatttttacatgaacaatctgctgacatagcaatgggtgttgattcaaaagataataaagatgaaggagctggagatcaaggaattatgtttggctatgcatgtaaagaaacagatgatttaatgcctgctccaatttatttttctcataaaattttacgattaatggctgatgatagaaaaaaaggaattttaaaaggaatagaaccagattcgaaaagtcaagttacaatgctatatcaggacaataaaccaacaaaagttacttctgttgtaatatcaacacaacattctagagacttgagtcaagaacaagttaaagatttgattgttccatacataaagaaatctataccagaaaaatatgtaagagatttagactctcaagaaatttatattaatccgactggccaatttataattggtgggccggatggagatactggtttaacaggaagaaaaataattgtagatacttatggaggagcagcaccacatggaggaggagctttttctggaaaagatcccacaaaagtagatagatcagcagcttatgcggcaagatatttatctaaaaatattgtatcagcaggcatctcagagaaatgcttgatac

SEQ ID NO: 243729 - DNA, 187 bp, Unknown
  Bacterial polypeptide expressing nucleotide sequence isolated from the Sargasso Sea
tatgagttatatatttacatctgaatctgtttcagaaggtcatcctgacaaagtttgtgatcaagtttctgatgctattcttgattcttatcttgcacaagatccaaatagtagagttgcctgtgaaacacttattaaaaataatacagttatcgttgctggcgaaataacatccaatgggatgcca

SEQ ID NO: 243730 - DNA, 520 bp, Unknown
  Bacterial polypeptide expressing nucleotide sequence isolated from the Sargasso Sea
attccttctaatttattagataatgacactaaaataatcgtaaatccatcaggtagatttgtaattggtggaccagtcggggatgcaggacttacaggaagaaaaataattgtagatacttatggaggagcagctaagcatggcggaggtgctttttctggtaaagacccaacaaaagtggatagatctgcagcatatgcagcaaggcacatagcaaaaaatatattagaaacaaaaatagcttcgaaagcagaagttcaattatcttatgcaattggtaaagcagaacctgtatcaattatggtcaatacatttggaacaggtaaagtaaaagatagtgttattgaaagtgctgtaaaaaaagtatttgatctaaggccttcttccataatttcaaggttagaattaagaaatccaatttaccagcaaactgccacttacggacactttggtagaaatgatcttaatctaccgtgggaaagaactgaacttgccaaagatttagaaaaggcattttgag

SEQ ID NO: 243731 - DNA, 575 bp, Unknown
  Bacterial polypeptide expressing nucleotide sequence isolated from the Sargasso Sea
tcaatcacaggttaaagatatagtaagaccgtatttagaaaaggcaattccaaaagaattactttcagatttaaaggatgaggaattttatgtaaatccaacaggccaatttataataggtggtcccgatggagattctggtttaacaggaagaaaaattatagttgatacatatggaggagctgccccacacggaggaggagctttttcagggaaagatcctagtaaagtggatagatctgcagcatacgcagcaagatatgttgcaaaaaatattgttgcttcaaaaatagcaaaaaaatgcttaatacaattagcctatgcaattggagtttcaaaacctttatcaatatatgtcaacctttttgatggtgatttagaaaaatccaaacatgttgaaaaattggtaaaagataattttgatttaagtccacgtggaataagagaaatgttatcgttaaataaaccaatttacgaatgtacctctgcttatggtcattttggtagagatccaaaatcagatggctctttttcttgggaaaaaactgataaaattgacatttttaagaagtaat

SEQ ID NO: 243732 - DNA, 430 bp, Unknown
  Bacterial polypeptide expressing nucleotide sequence isolated from the Sargasso Sea
ctgggaagaaaaattatagttgatacttatggcggtgcagctcctcacggtggcggagcattttctggaaaagatccaagtaaagttgatagatctgctgcgtatgccgcaagatatgttgcaaaaaatattgtagcatcaaagatatctgacaaatgtttaattcaacttgcttatgcaattggagtatcgaagcctctttcaatttatgtgaacctttacgatggtaatgaagaaaaatcaaaaaaagttgagaaacttattaaagagaattttgatttaagcccccgaggtatacgggaaatgttatcacttaatagacctatttatgagcgaacagcagcatacggccattttggtagaaaaccaggatctgatggctcattttcatgggaaaaaacagataaagttgatatttttaaaaagtaat

SEQ ID NO: 243733 - DNA, 1252 bp, Unknown
  Bacterial polypeptide expressing nucleotide sequence isolated from the Sargasso Sea
aatgagttacctatttacatctgaatcggttagtgagggacatcctgataagattgcagatcaaattagtgatgcattggttgataattttttagcttttgataaaaattcaaaagttgcttgtgaaacccttgtaaccactggacaggttattttggctggggaagtaaaatccactgtatacttgaatattcaagctattgcaagggaggttataaaaaaaattggttacaaaaagagtgaatatttatttgatggaaattcttgtggtattctttcatatctgcatgaacaatccaccgatattaatagaggtgtagataaaaaaaatatagaagatcagggtgcaggcgatcaaggaattatgtttggatatgcaacaaatgaaactgaaaattatatgcctttgactcttgatttatcaaataaaatacttgaagagttagctgagcttagaagagaaaatactcagattaaatacttaagacctgattcaaaatctcaagttacaatacaatattctgatgataataaaccagaaaaaataaaaactattgttatatcaactcagcatgatgattttgacgaagatgataccatgctaaaaaaaataaaatcagatatgatttctattttgattcctagaatattaaaaaagtatcccaattataaaaagttttttaacaaggaaatagagtattttataaatcctactggtaaatttgttattggcggaccgcatggtgattctggattaaccggtagaaaaattattgttgatacatatggtggaaagggagctcatggtggtggagccttttctggtaaagatcctagtaaagtagacaggagtgctgcatacgcagctaggcatattgcaaaaaatctagtagctgcgggagtttcagatgaatgtttggtgcaaatttcttatgcaattgggatagcaaaacctacagctttgtacgtaaatactaatggaacctcaaaaactaaattgtctgatagtcaaatttcaaaaattgtgttagagttatttgatttaaggccttattatatagaacaaagattaaaactcagaaatccaatttattttgaaactgcttcttatggccacatgggaagagagccaaagtttgttaagaaatcattcacttcaagttcgggtgattctaaagagattgaagttgaactttttacttgggaaaaattagactatgttgataagattaaagaaaaaattaaaacttaa

SEQ ID NO: 243734 - DNA, 487 bp, Unknown
  Bacterial polypeptide expressing nucleotide sequence isolated from the Sargasso Sea
tggtactggcaggtttgtttttggtggccccgaggcagacacaggcttgactggcagaaaaattatcgttgatacatatggaggatatgcaccccatggtggaggagctttttctgggaaagatccatcaaaagttgatcgttccgcagcatatatggcacggtatattgcaaagaactttgttgctgctggattggcaacaaaatgtgaagttcagttatcctatagtataggtgttgctgagccaacatcattttatgtaaaatcatttggtacaagtgaattttcagataaggaacttactgaaatagcaaaatctgtttttaaattgaagcctggtgagattataaatcatttaaatttaaaatatcctagatataggaatactgctgcaaatggacactttggacgagaagatgaacttttcacatgggagaaaacggataaagtgaatgaaattcaatctacagtctcagaaaggggatag

SEQ ID NO: 243735 - DNA, 403 bp, Unknown
  Bacterial polypeptide expressing nucleotide sequence isolated from the Sargasso Sea
atgaataaatacacttttacatcggagtcagtatcggagggtcatccagataaggtttgcgatgcaatatcagatgcgattttagatgaatacttaaatcaagacgccaattctagagtagcgtgtgagacgcttgcaaccactggaacggtttttgtttcaggagaagtaacctcagctggcactgtagacgttcaagcaatagttaagaataccttaaatgatattgggtattatgatgaagcatatggtatggatgcgaaaagtgttaaggtaatctctatgctagataagcaaagtcctgaaattgctcagggtgtaaatgaaggatctggattgcatggcgaacagggagcaggtgatcagggtttaatgtttggctttgcctgcaatgagacaaaag

SEQ ID NO: 243736 - DNA, 1063 bp, Unknown
  Bacterial polypeptide expressing nucleotide sequence isolated from the Sargasso Sea
cagtcgtgttgcttgtgaaacactcgtcacaacaggacttgcagtaattgctggtgaaatcacgtctcgaggcaccatcgactaccagcaggttgttcgtgatgtcattcgagaagttggctacacagatgacgaaatgggtatcgctgcagacacctgctcagtactcgttgctgttggcaagcagagtggagacattgctatgggtgtcaatgaagacaccgatacaggcaaagacattggagccggtgatcaaggattgatgtttggttacgcctgcaatgacacacctgaactgatgccactgccaattgctttgtcacatcgcatcttaaatcgcttagccgatgcccgtcttggcggagacgtagattggctccgacctgactcaaagagtcaggtaaccgttgaatacgacggtgataaaccaatacgaattgatactatcgttgtctccacgcaacatgccccgcatgtttctaacgaagagattcagacgtacatcattgaaaagattataaaaccagaacttccagatgacctggacaccagtgacatcacataccacatcaacccaactggtcggtttgttgtaggtggccctcacggtgatgctggcttgaccggcagaaaaattattgttgatacctacggcggctggggtcgtcatggcggtggcgccttttcagggaaagacccaacaaaagttgaccgcagtgccgcttacatggctcgctacgttgcaaaaaatattgttgccgctggactcgcagaccggtgtgaactgcagcttgcgtatgcaattggtgtcacggaacctgtcagcgttcacattgataccgctgggagcggaaaggttgatgatgaacgactgtgtgcacttattcgagaacatttcccacttacgcctcgtggaatcatcgagcatctcgacctccgaagacctatcttccgtcgaactgctgctggtgggcattttggacgagacgagttcccttgggaaaaaactgataaagcaagtgcattggcagaggctgcctccacagcaactgcggccaattga

SEQ ID NO: 243737 - DNA, 547 bp, Unknown
  Bacterial polypeptide expressing nucleotide sequence isolated from the Sargasso Sea
ttgtcatatatttttacatctgaatctgtatcagaaggccatcctgataagatctgcgatcaaatctcagatgccattttagatgagtgtcttaagcaagatagagaatctagagttgcctgtgagactcttgttaaaaacaatactgtcgttgttgccggtgaaataagctcaaaagcatctattgattatgaaaaaatagctcggaatgttgtaaaaagtattggttatattaatgaagagcttggttttagctacgacagttttgagtttattaatcttctttctcagcaaagtgcagatatagcaaaaggtatatccaacttagggtcgggtgatcaagggttaatgtttggttatgcctgtaaagagacaaaagaacttatgcctttacctatatcattggctcataaactgacaatgaaacatgctgaagttagaagaagttctgataatggcttattgcctgatgctaaatcacaagtttcagtagaatacgattcgaactataggccaaaaagaatcgattcagttgttttttcatctc

SEQ ID NO: 243738 - DNA, 720 bp, Unknown
  Bacterial polypeptide expressing nucleotide sequence isolated from the Sargasso Sea
gatgaaaaagaattatctatttactagcgagtcagtttcagagggtcacccagataaagtttgcgatagaatatcagatatggtcgtagatagttatttaggggcagagcctcagtcaagagtagcatgtgaaacattaacaaccacaaataaagttgttttagcgggagaggtcaggggaccagaaattaaaaaagatgatttaattcagaaagttagagaatgtatcaaggatattggttatgaccaagatggttttagctggaaagatacaactaagattgaaactcatttacatgctcaatcagcagatatagcaatgggtgtagactcatctggaaataaagacgaaggtgctggagaccagggaattatgtttggatatgcatgtaatgaaactgatgttttaatgccagctccaattcattactcacatagaattttaagattaatggctgaagatagaaaatctggaaagctaaaaggaatagagccagattcaaaaagtcaaattacaattgagtataaagacggtgtacctaatgctgtaaaatcagtggttatctctacacaacattctaaagatgttgacttagcaaaagttaaagaactttgtatgccatacattgagaaatctattccaaaaaatttattaggaaatcttgatgaaaaggagatttatataaatcctacaggaaattttgttataggtggtcccga

SEQ ID NO: 243739 - DNA, 830 bp, Unknown
  Bacterial polypeptide expressing nucleotide sequence isolated from the Sargasso Sea
taaagacgagggtgcaggtgaccaaggaatcatgtttggttttgcatgcaaagatacagaaactttaatgcccgctccaattcattattctcatcaaattttgtataaaatggctctagcgagaaaagacggatcagcaagtggtttagaaccagactctaaaagccaagtaacaatgttttatgaaaatggcaaacccactaaagtaacttctttagttatttcttctcaacacaagaaaggattatctccagctgatgttaaagaaattgttaagccatatgtttatgaatgtatacctaatgaattactagaaggacttaaagatgaggagttttatgtaaatccaacaggtaactttgtaatcggtggaccagatggagactcaggtttaacaggtagaaagattattgttgatacttatggcggtgctgcacctcatggaggaggagctttctcaggtaaagatccatctaaggttgacagatctgctgcttatgcagccagatatttagctaaaaatgttgttgctgctgatcttgctgatcaatgtactatacaattgtcatatgcaataggtgtttcaaaacctttatcagtatatgttaacactaatggtaccaataaagtggatgagcaaaaaattgaaaaatctgttcaagatttatttgatttgagtcctagaggaataagagaacatttaaagcttactaatgctatttatgttccaacctcagcctatggtcattttggaagagaaccaagtgataaaggtcattttacttgggagaaaactgatttagttgatgcgcttaaaggaattgcttaat

SEQ ID NO: 243740 - DNA, 1164 bp, Unknown
  Bacterial polypeptide expressing nucleotide sequence isolated from the Sargasso Sea
aatgagtgatcttaaaaattatcttttcactagtgagtcagtttctgaaggtcatccagataaagtctctgatcgaatttcagatatggttgttgattgttatttatcaggagatccattttcaagagttgcctgtgaaacattaactacaacaaataaagtagtacttgctggagaagttagaggtccagaaattaaaaaagatgagttagttcacaaagtaagaaattgtataaaagatataggctatgatcaaaaaggttttacttggaaagaagaaactaagatcgaaagccacttgcattcccaatctgctgacatagcaatgggagtagattcttctggaaacaaagatgagggagcaggtgatcaaggaattatgtttggatatgcttgtaatgaaacagaaatgttgatgccagctccgattcattattctcataaaattttaagattaatggcagaagatagaaagtcaggtaaattgaagaatattgaacctgactctaaaagtcaggtaacttttgaatatttagatggtaaaccaaataaagttaaatctgttgtaatttcctcccaacattctccagatgtaaatcaaaatgaagtcagagaattattgagaccttacttattaaagtccattccagaaaattttttaaagggttttaatgaagaagagttttacgtaaacccaactggcaattttgttattggtggtcctgacggagattgtggtttaacaggaagaaaaattatagttgatacttatgggggagcagcaccacatggtggtggagcattttcaggaaaagaccctaccaaagtagatagatcagcagcttatgcagcaagatacatagcaaaaaatattgttgcttcaaaagttgcagataaatgtttaattcagcttgcttatgcaattggggtttcaaaaccactatctatctatgtagatttatttgataatgatttagaaaaaaataaatttgttaaaaataaaataagtgaaaattttgatttgagcccaagaggtataagagaaatgttaaatctgaataagccaatttacgaaaaaacagctgcttatggtcattttggaagagcacctgaaagcaatggagcattttcttgggaaaagactgataaaatgagcttttttta

SEQ ID NO: 243741 - DNA, 1039 bp, Unknown
  Bacterial polypeptide expressing nucleotide sequence isolated from the Sargasso Sea
ttaatgacaaataataagtacttttttacaagtgagtctgtttcagaaggtcacccagataaggtgtgtgatcgtatttcagatatggttgttgacgcatatctatcaaaagaaccttacgcaagagtcgcttgtgaaaccttagctacaactaataaagtggttctagcaggagaaatacggggaccaaaaattaataatgaagatttaatacaaaaagttagagaatgtattaaagatataggctacgaccaagaagggtttagctggaaaactgcaaaaatcgagacgcatttacacgaacaatcttctgatattgctatgggagttgattccaagggaaataaggatgaaggtgccggagatcaagggataatgtttggatatgcatgtaaagaaacaaaagatttaatgccagctccaatacatttttcacataaaattttaagattgatggctgaagacagaaaaaaaggtgtcctaaaaggtattgaaccagactcaaaaagtcaggtaaccatgttgtatgaaaatggcataccaaaaatagtcacatctatagttatttccactcaacattcaaaagatcttgatcagaaaaaagtaaaagatttggtttatccttatataacaaaatctattccaaaggatttaataaaaaatttagatgataaaaatatttatgtaaatcccacaggccaatttattattggtggaccagatggagatactggtttaactggaagaaagataatagttgatacatatggtggagcagctcctcatggaggaggagctttttcaggcaaagatcctacaaaagtggatcgatcagctgcttatgttgctaggtatgtagcaaaaaatattgttgcctcaggcgcctcagataaatgtttaattcagttagcttatgctattggtgtatcaaaaccactttctgtatacgtaaaactatcagataaagataaagataaaacagaggatattaaaaaaaaaattgatcaaaattttgacctgtctccgcgggaattagaga

SEQ ID NO: 243742 - DNA, 802 bp, Unknown
  Bacterial polypeptide expressing nucleotide sequence isolated from the Sargasso Sea
ggcgatcaagggttaatgtttggttatgcgtcagatgaaactgagtttctaatgccagcccctatttattattcgcaccgtctagtggaaaaacaaactgagctacttaggtcaaaaaaagtgccatggcttagacctgatgctaaaagtcaagttacttttcagtatgaaaatgataaaccaaaatttatcgacacaattgttctatctacccaacactcctcagatattcctttagaagaacttcgagaatttgtaaaaaatgaaattatatttaaagttataccaagttcacttattaataatacaacaagaatttttataaatcctacaggaaattttgtagaaggtggtcctttaggagactcaggattaactggaagaaaaattattgttgatacttatggagggatggcaagacatggtggaggtgcattctcaggaaaagacccatctaaagttgataggtctgcagcttatgctgctagatatatagcaaaaaatatagttgctgcaaaattagcaacaagatgtgagattcaattatcttatgcgattggagtagctgaacctacatcaacattggttaatacatttggtactggtacaatttctgatgagaaaatatccagtataattagtaatgtttttgatttaactccttatggaattataagttcattagatttattaaacgttaaatacaaaccaactgctggatttgggcattttggaagaaatgataagaattttacttgggaacaaacagataagattgatatactacaatctgcaatttaaa

SEQ ID NO: 243743 - DNA, 1123 bp, Unknown
  Bacterial polypeptide expressing nucleotide sequence isolated from the Sargasso Sea
aatgtcatatatttttacatctgaatctgtttctgagggacatccagataaaatctgtgatcaaatttcagatgcaattttagatgagtgtataaaacaagataaatactccagagttgcctgtgaaactatgatcaaaaataatcatgtcatagttggaggcgaaattacttcaaaagctgatattaattataaagaggttgctaaatcagtaattaaagatattggatataacaacaaagaaatgggatttagccatgagtcaattaattttaaaagtctaattggtaaacaaagtgaagatattcatcagggaatatcaaaaggtgatattttgggctcaggtgatcagggattaatgtttggctatgcttgtaaggaaacaaaagaattaatgccacttccaatttcgttagcacataaactgatgcaaaaacataaaactataaggaatataaataataaactttggccggatgctaaatctcaagtatctgtacaatactctgataattatgaacccgagaggatttctgcaatcgtattttcagcacaacattgtccaagctttgatcttaacaacttaagagaatttattttggaagaaataattagaaaagttatccctgacgaattaatagatgatgatactaaattctttataaaccctgctggaaaatttagcatcggcggtccagttggagattgcggcatgacgggaagaaaaattattgttgatagttatggtggaatggccagacatggaggtggagcattttctggaaaagacccttcaaaagtggatagatctgcagcatatgcaatgcgacaagttgcaaaaacgttagtcaatgaaaatttatgtgattattgcgaagttcaagtttcttatgcaattggagttgaaaatccagtatctatttacacaaatacctttgagagtgaaaaaattccacttgaagaaattaatagaactataaacaaaaactttgatcttactcctcaaggaatcatttccgatttaagtcttttaaatccaatatatcttagtactgcaaaatatggtcattttggaagagaagatcaaaattttagttgggaaaaaaccaaaaacttaaaatga

SEQ ID NO: 243744 - DNA, 475 bp, Unknown
  Bacterial polypeptide expressing nucleotide sequence isolated from the Sargasso Sea
caatactatctttcaagtgaacccaactggtaattttgtaacaggtggaccagatggtgatactggaattacaggaagaaaaattattgttgatacttatggtggctatgctcctcacggaggaggagcttttagcggtaaagactgtactaaagtagatagaagtggagcatatatggcaagatatctagctaaaaatattgttgcatcaggttctgcaaacaattctactgtccaactcagttatgctatcggaataaaagaaccagtatcactatatgtgtactgtgatggaaaagttagaaatgacatatcagaatggatctctcaaaatgttgatttaacgccattgggaattattaggaaatttaacctatttcaactggatctatctgagactactaactatggtcattttggtaaagaacatcttgcatgggagaacacggatatatctgatcaattaaaattttaa

SEQ ID NO: 243745 - DNA, 1057 bp, Unknown
  Bacterial polypeptide expressing nucleotide sequence isolated from the Sargasso Sea
aatgagttatatatttacttcagaatctgtttcggcaggacatccagataaggtctgtgatcagatttcagatgctgttttggatgcatatttagcagaagatcctaatagtagagtagcttgcgaaactatgattaaaaataatatggtatttattgctggtgaaataacttcaactggaagccctgatttggaacctgtagtaagacagaccattaagaatatcggatacgataatgatgaatatggctttaatggcgatacatgtgaatttacaaacttagtttttgaacaatctccagacatttctcaaggagttaccgaaggagaaggcgaaaacctagaacaaggtgctggagaccaagggctaatgtttggttatgcctgtactgaaactgaagcacttatgcctcttccaattgatctttctcatagactagtacgacaacaagcagaagttatgaaaagcaatgggctttcatggctaagacctgatgcaaaaagccaggtaagtgcaatttactcagatgacggaaagacgattgagggtctttcagcaattgtactttcaacccaacacgatgaagatgttacacaagatgaaattaaagaaggagtaatggaaaatatcattaagccaattgttcctcaagaatggatactagattcaacaaagatatatatcaatccaacaggtaaatttgtaattggtggtccagttggtgattgcggtcttactggaagaaaaattattgtagatacctatggcggtatggcaagacatggtggtggtgcattttcaggaaaagatccatcaaaagttgatagatcagcagcctatgcagctagatatgtagctaaaaatattgttgcagccgggcttgcggattattgtgaaattcaagtttcatatgcaattggagtagctaaacctacatcaataaatgtaaatacgtttgatagcgaaaaagtatcaaaagaggctattgaaaaaatagttgaagaaaaatttgatcttaggcctaaaagtcttataaatatgcttgatctcaaaaga

SEQ ID NO: 243746 - DNA, 192 bp, Unknown
  Bacterial polypeptide expressing nucleotide sequence isolated from the Sargasso Sea
aaaatagacatgtagaaaaattaattaatgataattttgatttaagtccaagaggaattagagaaatgttgggtctaaataaagcgatatacgaaaaaacagcagcatatggtcattttggaagagatccagggtctgatggctcgttttcatgggaaaaaactgataaagcagatatttttaataagtaat

SEQ ID NO: 243747 - DNA, 922 bp, Unknown
  Bacterial polypeptide expressing nucleotide sequence isolated from the Sargasso Sea
gatggttttcattggcaaaccgcagatatccaatatttacttcacggacaatctgcagatattgcaatgggtgtagactcatcatctgacaaagacgagggggcaggtgaccaaggaattatgtttggatacgcttgtacggaaacacctgaactgatgccggcaccaattttttattctcataaaatcttagagataatggctaagggtagaaaagacggtagcttaaaaggattagagcctgactcaaaaagccaagtaactcttaaatacgttgatggtaaaccaagtgcagttacatctgttgtgatatcaacacaacatgctgatggattatctcctgctgatgttaaagaaatagtaaatccagcattaaaagaatctatccctgaagagttattaaaaaatttagatgataaagaatactacgtaaatccaacaggtaattttgtaattggaggaccagatggtgatacgggattaacaggaagaaaaattattgtcgacacctatggtggtgcagcacctcacggtggaggggctttctctggaaaagatcctacaaaagtcgaccgctctgccgcttatgcctcacgatacttagcaaaaaatattgttgctgccggtttatgtgatcagtgtactatccagttgtcttatgcaatcggtgtagccaaaccgttgtcaatatatgtgaatactcaaggcactaataaaatagatgaagcaaaaattgagtctgcgatacctgacattatgaatctttctccaagaggaatcagagagaaattacagttaaacaagccaatttacgaacaaacagcagcttacggtcactttggtagaacacatgacagctcttcaggagctttttcatgggaagctctagatttagtgtccgatttcaaatcgctagcttaat

SEQ ID NO: 243748 - DNA, 370 bp, Unknown
  Bacterial polypeptide expressing nucleotide sequence isolated from the Sargasso Sea
attttcaggcaaagatccaactaaagttgatagatctgctgcctatgcatcacgatatttggctaaaaatgttgtagcatctagaatttcagacaaatgtttaattcaacttgcttatgccataggtgtttcaaaacctttatctatttatgtagatctttttgataatgatgaggaaaaaaataaatatgtagaaaaattgattaatgaaaattttgatttaagtccaagaggcatcagggaaatgcttgaacttaataaaccaatttatgaaaaaacagctgcatatggccattttggaagagaacctggctcagacggctctttttcttgggaaaaaactgataaaaaaggaatttttgcaaagtaa

SEQ ID NO: 243749 - DNA, 1186 bp, Unknown
  Bacterial polypeptide expressing nucleotide sequence isolated from the Sargasso Sea
atgtttacattcacttctgaatcagttactgaagggcatccggataaagtatgtgatgctatatctgatgctatagttgatagccttttatcaaatgataaagattcacatatcgcttgcgaaactttagcaacaaaaaatctaatagtagtttctggagaagttcgatctaaagctacagtcgacgttgaaaaaatagtgagaaaaactctagaagaaataggctacaccaatacgcataaaggtatggataataaatctgttgatattatgataaagcttcaagaacaaagcactgaaattgcacaaggtgttgatcaatcggaggatcatgaacagggtgcaggtgatcagggattaatgtttggatatgcctgcaaagaaacccctgaactaatgcccatgccaattcatttatcccatagactcactgaacgtctagcaaaattaaggaaagatggaacacttccatggcttggcccagatggtaaatctcaggtatctgttgactatttaaatggtgttccaaattcaatttctaaagtggtaattgctactcaacatgatgatatgattgataaatttggttctgaggaattagaacacaattttgttgaacaagaggtaattgaaaaagtaattaatcctgttttagaaaaatctggattaaaatcttcaggtagcttcatagttaatggaactggaagatttgtatttggaggccctgatgctgacactgggctaacgggaagaaagattattgtggatacatatggtggatacgcgccacatggaggaggtgctttttctggaaaagatccttctaaagttgatcgatcagcagcctatatggctcgatatattgcaaagaatattgttgcttctgatcttgcagataattgtgaagttcagttttcttacagtataggtgttgcagaaccaacttcgttttatgttaaatcttttaatactgggaaaatatctgatgaagaattaacagatttagctaaaaaggttttcccattaaaacctggagatataatttcacacttaaaattaaaacatccccgttatcgtcaaactgcttcttatggacattttgggagagaaaacgatttatttacatgggaaagaattgatatggtagaaaaattaaaacttgaattgagtgagaggaatatttaat

SEQ ID NO: 243750 - DNA, 298 bp, Unknown
  Bacterial polypeptide expressing nucleotide sequence isolated from the Sargasso Sea
tatgagctatatatttacatctgaatctgtttcagaggggcatcctgacaaagtttgtgatcaaatttctgatgctattctggattcttatcttgcacaagatccaaatagtagagttgcttgtgaaacacttattaaaaataatacagtgattgttgctggcgaaataacatccagtggcacgccaaatatagaagaggtaataagaaataccgttaatgaaattggttataaccatgatgatttaggcttcaatggaaataactgtgaaatccaaaaaccttattcaaaacaatca

SEQ ID NO: 243751 - DNA, 1165 bp, Unknown
  Bacterial polypeptide expressing nucleotide sequence isolated from the Sargasso Sea
atgaagaagaattttttatttacaagtgagtcagtttcagaaggacacccagataaagtatgtgacagaatttcagatatggttgttgatacttatttaggatcagaacctcaatctagagtagcctgtgagactttaacaacaacaaacaaagtggtattagcaggagaagtaagaggaccagaaattaaaaaagatgatttagttcaaaaggtaagagattgtattaaagatattggatatgatcaagatggatttacatggaaagaagctactaaaattgaaagtcatcttcattctcaatctgcagatattgctatgggagtagactcatcaggaaataaagacgaaggagctggagaccagggtataatgtttggttatgcctgcaatgaaactgatgttttaatgccagcaccaattcattactctcacaaaattttaaggttaatggctgaagatagaaaatctggaaagctaaatggaatagagccagattcaaaaagtcaaattactattgaatacaaagatggagtccctactgctgtaaaatcagtagtgatctctacgcaacattctaaagatgttaatttagcacaagttaaaaatctttgtatgccatacattgagagatctattccaaaaaatttattaggaaatcttgatgaaaatgaaatttatataaatcctactggaaattttgtaattggtggtcctgatggtgacagtggtttaacaggtagaaaaattattgttgatacatacggtggagccgcacctcatggaggaggagctttttctggaaaagatccaacaaaagtggatagatctgcagcatatgcatctagatatttagctaagaatgttgttgcttcaaagattgctgacaaatgtttaatccaattagcttatgcgattggagtatctaagccattatcaatttatgtagatttatttgataatgatgaagaaaaaaatatgcatgtagaaaaacttataaaagaaaattttgatttaagtccaagaggaataagagaaatgcttggtttaaataaacctatatatgaaaaaacagctgcatatggtcattttggaagaactccagaaaatgacggatcattttcttgggaaaaaactgataaatccgaggtttttagtaagtaaa

SEQ ID NO: 243752 - DNA, 1171 bp, Unknown
  Bacterial polypeptide expressing nucleotide sequence isolated from the Sargasso Sea
tatgaaaagatcttatttatttacaagtgaatcagtttcagagggccatccagataaagtttgtgatagaatttctgatatggttgttgatacttatttatcatctggtgacccacaaacacgagtagcttgtgagactttgactaccactaataaagtagttttagctggagaagtaagggggccatcagtttctaaagatcagattatatctcaagttagagattgtattaaagatattggttatgaacaagatggctttcattggcagaattgtgatattgaaagttttcttcatgagcagtcagctgatattgctatgggtgttgattctggtagcaataaagatgagggcgcaggcgatcaaggaatcatgtttggttttgcttgtaaagacactgaatcattaatgccagcaccgatacattattctcatcaaatattatataaaatggcacaagcccgtaaagatggatctgcatctggtctagaacctgattcaaaaagccaagttacaatgctttacgaaaatggaaaaccaagcaaagttacttctttagttatttcttcacaacacaaagaaggtttatctcctgaggacgtaaaagaaattgttaaaccttacgtatatgagtgcatacctaataacttgttagaaggtcttaaagatgaagaattctatgttaatcccacaggtaactttgtaattggaggccctgatggtgactctggtttaactggtcgtaaaataatagttgatacatatggtggtgcagcgccccatggtggaggtgcattttcaggaaaggatccatctaaagttgatagatctgcagcatatgcagctaggtacttagcaaaaaatgttgttgcagcggatctagctgatgagtgtactatacagttatcttatgcaataggagtatcaaaacctttatcggtatatgtaaatactaatggaacaaataaagttgatgaacagaaaattgaaaaatctgtgcaagatttatttgatctaagcccaagaggaataagagaacatttaaaacttacaaatgcaatttatgttccaacttctgcttacggccattttggtagagaaccaagtgacaagggacattttacttgggaaaaaactgatttagtggaagctctaaaaggcattgcataa

SEQ ID NO: 243753 - DNA, 979 bp, Unknown
  Bacterial polypeptide expressing nucleotide sequence isolated from the Sargasso Sea
aatgagaaaaaattatatttttacatctgagtcagtgtctgagggacacccagataaagtttctgatcgaatttctgatgcagttgtcgatcattttatctccaaagacccatttgctagagtcgcttgtgaaacattaacaacaaccaacaaagttgttttatctggtgaagtaagaggaccagtccaagaagacaaagatgaaattatttcaaaagtaagggagtgcataaaagacatcggctatgagcaagatggttttcattggcaaaccgcagatattcaatatttacttcacggacaatctgcagatattgcaatgggtgtagactcatcatctgacaaagacgagggggcgggtgaccaaggaattatgtttggatacgcttgtacggaaacacctgagctgatgccggcaccaattttttattctcataaaatcttagagataatggctaagggaagaaaagacggtagcttaaaaggattagagcctgactcaaaaagccaagtaactcttaaatacgttgatggtaaaccaagtgcagttacatctgtcgtgatatcaacacaacatgctgatggattgtcccctgctgatgttaaagaaatagtaaacccagcattaaaagaatctatacctgaagagttattaaaaaatttagacgacaaggaatattacgtaaatccaacaggtaattttgttatcggaggaccagatggtgatacgggattaacaggaagaaaaattattgtcgacacctatggtggtgcagcaccgcacggtggaggggctttctccggaaaagatcccacaaaagtcgatcgctccgctgcttatgcctcacgatacttagcaaaaaatattgttgctgctggtttatgtgatcagtgtactatccagttgtcttatgccatcggtgtagccaaaccactatcaatttatgtgaatactcaaggcactaataaaatagatgaa

SEQ ID NO: 243754 - DNA, 310 bp, Unknown
  Bacterial polypeptide expressing nucleotide sequence isolated from the Sargasso Sea
atgagcaaaactaatttatttacttcagagtctgtttccgaggggcacccagataaggtagcggatcaaatctcggattcaattgttgatgcaatatttaaagaagattcaacagcacgcgttgcctgcgaggcaatgattaatacaggaatggttgtcttatctggtgaaattacaacgtctgcaaatattgattacgaaacaatagcacgtagaacgatacgcgacattggctacacatcagatgctgttggttttgattctgataaatgtgaagttttaatttcgattgataaacaatcaccagata

SEQ ID NO: 243755 - DNA, 1133 bp, Unknown
  Bacterial polypeptide expressing nucleotide sequence isolated from the Sargasso Sea
tatgtcattcctattcacatctgagtctgtttctgaaggtcatcccgacaaactgtgcgatatgatttctgactcaatcctagatgcgtgtctgcaagttgacccaaacgctagagtcgcagtcgagacgatggtcaaggggactccagattcaagttacatctacatagggggggaagtgactatttcttcttccgaaagagtcgattacgaaggaatagccagaactactgccgtatctataggctatgatgaccactccgttggaatggatgcctcagaccccaatctatgcgagatcgtggcaaggataactcaacaatcgcccgacatctcccaaggcgtggatgaaggaaaggggcttgatcttgcccaaggtgccggtgaccaagggcttatgtttggttatgcatcaaatgaaaccgaatcatttgaggaattagcaggttcattcatgccactcccagctgcactagctcaacgcctgactactaagatgtctcagtgcatgaagaatggagaattgtcatgggcccgcccagactcaaagagccaagttacaatcgagtataacgaggacggaacgatttctggagttgaaacggtagtaattgcgatccagcatgacgatctggcaacagagaggttcgatggagacatcgggagagagtaccaattcatagtttccgaaatcaatgagaaggtgatcgatcaagtaataccttcttccttgatgaatgagaaaacaagaaggatcatcaatggtacggggcgcttcgttcttggcggtccacatgctgacgcaggattgacaggtcgaaagataattgtcgatacttatggggggatgggcaggcacggagggggggctttcagtggtaaggaccctagcaaggtcgataggtcagcggcatatgcttcacgttgggctgcgaaacatgttgtcgctagtgggatggctgagaagtgcgagattcagcttgcatacgcaattggagtttcagatcctgtaagcgttttcgtgaacacaatgggttctggtaccgttgcagatcaggaactggccaagagggtcaacgaggcgttcgactttaggcctcaagccatcatcgaggaactttcacttagacaac

SEQ ID NO: 243756 - DNA, 313 bp, Unknown
  Bacterial polypeptide expressing nucleotide sequence isolated from the Sargasso Sea
aatgaagaagaattttttatttactagcgagtcagtgtcagaagggcacccagacaaagtttgtgacagaatttcagacatggttgtggacagttttttagcttccgaaccccaagcaagagttgcttgtgaaacattaacaacaacgaataaagttgtattagcaggagaagtaagaggtccggaacttaaagaagatgagttaatctcaaaagttagagattgtatcaaagatattggctatgaccaagatggcttttcttggaaagagcaaactaaaattgaaacacatttacactctcaatcagctgat

SEQ ID NO: 243757 - DNA, 671 bp, Unknown
  Bacterial polypeptide expressing nucleotide sequence isolated from the Sargasso Sea
tgacgggaaatcccaggtcacggtcaaatacttcaacggcaaaccggtcgaagtcacagccgttgtgatcagtacccaacacaaagagggacatgaccagggtcagttgaaaaagaacatcatcgaaaatgtcattcttccagtgatccctgcggaatttctcactgatacgactgatttccacatcaatccgacaggaatctttgaaattggaggaccccagggagattgtggattgacgggacgcaaaatcattgttgatacctatggaggaatgggacgtcacggaggcggggcattttccggaaaagatccctcgaaggttgaccgttccgctgcctacgctgcaagacacgttgccaaaaacgtcgttgctgctggtctggcaagccgctgtgaagtccaggtggcttatgccattggtgttgcggatccggtttctgtttctgtcgacactttcgggaccgccattatcgaagaggaaaagatttccatgttgatccaggaaacctttgacctcaaaccagcaagtatcatccagagactcaacctgcttcgccccatataccgtcaaacggctgcctacggacattttggcagggaattggaggattttacctgggaaaaaaccgactatgccggggaactcagaaaaaaagccgggatttaag

SEQ ID NO: 243758 - DNA, 853 bp, Unknown
  Bacterial polypeptide expressing nucleotide sequence isolated from the Sargasso Sea
ttctgggatatcagataatgaagacgaattagatagacagggtgccggagatcaaggaatgatgtttggttatgcctgtgatgaaaccgaagccctaatgcccttgccgatccaagtagcaaatcgtatggcagaaaggcacgcggaaataagaaaggcaggaaatatcccctatcttaggcctgatggaaaaacacaggttactttcgactacgaagacaataagcctgtgcgtttgaatactgttctagtttcaactcaacataatgatggaattgatagagatgcaataattcgcccggatctaattgaacatgtaataaggccgacaattcctgaagagtaccgtgaagacgattacacggttttggttaatccaacgggacgttttgttgtgggaggacctgtaggagatgcaggactgacaggaagaaagattattgtcgacacttacggcgggatcgcaagacatggaggtggagcgttttctggtaaagacccgagcaaagtagatcgatcagctgcatatgcgacaaggtgggttgcaaagaacatagtcgctgcaggagctgcatcaagatgtgaagtgcaagttgcttacgcaattggaatggcgagaccggtatcaatccttgttgaaactttcggaacagaaaaagttgaccctgttaaaatcgaagacgctattcaagaaatttttgatttaagaccagcggcaataatcaatgatcttgatttgagacggccgatctacaagtcgactgcagcttatgggcatttcgggcgcgaggagttcccttgggaacaagtcaaccgtgcagacgatgtgcgttcccatttagggttaaactga

SEQ ID NO: 243759 - DNA, 354 bp, Unknown
  Bacterial polypeptide expressing nucleotide sequence isolated from the Sargasso Sea
aatgaaaaaagattatttgtttacaagtgagtcagtttcagaaggccatccagataaagtatgtgatagaatttcagatatggtagttgatacttatttaggtttagaacctcaatcaagagtagcctgtgaaactttaacaactacaaacaaagttgtattggcaggtgaaactagaggacctgaaattaagaaagatgaattaatatcaaaagttagagattgtattaaagatattggttatgatcaggagggctttacttacaaggaagcaactaaaattgaatgtcatttacactctcaatcaaccgatatagcaatgggagttgactcttctggaaacaaagatgaagg

SEQ ID NO: 243760 - DNA, 445 bp, Unknown
  Bacterial polypeptide expressing nucleotide sequence isolated from the Sargasso Sea
atgaataatcttaaaaatttcctttttactagcgagtctgtatcagaaggtcatccagataaagtatcagatagaatttcagatatggtagtagataattatttagctaacgaaccccaatctagagtagcgtgtgaaacactaacgacaactaataaagttgttttggcaggtgaggttagaggtccagaaatcaaaaaagatgaattgatttcaaaagtcagagattgcattaaagatattggatatgatcaagatggtttctcttacaaagaagctacaaaaattgagagtcatttacattcgcaatctgcagatattgcaatgggtgttgatgcatctgggaataaggacgaaggtgccggagatcaaggtatcatgttcggctatgcatgtaatgaaacagacgttttaatgccagctcctattcactattcacataaaa

SEQ ID NO: 243761 - DNA, 465 bp, Unknown
  Bacterial polypeptide expressing nucleotide sequence isolated from the Sargasso Sea
aatgaaagattacatttttacatcagagtcagtttcagaaggtcatcctgacaaagtttgtgatcaaatttcagatgcagttcttgatgcatatttaaatgaggatccaaatagcagagtagcttgtgaaacaatgataaagaacaatttagttattattgctggagaaattacttcaaatggaaatcctgatttagaacctattgttagaaatgtaatcaatgacattggttacaatgatgataatcttggatttaatggaaatacatgtgattttattaatcatatcactaaacaatctccagatattgctcaaggcgtcaatgaaggtgaaggtgaagatctaaatcaaggagctggggatcaagggctcatgtttggatatgcttgtaatgaaactgatagtttaatgcctgcaccaatagatttgtctcataaacttgttaaaaagcaatcagaagttag

SEQ ID NO: 243762 - DNA, 352 bp, Unknown
  Bacterial polypeptide expressing nucleotide sequence isolated from the Sargasso Sea
aaaagacccctcaaaagtcgatcgttcagctgcatatgcagcaagatatgtagcaaaaaatatagttgctgctggtcttgctgattattgtgaaattcaagtttcttatgcaattggtgttgccaagccgacctcaataaatgtaaatacttttaatagtgaaaagatatctaaagaagcaatcgaaaaaattgtagaagataactttgacttaagaccaaaaagtcttataaacatgcttgatttaaaaagacctatctatctcccaactgcagcttatggtcattttggaagaactgacatagatttgacatgggaaaaaacagataaagcttcagaaatttcacaataa

SEQ ID NO: 243763 - DNA, 811 bp, Unknown
  Bacterial polypeptide expressing nucleotide sequence isolated from the Sargasso Sea
gtgcaggagatcagggatttaatgttcggatatgctacaaatgaaactgaagaattaatgccattaccaatacttttggcacataaattaacaaagaaattgactgatgttagaaaaagcaatgaactaacatgggtcagaccagatggaaaatcacaagtttcagtaagatatgaagatgacaaacctcaaggaattgaagcaatagttgtttcaacacaacattctccggacataactaatgatgagataacatcacaattaatcgagcatgtcattaaaccagtatgtggtaatctttggaatgacaatatcaagattcatgtaaatccaacaggaaaatttgaaattggtggaccacatggtgatgccggactaacaggaagaaaaattattgttgatacatacggaggaatgggcagacatggtggtggagcattttcaggaaaagatccatcaaaagtagatagatcagcatgttacatgtgcagatatgttgcaaaaaatattgttgcagcaggattagcagaaagatgtgaagttcaagttgcatatgcaattggtgttgcagaacctgtatcattaatggtaaacacatttggtacaaacaaaattgatgaaaagaaaattgaagaattagttaggaataattttgatatgagaccagcagggattgtctcagaattagaccttaaaagaccaatttacaaaaagactgcagcatacggtcattttggtagaaatgaacctgaattcagttgggaaagaactgataaagctgcaaaattaaaaactgaatcaggtatttagt

SEQ ID NO: 243764 - DNA, 1090 bp, Unknown
  Bacterial polypeptide expressing nucleotide sequence isolated from the Sargasso Sea
attgtcaaaatacgtaacagctgaaactgtgtctccagggcacccagataaaattgcggacttaatatctgattatgttttaacaaaggccttacaaaacaacagttcgtcaagagtagcagttgagacttttcttacaggaactaaaaatggtggtttagtacttgtaggaggagaaattagtgaaatcgcagcaatatctactgatgatgttattgaaattgtcaaagaagcactaaaaataactatcaagactagctttgaagattttgatttagaaaatctttcaatatataacgaattaacaccacaatctgaagaaattcgtgcagctgttgaagatgatgaggaccaaggtgctggcgatcaaggaataatggtagggtttgcaaccaacaaaacaaaatcatttatgcctccaacatttgatatgtctagaaatatacaaaaatctttatgggatcttcaaaactcagatgagatgcttgatcttgattcaaaagttcaggtaactagtggaggagaaaaaacaaaagttgtagtttcaacccagcacaataaagatattgatatggagaaattatttgaaaaggtttctgatattgttgctagtaatgttgaatctgaatttgaattagatttgaacccatctggatcattcgttaaaggaggtccagctggcgacacaggacttacaggtagaaaaatagtagtcgatgcttacggtccttctgtaccagtcggcggaggagcattttcaggaaaagatccgagtaaagttgatagatcagctgcttatgctgcgcgacatttagcaaaaaatattgttgcacataaattagcagacgattgtttagtcagggtgtcgtatgcaataggcaaagctgatccgtatgagcttacaatagaaactttcgacacacttaaagttgaacaaagcaaattagatgattttgttaacaagtttgacatgaaaccgggagctattattgaaaggctagatctaactaacgtagattacagaaaagatactttattttctcattttggacatgctgatagaaattgggaaaatatagaaaatatttaa

SEQ ID NO: 243765 - DNA, 712 bp, Unknown
  Bacterial polypeptide expressing nucleotide sequence isolated from the Sargasso Sea
aatggctgaagatagaaaatctggaaatcttaatggaatagagcctgactcaaaaagtcaaataactattgaatataaagatggtaaaccatctgcggtaaaatcagtagtgatatctacacaacattccaaagatgttaacttagcaaaagtaaaagagctttgtataccatatattgagaaatctattccaaaaaatttattaggaaatcttgatgaaaacgagatttatataaaccctactggaaactttgtaattggtggtcctgatggagacagtggtttaactggtagaaaaattatcgttgacacatatggaggtgcagcacctcatggtggtggagcattttcaggaaaagatccaacaaaagtagatagatcagcagcatatgcatcaagatatcttgcaaaaaatgttgtagcatcaggaattgctgataagtgtttaattcaattagcatatgctataggtgtttctaaaccattatctatatatgtggatttatttgataatgatgaggaaaaaaacatacatgttgagaaattgataaatgaaaattttgatttaagtcctagaggaattagagagatgctaggtttaaataaggcaatatatcaaaaaacagcagcatacggtcattttggaagagaaccagaatctaatggttcattttcatgggaaaaaacagataaatctggagtttttaaataa

SEQ ID NO: 243766 - DNA, 772 bp, Unknown
  Bacterial polypeptide expressing nucleotide sequence isolated from the Sargasso Sea
atggttgatcaatcaaaaaattatttttttacatctgagtctgtttcagagggccatccagataagatctgtgataagatatctgatactattttggatgcttatctgtctgaggataaagattcgcgagtagcagtggaaacccttgtgactactaatttagtagtaatttcaggagaagtcagatcaaaagccaaaatttcagaaaacgatattgagtctattacaagaaatgtaattaaagatataggttataattttggtgattttaattatcaaaatgtaaccataatgacacgtttgcatgaacaatcagccgacatagcgaggggcgttgatgcatctggaaatagttctgaaggtgctggtgatcaaggaattatgtttggctacgcttgtaatgaaacaatagaactaatgccagctactttaacttattctcatcaaattcttaaaaatttagcagataatagaaaaaacaatattattaagggattgcttccggattcaaaatctcaattaactcttttttatgaaaatgataagccaaaatttattgattcaatagttgtttcctcacagcatactgaggatacaactcaggaatatttaaacgaacaaattgaaatattgtgtaaagatattttaccaagtgattggtatacacaagatacaaaactattagtaaacccaacaggtaatttcgttataaacggacctgtaggtgacacaggcctaactgggagaaaaattatcgttgatacttatggcg

SEQ ID NO: 243767 - DNA, 590 bp, Unknown
  Bacterial polypeptide expressing nucleotide sequence isolated from the Sargasso Sea
ttcaactcaacatgacgaagatgttacacaagatgaaattaaagaaggagtgatggaaaatatcattaagccaattgttcctcaagaatggatacttgattctacaaagatatatatcaatccaacaggtaaatttgtaattggtggtccagttggtgattgcggtcttactggaagaaaaattattgtagatacctatggcggcatggcaagacatggcggtggtgcattctcaggaaaagatccatcaaaagttgatagatcagcagcctatgcagcaagatatgtagctaaaaatattgttgcagccggtcttgcagattattgtgaaattcaagtttcatatgcaattggagtagctaagcctacatcaattaatgtaaatacatttgatagcgaaaaagtatcaaaagagactattgaaaaaatagttgaagaaaagtttgatcttaggcctaaaagtcttataaatatgcttgatctcaaaagaccgatctaccttccaacagcggcttatggtcattttggaaggactgatatcgatctttcatgggaaaagactgataaagcatcagaaatttcacaataaa

SEQ ID NO: 243768 - DNA, 1126 bp, Unknown
  Bacterial polypeptide expressing nucleotide sequence isolated from the Sargasso Sea
gtggccgaccagatctcggacgcgattctcgatgcaatcttcaaacaagacccccgcagccgcgtcgccgctgaaacgctgaccaacaccggcctcgtggtgctggcgggcgagatcactaccaacgcgcatgtggactacatccaggtggcgcgcgacaccatcaagcgcatcggctacgacaacaccgactacggcatcgactacaagggttgcgccgtgctcgtggcgtacgacaagcagagcaacgacattgcccagggcgtggaccacgcgagcgacgaccacctgaacaccggcgccggtgaccagggcctgatgttcggctacgcctgcgatgaaacgcccgagctgatgcccgcgcccatttactacgcccaccgcctcgtcgagcgccaggcccagctgcgcaaggacggccgcctgcccttcctgcgccccgacgccaagtctcaagtgacgatgcgctacgtggacggcaagccccacagcatcgacaccgtggtgctctccacccagcaccaccccgaccaaagcgaaacgcaaaccaagatgaaggcctcgttcaccgaagccatcattgaagagatcatcaagcccgtgctgcccaaggaatggatccaggacacgcgctacctgatcaaccccaccggccgttttgtcatcggcggccctcaaggcgactgcggcctgactggccgcaagatcatcgtggacacctacggcggcgcctgcccccacggcggcggcgcgttcagcggcaaggacccaacgaaggtggaccgctcggccgcctacgctgcccgctacgtggccaagaacatcgtggccgccggcctcgcccgtcagtgccagatccaggtggcctatgcgatcggcgtggccgagccgatgaacatcacggtctacaccgaaggcacgggcgtgatccccgacgaccagatcgccaagctggtgcgcgcacacttcgacctgcgccccaagggcatcattcagatgctggacctgctgcgcccgatctacgaaaagaccgccgcctacggccacttcggccgcgaggaacccgagttcagctgggagaagacggacaaggctgctgcgctgcgcgcagcagcgggcctgtaaa

SEQ ID NO: 243769 - DNA, 943 bp, Unknown
  Bacterial polypeptide expressing nucleotide sequence isolated from the Sargasso Sea
gggtgtggacgaagccgatgaccacgagggcgatcccctcgaccgtgtcggcgccggcgaccagggcatcatgttcggctacgcctgcaacgagaccccggagctgatgccactgcccatcagcctggcccaccgtctcgcgaagcgtctggccgaggtccgtcacaacggcagcctcgattacctgctgcccgacggcaagacccaggtgagcgtggtttacgagaacgacaagcccgtcgccatcgacacgatcctgatctccacgcagcacacggccgaagtggccggcatcagcgatgagcagggcatccgtgagcgcatcaccgaagacctgtggacccatgtggtggaaccagccacggccgatctagccctgaaacccagccgcgaggccacgaaatatctggtgaaccccaccggcaagtttgtggtgggtggtccccagggtgatgccggcctcaccggccgcaaaatcatcgtggacacctacggcggctatgcccgccacggcgggggtgccttctccggcaaagatcccaccaaggtggatcgctccgccgcctatgccgcccgctacgtggccaagtgcctggtggcctccggcctggctgaacgcgctgaagtgcagctgagctacgccatcggcgtcgccaagcctgtgtcgatcctggtggagtcctttgggactgggaaggtgtcgaatgccgagctcaccgaactggtgcaggagcatttcgacctgcgccccggcgccatcatcgagaccttcggactgcgcaacctgccccagcagcgcggtggtcgcttttaccaagacacagccgcctacggccacttcggtcgtaacgacctcaaagccccctgggaggatgtggccgccaagagcgaagagctggtgaaggccgaagccaagcgcatcaagcaaggcgccacggtttga

SEQ ID NO: 243770 - DNA, 967 bp, Unknown
  Bacterial polypeptide expressing nucleotide sequence isolated from the Sargasso Sea
atcgaagaactcactcgcaacacgatccgtgatattggttacgtgcattccgatatgggttttgatgctaattcctgtgcagtattaagtgctattggtaagcaatcgcctgatatcaatcagggagtggataagaaagatcaagatcctagtgagcaaggcgcaggcgatcaggggttaatgtttggttatgccagcaatgaaactgacgtgctaatgccagctcctattacttattctcaccgcttggtgcaacaacaagccaaagtgcgtaaagatggcaccttgagctggttacgtcctgatgccaagtctcagctgagctttgtctacgaaaatggcaagccagtgggcatagatgctgtcgttttatcgactcagcactgcgacaccatttctacagcagacttacgtgaagctgtgatggaacacattatcaaaccagtgttaccaacagaatggttgagcaataaaaccaagttctttattaacccaacaggtcgttttgtgattggcggtcctatgggtgattgcggtttaacaggtcgtaaaatcatcgtcgacagctacggtggtatggcgcgtcacggtggtggtgctttctctggtaaagacccttcaaaagttgaccgttctgccgcttatgccgctcgttatgtggcaaaaaacatcgtagcggctggtttagctgaacgttgtgagatccaggtgtcctatgcgataggcgtggcagagccaacttctatcagcgttgaaacttttggcaccagcaagttaagtgaagatcaactgatagcactgatccgtcgtcacttcgacttacgtccttatggtctgatccagatgttgcagttagagcgtccaatctaccgtgcaacagcagcttacggtcacttcggccgtaacgaattcccatgggaaaacaccgacaaagcagacattctgcgctctgaagcaaaaatctaag

SEQ ID NO: 243771 - DNA, 1002 bp, Unknown
  Bacterial polypeptide expressing nucleotide sequence isolated from the Sargasso Sea
tgcttgctggtgaaatcacaagcgcatcggaacccgatttagaggcattaactagaaaagttatattagatataggctataacagtcttgatgttgggtgtgatggaaatacttgtgaggttgtaaatgcaattggaaaacaatctcaagacattgctcaaggcgtaaacgaaggtgaaggagaagacttagagcaaggcgctggagaccagggattaatgtttggttacgcgacaaatgaaactgaagtcttaatgcctgcccctataacttattctcatagacttgttgaacaacaagcctttataagaaaatctgggaaactttcttggttaagaccagacgctaaaagccaagtaagcttcgtgtatggagatgatggaaaacctgaatcaatttctgcagttgttttatccactcagcatgaccctgatgtctctcaagaagatttaaaagaaggtgttatggaagaaatagttaaacccattcttccttctaattggcttaatgcaaataccaaatattttataaatccaacaggaagatttgaaattggtggtccagtaggggattgcggactaacaggaagaaaaattatagtagatacgtatggcggaatggcaagacatggtggaggtgctttctcaggtaaagacccatcgaaggttgataggtcagctgcttacgctgggagatacgttgcaaaaaatattgttgctgctggtttagctgatagatgtgagatacaagtttcatatgctattggtgtggcggaacctacatctataagtgttaatacttttggcacttctacaattgatgaaaacaagatttcagatttaatcagagaacattttgatttaagaccaagacagcttattaatatgcttgatctaaaaagaccaatatatcaagcaactgctgcttatgggcattttggaagggaagaaagtgctttcacttgggaaaaaacagataaagctgaagctttaaaaggataaa

SEQ ID NO: 243772 - DNA, 1062 bp, Unknown
  Bacterial polypeptide expressing nucleotide sequence isolated from the Sargasso Sea
atacttcaaaagcagaggtggattttaacaagcttgtcagagaagttatcaaaagcattggctatagaagtgctagcgatggagggtttgatgctaatagttgcgccgttctagtcgcacttgaccaacagtcgtcagatatagctcaaggtgtaaatgaagctgaagatcattcaacagatccgctcgatcaagttggggctggtgatcaggggattatgtttggatttgcttgtgacgagactcctgaacttatgccattgccaataagtctcgctcatcgattagcacgaaggctggcattagttaggcaccaacaattaatcgattatcttttacctgatggcaaaacccaagtaagtgtctcatacgaaaacggagtaccatgcttcatagacacaatactgatttctacgcagcataaatctgaagtagatggaataactcttgaagaggaaatccaaaaaagaattgctaatgacctatggaaatttgttgttgagcctgccaccgaagacctgcctctaaaacctactaaagagtcaactcgcttccttgttaatccaactgggaaatttgttatcgggggaccccaaggcgacgcaggtctaactggaagaaaaataattgttgacacctatggtggatatgctcgacatggaggaggcgctttctctgggaaagaccctactaaggttgatagatctgcagcttatgcagcaagatttgttgcgaaggcattagttgcagcaaatcttgcaaaaaaagttgaagttcaattaagttatgcaatcggagtcgcaaaacctatatcgatacttgtggattcatttgggacagggaaggtttcagactctgaattaacacaacttgtacaagatcaattcgatctaagaccaggcgcaattattaaagcattcgatcttcaaaacctaccaagtattagaggtggacgtttttatagagatactgcggcctatggtcattttggcagaacggatattcttctcccctgggaggacgtatctcaaaaagcaaaagaactaagtttattcaaataaa

SEQ ID NO: 243773 - DNA, 454 bp, Unknown
  Bacterial polypeptide expressing nucleotide sequence isolated from the Sargasso Sea
tgggccggatggagatagtggattaactggaagaaaaataattgttgatacatatggtggtgctgcacctcatggtggtggtgcattttctggtaaagatccaacaaaagtagacagatcagcagcatatgcctcaaggtatttggcaaaaaatattgtagcgtcaaaaattgctgacaaatgcttaatacaattagcctatgcaattggtgtatccaaaccattatccatctatgttgatttattttctaatgatgaggaaaaaaacaaacatgtagaaaaattgattaatgaaaattttgatttaagtcctagaggcataagagaaatgcttggtttaaataaacctatttatgaaaagtcagctgcttatggtcattttggtagagttccagagtcaaatggtgcattttcatgggaaaacactgataaagcttcagtatttaacaagtaa

SEQ ID NO: 243774 - DNA, 931 bp, Unknown
  Bacterial polypeptide expressing nucleotide sequence isolated from the Sargasso Sea
tattgattatgaaaaaatagctcggaatgttgtaaaaagtattggttatattaatgaagagcttggttttagctacgacagttttgagtttattaatcttctttctcagcaaagtgcagatatagcaaaaggtatatccaacttagggtcgggtgatcaagggttaatgtttggttatgcctgtaaagagacaaaagaacttatgcctttacctatatcattggctcataaactgacaatgaaacatgctgaagttagaagaagttctgataatggcttattgcctgatgctaaatcacaagtttcagtagaatacgattcgaactataggccaaaaagaatcgattcagttgttttttcatctcaacattcaaaggatcttggcctagataagttaagggatttaattagagaagagataattaataaatcattgcccctagatctgttagacaataaaacaaaatatcttattaatcctgcaggtgaatttaatataggtggtccagttggtgattctgggctaacaggcagaaaaattattgttgatacttatggcggaatggcgcgtcatggtggaggaagtttttctggcaaagacccaactaaagtagatagatcagcagcttatgctcttcgccaaattgcaaaatcattagttagcgcaggtctatgtgattattgtgaagttcaatcttcttatgcaattggggtaatagaaccaacttcaatatttattaatacttttgaatcagaaaaaaaacctatcgaagagatacaaacaatagtagatgaatcttttgatttaacaccagctggcattattaataatttaaatcttttagaaccaatttatttaaaaactgcaagctatggtcactttggtcgagaagatcaaggatttagctgggaagatgcaaaagatctatga

SEQ ID NO: 243775 - DNA, 605 bp, Unknown
  Bacterial polypeptide expressing nucleotide sequence isolated from the Sargasso Sea
ttcagctattgtcctttcaacacaacatgatgaagatgtaactcaaaatgacataaaagaaggtgtaatggagcatataattaagccaattgttccaagtgaatggatattagattcaactaaaatatatatcaatccaacaggaaaatttgtaattggtggtccagttggagattgtgggcttactggcagaaaaattattgttgatacctatggaggaatggcacgtcatggaggtggagctttctctggaaaagatccttcgaaagttgatagatctgctgcttatgctgctagatatgttgctaaaaatatagttgcagctggattagctgactattgtgagattcaagtttcatatgcaattggagtagctaaaccaacatcaattaatgttaatacttttgatagtgagaaaatttcaaaagatgcaattgagaaaatagttgatgagcattttgacttgaggccaaagagccttataaatatgcttgatttaaagaggcctatatacctcccaactgctgcctatggacattttggaagaacagatattgatttatcatgggaaaaaacagacaaagcatcagaaatttcacagtagc

SEQ ID NO: 243776 - DNA, 643 bp, Unknown
  Bacterial polypeptide expressing nucleotide sequence isolated from the Sargasso Sea
tgccaatcacaagtttcagtggagtacgattcaagctataaaccaaaaagaattgattcaattgttttttcatctcaacattcaaaggatctacgcttagataaacttagagagttaattagagaagagataattaataagtcattacctgcagatttattggatgctgaaacaaaatatctcattaatccagcaggtgaatttaacataggtggtccagttggagattctggcttaacaggaagaaaaattattgttgatacttatggcggaatggctcgtcatggtgggggatgtttttctggtaaagacccaactaaagtagacagatcagcagcctatgctcttcgccaagttgcaaaatcactggtacatgccggtttttgtagttattgtgaagtacagtcttcatatgccattggagtagtggagccaacatcaatattcatcaatacttttgaatccgagcaaaagcctattgaggagatacagaaaatagttagtgaatcttttgacttaactccagctggcataattgaaaatttaaatcttttagaaccgatctatcagaaaacagcaagctatggtcactttgggcgagaagatcaaggttttagttgggaagatgtcaaagatctatgaa

SEQ ID NO: 243777 - DNA, 576 bp, Unknown
  Bacterial polypeptide expressing nucleotide sequence isolated from the Sargasso Sea
taactcttagcgatgttaaagattttgtgatggaagaaattataaaaacaacaatacctaaaaatttattattgagtaccactaagattcatatcaatccaacaggaaactttgtcattggaggaccaaacggcgattgtggtttgactggtagaaaaataatcgttgatacttacggtggtatggcaagacatggtggaggtgctttctctggtaaagatccatctaaagttgataggtctgcagcctatatggcaaggtatatcgcaaaaaatattgtagctactaagcttgcagataaatgtgaaatacagctctcttatgcaattggcgttgctgaaccaacttcaatttctgttgatacttttggaacatcgaagattgagaattctaaaatatcctctgcagtaagtaaggtatttaatctcactccgaagggtattattgacacactagaccttctgaacgtaaaatatcaacctactgcagcttttggacatttcgggagagatgacaaaaattttacttgggaacaaaaggataaggttgatatactaatgaatgaactaggatagg

SEQ ID NO: 243778 - DNA, 719 bp, Unknown
  Bacterial polypeptide expressing nucleotide sequence isolated from the Sargasso Sea
tatgacaaatcaaacatatttaatgacatctgagtctgttggtgagggtcatcctgataaaatggctgatcaaatttcagatgcgatcttagacgcaattcttgatcaagataaggactgtagagttgccgttgagactctagtcaagacggggctggttgtccttgctggtgagatcacaacaagtgccaatgttgattatgaagccattgcgcgacgaaccatcaaaaggatcggctatgacaaggcagaacttggttttgatgatcaatcttgtgaagtcctatctgcaatcagcaaacaatctccggatattgcaatgggcgttgaccgtgccgataaaaaagaacaaggcgcaggtgatcaagggctcatgtttggttatgccaccaatgagacaaaagaactgatgccagcaacaattcaattgtctcatcaactggtgaagaggcatgcagatgtaaggagaagcggtgagctcagttggctaagacccgatgcaaagagtcaggtaaccattctttttgaagatggaaaacctaaatcaatcgatacagttgttctatccactcaacacgatgaaaatatctcaatgaatgatattcaagaaggtgtcatggaacatatcattaaaccaatactccctgagggtttgctaactgattcaacgcaatatctcattaatcccactggaaattttatcattggtgggccagtcg

SEQ ID NO: 243779 - DNA, 1165 bp, Unknown
  Bacterial polypeptide expressing nucleotide sequence isolated from the Sargasso Sea
tatgacaaataaaacatatttaatgacatctgagtctgttggagagggacatcctgacaaaatggctgatcaaatttcagatgcgatcttagatgcaattcttgaacaagataaaggctgcagagttgctgttgaaacccttgtaaagacggggctggttgtccttgctggtgaaatcacaacaagtgccgatgttgattatgaggccatagcgcgacgaaccatcaaaagaattggctatgacagagaagaacttggctttgatgatcaatcttgtgaagtgctatctgcaatcagcaagcaatcttcagatattgcgatgggcgttgatcgtgctgacaaaaaagaacaaggtgcaggtgatcaagggcttatgtttggttatgccaccaatgagacaaaggaactgatgccagcaacaattcaattatctcatcagctcgtgaagcggcatgcagatgtcagaaggagcaatgaactcagttggctgagacctgatgcaaagagtcaggtaaccattctttttgaagatggaaaacctaaatcaatcgatacagttgttctatccactcagcatgatgaaaacatttcaatgaatgatatccaagaaggcgtcatggaacttatcattaagcctattcttcctgaggacttgctaactgattcaactcaatatctcatcaaccccactggaaatttcatcattggtggtccagtcggtgattgtggtttgacaggaagaaaaatcatcgttgatacatatggcggtatggctaggcatggaggcggtgcattctctggaaaagatccatcaaaggttgatcgttctgcagcatatgcagctagatatgtagccaaaaatatcgttgctgccgggttggcagatcgatgtgaaattcaagtctcatatgccattggtgttgcaaaaccaacctctgtaagaataaaaacttttggcacagaaaaagtttcggaagaggaaattgtgcatttggtgaatgaaaattttgatttaactccatatggaataatgaatatgttagatcttcttcagccaatatatgagaaatcagcagcttatggccactttggtagagaagacgaagaattcccttgggaaaaaaccgatcgatccgatgcactaaaggggcaatctggcttgtaa

SEQ ID NO: 243780 - DNA, 1165 bp, Unknown
  Bacterial polypeptide expressing nucleotide sequence isolated from the Sargasso Sea
atgacaaatcaaacatacttaatgacatctgagtctgttggagaaggccatccagataaaatggctgatcaaatctcagatgcaattttagatgccattctagagcaagataaaggctgcagagttgcggttgagactcttgtaaagacaggcctagttgtccttgctggtgagatcacaacaagtgccaatgttgattatgaggccattgcgcgacgaaccatcaaaaggatcggctatgatagagaagaacttggctttgatgatcaatcttgtgaagtcttatctgcaattagtaaacaatcaccggatattgcaatgggcgttgaccgagctgacaaaaaagaacaaggcgcgggcgatcaaggtctcatgtttggatatgcaactaatgaaacaaaagaactgatgccagcaacaattcagctatctcatcaactggtcaagaggcatgcagatgtcagaagaagtggagatcttaaatggctgagaccagatgcaaagagtcaggtaaccattctttttgaagatggaaaacccaaatcaattgatacagttgttctatccactcaacacgatgaaggtgtttcaatgaatgatattcatgaaggtgtcatggaacatatcattaaaccaatactccctgagggcttgctaactgattcaacgcaatatctaattaatcccactggaaacttcataatcggtgggcctgtcggagattgtggcttgactggaagaaaaatcatcgttgatacatatggcggtatggcgagacatggaggtggtgcattctctggaaaagatccatcaaaggtcgaccgatctgcagcatatgcagcaagatatgtggctaaaaatgttgttgctgcagggttggcagaccgatgtgaaattcaagtctcatatgccattggtgttgcaaaaccaacctcagtaagaataaagacttttggcacagaaaagatttcagaagaagaaattgtgcatttggtaaatgaaaattttgatttaactccttatggaatcatgaacatgctggacctcctccagccaatctatgagaagtcagcagcatatggtcattttggcagagaggatgaagcattcccctgggaaaaaaccgatcgatctgatgcactaaaggagcaatctggcttgtaat

SEQ ID NO: 243781 - DNA, 580 bp, Unknown
  Bacterial polypeptide expressing nucleotide sequence isolated from the Sargasso Sea
atgacaattaaaatagctactagatcctcaaaattagcattactgcaggttgatgaatttcttgattatcaatcaattaaagattttgaaattataaaagttacaacaaaaggcgataaattaagtaatgagggaaaaactcaattcgataaacttaattttatatcggacattgaaaaattaattctaagaggagaagtcgatgttgctattcattctgcaaaagaccttcctgcaatccaatctcctacaattgctcaatcctatttttctcaagaaaaacaaataggaaacgatgttttaatctttcgaaaagatttggatccaatttttaaagagcatttaagaattgggacatcaagcttaagaagacaaatgcaggctaagcatcatctaaatgcttcaaatattgtttctcttaatggcaacgttacaactagactgaaaaaacttgaagatggcatatgtgattgtattattcttgctgaagctggattaagaagattagatttgataaataaagaattaaattttataagattacacattacacaaactttgctcagggtactttggcagt

SEQ ID NO: 243782 - DNA, 400 bp, Unknown
  Bacterial polypeptide expressing nucleotide sequence isolated from the Sargasso Sea
tatgtctgaattaaagaaaattgtagtagggattcgcagcagtaaattatctaaatctcagactaatcttttaattcaggaactgcttaaacaagacccaaatttgaatagagatatctttaatgtaaagacaatcaaaacaactggggatgtcaataatacgcaccgattggaccagattggcggaaaaggtctttttataaaagaaattgaggaacaaatcatatcgggtaaaattgatataggagtacattcactgaaagatgttcctgctcaggtttcttatccagatctagatatcatttgttggatgcaaagacataaatcaaacgatgcattaataagcaattctggaaaaagttttatggatttaccagaaggcagtgtaatggcaccagct

SEQ ID NO: 243783 - DNA, 712 bp, Unknown
  Bacterial polypeptide expressing nucleotide sequence isolated from the Sargasso Sea
tttgttgaggatatagatgatctgcttgtggacagaaaaatagatatcgcgattcattctgcaaaagatatgccagctgtctcaaatctttctgatcttgatgaaatatatatatctaatgacttagcccaaagagatgaaaaatataactcccgaaatgacatcctcatattcagaaagaatgaagatccagtatttgaaaaaaatatgaaaataggcacttcaagcttaaggcgtaagttgcaatctaaattcttcttagaagctacagaaatagttaatcttaacgggaatgttgatactcgagtaaaaaaattaaatgatggtgaatatgattgcattattcttgcaaaggctggatgtgagaggcttgagcttgatctaaattattcagcgcttgatcaccttacaaatatttctcaaggatcaatttgtttacgctttaataagaaaagaaaggaaatccttaacctattagaacccttcagtgatgatgaaatgaaaagaaagattgatgagtgtaataattttcttaatcttattaatgcagactgcaattcagcagttgcagtagattataaggatgaagttttgcaagcagaggtgtatggtaagaatgaatatattaagttctctgcacttaatgcagaggaagcctttatacgctttaaggagttagatggtttaaggttgctgaatgaacatagttgat

SEQ ID NO: 243784 - DNA, 682 bp, Unknown
  Bacterial polypeptide expressing nucleotide sequence isolated from the Sargasso Sea
tttaaaagatttgcctacaataatgacagaaggtctatgtgttaatgctgtagtaaaaagaaatgatccaagagatgcttttttaagtcattcaaataaatctttcaacgatcttaaaccacaatcaaaaattggaaccagttcatttagaaggtatgctcaattaaaattattaagaaatgatcttgatattgttacaatgagaggaaatattgatacaagaattacaaaattaaaaaatcaagagtacgatgccatagttttatctttggctggaattcaaatgcttaatttagaaaatcaggttaaagaaatatttaccactgaacaaatgttaccagcccttggtcaagggacaattgcattacagtgtaaaaaagatgatcaaaaaactttaagtattttaaaagctataaatgataaagaaacttattattgtattcaggcagaacgagctctactagaagcaataggtggggattgtgatacagctattggtggtttagctaaattatcaaataataaaatatctttaaaaagtgagcttttttcaaatgatggaaaaaaaaaatttgaatctcaaagtgcaggaagtttaagtgaggctaaagaaataggttataaagttggtaaagaattactaaaaaaagctggttcagattttacaacacagggaagttaa

SEQ ID NO: 243785 - DNA, 301 bp, Unknown
  Bacterial polypeptide expressing nucleotide sequence isolated from the Sargasso Sea
atgacaaaaattacaattggagctcgaggtagtaaactttcattagcctatgttgctaaagttaaagagctattattaaaaaacaataatgatcttaaagaggaaaatattaattttaaagccataaaaacatcaggtgatttgaatctaaacaagaacatttcagaaataggtggaaaaaatttattttgtaaagaaattgaagaaagcttattaaaaaaagaaatagatattgctgtgcattctctaaaagataaaggggctaatgaaaatgagagtctcttgataggagcatattaaa

SEQ ID NO: 243786 - DNA, 825 bp, Unknown
  Bacterial polypeptide expressing nucleotide sequence isolated from the Sargasso Sea
gaaagtaatagatggagaatgtgatcttgctgttcattcttggaaggatttaccgattgagccatcaaatgaaacagaaatagttgggacattaaaaagagatgacatgagagatgttattattgtgaaatcaacagtagcatccctcgaacacaaagaagagattaaagtacttacatcctctcccagaagaaaatttaatttaggacaggttttgccctttcttattcctataaagtttaaaaggatttcatgttatgacataaggggtaatattcaaacaaggcttaaaaagtttgaatcaggtaacgctgatgcaatcattttagctaaagttgctttagatcgtctaattgaatttggaagagatagtacaaaacaatatataagagaaatattaaacgcaaacaactggtcgatcttaccattatctatttttccaactgcacctgggcaaggcgcaattgctattgaagcaaaaaaagacaacaaaatattgaaagaaataattgataaaataaattcctctaactcatttgcaaatgttcaaaaagaaaaattaatgttatctaattatggagggggatgccatcaaaagataggcgcttccgtatgggatgaaaatgaaataaaattaatttcattggtgggaatgacacatgagacaaaactattgaacacctttggtccagaaagatcaaataagcgatcaaaaacaaaaactaagaataaacacttatatccaaaaccgaatgatgaaaaattctttgaacgaaaaaagatcgataattctaagcagattcaagacttaaaaagtagcttaat

SEQ ID NO: 243787 - DNA, 371 bp, Unknown
  Bacterial polypeptide expressing nucleotide sequence isolated from the Sargasso Sea
aatgaataaaaaaattataattggcgcaagaggcagtaaactttcactttcttacgttgagaaagtaaaaaagttattttttttagcgtcaggcgaagaaaaggaaactgaaattaaaataattaaaacatccggtgatatttttcatgataagaaaatctcagatattggcggtaaaaatattttttgtaaagaaattgaaaatcaattgctcgataaaaaagttgatattgccgttcactcactaaaggatatggactccttcgaagaaagtgagttaacaattggagcttatataaaaaggaatgatccaagggatggcattgtccttaaaaacggaaaatcatttgatagtgttaacctaacaatag

SEQ ID NO: 243788 - DNA, 888 bp, Unknown
  Bacterial polypeptide expressing nucleotide sequence isolated from the Sargasso Sea
catggcattcattaaaataggaacgagaggaagtgatttagcattatggcaagccaactttgtaaaaagtaagttgcaaaagttagggtgtgaagttgaaatacacatcataaaaactcaaggggataaaatccagcatcttagctttgacaagttagaaggtaaagggtttttcactaaagaaattgaagacgccttaataaatcaatccattgatcttgctgtccactctcacaaagacctcgagacaaatcagcccgatggtttagaaatcgttgctgtctcagacagagagaacccatcagatatgcttttaataaaaaagcacgcctacgatccaacaaaacaattagcgttgaaagaaaacgctatagttggaacttcatcagcaaggagaaaagcgatactaagtgcctttcgttccgatttaaaaataaaagatcttcgaggaaatgttccaaccagaattaataaacttcgtgaggaagattatgatgctattgttttagcaaatgcaggagtttcaagattgaaaattgatctatcagaatttcaagtagaaattttaaaaccacaagattttgttccagcaccagcacaaggagtgcttggcttacaaactcgaactgaagatgaagaaactaaaaaatatgtttccaaaataaataacccaagcgtaaaatctattattaacattgaaagaggtgttttgaacaaattagatggaggatgccaactacctctgggagtttacgcagagaaaattaatgggaaatatgaagtctgggctgctttaggacaaaaagatggctctttgaaaagagttcaatccagttttagatctgaacacgatgcagctgactcaattgttagcgccttaaaaaaaac

SEQ ID NO: 243789 - DNA, 373 bp, Unknown
  Bacterial polypeptide expressing nucleotide sequence isolated from the Sargasso Sea
aatgataaaaattacaattggggctcgaggaagcaaactttcattagcctatgtgacaaaagttaaggagctattaataaaaaacaatagtgaccttagggaggaaaatatcaattttaaagctataaaaacatcaggtgatttaaatttaaataggaacatctcagaaataggtggaaaaaatttattttgtaaagaagttgaagaaagcttattaaaaaaagaaatagatattgctgtccactctctaaaagatatggaagctattgagaatgagaatcttttgattggagcatatgttaaacgaaatgattaccgagatgtaataattagtgaaaaaattaaaaatatttctgatttaaagatggtataa

SEQ ID NO: 243790 - DNA, 592 bp, Unknown
  Bacterial polypeptide expressing nucleotide sequence isolated from the Sargasso Sea
atgaaaaggaaaaaattaataataggatctagagcaagcaaattagcattaatctatgctaacagagttaaagacgaaatttcaaagtactttaatcaggaaataatcataaaaaaaataacaacaaaaggtgatacaaaaatagacataagacttagcgaaattggaggaaaaggattattttctaaaaatatagaggaagagcttctaaaaaaaaatatagatattgcagtgcacgcacttaaagatttgccatcttttgaaactaaaggtttaaaaacaaattgttttttaaaaagaaacagttcaaatgaagtattaattagtaattcaaaaaaaaaattaaaagatttagtgcctggatctataataggcacttcttcgtttagaagagaatttcaacttaggaatattagaaaagatttgaattttaaacttataagaggaaatatagacactcgtataaaaaaattaaaaaaaggcgaatatgatgcaattatactttcaaaagcaggattgatatcattagagatggatcatgagattactgaggaatttacgaatagtgagataatacctagtgcaggacaag

SEQ ID NO: 243791 - DNA, 568 bp, Unknown
  Bacterial polypeptide expressing nucleotide sequence isolated from the Sargasso Sea
aatggataataaaattactataggtgccaggggtagcaaactgtctttggcttatgctaataaagttagaagcaatattcttagtcaagtaccaggaatcgataaagaaattataattaaaacaattaaaacatcaggtgatttatttcagaataaaaaaatttctgaaattggtggaaaagatttattttgtaaagaaatagaggaaaaattaattaaaaaagaaattgatatggcagttcattctcttaaagatatggactcaaaagaaactaaaggcctaactattcatgcttacttagaaagaaatgatgcgagagaaacatttgtttcaaaaagttttaataaaatatcagacataaaagaaggtaaaattggttcaagttctaagagacgtgaacttcaaataaaacttttaaataaagacatcaaagttgaaagcattagaggtaacgtagatacaagaattgaaaaaatagaaagaggagaatatgatggtgcgattttagctttatcaggtttagaaacattaaatttagaaaatcatattaaacagatattttcttta

SEQ ID NO: 243792 - DNA, 511 bp, Unknown
  Bacterial polypeptide expressing nucleotide sequence isolated from the Sargasso Sea
atgaataaaaaaaaaatagtcataggagctagaggaagtaaattagctgttaaatacgcagaactcgctattagagaaattaaaaaaatttataatggaaaaattgagttaaaaaaaattgttacaaagggagataaaattttaaatcttagaacttctgatattggcggaaaaggagaatttgttaagaatattgaaaaagaattgattacaaaaaaaattgatatagctgttcattcattaaaagatatcccatataaagaaacatcaggcttgatcataaaaacatttcttaaaaggaattctccaaaagaagtacttataagtaaaaataatttatctttcgataagttaaaaaaaaattctgttattggcacgtcttcttttagaagagaatttcaattaaaaatgatgaggtctgatttaaaattcaaacttataagaggaaatattgatagtagaataaaaaaaatttatgaaaaaaaatatgatgcaattatttggccaaagc

SEQ ID NO: 243793 - DNA, 526 bp, Unknown
  Bacterial polypeptide expressing nucleotide sequence isolated from the Sargasso Sea
aatgaataaaattttaagaattggaactagagatagtgaactagcaatttatcaagcaaagaaagttcaaaaagctataaaaaaacttggcaagaattctgaattaaaacttataaaaagcagtggagataaaaacttaatacaacccatttataaaatgggaattcaaggagtctttacaaaagctctggatactgctttaattaataacaagatagatattgctgttcatagtttaaaagatattccaactaaaattcctaaagaacttttaatttcggcaattttaaaaagggattctccctatgacagtttagtctactcaaaaaaatttaaaaaattttcaaataaatccataattggaactggaagcttgagaagaaaagcgcaatggttaagaagatacccaaatcataaaactcaagaactaagaggaaatattttaacaagaattaaaaaacttaatcactctttttgggatggtgctatattttctgaggctggaattaataggctaaaaataaaa

SEQ ID NO: 243794 - DNA, 520 bp, Unknown
  Bacterial polypeptide expressing nucleotide sequence isolated from the Sargasso Sea
aatgaataaagataaaattatattgggatcaaggggcagtaaactggctattctatatgccaagcgtgctaaaaaaagcattttaaataaaaatgctggtttaaatgatgattcaattgatattaaaattataaaaacatctggcgatatacaccattccaaaagcctttccgagattggaggaaaaggacttttttcaaaacaaattgaagaagacctgctcaataaaaaaattgatgttgcagttcatgctttaaaagacttaccttcgaacgaaacaaaaggtttagaaactaatatttttttagaaagaaacgatcctagagacgtttttattagtcataaatatgagtctttacttgatttaaaaccaaattcagtaattggaaccagctcgtttagaagaaccgctcaactcagcactttaagaaaagatctaataataaatttaatgaggggcaatatagacacaagaattagtaaattagagcaaaacaaattcgatgctattgttttatct

SEQ ID NO: 243795 - DNA, 865 bp, Unknown
  Bacterial polypeptide expressing nucleotide sequence isolated from the Sargasso Sea
atgacaatcaaaattggatcaagaacttcacagcttgctttaaaacaggtagaaatagccataaagaggatcggagtacctagttttgaaattgtaggtgtagatactgctggagataagagaagtagagaaaataaagttcagtttgataaaaaaaactttgttgaggatatagatgatctgctcgtggacagaaaaatagatatcgcgattcattctgctaaagatatgccagctgtctcaaatctttctgatcttgatgaaatatatatatctaatgacttagtccaaagagatgaaaaatataactcccgaaatgacatcctcatattcagaaggaatgaagacccagtatttgaaaaaaatatgaaaataggcacttcaagtttaaggcgtaagttgcaatctaagttcttcttagaagctaaagaaattgctaatcttaatgggaatgttgatactcgaataaaaaaattaaatgatggtgaatatgattgcattattcttgcaaaggctggatgtgagaggcttgagcttgatctaaattattcagagcttgatcatcttacaaatatttcccaaggatcaatctgtttacgctttaataagaaaagagaggaaatccttaaactgttggaacccttcagtgatgatgaaatgaaaagaaagattaatgagtgtaataattttcttaatcttattaatgcggactgcaattcagcggttgcagtagattacaaggatgaagttttgcaagcagaggtgtatggtaagaatgaatatattaagttctctgcacttaatgcagaggaagcctttatacactttaaggagttagatggtttaaggttgctgaatgaacata

SEQ ID NO: 243796 - DNA, 511 bp, Unknown
  Bacterial polypeptide expressing nucleotide sequence isolated from the Sargasso Sea
aatgtataaaaaaattattattggaacaagaggcagtaaattatccttagcttatgctggaagagttaagaacttattgataagcctaaatccgtctcctaaaattcacataaatataaagattattaaaactactggagatttaaacgtcgataaaaagatctccgaattaggaggaaaaaattatttttgtaaagagatagaagatcaactccttaataaaaaaatagatatagctgtacactcatttaaagacatggaaacgtttgaaaataaaaatttagtggttgcggcatatttgaaaagaaacgatccaagagatatcttagtaatgaaagataaagattttatttcacctagcaagaattactcaataggttcgagttcaaaaaggcgagaattgcaaatgaaattgctatttaaaaattttgctacgaaagaaataagaggcaacattgatacaagaatagaaaaggttaaacacggaaaatatgatggtgttatgttagct

SEQ ID NO: 243797 - DNA, 739 bp, Unknown
  Bacterial polypeptide expressing nucleotide sequence isolated from the Sargasso Sea
ttattttgcaaagagatagaagagaatttaattgataaaaagattgatgttgttgttcattctttaaaagatatggagtccattgagcataatgaattaattattggtgcttatataaaaagaaatgatcctagagattctttggtaagtaataagattaaaaatttaagtgaattaaaagatgggatgttaataggtacaagttctaggagacgagaactacaaataaagagactaaacagaaatattactgtcgttcacattagaggaaacatagatacaagaattaaaaaagtagatgaaaaaaaattagacgcaattattttagctacagcaggtattaaaagtttaaatttagaaaataaaattggcttaatttttaatactaacgaaatgctgcctgcagttggacaaggtattatcgcagttcagtgcaggaaagaagataaatttattttgagtattataaaaaaaattaatgacgaagaaactagtctttgtgctaaggctgagaaaaagatgcttcaaactatagggggagattgtcaaacggcagttggtggtttagcagaaattaataataagaatttgagtttgaaagcccaattattttcagacaagggtgatgacaattttaactttgaacttctaggtaaagatgtagatgctttaaatattggtaaaaaagtaggtcaaaaattattaagcctagcaggtgacaaatttaaaaaaaaatgaa

SEQ ID NO: 243798 - DNA, 698 bp, Unknown
  Bacterial polypeptide expressing nucleotide sequence isolated from the Sargasso Sea
gattgataatgctgttcattctttaaaggatatggagaccattgaacatcataaattaattattggtgcttatataaaacgaaatgatcctcgagactctttggtgagtaataaaatcaaaaatttaaatgaattaagaaatggaatgttaataggcactagttctaggagacgagagcttcagatgaagagactaaacagaaatattactgtcgttaacattagaggaaacatagatacaagaattaaaaaagtagatgaaaaaaaattagacgcagtcattttagcgacagcaggcattaaaagtttaaacttagaaaataaaattggcttgatttttaaaactaacgaaatgttgccagcagttggacaaggtattatcgcagttcagtgtaggaaagaagataaatttattttgagcattataaaaaaaattaatgacgaaaaaactagtctttgtgctaaggcagaaagaaaaatgctccaaactatagggggagattgtcaaactgcagttggtggtttagcagaaattaataataaaagtttaagtttaaaagctcaattattttcagacaagggtgatgacaattttaactttgaacttctgggtaaagatacagatgctttagatattggcgaaacagtaggtcaaaaattattaaacctagcaggtgacaaattcaaaaaaaaatgaa

SEQ ID NO: 243799 - DNA, 343 bp, Unknown
  Bacterial polypeptide expressing nucleotide sequence isolated from the Sargasso Sea
atgagtaataaaataattttaggttccaggggaagcaaactttcattagcttatgcaaataaagttcttaatttattatcaggtattaggactgaccttaataaagaagtaatattaaaaaccattaaaacatccggagatctatatgataaaaaaaaaatatcagaaattggaggaaaaaatttattttgtaaagaaatagaggacaaattaatttctaaagaaatagacattgcggtgcattcgttaaaggatttggattctatcgaaacagaaggtcttgtgatcaaagcatatttaaaaagaaatgatcctagagacactttggttctacaaaattaaa

SEQ ID NO: 243800 - DNA, 721 bp, Unknown
  Bacterial polypeptide expressing nucleotide sequence isolated from the Sargasso Sea
aaattagcattaatttatgcaaataaagctaagttagaaatttcaaagtattacaaaaatgacataattattaaatcaattgtcacaaaaggtgatcaagaaaaaaataaaaggattgcagaaataggaggaaaaggacttttttcaaaaaatatagaaaatcaacttttagacaaaaaaattgatattgctgttcatgctctcaaagatatgccatcagaggagacagacggcttaattacatgttgctttttgaaaagaaactttattaacgaagtcttaattagtaaaaatcataaaaagttcgcagaattaaaaaaaaattctgttgtaggaacttcttcatttagaagagaatttcaacttaaaaaaaaaagaggtgatttaaaatttaaattgataagaggcaatatagatacaagaatacagaaagttaaagatggaaaatatgatgcaattttactcgctaaggcaggagttgaattattgaacttaaaaaaagaagtaagccaggagtttaccctcgatgaaattataccaagtgctggtcaaggaataatagctatacaatgtagaaaagaggactcaaaaatacaaaaactattaaaaaaaattaatcacaataaaactcaaacagctgcaattgcagaaagacaagtccttaaatctttggagggagattgtgatacggcagtaggggttatatcaaaaataaataata

SEQ ID NO: 243801 - DNA, 349 bp, Unknown
  Bacterial polypeptide expressing nucleotide sequence isolated from the Sargasso Sea
ttgaaagtcgtgatcgggtccagggggagccagctcgccctgtggcagtctgagtgggccaagtcccaattggcttcaacgcacgacggcctcgacgtcacgatcgaggtgatcaagacggaaggtgacgctaacctcgccgcctctttctctgaaataggtagcaagggtgtgttcacgaaggaggtcgatgaagccctcctatctggtcgcaccgacttctccgtccacagtctcaaagatcttcccacaacgctcctcgatggtctagagttggccgctgttagcccgcgcgaggacgtgcgagacgcaatctgtgcacgcgatggtctgtcactttcggatctgc

SEQ ID NO: 243802 - DNA, 544 bp, Unknown
  Bacterial polypeptide expressing nucleotide sequence isolated from the Sargasso Sea
tatgcaggataatataaaactagctactcgtgaaagccctcttgcgctacgacaggcaaatatagttaaagagtatttactagagaataacgtcttcaataaaatagatattgttgccatgtctaccagcggtgataaagctgataatgagacctttaagaggaacgggggcaaaggcttatttcttaaagaactagaaaatgctctcattgagggtaaggcccatattgcagtgcattctatgaaagatgtacctgctagagtaaatgatggatttttgataaccagtattatggagagagaggatccctgtgacgtgttcatatcaaattcttataaaagtatagaggagatatcaattggaacgataggctcatccagtccgcggagacaagcaatgataaaaagcttaggaaaaaatataaacgtcgttgagatgagaggtaacatcaacaccagactaaaaaagcttaaaaactcaaatatagatggaatcatactggccaaagccgggcttcgtaggatggaaatggatagccttata

SEQ ID NO: 243803 - DNA, 545 bp, Unknown
  Bacterial polypeptide expressing nucleotide sequence isolated from the Sargasso Sea
aatgataaaaattggcacaaggggatcgcctctcgccgttagacaggcagacggagcggcacacaaattagtgcaaccgtacgaattagaaatcataaaaagtcaaggagatattgatcagaaaactcctatatacgaaatgggcggtaagcacgtattttgttctgcattagaagaaagtttgttagcaggggaagttgattgttgtattcatagtgcaaaagatatggcaactgaaatacatcaagacacagaagtgatgggcgttgtgtgggaggttggagatagacgagatacacttgttggacctttcgaaaattttgattctatacctaaaggacaaagaataggaactagttctcctagacgagcaaaaatgttacaggatcaaagaaatgatttgcgttttgttcctattagaggaaacattgatacaagattaaaacttgtaggcaaagaagtagatgcaatcataatggcaaagtgtgcattggacagattaaaattagatcccacaaattctcctataccagaagaagaaaata

SEQ ID NO: 243804 - DNA, 547 bp, Unknown
  Bacterial polypeptide expressing nucleotide sequence isolated from the Sargasso Sea
atgaaaaaaattataattggttctagaggtagcaaattgtccttagcatatgcagctaaggtaaaaagccttattttagaaaaaaatccagaactgcaagaaaaagacctttccataaagtccattaagacttcaggcgacgttttttttgacaaaaaactttcagaaataggaggaaaaaatttattttgtaaagaaattgaagaaaatttaattgaaaaaaaaatagatgttgcagttcattctttaaaagatatggactcgaaagaaaataaaaatttaactattggagcctatgttaaaagaaatgatcctagagatgtctttataagtataaaatacaataatttagaggaactaaggaaagactcggttattggttcaagctcacgaagaagagaactacaattgaaattacttaaaaaaaatataaccgttctaaatattaggggcaatattgacacaagaattaaaaaaattgaagagggaaaactagacggtgtaattcttgctgcagcaggagtagaaagtcttaaattacaaaaaa

SEQ ID NO: 243805 - DNA, 637 bp, Unknown
  Bacterial polypeptide expressing nucleotide sequence isolated from the Sargasso Sea
agctgtctcgaatacttctgatcttgatgaaatatatatctcgaatgacttagtccaaaatgatgaaaaatataactcccgaaatgacatcctgatattcagaaaaaatgtgcatccgatatttaaaaaaaatatgaaaataggcacttcaagcttaaggcgaaagctgcaatctaaattctttttggaagctactgaaattcataatcttaatgggaatgttgatactcgaataaaaaaattaaatgatggtgaatatgattgtattattcttgcaaaggctgggtgtgaaagattagagcttgatcttaattacttagagcttgagcaccttacaagtatttctcaaggatcgatctgtttacggttcaataagaaaagtagggaggtccttaaactattggagcccttcaatgataatgaaatgaaaagaaagatcaaagagtgtaataattttcttaatcttattaatgcagactgtaattcagcagttgcagtagattacatggatgaagtattgcaagcagaggtgtatggtaagaaagagtttataagtttttctgcgcttaatgcagaggaggcatttatgcgctttcaagagttagatggtttaaggttgctaaatgaacatagttga

SEQ ID NO: 243806 - DNA, 535 bp, Unknown
  Bacterial polypeptide expressing nucleotide sequence isolated from the Sargasso Sea
atgaataaaaagattataattggtgcacgcggcagtaaactttcactttcttacgctgaaagagtgaaaaagttatttttttcagcgtcaaatcaaaaaatagaaattgatattcaaactatcagaacttctggagacatttttcatgataaaaagatttctgacatcggaggcaaaaatatcttttgtaaagaaattgaaagacaattattagaaaaaaaaattgatattgcagtacattctttaaaagatatggactcgtttgaggaaaataatttaattgtaggcgcttatttaaaaagaaatgatccaagagatgttataattctcaagaaagacagatcacttaacagcgataaactcacaattggttcaaattcaaaaagaagagagcttcaattgaaattatacttcaaaaatataacatgcaaaaatataagaggaaatattgacagcagaatctctaaagtaaaaaaaggcgagtatgatggtgttattctagctttagctggtattcaaacattaaatcttcaag

SEQ ID NO: 243807 - DNA, 391 bp, Unknown
  Bacterial polypeptide expressing nucleotide sequence isolated from the Sargasso Sea
atgcagaaaaataaaaaaattcgaattggacttagaaagagtaagctttcaaaattacaaacaagtgactttattgataagtttttacaatcaaacaaagatatttatcctgaggatattgaacagattaccatttcaacaaaaggagatattcataaaagccaccgtttggataaaataggtgggaaaggactttttgttaaggaaattgaagaccatattatagagggtgatatccacttaggggtacattctgtaaaagacttaccttcacaagaaaataataaattaaaaattgtatgctggcttgaacgtctaatgccaaatgatgttttaatatcaaattcaaataaatcgcttaaagaacttaaaaaaggttcagtagtgggaa

SEQ ID NO: 243808 - DNA, 793 bp, Unknown
  Bacterial polypeptide expressing nucleotide sequence isolated from the Sargasso Sea
ctcccacttgatcttggtagagaaacatttttaggcggatctttagaaagagcagatcaaagagatatattatttgtaaaaaaaaataatatagaaaaaattaataaatctaaatctatttctgttttatcatcttctccaagaaggatctataatcttaatgaatttataaaagagtatttaccttttaattgtaaaaaaattttttttaaagatattagaggtaatattccaactagatttgaaaaatttattttaggccatgaagattgtatggttgttgccaaagctgctattgatcgattaatacatagtaatatggatcaatttaataatttatctaaaaatataaaagaaaaaataaatgaatgtctttggactattactcctttatcacaaaatccaacatctcccggccaaggagccttgggaattgaagtgagaaaagataataatgaaataattgaaattttaaaaaaaatttcagatacaatgacaatagaatgtgtaaatcatgagagagaaattttaaaaaaatatggtggaggatgtcatcaaaaaataggtgtaagttttttcccaatgttttttggtcttatgaaatcagaaaagggtgaaacagataatggacaaaaattttcaaattggggaaaatacaaaaataatattttgaaaaaagaaaaaatttcaataaaaaatttataccccgagtccttaaaagataataaattattttttagaaaagaaatgaaagaaagcatcagtaaaattaatgctctacgaaaacattgta

SEQ ID NO: 243809 - DNA, 584 bp, Unknown
  Bacterial polypeptide expressing nucleotide sequence isolated from the Sargasso Sea
catgggtaaagaaattataatcggctccagaggcagcaaacttgcattactttatgctcaaatggcaaaagataaaattattgaaaatactgaattagaagatgatgatattttgataaagccaataacaacaaaaggggacttgataaaaaataaaaggctatctgagtttggagggaaaggtttattttctagcaacatagaaaaagaattgttaaataaaaatattgatatagctattcacgcacttaaagatatgccagttattgaatcaaaaggacttatgactgagacatttttagaaagaaatgatccaagagaaattttgctatctattaacaagaaaaaatttagcgatttgaatttaaaatcaatcataggaacctcatcatatagacgagaatttcaaataaaaaaaatgagacctgatattgtttgtaagcttataagaggcaatatcgatacaagaattaaaaaacttaaagaaggtatttatgatgcaattgtactatcttatgccggagtgaaatgtctgaatttagataatcaaatttctgaaatattctctattaataagattattc

SEQ ID NO: 243810 - DNA, 458 bp, Unknown
  Bacterial polypeptide expressing nucleotide sequence isolated from the Sargasso Sea
tatgaataaaaaaaaaatagtaataggagccagaggaagtaagcttgctactaaatacgctgaacgtgcaattagagaaattaaaaaattctactctgggaaaatagaaataagaaaaattatcacaaagggtgacaagatcctgaataggagaacctcagatattggtggtaaaggagagttcgtaaaaaacatagaaaaagaattgatttcaaaaaaaattgatattgcagttcattcattaaaagatattccatataaagagacaccaggtttaattttagaaacatttcttaaaaggaattcaccaaaagaggtattgataagtaaaaataaagtaaccttcgaaaaattgaaaaaaaaatccattattggtacctcatcttttaggagagaatttcagttaaagatgattagacctgatttaaaatttaaacttattagaggaaatattgata

SEQ ID NO: 243811 - DNA, 823 bp, Unknown
  Bacterial polypeptide expressing nucleotide sequence isolated from the Sargasso Sea
atgaagattaaaatagcatcaaggaattccaaattagcactaagacaagttgaattatttgcaaagactttttccattgaaaattatagcttgaaagaagtctcaactcagggagataaaatgagtgcagatggcaatgttttatttgataaagcaagttttgttagtgatattgaaacatgtcttttagatgaaactgcagatcttgcaattcattcagcaaaagatatgcctgcgatcaaaaccgctggattagaacatctctactttttagaaggtacatcgagaaaaatttcagatctattgatatttaaaaaaggtattgacgctgtatataaaaaaaatatgaagcttggtacatctagcctaagaagaaagatgcaagccaagcatcatttgcattcaaatgatatttatcctttaaatggaaatattgatacaagacttaaaaaattaaatgacggtatttttgattgtattattttagcagaggctggtttatcaagacttgattatctattaaagggtcataattttataaagttaaatcacataacttgttcaggtcagggcgctttatcagttcaatggaaagttggaagtaaaattgaagaattcttaaaacctttttttgcaagcaattcatcggatgatttaaatctaggaattaatatggaaagagaactccttagaaaattagaggcaaactgtaattcagcaatttcgttatatgtgtctaatggcattttaaatggggaaatttatggaaaaaagaaatttattaatttctcaggcaaaaatgttgatgaaatatttaataata

SEQ ID NO: 243812 - DNA, 659 bp, Unknown
  Bacterial polypeptide expressing nucleotide sequence isolated from the Sargasso Sea
tatgcatcaaaaaattagaattggatctagaggcagtgatcttgccttatggcaagcaaattttgtaaaaaaacaattaaaagatttaggctttgactccgtgattgaaataatttcaaccaggggagatcaaattcaacatcttagctttgataaaatagaaggcaaagggtttttcacaaaagagatcgagcaggcattaatagataagaaaatagatttggcagttcattctcataaagatttggagactaacccacctaaagatttagaaattgtagcggtatctaatagagaaaacccttcagaattgttgttgataaataaatcctgtgtcgataaaaatcagttctggaaaatgaagaaaaatgctgttgttggcacatcttctgcaagaagaaagtctcaattgttgttttttaggaaagaccttaagattaaggatttaagggggaatgttccaactagaattcaaaaattaagagaaggacattacgatgctatattaatagctaatgctggagtatcgagattgcaattagatgtttcagatttgtattcagaaatattatcaaaaaaatggctgattccagctccagcgcaaggagtactaggtattcagataaggaaggataatgatcgacttcgaaagatattgt

SEQ ID NO: 243813 - DNA, 919 bp, Unknown
  Bacterial polypeptide expressing nucleotide sequence isolated from the Sargasso Sea
atgagtaaaaaaattgtaatcggctccagaggcagcaaactagcattactttatgctcaaatggccaaagataaaattattaagaatactaatctaaaagatgaggatattataattaaaccaataaccactaaaggtgatttagtaaaagacaaaaggctatctgagtttggaggtaaaggtttattttcaaacaatatagaaaaagaattattaaataaaaatattgatatagctattcacgcacttaaagatatgccagcgttagagtcaaaaggacttatgaccgaaacgtttttagaaagaaatgatccaagagaaattttattatctattggcaagaaaaaatttagtgatttaaatttgaaatcaataataggcacttcatcatatagaagagaatttcaaattaaaaaaatgagacctgatattgtttgtaagctcataagaggaaacattgatacaaggattaaaaaactcaaagaaggtacatatgatgcgattgttctatcttatgctggagttaaatgtttgaatttagacaatgaaatttccgaaattttttctattaataagattattccaagtgcaggccaaggaataatagccttgcagtgtagagaaaaagataacaagattatttcaattttaaaaaagattaatcatagtgaaacttataaaagggcacatgcagaaagaaatattttaaaagttttagagggtgattgtgaaactgcagtaggggctcatgctacaattgataaagacaagattattttagaggcagaattattttccttagatggcacagtaagattttatgaaaaaaaaacaagtaccttagataaatttaaacaacttggtatcgaagtaggtaaaagtttgaaaactaaatcgaataactcttataaaaaatagt

SEQ ID NO: 243814 - DNA, 916 bp, Unknown
  Bacterial polypeptide expressing nucleotide sequence isolated from the Sargasso Sea
atgaataaaaaaattataattggtgctcgtggtagtaaactttcactttcttacgctgaaacagtaaaaaagttatttttttcagcatcaaatcaaaaaaaagaattagaaattcaaactattaaaacctctggagatatatttcatgataaaaggatttcagatattggcggtaaaaatattttttgtaaagagattgaaaatcagttaattgaaaaaaaaattgatattgctgtccattctttaaaggacatggactcttttgaagaaaatgacttagttataggcgcatacttaaaaagaaatgatccaagagatgttatagttatgaataaagatagatcgcttagtagcgataaacttattataggatcaagttcaaaaagaagggaacttcaattcaaaacatactttaaaaacataatatgcaaaaatattagaggaaatattgacagcagaatctctaaagttaaaaagggtgagtatgatggtgtaatattagctttagccggtataaaaattttaaatcttgaaaacgaaattaaagaaatattctctgaagaaaaaatcattccatctgctgggcaaggagtgatagctgttcaatgtagaaaagatgatcttgaaaatttgaaaattctggaaaaaattaatgatgaaaatacaaaaatttgcgctttaacagaaagaagtttattaaaaactattggaggagactgtcatacagctgtaggagtttatgcaaaaatagacaaaaataatattactatatcttcacaattattttcagatgatggtctaaaatcattttcgattaaaaaaagtggagataaaaaatttccagaaaaactgggagtctctgctggaaaagatttattaaatcagtctaaaggtaattataaaaaaaaaagatgaa

SEQ ID NO: 243815 - DNA, 910 bp, Unknown
  Bacterial polypeptide expressing nucleotide sequence isolated from the Sargasso Sea
atgaaaaaaattataattggagcaagaggaagcaagctatctttagtctatgtatcaaaagttaaaaacttaatacttcaaaattatagagatattgatattcaagtaaaaataataaaaacatctggagacatttatcaaaacgttaaaatatctgagatcggcggaaaaaatctattttgcaaagagatcgaggaaaatttactcgataaaaatattgatattgctattcatgctttaaaagatttggagtcagttgaacatgaaaatttgactataggcgcatacattaaaagaaatgatcctcgagatattcttgtaagtaataaaataaaaaaattgagtgacttaaatagcaatgtgactattggctcaagttcaagacgaagagagcttcaattaaaaaatattaataaaaaaattaatgtagaggaagtaagaggtaatattgataccagaataaaaaaacttgaagaaaaaaaatttgatgcaattattttagctgcagcaggagtcaaaagtttaaacttagaaaataaaattagtttagtttttgaaagcaaagaaattttaccagcagcaggacagggcataatagccgttcagtgtagaaaggatgatgattttattttaaatttaataaaaaagaccaatgacaaaactacaagtctatgcgcaaaagcggagagaaaaatgttacaaactatcggaggagattgtgaaacagcagtaggcggtttagcagagatatctaataataatttaaaacttaaagcacaactattctctgattctggagaggaaagttttaaatatgaaatgactgggcccgaaaatgatgctttgattatcggtgaaacggttggaaaaaaattattagatttagcaggtgataaatttaaaaattaat

SEQ ID NO: 243816 - DNA, 547 bp, Unknown
  Bacterial polypeptide expressing nucleotide sequence isolated from the Sargasso Sea
aatgaaattgggtacaagcagtcttagaagacaactacaagctaaacatcatttgaatgcaataaatattgttaatttatcagggaatgttgatacaagattagaaaaactatctcaaggagaatatgattgcataatacttgctaaagccggcttagagagactaaagctcttagatgaattgcattatgaagtaatggattggtcaaccgcatctggacaaggttttttgtgcattgaggtattaaatgatccgtctggcgatatttataattttctattgaaatcttttcgtgaaattaacttaactcttggaaataatatttccattgaaagaagtattttagaggcaattaatgcaggttgtaattctgcgatctcaattcagactcaatctaatcttgagtcagagaactcacaatcaattcatttaggtaagatttatggtgttgagaaatatatatctttttcaggaactaccgcagaaaaaactattaatgatattaaaaatcaagatgggctgaaacttttaaatgaacataattga

SEQ ID NO: 243817 - DNA, 883 bp, Unknown
  Bacterial polypeptide expressing nucleotide sequence isolated from the Sargasso Sea
tagagcaagcaaattagcattaatctatgctaacagagttaaagacgaaatttcaaagtactttgatcaggaaataatcataaaaaaaataacaacaaaaggtgatactgaaatagacataagacttagcgaaattggaggaaaaggattattctctaaaaatatagaggaggagcttctagaaaaaaatatagatattgcagtgcacgcacttaaagatttgccatcttttgaaactaaaggtttaaaaacaaattgttttttaaaaagaaacagctcaaatgaagtattaattagtaattcaaaaaaaaaattaaaagatttagtgcccggatctataataggcacttcttcgtttagaagagaatttcaacttagaaatattagaaaagatttgaattttaaacttataagaggaaatatagacactcgtataaaaaaattaaaaaatggtgaatatgatgcaattatactttcaaaagcaggattgatatcattagagatggatcatgagattacggaggaatttacgaatagtgatataatacctagtgcaggacaaggaaccattgcagttcaatgtagagaagatgatcatgaaataaatgaatttttaaaaaaaataaatcaccatgaaactagtttaaaagtcaaagctgagagagaggttttaaaagttttagatggtgattgtgagactgctgtaggtactttttcagaaataatcaataatgagatttttatatctggcgaacttttctctattgatggaagacgaaggtattattataaagttagatctgaaacaaaaaaatcgattgaagcaggaaaaacattaggaaaaaaacttaaagaacaatctggtggtgattataaaaaataa

SEQ ID NO: 243818 - DNA, 361 bp, Unknown
  Bacterial polypeptide expressing nucleotide sequence isolated from the Sargasso Sea
atgactaaaattacaatcggtgccagaggaagcaagctttcaattgcttatgtaaaaaaagtgaaagagcttttaattcaaaaaaataatgacttgagagaagaaaatatagattttaaagctatcaaaacttctggtgatattaatcaaaatgtaagattatctgaaataggtggcaaaaatctattttgtaaagaaattgaagaaaaacttttgaagaaagaaattgatattgctgttcactccttaaaagatatggagtccgtggaagacagcaaccttatcatcggcgcatatgtaaagcgaaatgattacagagatgtaattataagcgataagattaaaaggttagaagattaaa

SEQ ID NO: 243819 - DNA, 421 bp, Unknown
  Bacterial polypeptide expressing nucleotide sequence isolated from the Sargasso Sea
tatgaacaatcataataaaaatacacccctcattaagcttggtactcgaggatctagattagcactggcccaggctgaagagtttaaaacacgtcttgccgagtcaataaatgtttttagggagcctggtgcagtagagatagtagttatcaatactgctggcgataaaatactcgatcggcccttaagcgacgttggcggtaaggggcttttcattaaagagattgagaaagctcttctagagggtcatatagatgtagcagtccattccatgaaagatgtcgagacttgtttgaatccagaaacaagaattggatgcatcctgccacgcgaggaaattaacgatgccttcatttccaattcctcagagaaattaatgaatctctccctatgcgagcgtagtcggtacatcctctattag

SEQ ID NO: 243820 - DNA, 880 bp, Unknown
  Bacterial polypeptide expressing nucleotide sequence isolated from the Sargasso Sea
atgaataaagttttaagaattggaactagagatagtgaactagcaatttatcaagcaaagaaagttcaaaaagctataaaaaaacttggcaaaagttctgaattaaagcttattaaaagtagtggagataaaaacttaatacaacccatttataaaatgggaattcaaggagtctttacaaaagctctggacactgctttaattaataacaagatagatattgctgttcatagtttaaaagatattccaactaaaattcctaaagaacttttaatttcggcaattttaaaaagagaatctccttatgacggcttggttttctcaaaaaaatttaaaaaattttcagataaatcaataattggaactggaagtttgagaagaaaagcgcaatggttaagaagatacccaaatcataaaactcaagaacttagaggaaatattttaacaagaattaaaaaacttaatcactctttttgggatggtgctatattttctgaggctggaattaataggctaaaaataaaagatgtcaaatatcaggttttagactggatgattccctcccctggtcagggcgtaattgctatatgctcaaaaaaaaaacaattaaaattgacaaaatttttaactaatcttaattgtgaaaaaacagaaatgtgtgtaaaaattgaaagaaattttctaaatattttagaaggtggttgtaaagctccaattgctgcttttgcaaaaattgaaaataaaaaaattatattcaaatcaggtctattttctttagatggttcagttgcatacattgaaaatcaagaaattgatctttataactcaaaagattgtggaataaatgcggcaaaaattatattgaaaaaaggtgggaaaa

SEQ ID NO: 243821 - DNA, 868 bp, Unknown
  Bacterial polypeptide expressing nucleotide sequence isolated from the Sargasso Sea
aatgacaattaaaatagtttctagatcttcaaagctagcacttgcacaagtacaagaatttatagatgttttttcaataaaagaatatgagttaataaatataaaaacaaggggagacatattaagttctcaaggtgaagtattgtttgataaagctaattttgtatctgatattgaaaaaagtcttattgaagaaaaagcagatgttgctattcattcagcaaaggatatgccagctgaagatactgaatatcttaaccaacttttctttgcaaaaggtgaggagagagtagtttcagatctattaatttttagaaaagataccgaacctgtatttgacataaatatgaaattagggacttcaagtctaaggagaaagatgcaagccaaattccatttaaaagcaaagaatattatggatctaaatggaaatattgatacaagaatacgaaaactaaatgaaggaatttatgattgtattattttagccgaagctggtttatcaagacttcaatatcttttagaggatcaaaactatataaaattaaatcatttgacatgctctggtcagggagctctagcggctcaatggaagaatgaaaataaatttagtgacatgattatttcatctgatatttcttcagctgcaattaatctaaatgatgaaataaatatggaaaaatctcttttacaaaagttaaatacaagttgtaattctgcaatatctcttagagctcaaaatggtttattaaaaggcgagattttcggatccaaaagttatatctcttttagtggggaccaaattgatgaggtttacaaagatattaaggaaaatagagggttagaattactaaatgaacatcattga

SEQ ID NO: 243822 - DNA, 868 bp, Unknown
  Bacterial polypeptide expressing nucleotide sequence isolated from the Sargasso Sea
atgacaataagaatagcatctagatcttcaaaattagcgctaaagcaagtagaaattttttcaaaggcttttttattagaagattataaattagttgaagtattaacgagtggagacaaaatgagtgctaaaggcgaagtaatgttcgataaggcgaacttcgtgaatgaaattgagcaaatgattcaaaaaaattctgtagacattgctattcactcagccaaagacatgcccgctcaggagactgaaggtttaaaacatttttactttatcgaaactcaaaagagaaaaataaatgacttaataatatttagaaatgatacagatacagtttttgaaaaaaatatgaaacttggtacatcaagcttaagaaggatcatgcaagcaaaatttcatatgaatgccaaaaatattcaacttctaaacggaaacatagataccagaattaaaaaacttaatgatggtatgtacgattgcatcatattagcagaggcaggattatctagattgagttctcttctgaaaaagcaaaattataaacaactggaacatataacttgctcaggtcagggtgttttagctgttcaatggaaagaaggttctaaagtgggagattttataaaatcatcattattgttcgaccaaatgaaagaacttaatgaacaaattaaaatggaaagaaatttattgaaaaaattaaatgctaattgtaattcagcaatttcaatttttgcttcaaacggttttttacagggtgaaatctttggaagagataaatttattactttttcaggtaataacgttgatcagttatataaagatataacggcaaataatgggttaaatttattaaatgaacatcattgat

SEQ ID NO: 243823 - DNA, 886 bp, Unknown
  Bacterial polypeptide expressing nucleotide sequence isolated from the Sargasso Sea
catgactgtcaaaaaattaattattaatcaagataacacagacagaagaatagataattatctactatcactttataaaaatgtaccaaaaagtaagatttataacattataagaaaaggtgaagttagagttaattctaaacgcattaaaccaagctataagttaaaaattgatgacctggtgagaattcctccttttttggatggaccttcagctctaaataaaaaaattagtttagatttaatagaaaaacatacaacaaaaattatttatgaagatataaattatattgttaccaataaaaataatgatattgctgttcattctggttctaaaaatagaatagggcttattgatatttttagattgaaatttggaaatcatattgaactttgtcatcgattagataagcacacatctggatgtttagttttggcaaaaaataaaaaatcagtcaaatacttttcagatttattaacaaaaaatgaaataaagaaaatttacatcgctattataaaaggaagttttaaggaaaaaagagttattgaaaatgaaatttataagaataattcattgaaatttaagaaatctaaatcaatatttaaactggttagacaacttaaaaatacttctatagtcagtgtcgatcttcatacaggcagaactcatcaaatccgaatacatgcatctcaaatcaaccatccaatactatttgataaaaaatatggcgatgaaatatttgatagttcaattaatttcaactttaaaaaaactttggcgttacattcaaaatcaattatatttaaagatcaaaattcaaaaataataaaggctacagcaaactatccagatgaatttaaaaacctaatcaaagctctagaatag

SEQ ID NO: 243824 - DNA, 871 bp, Unknown
  Bacterial polypeptide expressing nucleotide sequence isolated from the Sargasso Sea
aatgacaattaaaattggatcaagaacttcaaagcttgctgtaaaacaggtagaaattgccatgaatataatcggagtacctagttttgaaattgtaggtgtagatactgctggagataagagaagtagagaaaataaagttcagtttgataaaaaaaactttgttgaggatatagatgatctgcttgtggacagaaaaatagatatcgctattcattctgcaaaagatatgccagctgtctcaaatctttctgatcttgatgaaatatatatatctaatgacttagcccaaagagatgaaaaatataactcccgaaatgacatcctcatattcagaaagaatgaagacccagtatttgaaaaaaatatgaaaataggcacttcaagcttaaggcgtaagttgcaatctaaattcttcttagaagctacagaaatagttaatcttaatgggaatgttgatactcgagtaaaaaaattaaatgatggtgaatatgattgcattattcttgcaaaggctggatgtgagaggcttgagcttgatctaaattattcagagcttgatcaccttacaaatatttctcaaggatcaatctgtttacgctttaataagaaaagagaggaaatccttaacctattagaacccttcagtgatgatgaaatgaaaagaaagattgatgagtgtaataattttcttaatcttattaatgcagactgcaattcagcagttgcagtagattataaggatgaagttttgcaagcagaggtgtatggtaagaatgaatatattaagttctctgcacttaatgcagaggaggcctttatacgctttaaggagttagatggtttaaggttgctgaatgaacatagttga

SEQ ID NO: 243825 - DNA, 651 bp, Unknown
  Bacterial polypeptide expressing nucleotide sequence isolated from the Sargasso Sea
ttttttatctcaaagaaagcacaaaggatatctatacgtggtcatctgataggattattttcagagatcaaaataaaaaaaaattttcttcagaaatgattcttggcacttcgagtctaagacgaaagatgcaagctaaatttttgttaggcgctgaaaaaattttttctttaaatggaaatattgatactagaattaggaaacttaattccggtgagtatgactgtatcattctggcaaatgctggctgcactagacttggttttaatcttaattcttacaatcttgattttcttactccaagcgcacaaggcttaatttgtcttcagtgcctgaaaggaacagatatctctaaaatgcttaataatttttttgataaagataaatataaaatacataagataggtatggacatatataaaagttttttaaggaatattaatgctgattgcaattcagcaatttctgtaaggtcagtagacaatggcagaatagcgaatggagagcataaactaacttttcaagtattcggtaaacatgaatttttttctgcagaaaaaacacattcagaccctcaaaaattaattgaacttgctactgaagagttttatagaaataatgcaaaaaaattattagatgaacataattgat

SEQ ID NO: 243826 - DNA, 871 bp, Unknown
  Bacterial polypeptide expressing nucleotide sequence isolated from the Sargasso Sea
aatgacaatcaaaattggatcaagaacttcaaagcttgctttaaaacaggtagaaatagccatgaatagaatcggagtacctagttttgaaattgtaggtgtagatactgctggagataagagaagtagagaaaataaagttcagtttgataaaaaaaactttgttgaggatatagatgatctgcttgtggacagaaaaatagatatcgcgattcattctgcaaaagatatgccagctgtctcaaatctttctgatcttgatgaaatatatatatctaatgacttagcccaaagagatgaaaaatataactcccgaaatgacatcctcatattcagaaagaatgaagacccagtatttgaaaaaaatatgaaaataggcacttcaagcttaaggcgtaagttgcaatctaaattcttcttagaagctacagaaatagttaatcttaatgggaatgttgatactcgagtaaaaaaattaaatgatggtgaatatgattgcattattcttgcaaaggctggatgtgagaggcttgagcttgatctaaattattcagagcttgatcaccttacaaatatttcccaaggatcaatctgtttacgctttaataagaaaagagaggaaatccttaaactgttggaacccttcagtgatgatgaaatgaaaagaaagattaatgagtgtaataattttcttaatcttattaatgcggactgcaattcagcggttgcagtagattacaaggatgaagttttgcaagcagaggtgtatggtaagaatgaatatattaagttctctgcacttaatgcagaggaagcctttatacactttaaggagttagatggtttaaggttgctgaatgaacatagttga

SEQ ID NO: 243827 - DNA, 868 bp, Unknown
  Bacterial polypeptide expressing nucleotide sequence isolated from the Sargasso Sea
atgacaatcaaaatagcttctagatcatcaaagcttgccttagctcaagtagaagaatttgttcaaactttttctatcaaagaatatgaattaattaatataagaactcaaggtgacattatgagttcaaaaggtgaaatattatttgataaagcgcacttcgtatctgacatagaagaatctttgttaaatggctcagttgatgtagcaatacattctgcaaaagatatgccagctaaaaaaactgcagaattagatcatctctattttacaaaagaaaataaaagattcgtttcagacctactaatttttaataagagccaaggttctttgtttaaaagccatatgaagttaggtacctctagccttagaagaagattacaggctaaatttcatcttaatgcaaaaaatatttctaatcttaatggaaatattgatacaagaataaagaaacttgatgatggaaaatatgattgcatcattctggccgaagcaggcctcaaaaggttggaacatctattggaaggtaaaaattttgttaggcttaatcatatttcatgctctggacaaggtgcacttgcagttcaatggaaagataataataaatttggcgatcttattatgtcttcagatgtagcatcactttacacagagctaaatgcaaatattgaactagagaaatctcttctaaaaaaacttaaaacaaattgtaattctgctatttctattaaatcttcacaaggtcaaattaatggtgagatttacggtattgataagtttatagcttttaaaggtacaaaaattgaaacgatacataaagaaattgttgatatgggtgggctaaaattattaaatgatcataattgat

SEQ ID NO: 243828 - DNA, 868 bp, Unknown
  Bacterial polypeptide expressing nucleotide sequence isolated from the Sargasso Sea
aatgacaattaaaatagtttctagatcttcaaagctagcacttgcacaagtacaagaatttatagatgttttttcaataaaagaatatgagttaataaatataaaaacaaggggagacatattaagttctcaaggtgaagtattgtttgataaagctaactttgtatctgacattgaaaaaagtcttatagaagaaaaggcagatgttgctattcattcagcaaaagatatgccagctgaaaatactaaaaatcttaaccaactattctttgcaaaaggtcaaactagagtagtatcagacttgttagtttttagaaaagataccgaaccagtatttaatataaatatgagattagggacttcaagtctaaggagaaagatgcaagctaaattccatttaaaagcaaaaaatattgtgaatctaaatgggaatattgatacaagaatacgaaaactaaatgaaggtagttatgattgtattattttagcggaagctggtttatcaagacttcgatatcttttagaagatcaaaattatataagattaaatcatttaacatgctctggtcagggagctcttgcggttcaatggaaaaatgaaaataaatttagtgacataattatgtcagctgatatttcttcatctgcaattaatctaagtgatgaaataaatattgaaaaatctcttctgaaaaaattaaacacaaattgtaattctgcaatatctcttatagctagagatggtttattaaaaggtgagattttcggattgaaaaattatatctcttttattggagatcaagttgatgaagtttacaaagatattaaggaaaatagaggattagaattgctaaatgaacatcattga

SEQ ID NO: 243829 - DNA, 655 bp, Unknown
  Bacterial polypeptide expressing nucleotide sequence isolated from the Sargasso Sea
tgcagttcactctgcaaaagatactcctgcaaaaaaaacaaatggaattgaaagaaattttataataagtagaacttcaaaagatgtattagtatttaaagataataataattttgattcaagcatgaagttgggcactagcagcttgagaagaaaactacaggcatttcatttcttaaaatcatcaaatgttagtggtataaatggaaatgttgatactagattagaaaagctttatcgaggtgattatgactgcataattttggcaaaagcgggtcttgaaagattgagattgcttgaagaactaaattatgaagaaatggattggataactgcctcagggcaaggtacgttggcagttgaaatggtagagtcctttcatgaaaatgaagagttattagaaattaactcaaatattaaaaataaattagctacgaatgttattgagtatgaaagaaatattttagatagggttgatgctggatgtaattctgcaatagcaattgagagtatttcagaaaattccaaacaaattataagaggcgaaatatatggtgttaaaaaatttataacattttctggtgctacagatatagaagcaatcgaagatattgaaagacaaaatggtcgtaggtttttaaatgaacataattga

SEQ ID NO: 243830 - DNA, 895 bp, Unknown
  Bacterial polypeptide expressing nucleotide sequence isolated from the Sargasso Sea
aatgaaaatagcaaccagatcttcaaaattagctttagaacaaacgtatttttttcaaagctggatacctaaacaaaccactcaaattgttgaaataaaaactgaaggtgacaaaaaaagtgctctgggcgaagtattgtttgataaagcaaattttgtcagcgacatagagaaatgcttaataaaagatggtgcagatgttgccatacattcagcaaaagatatgcctgcatttaaacataaggaattagatcactatttctttgggcctagatcaagatcagacttattaatcttcagaaaagatattgatccagtctttaaaaaagatatgaaattaggcacatctagtttaagaagaaaaatgcaagcaaaattctatcttggtgcaaaaaatgttattcctattagtggaaatgttgatacaagaataaataagcttaatagtggagattatgactgtattattcttgctgaagcaggatgtcaaagactgaagatagattttgaaaagttaaattatataaagttagatcatcttacatgtgcaggtcagggagtattggctgtgcaatataagccagacaataaatttgcaaaagaatttcttttggaatggaagcaaaattttcttcaaagagttattcatgatgaaacagaaatggaaaaaagattattagagaaaattggtgctagctgtaactctgcaattgcagtaagagcaaatcatgaagggccaaaaggagtggataaaataatcaagggcgaaatatatggattaaatgaatatatttcttttgaaagcaaatcttctgatgttgatacagctattaatgatgcaatagacatgctgaaaaataaaaatggtttagagttactcaatgaacataattga

SEQ ID NO: 243831 - DNA, 280 bp, Unknown
  Bacterial polypeptide expressing nucleotide sequence isolated from the Sargasso Sea
tatgcaggataatataaaactagctacccgtgaaagtcccttggcgctacgacaggcaaatattgttagaaagtatttactagacaataatgtcttcaataaaatagatattgttgcgatgtctacaagcggtgataaagctgatagtgagacctttaagagaaacgggggtaaaggcttatttctcaaagaactagaaaatgctcttattgagggtaaagctcatattgcagtgcattctatgaaagatgtgcccgctatagtaaatgatgatttttaa

SEQ ID NO: 243832 - DNA, 691 bp, Unknown
  Bacterial polypeptide expressing nucleotide sequence isolated from the Sargasso Sea
atgacaatcaaaatagcttctagatcatcaaatcttgccatagctcaagtagaagaatttattaaaactttttctataaaagaatttgaattaattaatatcagaactcagggtgatattatgagtgcaaaaggtgaaatattatttgataaggcacacttcgtatctgacatagaagattctttgctaaatggctccgtcgatgtagcaatccattctgcaaaagatatgccagctaaaaaaactataggattaaaacatctctattttacaaaagagaataaaagattcgtttcagatctgcttatttttaataatgatcaaggtcctttttttaaaagtaacatgaagttaggtacctcaagccttcgaagaagattacaggctaaatttcatcttaatgcaaaaaatatttctagtcttaacggaaacattgatacgagaataaaaaaacttgatgatggagaatatgattgcatcatcctcgcggaagcaggtctcaaaaggttagaatatcttttggaaggtaaaaattttgctaggcttaatcatatttcgtgctctggacaaggcgcacttgcagttcagtggaaagaaaataataaattaggcgatcttattatgtcttctgatatagcatcactttctgcagagctaaatacaaatattgaaatggagaaatcgcttctaa

SEQ ID NO: 243833 - DNA, 913 bp, Unknown
  Bacterial polypeptide expressing nucleotide sequence isolated from the Sargasso Sea
atgcaggataatataaaactagctacccgtgaaagtcccttggcgcttcgacaggcaaatatagttaaagagtatttactagacaataatgttttcaataaaatagatattgttgccatgtctaccagtggtgatagagctgataatgagacctttaagaggaacgggggtaaaggcttatttcttaaagaactagaaaatgctctcattgagggtaaggcccatattgcagtacattctatgaaagatgtacccgctagagtaaatgatggatttttgatatcaagcattatggagagagaggatccctgtgacgtgttcatatcaaattcttataaaagtatagaggagatatcaaatggaacgataggctcatccagtccccgcagacaagcaatgataaagagtttaggaaaaaatataaacgtcattgagatgagaggtaacatcaacaccagactaaaaaagcttaaaaattcaaatatagatggaatcatattggctaaagccggtcttcgcaggatggaaatggatagcctaataacacagaatctcagtgtcgagtcatttgtaccctcgccaggacaaggtgtattgtgcatagaatgtttaagtcaacacagcgagattatgagtaagattaagaagatagtacatctaaatacagaaatatgtgtttcagctgaaagaatatttgctgcccagatggatggggattgtatgtcaccaataggtgctcatgcgacaatccaaaaagacttaattactattactgggtttgttgccacagctgatggtacaagatatatcagaaataaaattgaaggtaataagaacaactataaggacctgtcaacaaaactctcaaatttattcattaaaatgggctctaaaggtatgctgaaatgttaga

SEQ ID NO: 243834 - DNA, 895 bp, Unknown
  Bacterial polypeptide expressing nucleotide sequence isolated from the Sargasso Sea
aatgaaaatagcaaccagatcttcaaaattagctttagaacaaacgtatttttttcaaagctggatacccaaacaacccactaaaatcattgaaataaaaactgaaggtgacaaaaaaagtgccatgggcgaagtattgtttgataaagcaaattttgtcagtgatatagaagagtgcttaataaaagatggcgcagatgttgccatacattcagcgaaagatatgcctgcatttaaacataaagaattagatcactatttctttgggcctagatcaagatcagacttattaatcttcagaaaagatattgatccagtctttaaaaaggatatgaaattaggcacatctagtttaagaagaaaaatgcaagcaaaattctatcttggcgcaaaaaatgttgtccctattagtggaaatgttgatacaagaataaataaacttaatagcggtgattatgactgtattattcttgctgaagcaggatgtcaaagactgaaaatagattttgaagatttaaattatatagaattaggtcatcttacatgtgcaggtcagggagtattggctgtgcaatataagcgagacaataaatttgcaaaagaatttcttttggaatggaagcagaattttcttcaaagagttattcatgatgaaacagaaatggaaaaaagattattagagaaaattggtgctagctgtaactctgcaattgcagtgagagcaaatcatgaagggccaaaaggagtagacaaaataattaaaggcgaaatatatgggctaaatgaatatatctcttttgaaggcaaatcttctgatgttgatgcagctattaatgatgcaatagacatgttgcaaaataaaaatggtttagagttactcaatgaacataattga

SEQ ID NO: 243835 - DNA, 781 bp, Unknown
  Bacterial polypeptide expressing nucleotide sequence isolated from the Sargasso Sea
gatttgaatctaaataagaacatctcagaaataggtggaaaaaatttattttgtaaagaaattgaagaaagcttattaaaaaaagaaatagatattgctgtgcattctctaaaagatatggaggccaatgaaaatgagtgtcttttgataggagcatatttaaaaagaaacgattaccgagatgtaataatcagtaaaaaaattaaaaatatttctgatttaagtaatggcgtaaaaattggctcaagttcaaaaaggagagagcttcaattaaaaaaaattaataataagatttctgtagtcaatattcggggaaatattgatactagaattaataaaattaacgataacaaattagatggagtcattcttgcagctgctggagttaaatcactcaaactcgataaaaaaatcagtttaacttttaattgtgaacagattttaccagcagttggacaaggaataattgctgtacaatgtagaaaggaagataaaattaaaaatttaataggaagaataaacgatagtgcaactagtttatgcgcaatagctgagagaaaaatgcttcaaaccatcggaggcgattgtgatactgcaattggtggtttagcagaaattgaaaaccacaatttaaaactaaaagctcagcttttttcggataatggtcaagaaagttttgaatatgaactaataggaagagaagccgacgcttcttttattggaaaaagtgttggagaaaaattattaaatctggctggagaaaaatttaaaaaaaaatgaa

SEQ ID NO: 243836 - DNA, 588 bp, Unknown
  Bacterial polypeptide expressing nucleotide sequence isolated from the Sargasso Sea
atctgccgccaggttccaggatcggtaccagttcactcagaagagcggcccagctcaaaaacatgagacctgatgtggaagtaacttccctgcgcgggaatgttccaacccggttgaagaaacttgattccgaagaagtggatgcagccgttttagctgctgccggattgatcaggctggagctggaagaccgaatcaatctggaactttcaacagagcagatgcttcccgctatcggccagggggttttggccttggaaaccagaaaaggtgatgatgcaaccctggaaaaactccgtttcatgaatgatgaaccaaccgaggcttgcatgattgcggaacggaaggtgcttgagacccttgagggaaactgtcaggtgccgctggcgggattctgcaagtttgatggaaataatctccatctccgtgctttgattgcccagccggatggaagcacaatcttccgcgccgaagaacgggccagacgggatgatgcagaagaacttggcaccagggtggccattcaattgcttcaacagggaggaggagcgttgctgcaaaatctttcagctatggaagaacgatgat

SEQ ID NO: 243837 - DNA, 840 bp, Unknown
  Bacterial polypeptide expressing nucleotide sequence isolated from the Sargasso Sea
acattaagccagcattggacaaagaagttatattaaagaccataaaaacatctggagatttatttgataaaaaaaaaatatcagaaatcggaggtaaaaatttattttgcaaagaaatagaagataaattaatttctaaagacatagatatcgcagtgcactctttaaaggatttggactcagtagaaacagatggtcttgttattcaagcatatttaaaaagaaatgatccacgggatactttagtttcctcaaaattcaaaaaattatctgaattaaatgggcagaaaattggatcaagttcaagaagaagggaacttcaattaaaacaattaaatagaaacatcaaagtggagagcattagaggaaatatagatactagaattaaaaagataaaaaacggagaatatgatggagccattttagctttagcaggtctaaaagtattaaatcttgaaaaatatgctaaagaaatattttcattaaaagattttctaccaacagcaggacaaggaatagttgcagttcaatgcagagctaaagatgatcatataaaaaaaattttaaaagaaataaatcataaagagaccgaaacatgtgcattggcagaaagaagttttttaaaaacattaggtggtgattgtgatactgcagttgggtgtactgcaattcttaataaaaaagatatagaattaaaagctcaactattctctgatgatggcactaaggtttttaacataacgaaaacaggaaaagaaaatgagccacaaatgttaggcaaacttgctggcgaagaaattcttaaacagtcaggaaaaaactttacaaaaaaaagatgaa

SEQ ID NO: 243838 - DNA, 670 bp, Unknown
  Bacterial polypeptide expressing nucleotide sequence isolated from the Sargasso Sea
tatgaataaaaaaattataattggatctagaggaagcaagttggcgatgctttatgctgaaaaagctaaagataaaatcatcaaaatcactgatttagatgatgacgatatagttataaaaaaaattaccactaaaggggacgagattaaggatgtaagactggcagaagttggaggaaaaggattattttcaaacaatatagaaaaggagcttcaggatgaaaatattgatattgctgttcacgcactcaaagatatgccagctcttgaaacaacaggtcttaaaacagagtcatttttagaaagaaatgatccaagagaaattcttataacaacgaacaaaaagaaattaagtgaattaaaaaaaaattctattattgggacctcatctttaagaagagaatatcaaattaagaaaattaggtctgatcttgaatgtaaacttataaggggaaatgttgatacgcgaatcaaaaaattaaaagatggagcgtatgatgcagtaatattatcttacgcaggaattaaattcttaaattttgagaatgagatatcagaaattttttctatagaacaattaatcccaagtgctggacaaggtataattgcccttcaatgtagagaagatgatgaggaaataatctcagtcttaaaaaaaattaatcataat

SEQ ID NO: 243839 - DNA, 364 bp, Unknown
  Bacterial polypeptide expressing nucleotide sequence isolated from the Sargasso Sea
atggtgggacatcttataaagttgggaacgcgggggtctcctctcgctttaattcaagccaaagaggtgcgggaaaagctgttggccgctcatgacgggcttcaggtcgaaattgttgaagtgtcgacaatcggcgatcggatccaggaccggacactcgcagcgattggcggaaaagggctcttcactaaggaaatcgaacaggcgttatacgacggtgatgtcgatgtggccgttcattccgcaaaggatatgctgacggagttcccgccaggattggtcctgggcccgatcttggcgcgcgaggatgttcgggatgtcttaatctcgaagagcgggaaggtttggaagacctcgaagctgg

SEQ ID NO: 243840 - DNA, 748 bp, Unknown
  Bacterial polypeptide expressing nucleotide sequence isolated from the Sargasso Sea
tatgaataaaaaaaaaataatcataggagcaagaggaagtaaattagctgttaaatatgcagaactcgctattagaaaaattaaaaaattttataatggaaaaattgaattaaaaaaaattgttacaaagggagataaaattttaaaccgcagaacttctgatattggtggcaagggagaatttgtgaaaaatattgaaaaggaattgattgccaaaaagattgatatagctgttcactcattaaaagatattccatataaagaaacaccaggcttgatcataaaaacttttcttaaaagaaattctccaagagaagtacttataagcagagacaatttatctctcgaaaagttaaaaaaaaattccattattggcacgtcttcttttagaagagaatttcaatttaaggcgatgaggccagacttaaaatttaaaattataagaggaaatattgatagtagaataaaaaaaatttacgaaaaaaaatatgatgcaattattttggccaaggcaggtttaaagagtttaaagatgacaagtttaattacacaagaatttgattgtgacaatatcattccgtccgcaggtcagggtataatttctctacaatcgagaaaaaatgataataaaattaataaacttttagaaaaagttaatgacaaaaatacaagaattagagcaaagaccgagagacaagttttaaaaattttaaaaggtgactgtagtacagcagttggtatttattca

SEQ ID NO: 243841 - DNA, 263 bp, Unknown
  Bacterial polypeptide expressing nucleotide sequence isolated from the Sargasso Sea
aatgaaattagataatatcgataaattaagaataggcacaagaagctctcctctggcaatagctcaaacaaatttggttatagataaactcgagtcagcttatccatcgattagaagtataatcgaaataaataaaataaaggtttcaggtgataaatataaaaatcgtccactacggaatgtaggagggaaaggattatttactaaagaaattgaccaggctgtgatagatggagaagttgatatagctgttcactctatga

SEQ ID NO: 243842 - DNA, 571 bp, Unknown
  Bacterial polypeptide expressing nucleotide sequence isolated from the Sargasso Sea
atgaagaaaattataattggagctagaggtagtaaattatcctccgcctacgtattaaaagttaaaaatttattacttcaaagccatagagatattgattttgagataagaataataaaaacctctggagatcttcatcaaaatatcaaaatttctgaaattggtggaaaaaatctattttgtaaagagattgaagaaaatttacttaataaaaatattgatattgctattcattctttaaaagacatggagtcgattgaaaacgaatatttaactataggcgcatacattaaaagaaacgatcctcgtgacattcttgtaagcaataaaattaaaaaattgagtgatcttaatagcaaagttactattggttcaagttcaagaagaagagaacttcaattaaaaaaaattaacaaaaatattaatatagaaaatataagaggaaatattgatacgagaataaaaaaaatagaagaaaaaaaatttgatgcaattattttagcagcagctggagtgaaaagcttaaacttagaaaataagattagcctaatttttgaaagcgaagagattt

SEQ ID NO: 243843 - DNA, 805 bp, Unknown
  Bacterial polypeptide expressing nucleotide sequence isolated from the Sargasso Sea
atgacagataagaaaaggtttataattgggtctcgtggaagtaagctttccttagcttactcataccatgttaagaatttattgataaaatctagctcacaatttgatgaaacttcagttgaaataaaaataataaaaacttcgggagatatatttcaaaataaaaagatatcggatattggaggcaaaggagtattttgcaaacaaatagaagaggaattattagattcaaaaataaatttagccgttcattctcttaaagatttacccactcaaatgaccgaaggattatgtgttaatgccgtagtaaaaagaaacgatccaagggacgcatttttaagttattcaagtaaatcttttaaagagctaaaaccgcaatcaaaaattggaactagctcttttagaagacatgcacaacttaatttattgagaaatgatctcgaaattatttcaatgagaggaaatatagatacaagaattacaaaattaaaaaacaaagaatacgatgctatagttttatctttggcaggaattcaaatgcttaatttaaatgatcaagttaaagaagtttttactattcaacaaatgttaccagctataggtcaaggtgtaatcgctttgcaatgtaaaaaggacgatcaaaaaactttaaatattttaaaagaaataaatgataaagagacgtattactgtatagaggcagaacgtgccttacttgaagcgattggtggagattgtgatacagccattggaggattagctcaattatcaaatgatataatatcactaaaaagtgaactttttt

SEQ ID NO: 243844 - DNA, 354 bp, Unknown
  Bacterial polypeptide expressing nucleotide sequence isolated from the Sargasso Sea
aatggcatataaaaaaaaattaataattgggtcccgcggaagtaggctttccttagcttattcagctcatgtaaaaaatttattattaaaatcaaatttacaacttgatgaaaattcaatcgaaataaaaataattaaaacttcaggagatatatttccaaataaaagaatatctgatattggtggaaaaggagtattttgtaaacagatagaagaagaattattggattcaaaaatagatttagctgttcattcactcaaggacttacctacacaaatgaccgaaggattatgcgttaatgcggtagtaaaaagaaatgacccaagagatgcattttttagtaattcaagcaa

SEQ ID NO: 243845 - DNA, 568 bp, Unknown
  Bacterial polypeptide expressing nucleotide sequence isolated from the Sargasso Sea
atgaaaaaaaaaattattataggaacaagaggaagcaaattggctttgatttatgctaaaattgctgaaaaaaatattaataaatttaaatcaagattttcaataaaatctgtaagtattaaaaaagttattacaaagggagacagaattcaaaataaaagactttctgatgttggtggaaaaggtttatttacaaaaaaaatagagaatgaacttttaaacaaaaaaatagatattgcggttcatgcactaaaagatattccatcaaaagtatctaaaaaattttatactaattgttttcttaaaagaaatgatccaagagaagttttaataactagaaaaaaacagaaatttaaaaatcttccaaaaaattctatagttggcacatcatcttttagaagagaatatcagcttaaaagaataaggaaagacttagtttataaattgataagaggaaatgttgatacaagaatcaaaaaattaaataataaaatttatgatgcaataattttatcatacgcaggtttaaaaagtaaaaaaatgcagaaaaaaatatcccaagtatttt

SEQ ID NO: 243846 - DNA, 351 bp, Unknown
  Bacterial polypeptide expressing nucleotide sequence isolated from the Sargasso Sea
aatgacagacaagaaaaaatttataatcgggtctcgaggaagcaagctatcattggcttactcaaaccatgtaaaggctttattggtaaaatctcattctcaatttgatgatagttcaatagagataaaaataataaaaacctctggggacatatttaaaaataaaagaatatcagaaattggaggtaaaggagtattttgtaaacaaatagaagaggaattgttagattcaaaaatagatctagctgtccattcattaaaagatttaccaacgcaaatgacagaaggattatgtgttaatgctgtagtaaaaagaaatgatcccagagatgcatttttaagttattcaag

SEQ ID NO: 243847 - DNA, 662 bp, Unknown
  Bacterial polypeptide expressing nucleotide sequence isolated from the Sargasso Sea
aatgacaatcaaaatagcctctaggtcttcaaaattagctttagctcaggttgaggaatttgttaatcattttcagatatcagattacaagataattaaagttaaaacagagggagataaaaaaagtgctagaggtgaaactctttttgacaaatcgcattttgtaactgatattcagaaatgtctacttaatgatgaggcagatattgcagttcattcagcaaaagacactcctgcaaaagaaacagaaggtatcaatagaactttcctaataagcaaaaccccaaaagatatattaattttaaaagaaaatattgattttaatcaagcaatgcgcttaggaacaagtagcttaagaagaaggctgcaagccaaacattatttaggttcttcaagtgtttttgatttatctggaaatattgataccaggttagaaaaactgtatagaggtgaatatgattgcataattttagcaaaagcagggcttcaaagattggatttattaaaagaactaaattatatggatatggaatggattactgcctcaggtcaaggtactttagccatagaatatccaaataataaaaatcttctaaatttagaagaaaatcttgataaaagtattgatgattcgataagagctcaaagatctgtcttagaaa

SEQ ID NO: 243848 - DNA, 640 bp, Unknown
  Bacterial polypeptide expressing nucleotide sequence isolated from the Sargasso Sea
gatgactactactattcgtcttgcgactcgaaaatctcgacttgcacttgagcaagctaacttagtaatagatgcattgaagagaattaatcaacaactttctatagagctagtgccaattgagactgaaggtgatattgatcgagaaactccactgactgttctgggtgggagaggtgtatttgtaaaagcagttgaacaagcgttattagatgatgttgctgatattgcagtgcactcgcttaaagatgtccctactgaagaagtttcaggtttaatatttccggctattacagagagagcagatcctagtgatgttcttgttgcaaacaataaatataaacttgctgagttaagtgcaggttgcaaaatcgggacgagttcgaggcgtcgtgcagtcttgttaagtgcgataagacctgatttagaagtagtcgatatcagaggtaatatagatacacgtatacaaaaagtacatgatggtgtggttgatgctgtcattctggctgcttctggaatagaacgattgggaatggacgatgaaattagtcagagatttgatcctcaagaatttatcccagcacctggtcaaggtgctcttgccgtgcaatgtcgcgataatgacaaagatataaaaagt

SEQ ID NO: 243849 - DNA, 726 bp, Unknown
  Bacterial polypeptide expressing nucleotide sequence isolated from the Sargasso Sea
gacattatggggggtaaaggtctctttaccaaagaaattgaagagcatattataatggatgaaattgacataggaatccactctatgaaagacgtcccagctgtctctaatcgaaacgccttggaaattatatgttggatgaaaagatttacaaacaatgacgttttgctcacaaactctggaaaaagtttttttgatctacctggtgggtccattataggaactagctcaattaggcgtcgtgcacaaattttaaacctcagaaaagatttgggaattaaattgttaagaggaaatgttgatacaaggataaagaaattaaaaaataatgagtatgatgcgatcatattaagtcatgctggtattcagagattaggtcttgaatctgaaataacagaaattttagatttagaaaattttttgccagcagcatgtcagggcgtaattggcattcaagcaaacataaaaagtgactataaaaacttattcaaggatataaatgatggcaccaccgagatagagtgcctttctgagagaagggttttgaaaaacataaacgcaaactgtaatagtcctgtctctgtttttgctcaagtacaagatgatcaattaaacataaaatcagaaatacatgatcactcagggaataaaatatttactgattgtacaattggatcaaagaattcatatcataatttggctgatagcatcgcagctcaaatttaa

SEQ ID NO: 243850 - DNA, 647 bp, Unknown
  Bacterial polypeptide expressing nucleotide sequence isolated from the Sargasso Sea
aatgacaaaaattacaattggagctagaggcagcaaactttcattagcctatgtggcaaaagttaaagagctattaataaaaaacaataatgatctcaaagaggaaaatattaattttaaagccataaaaacatcaggtgatttgaatttaaataagaacatctcagaaataggtggaaaaagtttattttgtaaagaaatcgaagaaagcttattaaaaaaagaaatagatattgctgtccattctctaaaagatatggaggctaatgagaatgagaaacttttaattggggcatatgtcaaacgcaatgattaccgagatgcaatagtcagtgaaaaaattaagagtctttctgatttaaaagatggtgtaaaaattggctcaagttcaaaaagaagagagcttcaattaaaaaaaattaataataaaatttctgtaataaatattcgaggaaatattgacactagaataaataaaatcaacgagaacaaattagacggaatcattcttgctgttgccggagttaaatcacttaaactcgataaaaaaatcagtttaacttttaattgtgaacaaattttaccagcagtgggacagggaataattgctgtacaatgtagaaaagaagatgaaattaaaaatttaa

SEQ ID NO: 243851 - DNA, 671 bp, Unknown
  Bacterial polypeptide expressing nucleotide sequence isolated from the Sargasso Sea
tatgaaaccaaaattaaagattgtatccagaagttcaaatttagcattgaaacaagttgaaattgtaaaagaaaaattgtcaaaattttttgacattgaaataataaagataaaaactaaagcagacaataacacacaaaaaccactttttgaaattggcgggaaaggtctttttgtaaaagagttagaaaaatacttgatagaaaaaaaggctgatgtagctattcattccttaaaagatgttgaaactacgctagcaaaaaatacatttctttgtgcagttacagctagagaaagtaaacatgatgttcttgtaggtgagtataagaacttatcgttacttccaagagatgcgataattggaacaagctctcctcgaaggacagcatttttaaaagcttacaggaaagattttcaaataaaaacatgtcgaggaaatattgaaacaaggatagaaaaattaaaaaaaggtgaatatgatgctttgattttggctgaagcggggttaaaaaggcttaacatagattgcaaaaatgtaatccctttggaaataatgccaccatctgcaggacaaggtgttatagccattcaatctcttgaatcatcagaaaaagaaaacacaaataaattgatttcttcaataaatgataaatcagtatattttgaaattt

SEQ ID NO: 243852 - DNA, 757 bp, Unknown
  Bacterial polypeptide expressing nucleotide sequence isolated from the Sargasso Sea
ataaatactacaggagataataagatagatataagattaagtgaattaggtggaaaaggtttgttttcaaaaaatattgaaaatgaacttttaaacaaaaatattgatttagctgtacatgctcttaaagatcttccatcttttgacactgaaggtttggtaacaaattgttttttaaaaagaaataattctaatgaggtgatgattagcaactctaataaaaagttgaacgatctagttcccggatctattgttggcacatcttcatttcgtagagaatttcaattaaaaagaattagaaaagatttaaactttaaactcattagagggaatgttgatacaagaataagaaaattaaaaagtggtgaatatgatgctataattcttgcaaaggcaggtttaagttctttaaatctagacaaagaaatcactcaagagttttccaataacgacttaataccaagtgctggacaaggaaccattgcagtacagtgtagaaaagatgatgtagagataatagaattactaaataaaattaaccatgaaaaaacaagtatttgtgtaaaagctgaaagagaagtacttaaagttttggatggggattgtgaaactgcagttggcgcaacatcaaaaattgttgatgataaaatatatttatcaggtgaattattttcaattgatggaagtagaagatatttttataaaactagtaaaaagttatcagattttcatatggccggtgaagaggtaggaaaaa

SEQ ID NO: 243853 - DNA, 931 bp, Unknown
  Bacterial polypeptide expressing nucleotide sequence isolated from the Sargasso Sea
gatagcaagttatcaaaagcacaaacaaaaattttcattgatcaggcaaaacaaatagagtcaataagtagcaattattcactagatattaagacaataaagaccactggggatattcacaacaatcacaggcttgatcaaatgggaggtaagggtctttttgttagagaaattgaggaacaacttataaaaaaagatattgatctggcggttcactcaatgaaagacctgccatcgcaagaatctaaaaataatctaaaaatagtttgttggctgcaaagacatggcaacgaggatgttcttatctcaaatttaggtaaaagcttttacgatttgccttcaggttcgattattggaacaagttcaattagacgtcgctcccaaattcttaacttaagaaaagatttatcaattaaattattaagaggcaatgtagatacaagaattaataaacttcagaataaagagtatgatgcaattatacttagtaaagcggggcttgatcgattaaatttatctcatctgatcacagaagttttagataaatcaatttttctacctgctgcaaatcaaggagctgttggcattcagtcaaatcaagacagttcttttaacgatcatttaagacatattaatcattcaaatacagaaactgagtgtcttgcagaaagaatgatattaaagctagttaatgccaactgtaacagtcctatctccgtatcagccagcgttgcgtctgatcaaataaaaatttcatgtgatttgtttgatcacgacggtgaaaaactttttcacaaaacaataaagtcaaaacaaaatgaatacgcagagttgagcaaggcaatagcagatgaaatattaagtactgtaggtcaaactaaaataaatacattggataagttagaaaatgattttaattacaaggccccat

SEQ ID NO: 243854 - DNA, 879 bp, Unknown
  Bacterial polypeptide expressing nucleotide sequence isolated from the Sargasso Sea
cattggcttatgctaaaaaggttaagaatttaattttagatttagatttaccaagtagaaaagaaataataatagagcctattaaaacctcaggagatttatttcaaaataaaaaaatatcagaaataggaggaaaaaatctattttgtaaagaaatcgaagaaaaactaattagcaagaaaatagacattgccgttcattctcttaaagatatggactctatcgaaaccaagggacttgttatccaagcatttattaaaagaaatgatcccagagaatcttttgtttcgaagaaatttaaaaaattatcagaattaaataatgccaaaataggttctagttctagaagaagggaacttcagttaaagttacttaataaaaatattaaagttgaaaacataaggggcaatgttgacacacgaattaggaaaattgaaaatggcgaatatgatggagcgatattagcagttgctggtttaaaaagtttaaatttggaaaattatattaaagaagaattttcattaaaagaatttttaccaacggctgggcagggaataatagcagctcaatgtagagaagataacatagaaattaaaagaatattaaaaaaaataaaccataataaaacagaaatatgtgctctggctgaaagaaattttttaaaggctataggcggtgattgtgatacagcagttggttgttcggcaattttaattggagataaaattgagcttaacgcacaacttttttctgatgatggaaagaaagtttttaatattaaaaaatatggacaagcaaatgaacctgagttaactggaaaattagcaggagaagaaattttgaaaaagtcagcaaataattttacaaaaaaaagatgaa

SEQ ID NO: 243855 - DNA, 498 bp, Unknown
  Bacterial polypeptide expressing nucleotide sequence isolated from the Sargasso Sea
actgtttggctcgcaaaatcccgtgacgactctcaaaattggtacccgacgcagtgatcttgccatgtggcaggcggtttttgtccgtgatgcgttactgggcgcgcatccagatcttgaagtcgagttggtggggattacgacagaaggtgaccgtacccttgatgtcccgcttgctgccaaagggggcaaaggtcttttcctgaaggaacttgagcaggcactcctggagcggcggattgatgtcgccgtccactcgatgaaagatgtcaccgtcattgagcccgaggggctgcatattccggtgatttgcgagcgcgaaaacccctgcgacgcactggtctctgctcatttttccaaacttgaggatctcccggcaggcgctgtggtgggcacgtgtagtttgaggcgccaggccatactccgtcaccgctttccggatcttcaggtcgaaaacttaaggggcaatgtgaatcgtcggttggcccgcctggatgc

SEQ ID NO: 243856 - DNA, 373 bp, Unknown
  Bacterial polypeptide expressing nucleotide sequence isolated from the Sargasso Sea
atgacactagaccaactgcgcatcgcctctcgccgaagccagctggccatggttcagacgaactgggtgcgagatgaactacaaaaagcacatcctgatcttgctatcactatcgaagcaatggctacgcagggtgacaaaatacttgatgtagctttagcaaaaataggagataaaggtcttttcactaaagagcttgaagctcaaatgcttctcggtcatgccgaaattgcagtccactcactcaaggatttacccacaaaccttccagagggactaattcttggctgcataacagaaagggaagatccttcagacgcgttagtcgttaatgagaaaaatcaaattcacaaactagagactctgccagaag

SEQ ID NO: 243857 - DNA, 616 bp, Unknown
  Bacterial polypeptide expressing nucleotide sequence isolated from the Sargasso Sea
gcctcgagaagacgtaagagactcgtttgtttccagaaagtataaatcgataaaagagcttccggtaggtgctaccgtaggtacatcttctttacgtcgtcgagcacaattgcttgctattagaccagatctaaaggttatagaatttagaggaaacgtacagacgaggctgaaaaagttagatcagggaattgcagatgctacttttttggcttgtgcaggtctttcccgtttgaatttgaagaaattaattaatcccatacctataagccaaatgctacccgctgtatcgcagggagcaattggaatagagcagaatttaaataatgacttgataagggaaatagtttcggtaataacggacaaaggctcagagacacaattggaagttgaaagagcttttcttttagagttagatggctcttgcagaactcccattggtggatacgctgaaattttaggagaagagatcacattccacggagaaatactaaaacctgatggtagtgaaacttacaagggtatttggaaaggtgaattgtccgatgcaaccgaattaggaaaaagcgccgcaaaagttttgaaggaaaaaggtggcacagcattttttgaataa

SEQ ID NO: 243858 - DNA, 340 bp, Unknown
  Bacterial polypeptide expressing nucleotide sequence isolated from the Sargasso Sea
aatgattaataaaattataattgggtccagaaaaagtaagctttcattagcttacacaaaaaaagtaaaagagctaatcgcaaaatcttgcaagttttctaagtctaaaatttattttaaaggaataaaaacatcaggcgacttattaagtaaaaaaaaaatttctcaaataggaggaaagaatttgttttgcagggaaatagaacaaaaacttttgaataaagaaattgatatagctgtccattcattaaaagatttggactcactagaaacaaagggacttgtaatacaggcttttataaaaagaaatgatcctagagatgcttttgtttctaaaaat

SEQ ID NO: 243859 - DNA, 332 bp, Unknown
  Bacterial polypeptide expressing nucleotide sequence isolated from the Sargasso Sea
catgcctaacgctttatcaataagcggcaaaataaatccttccttaacaatcgcaactagaggcagtaagctcgcactttggcaggcaaactgggtaaaggaaaaaattaatgaaatgtattctgaaattaaagttgaaattttaaccgtaacaactgaaggtgaccttaatcagcaacagcctcttgcagagattggagggaaaggactttttgtcaaagaccttgagaacgttttgcttgcaggcaaggctgatctagctgttcacagcatgaaagatgtgaccagtattttacctgaagggctggaaatttctgtaattgctgaaagag

SEQ ID NO: 243860 - DNA, 595 bp, Unknown
  Bacterial polypeptide expressing nucleotide sequence isolated from the Sargasso Sea
aatgactaacttaagaaaatgcatagtcggtatcagagatagcaagttatcaaaagctcaaaccaaccttcttatcaaagaagcagaaaaatttgatgttataaaaaaaaatattcaatttgaagttcaaactattaaaacatcgggtgatattcatagagatgaacgtctcgacacccttggtggaaaaggcctcttcacgaaagaaatcgagggcaaaattttagataaagcaattgatgtggggatccattcaatgaaggatgtgcctgcaagtgatgaaaatcctgaacttaaaattatttgctggatgagacgtcatgatccgtcagatgcttttatttcaaagtcaggaaaaaagcttgagcaattaccatcgggatcaattattggtacaagttcagtaaggcgaagagcgcaaattttaaacttcagacaagatttgcaaattaaattattaagaggcaatgtagatactcgtctaatgaaattaagtcacgggcaatatgatggtataatattaagtacagctggcctagagagaataggtcagggccatgtaataaccgaagttatggatcaaaaaacttttttg

SEQ ID NO: 243861 - DNA, 589 bp, Unknown
  Bacterial polypeptide expressing nucleotide sequence isolated from the Sargasso Sea
aatgaaaagtaataaaattattattggatctagaggaagcaaactagccttaatctatgcagaaagagcaaaagctgaaatattaaagatatgtgacgataaaaaagatgctgaaataaaatgtattacaacgaagggtgacacattattagataaaagattgtctgaatatggaggcaaaggtttattttgtaaaaaaattgaagaagaattattagaaaaaaaaatagatgtagctgtacatgcattgaaagatatgccttttcaagaaacagaaggtttaataacaaattgttttttaaaaagaaatgatccaagagaagtttttattagcaaagaaaataaaaaaattgaaaatcttaatacaaatgcaactgttggaacttcttctctaagaagagaatttcaattaaaaaaaataagaaatgaccttaattataaaatgataagaggaaacatagatactcgaattaaaaaattgaatgataatttatatgatgcaataattctttcatatgcaggaataaaatcattaaatttaaataaaaaaatttcacaaagtttttcaacatcacaaattattccaagc

SEQ ID NO: 243862 - DNA, 730 bp, Unknown
  Bacterial polypeptide expressing nucleotide sequence isolated from the Sargasso Sea
gtaaagaaattgaaagacaattattctgaaaaaaaaattgacattgcagtacattcattaaaagacatggactcttttgaggaaaatgatttaatgataggcgcttacttaaaaagaaacgatccgagagatgttatagttcttaaaaaaggtagatcactcgatagcgatcaactcacaattggttcaagctcaaaaagaagagagcttcaattcaaatcatgtttcaacaacataacattcaaaaatataaggggtaatgttgatagcagaatatccaaagtgaaaaaaggtgagtatgatggtgttattctagctttagctggtattcaaacattaaatcttgaagaagaaattaaagaaattttttcagagaaaaaaattattccttcagctggtcaaggagtgatagctgttcaatgcagaaaagacgactttgaaaatctaaaaattttggaaaaaattaatgatgaaaatgcaaaaatttgcgccctaacagaaagaagtttattaaagacgatcggaggggattgccatacagcagtaggggcatatgcaaaattagataaaaataatattactataatatcgaaattgttttcggacgatggtcttaaatcattttcgatacaacgaagtggagataaaaaatttccggagcagcttggaatttctgctggaaaagatttattgaaacaatctgagggtagctataaaaaaaaaagatgaa

SEQ ID NO: 243863 - DNA, 376 bp, Unknown
  Bacterial polypeptide expressing nucleotide sequence isolated from the Sargasso Sea
aatgaaaatagcaactagatcatctaaattggctttgaaacaggtggaaatatttacgaatcaacttaaagttttaggcctaaattttgaaataaaaaaacaacttactgaaggggataaaaaaagcaaacaaggtgagaatctttttgataaagcccactttgtagaggatcttgaaactagcttactaaattacgaagctgatgtagcaatacattctttgaaagatatgtcttgtcatgacacaaaaggactagaaatctatgctgcgatagaacatccatcaagatcagatgttttggtgtataaagatgaaattaatcctgatgatttaacaaacatcaaaattggaacttcaagcctcagaagaaaaaga

SEQ ID NO: 243864 - DNA, 655 bp, Unknown
  Bacterial polypeptide expressing nucleotide sequence isolated from the Sargasso Sea
atgaataatacaattactataggatcaagaggaagcaaactttcgttagcttatacaaacaaagttaaggatttgatgttaaatttacgtttagttaataaaaaagaaataaaaatagaaactattaaaacatcaggagatttatttcagaataaaagaatatctgaaattggaggaaaaaatttattttgtaaagaaatagaggataaattgataaaaaaagaaatagatatagcagtacattctttaaaagacatggactccgttgaaacaaaaggacttaccattcaggcttacatagagagaaatgatccaagggagtcttttgtatctaaaaaatttaaaaggctatcaggcctaaatctaaataatgccaaaataggatctagctcaagaagaagagagcttcaactaaagatattaaataaaaatattaaagtagagaatatcagaggaaatgttgatactagaattaagaaagttgagagtggtgagtatgatggagcagtcttagctttagctggtttaaaagtattaaatttagaaaattatgttaaagaaatttttcctttaaaagattttcttcctacagctggacaaggaatcatcgcagttcaatgtagagatgatgataatgaaattaaaaaaatttgaa

SEQ ID NO: 243865 - DNA, 400 bp, Unknown
  Bacterial polypeptide expressing nucleotide sequence isolated from the Sargasso Sea
actttctgatatgggaggaaaaggtttattttcaaaaaaaattgaggaacaattgatagaaaataatattgatttagcagtacatgccttaaaagacatcccatctttagagactaaagggttatctactgagtgttttttaaaacgtaatgatcctagggaagttttaattacaaaaaataataaaattttggaaaaacaaaaaaaaggagcaataatagggacctcttctttaagaagggaatttcaagttaagagaaaaattaataattttaattttaaactaataagaggaaacgtagatactagaattaaaaaacttaaggatggtttatatgatggaattattttatcgttcatcggattaaaatttttaggtttagaaaaaaatgtttctcaa

SEQ ID NO: 243866 - DNA, 703 bp, Unknown
  Bacterial polypeptide expressing nucleotide sequence isolated from the Sargasso Sea
atgaataaaaaaaaaatcatagttggtgcaagaggtagtaaattagctatcaaatatgctgagatagcaattaaaaatattaaaactatttttaacgggtcaattgaattaaaaaaaattactacaaaaggagatttggttcttgatcgcagaacttcagatattggtgggaagggtgaatttattaaaaatatagaacatgagttaataaataataaaattgatatagcggtccattctttaaaagatatcccctcagagaatacaaaaggacttgtgttgaaatcatttttaaaaagaaattaccctaatgaagttcttataagcaacggtaatttatcttttaaaaatttaaaaaaaaattcaatagtaggtacatcttctccaagaagagaatttcagattagacttaaaagacccgatttaataattaaacttatacgaggcaacatagacacaagaataagtatgttaagaaataaaaattatgatgcaattatattagctaaggcaggtatttcgtctttaaatttagaaaacttaatttctgaggaatttcattgtagagaaatagttccctcagccggacaaggcataattgccttacaagcgagggaaaaagattacaatatcttagaaattttagaaaaaatcaatcatcctaaaacagaaataatgggaaaatgtgaaagggaagtttaaa

SEQ ID NO: 243867 - DNA, 808 bp, Unknown
  Bacterial polypeptide expressing nucleotide sequence isolated from the Sargasso Sea
gttggcccgtaatattataatcggatctagagggagtgatcttgcattatggcaggccaattacgttaaagatcatttaaaaacaattggtttatcgtctactatcaaaatcattaaaacaaaaggagatcaaattcagcatttgagttttgataaaattgaaggaaaagggttttttactaaagaaattgaaaatgaactgcttagcaaagaaattgatttggcagttcattctttaaaagacttagaaacaaatcaaccacaaggtttgtgtattgcggctgttccacctagacaagatcctgcagattgtctgttgattcgctccaaaggttttgacctgaaacaggatttaaaattgaaagattccgctgtagttggcacctcatctgcaagaagaaaaaatcagttgttattttttagagaggatctccaattgaaagatttaaggggtaatgtgcccactcgtgttgacaaactaagaaaaggggaatatgatgccattgttttagccaaagctggcctaaatagattaaatatagaccttaaagaatttcatgtggttaatttattacctcatgtctttatccctgctccagctcagggtgcgctgggtttacaagtgagagatgaagatcaggttttaaaagaacagctcaaaaagcttaatgacaccaatacttccgatagtgttcattttgaacgagcaattctgaatcaattgggaggtggatgtcattctccttttggtgcctatagtgctttggataatgtagggaatcgtcatatttgggtgacttcttcccgg

SEQ ID NO: 243868 - DNA, 312 bp, Unknown
  Bacterial polypeptide expressing nucleotide sequence isolated from the Sargasso Sea
tatgggacaaacttccaaacctataattattggcacgcgcggcagtcaactggctttatggcaagctaggtatgtacaaaaccttttgaaagaaaaaggcttagatacagttttaaaaattacccatactaaaggtgaccgtatccaaaaccaacccctttgtgaaatcggaggaaagggtgtctttataagagaaattgagcactctcttctagactgcagtatcgatattggagtccatagcctaaaagatttacctactgatattccccaacaactagagctcgcggcatttttaccaagaggcccaca

SEQ ID NO: 243869 - DNA, 828 bp, Unknown
  Bacterial polypeptide expressing nucleotide sequence isolated from the Sargasso Sea
aatgacaaaaattacaattggagctcgaggcagtaaactttcattagcctatgtggctaaagttaaagaactattactgaaaaacaataatgatcttaaagaggaaaatattaattttaaagctataaaaacatcaggtgatttaaatctaaacaagaacatctcagaaataggtggaaaaaatttattttgtaaagaaattgaagaaagtttattaaagaaggaaatagatattgctgttcattctttaaaagatatggaggctaatgaaaacgagggtctactgataggagcatatttaaaaagaaacgattatcgagatgtaataattagtgaaaaaattaaaaatatttctgatttaagaaatggcgtaaaaatcggctcaagttcaaaaaggagagaacttcaattaaaaaaaataaataataatatttctgtaatcaatattcggggaaatattgatactagaattaataaaattaatgagaacaaattagatggagttattcttgcagctgctggagttaaatcacttaaactcgataaaaaaattagcctcacttttaattgtgagcacattttaccagcggtgggacaaggaataattgcagtacaatgtagaaaggaagataaaattaaaaatttaataaaaagaattaacgataatacaactaatctttgcgcaattgctgaaagaaaaatgcttcaaaccatcggaggtgattgcgatactgcaataggtgggttagccaaaattgaaaatcataatttaaaacttaaagctcagcttttttcagatagcggtcaagagagttttgaatatgaact

SEQ ID NO: 243870 - DNA, 709 bp, Unknown
  Bacterial polypeptide expressing nucleotide sequence isolated from the Sargasso Sea
ttattaaaaaaagaaatagatattgctgtacactctcttaaagatatggaggcaaatgaaaatgaaaatcttttgataggagcatatttaaaaagaaacgattaccgtgatgtaataattagtgaaaaaataaaaagtatttctgatttaaaagatggcataaaaattggctcaagttcaaaaaggagagagcttcaattaaaaaaaattaataaaaaaatttctataataaatattcgtggaaatattgataccagaataaataaaatcaatgagaacaaattagatggaatcattcttgcagctgccggagtaaaatcacttaaactcgataaaaaaattagcttaacttttgattgtgatcatattttaccagcggtgggacaaggaataattgcagtacaatgtagaaaggaagataaaattaaaaatttaataaaaagaattaacgataacacaactagtctttgcgcaatcgctgaaagaaaaatgcttcaaaccattggaggtgattgcgatactgcaataggtgggttagccgaaattgaaaaccaaaatttaaaacttaaagctcagcttttctcagatagcggtcaagagagttttgaatatgaacttacaggcagagaggttgacgcttcttttataggaaaaagtgttggggaaaaattattaaatctagctggagaaaaatttaaaaaaaaatgaa

SEQ ID NO: 243871 - DNA, 650 bp, Unknown
  Bacterial polypeptide expressing nucleotide sequence isolated from the Sargasso Sea
gtggagcaaccagatggattaacgctcggatgcttcttaccgcgcgaagatgtcagagatgcttttgtttcgtcagacttcaaaaatgttaacgatttgccaagtggctctaaagttggcacttcatcactaagacgcaaagctcaacttaagttttctcgaccagacctcgaagttgttgaatttaggggcaacgttcaaacacgtttgaagaaactaaaagacggtgtggcttcatgtacttttttagctatggcaggtttaaatcgtctaggattggaggaagtggcccaaagcgcaataaatccaaatgaaatgttaccagcaatagcacaaggcgcgattggaatagaatggcgagaagaagataaacaaataaccgatatacttaaaaaaatacaccacaaagaaacaggacaacgtttaaatgcggagagagcatttctggcagaattggacggttcttgccaaactccaattgccggcttggctacaattgaaggttcatcactgaaatttactggccaagttttgcgtactgatggatcagaatctatatctgaaactgcttcttgtaacattgaagacggggcagagttgggtcgggaaatggcgcagaagattttagcgaaagcgggcccaaaattctt

SEQ ID NO: 243872 - DNA, 771 bp, Unknown
  Bacterial polypeptide expressing nucleotide sequence isolated from the Sargasso Sea
taagaaaaatatcagaaattggaggaaaaaatttattttgcaaagaaatagaagataggctgattaaaaaagatatagatatagcagttcattctctaaaagatatggattcggttgaaacagaaggacttgtcattcaagcttacatacaacggaatgatccaagggagactttggtatccaaaaaattcaaaaaaatatctgaattaaataatgctaagattggatctagttcaagaagaagagagcttcaactaaagcttattaataaaaatattaaagttgtaaatatcagaggtaatgttgatacaagaattaagaaaatagaaagcggtgaatatgatggagccgttttagccatggcaggtctaaaagtattaaatttagaaaattatgttaaagagattttttctttaaaagactttcttccaacagctggacaaggaataatcgcagttcaatgtagagataatgacgaagaaattaagaatattcttaaaaaaattaatcataacgagacaaaaatttgtgctttagctgaaagaaattttttaaaaacattaggaggagactgtgatacagcagttggttgtcatgtaattttaaatagagatacattagaacttaatgctcaactattttcagatgacgggaaaaaagttttcaatgttaaaaaatcaggaaaagttaatgaacctaaacttctcgggaaactggcaggtgaggaaattttagaaaagtcttttaataatttctcaaaaaaaagatgaa

SEQ ID NO: 243873 - DNA, 874 bp, Unknown
  Bacterial polypeptide expressing nucleotide sequence isolated from the Sargasso Sea
gacgacgggcgacatggtcctcgacaaggcgctcaaggagctgggcggcaaggggctcttcaccaaggagctcgacgtgtcgctgctcaacggcgatgtggacgtgtgcgtgcactcgatgaaggacgtgccgacgtggctcgtccccggcacggtgctgccgtgcaacctgccccgcgaggacacgcgcgatgccttcatctcgcccaaggccggaagcccggaggagctgcccgacggctccgtgatcggcaccgcctcgctccgccgccaggcccagctgctcgcgatgaacccgaccttcacgtgcgtcaacttccgcggcaacgtgcagacgcggttgaaaaagctgggcgagggcatcgtcgacgcgacgctgctcgccagggccggcctcaagcgcatgcagctggaggagcacatcaccaaggtcctcgagttcgagactatgatccccgccgtcgcgcagggcgccatcggcatccagtgccgcgagggcgacgagaaggtgctggcgtacctcgacgcgctcaacgacccggacacgaagctggcggtcgactgcgagcgcgccttcctcgccgcgctcgacggcaactgccgcacgcccatcgccggccaggcgaagctcgtcgacggcgagttgcagttccaggggctgattgccaagcccgatggctcgatcatctacaagacgagccgcacgggggcacccgaggacgcggtgaagatggggaccgaggcgggcgaggagctcaaggccaagtgcggcgacgacgcgctcgccttctttggtgacgcggaggtgctgcccgagcccaagtcgtcgatcagcggtgtgaagagcgacgggctcggagggtacgagtctggc

SEQ ID NO: 243874 - DNA, 764 bp, Unknown
  Bacterial polypeptide expressing nucleotide sequence isolated from the Sargasso Sea
aaaaggactttttgtcaaagaacttgaatctgccttgcttgaggaaagggctgatctggctgtgcatagcatgaaagatgtgaccagtattttaccagaaggactagaaatttctgtaatcgctaaaagaagtgatcctcgggatgcttggatttgtccaaaatatggaagtattgaaaactttcccaaaggagcaactgttggtacaagttcattacgtagaactgcgttcataaaataccatcgacctgatattaacgtgcgcagtcttcgtggcaatgtgcatacgcggctagagaaactagataatggagaagttgatgcgattattttagctgtatctggacttaagcgtataaatctagaaaatcgtatcacggaaatatttccaataaaatggatgcttccagcaattggtcaggggacaattggaattgaaactaggaaaggtgatcatcatactatgagtttgctagagcacattaatgatcgggttactaatgaatgtttgctggcagagaggtctttgctcttagagctagagggaaattgccaaacccctatagcaggctattgtgtaaacaaaattgaggaattgtatttgatgtccgcactttgtgaccatgaaggtaaatcattgatagtttatgaagcaagagctcaaccgcatgatgcagtaagcctcggaaaagaatctgcagaatggcttcttaaaaatggtggcgatcaaattttactaaaatctcatgctgcattacaatgag

SEQ ID NO: 243875 - DNA, 719 bp, Unknown
  Bacterial polypeptide expressing nucleotide sequence isolated from the Sargasso Sea
aatgaaaagcaaaaaaattattattggctctagaggtagtaaattagcactaatatatgcaaaaaaagtaaaggaagagattttaaaaatctcatctgaatttggcattgcagatattataataaaagaaataaaaactgaaggtgataagatacaaaatattagattgtccgaggttggaggcaaaggattatttgcaaaaaaaatagaagaacaattattaaaaaaaaatatagatattgcggttcatgctcttaaagatatgcccactcaagaaactaaaggattattgactaattgttttttaaaaagaaatgatccaagagaaattttaattagcaaagaaaataaaaatattattgagttaaaacctaattcaatagttggcacatcttcgttaagaagagaatttcagttaaagaaaataagaaaagatttaaattataaactaataagaggaaatgttgatacaagaataaaaaaattaaatttaaaattatatgatgcaataattttatcttatgctggagtaaaatctctaggtttaaataaaaatattacacaagtattttcaacatctaaaataattccaagcgttggacaaggagttattgcagcacagtgtagaaaaaaagatatgaaaataataagtgttctagaaaaaataaatcataaaccaacacgtatttgtactcatgcagaaagaaattttcttaaaa

SEQ ID NO: 243876 - DNA, 469 bp, Unknown
  Bacterial polypeptide expressing nucleotide sequence isolated from the Sargasso Sea
atgaaagaaatcaccattgcgacacgcgagagtgccctggcactttggcaagcgaacttcatccgcgacagactgatcgaggcacacccaaacctcacggtacacctgctgggtatgaccacccaaggcgatcgttggctcaacgccccacttaaagaaattggcggcaagggcctgttcatcaaagagcttgaagttgccatgttggaaggacgcgctgacctcgccgtgcactcggttaaggacctgccagcacacctacctgaaggttttagtctgccccttattgggtatcgagacgatgttcgtgatgtgctccttggcgagcccgagggtgtggccgcgctgccgccaaatgcaagagtcggctcgtctagcccacgccgtcaggcgcaactgctggccatgcgcccagatctccgcgtcgacagcattcgaggcaatgtcaaaacacgcttgagcaaactgg

SEQ ID NO: 243877 - DNA, 916 bp, Unknown
  Bacterial polypeptide expressing nucleotide sequence isolated from the Sargasso Sea
atgaaattaaaaattagaattgcttcacgcaaatcaaagttagcactttgtcaggtagaaatacttaaaagttactttgatttaggtatagaaacggaaattttagaagttattacttctggagaccaaattttaaataaatccttatcagaaattgggggaaaaggtctttttataaaagaactagaaaaatttattttagacggttctgcggatattgcagttcattctatgaaagacatggaaactgagatagcccaaaatactgtaatatcagctgttcttccaagaggagacaggagcgatgtattgttgggcaaatactcatcattagatgatttgccttataatgcagtaattgggactagttctgttagaagagctgcttttactaaatcatatagacctgatgtagttataaaacttttaagaggaaatgtagaaactcgtattgaaaagctagaagatggactttttgatgcaatcatattagctaaggcgggtttagatcgattaaaaatcaatgttggtaaacaaatacctacagatataatgccacctgcggccacccaaggtgctattgcaatccaatcaactactaatagaaataataaatatgaaaaagatttaaataattatttattgaatattaatgacaatgaaacatattttgaaactttagcagagagaagtcttttaaaaactttagatggttcatgccggtctcctatttcggcaagtgcatatataatagaaaatgaccgtttaaaattatatggggcaattgctaggctagatggaactaagttagtcaaatcagaaattgtaggattaaaaaaagacgcagttctgttgggtaaaaatttaggaacagaaatgttaagtaaagcaaatggtgaaattatttataaataaa

SEQ ID NO: 243878 - DNA, 922 bp, Unknown
  Bacterial polypeptide expressing nucleotide sequence isolated from the Sargasso Sea
aatggacaacaaaattacaataggtgctagaggtagtaaactgtctttggcttatgccaataaagttaaaagcaatattcttagtcaagtaccgggaatcgacaaagaaattataattaaaacaattaaaacatcaggtgatttatttcagaataaaaaaatttctgaaattggtggaaaagatttattttgtaaagaaatagaagaaaaattaattaaaaaagaaattgatatagcagttcactctcttaaagatatggactcagaagaaactaaaggtctaactatccatgcttacttagaaagaaatgatgcgagagaaacatttgtttcgaaaagttttaataaaatatcagacataaaagaaggtaaaattggttcaagttctaaaagacgtgaacttcaaataaaacttttaaataaagacatcaaagttgaaagcattagaggtaacgtagatacaagaattgaaaaaatagaaaaaggagaatacgatggtgtgattctggcattagcaggtttaaaaacattaaatttaaaaaatcatattaaacaaatattttctctaaaagaatttattccaacggctgggcaagggattatcgctgtacaatgtagagaaaatgatgaggatactaaaaaaattttaaaaaagattaatcatattaatacagaaatatgtgcgttagctgaaagaagttttttaaaaacattaggaggagactgtgatacagcggttggttgctcagctgttcttaaaggaaataacattgatttagaagctcaacttttttcagatgatggtaaagaagtatacaatgtaattaaatctggaaaatcaactgatcctcaaagtctaggcaaagtagcaggtgaggaaattttaaaaaaagctggaaaaaattttattaaaaaaagatga

SEQ ID NO: 243879 - DNA, 922 bp, Unknown
  Bacterial polypeptide expressing nucleotide sequence isolated from the Sargasso Sea
atgcttaataaaattattataggctcaagaggcagcaaactttcactggcttatgccaataaagttaaaggtctcatattaggagttaataaaagtttagatcaaaatattgaaattcaagcaataaaaacttcaggtgatattttccaaaacaaaaaaatttctgaaataggtggaaaaaatttattttgtaaagaaatagagaataaattaattaataagcaaatagatattgctgtgcattcactaaaagatatggactcaattgaaacaaatggattaatcattcaagcgtatatcgaaagaaatgacccaagggagtcttttgtttcaaaaaaatttaagaaactatctgatataaatgatgggaaaataggttcgagctcaagacggagagagcttcaattaagaatgttaaacaaaaatattaaaatagaaaatattaggggcaatgtagatacaagaattaaaaaagttgaaattggcgagttcgatggtgtaattctagctttagctggtctaaaaactttaaaactagaacatcatgtaaaagaaacctttcccgttaaggattttataccaactgctggacaaggtataatagctgttcaatgtcgaaaaggagatgaaaaaataaaagaaattttaaaaaaaattaatcatagagaaacagaactctgcgctatagctgaaagaagttttttaagaacgttaggaggtgattgtgatacagctgttggatgttctgcaattttaaacaaaggtaatatcgaacttagtgctcaacttttttcagatgatggagaaggggttttcaatgtcaaaaaattaggagaatcaaaacaaccacaactattgggacaattagctggtgaagagattttaaaacaatcaggggataattttacaaaaaaaagatgaa

SEQ ID NO: 243880 - DNA, 882 bp, Unknown
  Bacterial polypeptide expressing nucleotide sequence isolated from the Sargasso Sea
tttcactagcttatgctggcaaagttaaggacttaattttacagtttcataccaccaatgaagataaaatagtaatcgaaaccattaaaacgtcaggtgacttatttcagaataaaaatatatctgaaattgggggaaaaaatttattttgcaaggagatcgaagataaactgatcaaaaaagaaatcgatattgcagttcactccttgaaagatatggactcaattgaaactaatggactaataattcaagcctatataaagcgtaacgatccaagagagtcctttgtttcaaaaaaatttgaaaaattatcagatttaaacaatggtaaaattggatcaagttccagaagaagagagctacaattaaaattaatgaataataatttaaaaattaaaactattagaggaaatgttgatacaagaattagtaaaattgaaaagggtgaatacgatggagcaatattagctttagctggtttaaaaacattaaatttagaaaattatgctaaacaagtattttcagtagaagattttataccaacagcgggccaaggaataattgctgcacaatgtagggataatgatgaaagaattaaaaatattttaaaaaaaataaatcattatgaaaccgaaatatgcgctttagcagaaagaaactttttaaaaactatcggtggagactgtgatacagcagtagggtgtactgcaaatctaaataaaaataaaattgaccttaaagcacaacttttttctgacgatggtaaaaaagtttttaatgttataaaatcagggaaatctaatgaaccagaattattaggaaaattagctggtgaagaaattttaaaaaaatctgccaaaagttttacaaaaaaaagatgaa

SEQ ID NO: 243881 - DNA, 826 bp, Unknown
  Bacterial polypeptide expressing nucleotide sequence isolated from the Sargasso Sea
tttataataaaagaaattattataaaagatataaataccacaggagataataagattgatataagattaagtgaattaggtggaaaaggtttgttttcaaaaaatattgaaaatgaacttttaaacaaaaatattgatttagctgtacatgctcttaaagatcttccttcttttgataccgaaggtttggtaacaaattgttttttaaaaagaaataattctaatgaggtgatgattagcaactctaataaaaagttgaataatctagttcccggatctattgttggcacatcctcatttcgtagagaatttcaattaaaaagaattagaaaagatttaaactttaaactcattagaggtaatgttgatacaagaataagaaaattaaaaaatggtgaatatgatgctataattcttgcaaaggcaggcttaagttctttaaatctagacaatgaaatcactcaagagttttccaataacgacttaataccaagtgctggacaaggaaccattgcagtacagtgtagaaaagatgatgtagatataatagaattattaaataaaattaatcatgaaaaaacaagtatttgtgtaaaagctgaaagagaagtacttaaagttttggatggggattgtgaaactgcagttggcgtaacatcaaaaattgttgatgataaaatatatttatcaggtgaattattttcaattgatggaagtagaagatatttttatgaaactagtaaaaagttgtcagatttttatatggtcggcgaagaggtaggaaaaaaacttaaagaagaatctcaagggaattataaaaaataaa

SEQ ID NO: 243882 - DNA, 940 bp, Unknown
  Bacterial polypeptide expressing nucleotide sequence isolated from the Sargasso Sea
ttgattgtgactgaccgttctgatcgagtaattaagattgctactaggaacagtagacttgcgactttccaggcgacggttgtaaaagaggaacttgaatctctattcccaaattacaaatttgaattgaattatgttagatctgaagtaggagatctcaataaagacaaaccattggctgacttaggattgggggtatttgttcgaagcatagaacagtcactgttagcatctgaatcagatatagctgtccatagcttaaaagacgttcccactatattgactgagggattggaaatagtagcatttttggaaagggaagatgctagagatgttaatgtttctagagacaatatttgcttaaaagaactacccattggggcaagaattgggactagtagcccacgcagagcggttcagattctgaatatgagatcagatttacagatagttcccatccgaggtaatgtgcctacaagagtatctaaaatagaaacgttagaatgcgatgctgtagtgttagcagctgcgggtttaaagaggttgcagttagataatcacatatcagaatatttaaatatagatgattttgttcctgctccaggtcagggcatcataggagtccagataagatctgatgatcaagagctatttcctatagtaagagcattgaataatgttgaatcagaggtctgttcaaaatctgaacgcaaattcttggagttattaggtagtggttgtcaaatgcctgttggggctcacgcaagaattatcaaaggtgagctgcatatgattagtagtattggggatctgaatttgaacaaatgttatgtttctagagtggttgggcaattagaaaagcctgagaatttagcagaggaaacaaagtatgattttgagtcaagggaagctaaatatctaatagaaagatatacttaat

SEQ ID NO: 243883 - DNA, 730 bp, Unknown
  Bacterial polypeptide expressing nucleotide sequence isolated from the Sargasso Sea
aatggacaacaaaattactataggtgccaggggcagcaaactatctttggcttatgccaataaagttaaaagcaatattttaagtcaagtacaaggaattgataaagaaattataattaaaaaaattaaaacatcaggtgatttatttcagaataaaaaaatttctgaaattggtggaaaagatttgttttgtaaagaaatagaagaaaaattaattaaaaaagaaattgatatagcagtccactctcttaaagatatggactcagaagaaactaaaggtctaactattcatgcctacttagaaagaaatgatgcgagagaaacattcgtttcaaaaagttttaataaaatatcagacataaaagaaggtaaaattggttcaagttctaagagacgtgaacttcaaataaaacttttaaataaagacatcaaagttgaaagcattagaggtaacgtagatacaagaattgaaaaaatagaaagaggagaatatgatggtgcaattttagctttagcaggtttagaaacattaaatttagaaaatcatattaaacaaattttttctctaaaagaatttattccaactgctgggcaagggattattgctgtgcaatgtagggagaatgacgagtatattaaaaaaattttaaaaaagataaatcatgttaataccgaaatatgtgcgttagctgaaagaagttttttaaaaacattagggggagactgtgac

SEQ ID NO: 243884 - DNA, 792 bp, Unknown
  Bacterial polypeptide expressing nucleotide sequence isolated from the Sargasso Sea
gatggtgcgagtgggaactcgtggaagccagctcgctcgaactcaaacaggtcatgtcatagatcaactgcggagttttggctttgaagtacaagaagtcatcatctcgactcgtggggatcagcaacagactgtcccaattgcacagattgggaatgatggcgtctttgtccgtgagcttgaaaaagcactcctcgaagaacgcattgatctagcggttcatagtctgaaagacctgccaacggcaatgacgccgggtcttgaatttgcctgtactccaccaagggcgacaccatttgatgttttggtgagtcgggatggcgtcgggcttcgtgatctgccagcggacgcgcgtgttggtacagcaagtattcggcgacgaattcagattcgggctgtccgcccggacctccagattgttgctatcagaggcaacgttgattcacgtctgaagcgagttgacgagagggagcttgatgcggtcgttctcgcagcggcaggcctcgaacgacttggccgcgcggactgcataacagaagtactccagccaccagatttttggccggcagtggctcagggagccttggtaatacagatcaaggaggcgaatcaacgggttcaagaaattcttgaaccgatacatcatcctgcaacgtacctgtcaaccgtttcagagcgtgcgcttctggcgtctctcgctgggggatgtctcgcgccaattgggagttggggaaagattgaagcagacggcgaactaagcttgggagggtgtgtaatgtctgatgccggaag

SEQ ID NO: 243885 - DNA, 1042 bp, Unknown
  Bacterial polypeptide expressing nucleotide sequence isolated from the Sargasso Sea
gatgacgcgtggaagtaaggtgaagacgagtacgacggtggcgagagcgggcgcgcggtcccgcgcggtcgtgcgcgcggctgtggatgcgccgatcgtgaagattggaacccgagggtcgccgctcgcgctcgcgcaggcgtacatgacgcgcgatttgctcaaggagaacttcccggaactggcggaggagggtgcgcttgagatttgcatcattaagacgaccggtgataaggttttggaccagccgttggcggatatcggtggaaagggtttgttcacgcgcgagttggacgacgctttgctcgacggacgcatcgacatcgccgtgcactcgatgaaggatgtgccgacgtacttgccggaagggatggtgttgccgtgcatgttgccgcgtgaagacgttagagatgctttcttgtgcttgaagtacgactccttgtccgatttgccggagggcgccgtcgtcggcacggcgtctcttcgccgccagtctcagcttctttacaagttcccgaccttgaagtgcgtcaactttagaggtaacgtgcagtcgcgcattcgcaagctcaaggaagaagtcgttgactgcaccttgctcgccatcgcgggcttgaagcgcatggatatggctgagcacgccaaggtggtcatcccgacggatgaaatgttgccggctgtcgcccaaggcgccatcggtattacgtgcagaactggtgacgacaagcaacttgaattcctcgccaagctcaaccacgaagaaacccgcatggctgtcgaaggtgagcgcgccttcttggccgccctcgacggttcttgccgcaccccgatcgccgcgcactgccacaacgtcgacggcaagatgcagttccgcggtttgatcgcctccctcgacggcaagcaagtccttgaaaccactcgcgagggtgcctgggacgcgcaatcgttgttggatgccggtaaggatgcgggtgcggagctcaagggccaggctccggcggacttcttcgccaacttgatcgagaacggcggcggctggtaa

SEQ ID NO: 243886 - DNA, 709 bp, Unknown
  Bacterial polypeptide expressing nucleotide sequence isolated from the Sargasso Sea
ttaattgaaaaaaaaattgacattgccgttcatgctctaaaagatatgccatcttttgaaacaaaaggtttatatactggatgcttcttgaagagaaattactcaaatgaaattttgataagtaaaaataatatcaaatttgataaacttaaacctaaatcaatagttggaacctcttcacttagaagagaatatcaactcaaaagaaaaagaaatgatttgatatttaaactcataagaggaaacgttgataccagaattaaaaaattaaaagaaggtacatatgatgcaataattttgtccaaagcaggaattgattgtttaaaattaaatgaccaaatttctgaagaatttttagataacgatattattccaagtgccgggcaaggaataattgctattcaatgtcgacaagaagattctgaaatgattgatttattaaaaaaaataaatgatgaaaaaactaaaatgtctgctttggcagaaaaagaagtactcaaaacacttgatggtgattgtgatacagctattggagtttcatcagttattaaagataaaacaataaccatagaagcagaactattttcaattgacggaaaaaaaagatattatattaaatccgaaaaagaattaaaattagcatctgagcttggaaaagaaatgggaaaaatattaaaagaaagatctaaaggttcatataaaaattagc

SEQ ID NO: 243887 - DNA, 877 bp, Unknown
  Bacterial polypeptide expressing nucleotide sequence isolated from the Sargasso Sea
aatgacaattaaaatagcctctagatcttcaaagttagcgcttgcccaagttgaagaatttgtgaaaaaatttggtatatctgattacaaaataattaaagtcaaaactgaaggagatatcaaaagtgctaacggtgaaactttatttgataaggcacactttgtttctgatgttcaaaaatgtcttttaaatggtgaagctgatattgctgttcattcagccaaggatactcctgcaggagagacaactggtttactgaggtacttcttgccaagtcagtccaatgaagatgtattaatattcagagaagaatataaatttaatagtgaaatgaaattaggtacaagtagtcttagaaggcagctacaagctaaacatcatttgaatgcaaaaaatattgttaatttatcagggaatgttgatacaagattagaaaaactatcccaaggagaatatgactgcataatacttgctaaagccggattagctagattaaagcttttagataaattgcaatatgaagtaatggattggtcaacagcatctggacaaggatttttgtgcattgagatattaaatgatccgtctgtcgatatttataattttctattgaaatctattcgtgaaattgacttaaatcttggaaaaaatatttctactgaaagaagcattttagaagcaattaatgcaggttgtaattctgcaatctcaattcagactcaatctaatcttgagtcagagaactcacaattaattcatttaggtaagatttatggtgttgagaaatatatatctttttcaggaactaccgcagaaaaaactattaatgacattaaaaatcaagatgggctgaaacttttaaatgaacataattga

SEQ ID NO: 243888 - DNA, 477 bp, Unknown
  Bacterial polypeptide expressing nucleotide sequence isolated from the Sargasso Sea
aatggcagataaaaaaaaatttataattggatcacgtggaagtaagctttctttggcctactcgagccatgttaagaatttattgataaaatctaactctcaatttaatgatgattccattgatataaaagtaataaaaacttctggagatatatttcaaaataaaagaatatcagacattggaggcaaaggagtattttgtaaacaaatagaagaagaattattggattcaaaaatagatttagccgttcattccttaaaagacttacctacacaaatgacccaagggctatgtgtcaatgctgtagtgaaaagaaatgatccaagagatgcatttataagttattcgagcaaaacttttaaagaacttaaaccacaatcaaaaataggaaccagttcttttagaagacatgcgcaactaaatttattaagaaatgatcttgaaattgtagcaatgaggggaaatattgatacaag

SEQ ID NO: 243889 - DNA, 703 bp, Unknown
  Bacterial polypeptide expressing nucleotide sequence isolated from the Sargasso Sea
atgaataacaaaattactattggttcaagaggcagcaaactttcattagcctatgctaataaagttaagaatttgatctctaggctaagtgaagcttcagggtcagaacttgaaataaagacaatcaaaacttctggagatctctttcaaaataaaaagatatcagaaattggaggaaaaaatttattctgcaaagaaattgaagaaaagttgatcaataaagagatagatattgctgttcactctttaaaagatatggactcagctgaaactaacggtcttgttatacaagcctttattgagaggaatgatcccagagagtcttttgtttcaaaaaaatttaataaattatctgaattaaataatgctaagataggctctagctcaaggaggagagaacttcagcttaaattgttaaataaaaatatttctgtaaagaatattagaggcaatgttgatacaagaattcagaaggttgagaatggcgaatatgatggagttatattagctgtagcaggactgaaaacgttaaaattagaaaattatgtaaaagaaattttttcaataaaagaatttataccaactgctggtcagggaataatcgcagttcagtgtagaaaagatgatgaagatataaaaaaaattttaaaacaattaaaccattatgaaacccaattatgtgcactggcagagagaaattttt

SEQ ID NO: 243890 - DNA, 1531 bp, Unknown
  Bacterial polypeptide expressing nucleotide sequence isolated from the Sargasso Sea
atgattaaaattatttctagaaaaagcgatttagcagttattcaggctgaattagttgctgaagctttaaaaaaggcagatagaaatatttctatatcttttgttaaaaaagaaacagaaggtgatatagatcaactaacatcattaagtaaattatctaatattggtgtttttacaaatgatattagagaatcgcttttaaatagtgaggctgatatcgctgttcattctcttaaagatttgccaatcgacgaccaaaatgatacgtcaattgtttccatattagaaagagctgattcgagagatattttatttcttaaaaaaaataaccttgataattataataataaagaattaaaaattcttacatcttcaccaagaagggtttacaatttttcaaatttcttaaaatctttgcttccttttaatccaagtgaaataacttttgaggatattaggggtaatatacctacaagactaaaaaagttattgaatggaaactgccaaggtttaattgttgccaaagcagcaattgacagattaatctcttgtgaaaataaaagtatttcaaatgaaatatctacattgattgaaaattttttttggatggttattccgctgtctttaaatccatgtgcgcctggtcagggagcaattgcaatagaggtaaattcaaaaagagaagatattattgagttgattaaaaaaattaatcacaatgagacatattctcaagttgctgaagagagaggaattcttcaaaattatggcgggggttgtcatcaaaaaattggagtaagtattgaagataaattttttggaaagattcttactattaaaggtcagactgaggaaggcttaaaaattgaaaggcgagaaattatagataataagaataattggaaaaatattcctgaaaataatttctttccatcgaatatagaaaagtacaaattatttgagagaaaaataataaataaaaatttaattaaaattaataaattaaaaaatactaacatatatgtaagtcgagaaaatgctttaccagaagatataagtattgagtctacaaatgtgatatggactagtgggatcaaaacatggaaaaaattggcaaaaaaaggttattgggtgaatggttcctcagatagcttaggagaagaaaatccaaaaattaattatctatccaaaaataaaaaatgggttaagttgacacataatttaactcctaaaaattatttcaaatctcatagcagccctaaaaatgctcgtattatttccacctatgaactaaagccagttgaaatacttgaagatttaaataacaaaagccatttttactggatgagtggatcagcgttcaagttagttttaaaaaattatcctgaaataataaatgccaatcatgcttgtggaccaggaaatacatttaattatattagtaagtatgtagataaaaataatataaatattttcctttcatacgaagatgctctaaatactttaatgagatctggtgataaaaaatgaa

SEQ ID NO: 243891 - DNA, 913 bp, Unknown
  Bacterial polypeptide expressing nucleotide sequence isolated from the Sargasso Sea
atgaaaataagaatagcaaccagattgtctcctctcgcaatgcttcaaactaaagaagtgattaaaaaaatacaacatcatcatccgacatgtgcttgtgaagttattaaagtagagtctgatggagatttaactgatacacctttgcatatgattggaggtaaggggttgtttatttctaagcttgagcaagctttacataatgacattgcagatattgcggtacacagtttaaaagatgtgcctgcatcccttgataaaaaatttactattgcagcaacacttccgcgagaagaagtggaagatgttttgctattaagagataaattaaatataagtgatttatcaaaaaagctaaaaattgctacctcagggcctagaagaaaagcgcaattgcttggaataaactcaggtttcaacatagtgccaataagaggaaatattcaaacaagaattgataaaatgactacagaaaatttagatggtttgatagttgcaaaagctgctctgaataggttaaaaatttcacatccaaatatttatatattttcgcaagaagaaatgctgcctgcggctgctcaaggagcaattggtatcgaagttattgaagaaaatctcgaagctgaaacaaataatttacttcaatcaataaacgataatttaacttttcaagccacagaaattgaaagaactgttgttgcagctcttcagggtaattgtttatcaccaatttctgcgctttgtaaaattagtgatcaagatgttgaactaaaagtaagggtctcgaatcaaaaaggatctgaagtttatgatcagaaagaaatatttaaattggacaataaaattgaagctttagaaggtttcattgaaaaacttataagcaatggcgcaaaaacactaattcaaaaataaa

SEQ ID NO: 243892 - DNA, 619 bp, Unknown
  Bacterial polypeptide expressing nucleotide sequence isolated from the Sargasso Sea
atgacaattagaatagcctctagatcttcaaagttagcgcttgcccaagttgatgaatttgtgaagaaatttgatatatctgattacaaaataattaaagtccaaacagaaggagatatcaaaagcgctaagggtgaaactttatttgataaagcacactttgtttctgatgttcaaaaatgtcttttaaatggtgaagctgatattgctgttcattcagccaaggatactcctgcaggagagacaaccggtttactgaggtacttcttgccaagtcagtcaaatgaagatgtattaatattcagagaagaagataaatttaatagggaaatgaaattgggtacaagtagtcttagaagacaactacaagctaaacatcatttgaatgctatgaatattgttaatttatcagggaatgttgatacaagattggagaaactatcccaaggagaatatgactgcataatacttgctaaagctggcttagctagattaaagctcttagatgaattgcaatatgaagtaatggattggtcaacagcatctggacaaggatttttgtgcattgaggtattaaatgatccgtctgccgatatttataattttctattgcaatctt

SEQ ID NO: 243893 - DNA, 1531 bp, Unknown
  Bacterial polypeptide expressing nucleotide sequence isolated from the Sargasso Sea
aatgattaaaattatctccagaaaaagcgacttagctgttattcaggctgagattgtggctaatgctttaaagcaggctgataaagatatttctgtatcttttattaaaaaagaaactgagggagatattgatcaattaacttcattaagtaagttatcaaatattggtgtatttactaatgatattagagactcacttttaaataatgaggctgatttagcagttcattctcttaaagatctcccaattgaagatcaaaaagataccttaattgtttctatgttagagcgagctgactcaagagatattttattcctaaaaaaagatatatttgaaaattacaataataaagaattaaggattcttacttcatcacctagaagagtttacaatttttcaaatttcttagaatctttaattccttttaacccaagtaatataacctttgaggatgttcgaggtaatattcctacaagactagaaaaattattgaatggagactgccaagggttaatcgttgctaaagctgcgattgacagattaatctcatatggaaataaaaatatttcagctaaaatacaatcataccttgatgatttactctggatgattattcccttatctttaaatccatgtgctcccggtcaaggagcaattgctatagaggtaaattcaaaaagaaaagatattattaagttagttaataaaattaatcacaatgagacattttcccaagttgcaaaagagagagagattcttcaaaattatggaggaggttgtcaccaaaaaattggcgtaagtattgagtctaaattttttggacaaattcttactataaaaggtcaaacagaagaaggattagaaattgaaaaaagagaggttgtaaatcaaaccactgattggaaaaacattccggaatcaaattttttcccgtcaaacttaaataaatataaattgtttgaaagaaaattaattaataaaaatctaaaaaaaattaataaacttaagaatacaaatatttatgttagtagagaaaatgctttgccaaaaaatcagaatattgaattaacgaatgtggtctggacaagtggaattaaaacatggaaaaaattagctgaaaagggttattgggtaaacggttcttcggatagcctaggagaagacgatccagaaattaaatgtttatcaaaaaataagaagtgggttaagttaactcataatatgacgcaaaagaattatttcaaatcacataaagacccacaaaatgctcgtattatccccacctatgaattaaaaccagttaatatgaatgaagatttaaatgaaaagacccatttttattggatgagtggctcagcttttaaattggccttaaaaaattatcctaaaataataaatgccaatcattcttgtggacctggaaatactcttaagactattaaaaagtatataaacaaaaataatataaatgttttcctttcatatgaagatgctctaaaaaatataacaagacctggcgataaaaaatga

SEQ ID NO: 243894 - DNA, 351 bp, Unknown
  Bacterial polypeptide expressing nucleotide sequence isolated from the Sargasso Sea
cagaaatcggaggtaaaaatttattttgcaaagaaatagaggataaattaatttctaaagagatagacatcgcagtgcattctttaaaggatttggactcagtagaaacagatggtcttgttattcaagcatatttaaaaagaaatgatccacgggatactttagtttcctcaaaattcaaaaaattatctgaatttaatgggcagaaaattggatcaagctcaagaagaagggaacttcaattaaaacaattaaatagaaatattaaagtggagagcattagaggaaatatagatactagaattaaaaagatagaaaacggagaatatgatggagccattttagcttagc

SEQ ID NO: 243895 - DNA, 907 bp, Unknown
  Bacterial polypeptide expressing nucleotide sequence isolated from the Sargasso Sea
tatgacaattaaaatagcctcaagatcttcaaaattagcactagctcaagttgatgcattcgttacacaattttcaatatctgattatgaaataatcaaaattaaaaccgaaggtgataaaaaaagtgctcaaggagaaactttatttgataaagcgcatttcgtatctgatgttcagaaatgtatattaaatggtgaggctgatattgctgttcattcggcaaaagacactccagcaaaagaattagatagtttgataaggtacttcctaccaagtaagtcatgtgaagatgttttaatttttagagaagaagttaaatttaatgacgaaatgaaattaggtacaagtagccttcgaagacaaatgcaagctaagcatcatctaaatgcaaaaaatattgtcaatttgtcagggaatgttgatacaaggcttgaaaaattatatcgaggagaatatgactgcataattttagctaaggctggtctggaaagattgggcatgctagatgaattacaatatgaagaaatgacttggccaactgcttcaggtcagggatttttatgtattgaacatttaaatgacttatctactgacattgatcatttcttattacgttctttgtatatacatcatgttgttgatgggagacttatttcaatcgaaagggaaattttagaaacactgaatgctggttgtaactctgctatctcaatacaaactgatattcatccagaaacatataataagccccctagtaaaattaagccgggtgaaccagattttattcattctggtgtaatttacggtaaagaaaaatatatatctttttcaggtacaaccatagaagaaactattaatgatattaaaaaacaagacggaattaagcttttaaatgaacataattga

SEQ ID NO: 243896 - DNA, 907 bp, Unknown
  Bacterial polypeptide expressing nucleotide sequence isolated from the Sargasso Sea
atgaaaaaaataactattgggtctagaggaagcaaattagcattgatttatgcagaacgtgttaaaaaagagattcaaaaattttataaagatcacattgaaataaaaacaatcgttacgtctggagataaaaatcaaaaagatcggttgtccgatttaggtggaaaaggattgttttcaaaaaatattgagatcgagcttttagaaaataaaattgatttagcggtacatgctttaaaagatatgccttcacttgaaacaaaaggacttcttactgattgttttttaaaaagaaatgatccaaatgaaattctaataagtaaaaataatattaaatttaataaattaaaatctagttctgtagtaggaacttcatcttttagaagagagtttcaattaaaaaataaaagagcagatttaaattttaaacttataagaggaaatgttgatacaagaataaaaaaacttaacgaaggtaaatatgatgcaataattttatctaaagcaggaataaaatctctggacttaatggattatataacagaagaattttcaacggaagatataatcccaagtgttggacaaggagctatagctattcaatgtagatcaagtgataatgatatgattaaatttttaaaaaaaattaatcacatggaaacccatatttgtgtaacagctgagagagaagtgttaaaaattcttgaaggagattgtgaaacagctgtcggggccatttcaaaaatagaaggaaataatatttatatctctgctgaacttttttctattgatggaaaagaaagatactattttaagtcttcaaaaaatattaatctttcaaaagatttaggaaaagaagtgggtaagattttaaaagaacaatcaaagggatcatataaaaaataat

SEQ ID NO: 243897 - DNA, 324 bp, Unknown
  Bacterial polypeptide expressing nucleotide sequence isolated from the Sargasso Sea
catgcctaacgctttattcaaaagcggtaacaaaaatcccaccttaacaatcgcaactagaggcagtactcttgcgctttggcaggcgaattgggtaaaggaaaaaattcttcaaaggcataacaaaattaaagtagaattattaaccgtaaaaacactaggagaccttaatcagggacaacctttgtcagagattgggggaaaagggctttttgttaaagacctagaacaaactttgctatacggaaaggctgatttggcagttcacagtatgaaagatgttaccagcatcttacccaaggactggaaatttctgttatcgca

SEQ ID NO: 243898 - DNA, 913 bp, Unknown
  Bacterial polypeptide expressing nucleotide sequence isolated from the Sargasso Sea
atgaaaattagaatagcaaccagactatctccgcttgcaatccttcaaactaaagaagtaattaaaaaaatacagcgtcatgatccaacatgtatttgtgaaatcattaaaatagagtctgatggagatcaaacagatatacctttgcatatgattggaggtaagggattatttgtttccaagcttgagcaagcgttaagtaatcagattgcagatattgcagtccatagtttaaaagatgtgcctgcatcccttgataaaaaatttaaaattgcagctacgcttccaagagaggaagtagcagatgttctgttgttaagagataaattaaatagaagcgatttatcaaaaaatcttaaaattgctacctctgggcccagaagaaaagcacaattgctcggaataaactcaggtttcaacatagttcccataagaggaaatattcaaacaagaattgataaaatgacttcagaaaaattggatggtctgattgttgcaaaagctgctctgaatagattaaaaatttcgcatccaaatatttatatattttcagaggaagaaatgttgcctgctgctgctcaaggtgcaattggtatcgaagttattgaagaaaatttagaaactaaaacgaataatttactcaaatctataaatgataatttcacttttcaagcaacagagattgaaagaactgttgtagcagctcttcagggtaattgtttatcgccaatttctgcactttgtaaaattagagatcaagatgttgaactaaaagttagagtctcaaaccaagaagggtcagaagtttatgatcagaaagaaatattttcactggataataaatttcaagctttggaagattttgttgaaaaacttattagcaatggcgcaaaaacgcttattcaaaattaaa

SEQ ID NO: 243899 - DNA, 276 bp, Unknown
  Bacterial polypeptide expressing nucleotide sequence isolated from the Sargasso Sea
aatgactaattttaagctgaaaatagctagtagaagaagtaaactagccatggttcaaactttatgggttaaagatcaactagaaaagaatattcccaatttagaggtatctatagaagctatggcaactcaaggtgacaaaatcttggatgtagccttagcaaaaataggtgacaaaggcttatttacaaaagaacttgaagcgcaaatgcttgtaggccatgcagatatagcagtacattctctgaaagatttacaaaccaatttgcctaatgg

SEQ ID NO: 243900 - DNA, 422 bp, Unknown
  Bacterial polypeptide expressing nucleotide sequence isolated from the Sargasso Sea
aatgattaaaattatttctagaaaaagcgatttagcagttattcaggctgaattagttgctgaagctttaaaaaaggcagatagaaatatttctatatcttttgttaaaaaagaaacagaaggtgatatagatcaactaacatcattaagtaaattatctaatattggtgtttttacaaatgatattagagaatcgcttttaaatagtgaggctgatatcgctgttcattctcttaaagatttgcctatcgacgaccaaaatgatacttcaattgtttccatattagaaagagctgattcgagagatattttatttcttaaaaaagataaccttgataataataaagaattaaaaattcttacatcttcaccaagaaaggtttacaatttttcgaatttcttaaaatctttgcttccttttt

SEQ ID NO: 243901 - DNA, 788 bp, Unknown
  Bacterial polypeptide expressing nucleotide sequence isolated from the Sargasso Sea
tggcggtgatggcgtatttgttcgagagttggagcaggcactattggatcatcgtatcgatatagcggtgcatagtatgaaggatcttccaaccgcagagactcctgggctagtcattccgtgtgtgcctcaaagggcaacgccctatgatgtatttgttggccgtacaaagccaacgcttcaggagttgccctcagggtctgttgttggaacatcgagtattcggcgggttgttcaattgaaaggcttgcgaaaagatctagtgatacagcctattcgtgggaatgttgatacacggctcaaaaaactggactctgggaaatacgacggacttatactagcgggtgcaggtttggagcgtctggatcttgctgacagaattacccagttcctcaagccgccactcttcgccccggccattgcgcaaggtgcattggctgttcagacacgagaagacgataggtttgttcgagaacgtatccttccgatatcccatgaagccacacatgagtcagtgcttgccgagcgggcatgtctccagacacttgcaggaggttgcctagctcccatcgcagggtggggaaggaaggactcaaataacaatgtcagtcttgacgcgtgggtatttgaggattgcggtgaggagatagtaagtatccatgcttccgggattgctgaccctagcactgagtcacctcggcaattaggggaaagagtggccacatccctcattgataagggggctacgagcatgttggaacggatccgcgagccaccgaatgagtagc

SEQ ID NO: 243902 - DNA, 789 bp, Unknown
  Bacterial polypeptide expressing nucleotide sequence isolated from the Sargasso Sea
aatgtattcattcaatagtgaaattagaatagccactaggtcttcaccactagctattaagcagtgtgaaattcttattgagaaattaccatctttaaaaactaaaattatccaaatcgtatctagaggtgatgagatacaagataaaagtctccaagaaattggaggaaagggcttgttcataaaaaaactggaacaggctttaatcgataacgtagcggatattgctgtccactccttaaaagatatggaatggaaagaaactaatgggcttgaaatagcagcttttttacaaagggggtctagaaaagacattttaataagtaaatataaatctatttatgaacttcctacaaatgcaaaattaggaacatcctctgttagaagaaaagcttttattttatcagagaggcctgacttaaatatttcaatattaaggggaaatataaatacaagaatcaataaatataacagtggtaaattcgatggaattatcttagcacaagctggtgttgagagattagacataaagaccaaatatacagaatttgatgaaagcattatgcttccaagtgcaggacagggagctattgctgtacaatgtaggtctaataataaacaaatacttaaattaataagatctctaaatcatgagcaaacaaaatatgaaactttagctgaaagatctttcgtttttaatttaaacggtacttgtagctcgcctataggagcttctgcaaaaatttctaatgaaattttggagctttctggcgcattggctagtccaga

SEQ ID NO: 243903 - DNA, 676 bp, Unknown
  Bacterial polypeptide expressing nucleotide sequence isolated from the Sargasso Sea
atgtcctctcgcgaaatccgcatcgccacccgtaaaagcgccttggccttgtggcaggccgaatacgtcaaagcacgccttgagcaggcccatcccggcctcaaggtctccctggtgcccatggtcagtcgcggcgataagctgctggactcgccactgtccaaaatcggcggcaagggcctgttcgtcaaggaattggaaactgcgctgctggataacgaagccgacatcgccgtgcattcgatgaaagacgtgcccatggacttccctgaaggcctgggccttttttgtatctgcgagcgcgaagacccgcgcgacgccttcgtttccaacaccttcgcgtctctggacgaattgccgccaggcagtatcgtcggcacctccagcctgcgtcgccaggcccagttgctgacgcggcgtcccgacctgcagatccgctttttgcgtggcaacgtcaacacgcgcctggccaagctggacgccggggaatacgacgcgatcatcctcgccgctgccggcctgatccgcctgggctttgaagaccgcatcacctcggccatcagcgtcgaagacagcctgccagctggcgggcagggtgcagtcggcatcgaatgtcgcaccgccgacagcgaaattcacgcactgctcaagcctctcgatcacgcggacaccgaag

SEQ ID NO: 243904 - DNA, 820 bp, Unknown
  Bacterial polypeptide expressing nucleotide sequence isolated from the Sargasso Sea
ttaaatgccgaaattataaaaattaaaacaacaggtgataaaattactgaccaaccattatctgcgattggtggtaaaggtctatttacaaaggaaatagataaagagttaattaataaaagaatagatttagctgttcattcattaaaagatattccgacaacaattcctgaagaatttaatttatcttttatcctaccaagaggcgcgccagaagatattcttatctcacaaaataattcaaaaaatatctattcactacctattaactctactataggaacttctagccctagaagatatgcgcaaatcaagaggataagacctgatattaaaattttaccaataagaggcaatataaacactaggttggataaagttaaaaataaagaagtaactgcaataatattagctttagcaggaataaatagactgaagatagaaataccatattctattctagattatgaagagtgtatgccagcagcttcgcagggaataattgggataacttatctaaaaagtaatataaaagttcaaacaatacttagtaagctcattaatataaatacgcaatatcaagctataggagaaagagctgttctaaatgtaataaatggagattgccattcgccgattgccgtgacttcctctataatatcaaacaaaatttcaatctctgctaaaatattttctattgatggcaaaaatatgattgaacaatgtaaaactgatattacagaaaatgctgaaatgttagggaaagacataggtaataatttaattaaaatgggagcgcttgaattacttaaattatgaa

SEQ ID NO: 243905 - DNA, 898 bp, Unknown
  Bacterial polypeptide expressing nucleotide sequence isolated from the Sargasso Sea
atgacagataagaaaaaatttattattggatctcgtggaagcaagctttctttggcttattcgagccatgttaagaatttattaataaaatctaattctcaatttgatgataattcaattgagataaaaataataaaaacttcaggagatatttttcaaaataaaagaatatcagatattggaggtaaaggagtattctgtaaacagatagaagaagaattattagatgcaaaaatagatttagctgtccattctttaaaagatttaccaacaaaaataacagacggattatgtgtaaacgctgtagtaaaaagaaatgatccaagagatgcttttttaagttattcaagtaaatcttttaacgaacttgggcccaaatcaaaaattggtaccagctcatttagaagacaagctcaactcaatttattaagaaacgatcttaaaattattgaaatgagaggaaacatcgacacgagaattagaaaattaaaaaaccaagaatttgatgctatagttttgtctttggccggagttcaaatgcttaatttagaaaaagaagttaaagaagtttttagcactgaccaaatgttacctgctcttggtcaaggaacaatagctttacagtgcaataaagatgataaaaaaactttaaatattttaaaagtaataaatgatagagaaacattttattgcattcaggcagaacgtgctttacttgaggcaataggaggcgattgcgacacagctattggaggtttagctaaattatcagatgatacaatatatttaaagagccaactcttctcaaatgatggaaaaaaaaaatttgaatttcaaagctcaggtaattttaaaaaagctaaagaaataggttataatgttgtaaagagttataaaa

SEQ ID NO: 243906 - DNA, 790 bp, Unknown
  Bacterial polypeptide expressing nucleotide sequence isolated from the Sargasso Sea
atgaaaaaaattataattggagccaggggtagcaaattatctctagcttatgcatctaaggttaaagatcttattttaaaaagttcaaaaggcatagatattcatattaaaattataaaaacttctggtgacattcacaaagataccaaggtgtcagagatagggggaaaaaatttattttgcaaagagattgaagaaaacttaatagaaaataatattgatatcgctgtacattctttaaaagacatggaatcttttgaacacaaagaattgattattggagcctttataaaaagaaatgatcctcgtgatacacttgtgagtaataaaattaaaaatttaagagaattaagtgaggaaacgaaaataggttcaggctctagaaggagagagcttcaactaaaaaaattaaataagaatatttctgtcaccagtataagagggaatatagatccaagaattaaaaaagtagaggaaaacaagtttgacgcaattattttagcagcagcaggattaaaaagtttaaacttagaaagtaaaattagcttcacttttaaaacttatgaaatgctccctgctgtaggtcaagggattatcgctgttcagtgcagaaagcatgatgaattaatatttgatattataaaaaaaattaatgacaaggaaactagtctgtgtgctatggcagaaagaaagatgttacaaacaataggcggagactgtgaaactgctgtgggtggattagctgaaattcataataataatttaaaattaaaagctcaattattttcag

SEQ ID NO: 243907 - DNA, 629 bp, Unknown
  Bacterial polypeptide expressing nucleotide sequence isolated from the Sargasso Sea
catgtctaacgctttatcaaaaagcggcaaaaaaaatcctaccttaacaatcgcaactagaggcagtaccctcgcgctttggcaggcaaattgggtaaaggaaaaaataaatgaacagcattcagaaattacggttgaattattaaccgtaaaaactgccggtgaccttaaccagcatcaacccttggcagagattggaggaaaaggactttttgtaaaagaccttgaaaaagctttacttgacgaaagggctgacattgcagtacacagtatgaaggatgtgaccggcattttacctgaaggtctggaaatttcagttattgcagaaagagatgaccctcgagatgcatggatttgcccaagatatggaagcattgaaaacttacccaaaggtgcaactgttggaacaagttcgttgcgtcggacagctttcttgaaacatcatagacctgatatagaagtttgtagcttgcgtggtaatgtgcctactaggcttggtaaactagatagaggagaagttgatgctataattttggctgtttcaggattgaagcggataaatctagaaaatcgcattaataaaatttttccaataaaatggatgctccccgcgatcgggcaaggtgcaa

SEQ ID NO: 243908 - DNA, 751 bp, Unknown
  Bacterial polypeptide expressing nucleotide sequence isolated from the Sargasso Sea
attggctgtgacagcggatggtttaaaggtgcctgaacgccctttgctgaggatcgcgacccggggcagcaaactggctctatggcaggcggaacacgtacgtagtttaatcttaaaacaacatcctgacattgcagtggaactggtggtcctaaaaaccaagggagacctgattctagaccgtcccctgtctgaagtaggaggtaaaggactttttgtcaaagaactggaaagcgcgatgctggaaaaccgtgcggacctggcggtgcatagcctcaaggatgtgcctgccatccttccagaaggtttggaactttccgtcatcctgaaacgagaaaatccccatgatgtcctagttttccgtgaaacgaacatgaccctagatgacctgccgcaaggttccatgatcggtaccagttcgctaagaagagcggcccagctcaaaaacatgagacctgatctggaagtgacttccctacgagggaatgttccaacccggttgaagaaactggattctggagaagtggatgcagccgttttagccgctgccggattgattaggcttgaactggaagaacgaatcaatcaggaactatcgacggagcagatgcttcccgccatcggacagggggttttggccttggaaaccaggaaagatgatgatgccaccctggaaaaactccgtttcatgaatgatgaaccaaccgaggattgcatgattgcggaaacggaaggtgctttgaacccttga

SEQ ID NO: 243909 - DNA, 493 bp, Unknown
  Bacterial polypeptide expressing nucleotide sequence isolated from the Sargasso Sea
atgactaattttaagctgaaaatagctagtagaagaagtaaactagcaatggttcaaactttatgggttaaagatcaactagaaaggaatattcccaatttagaggtatctatagaagccatggcaactcaaggggacaaaatcctggatgtagccctagcaaaaataggcgacaaaggcttatttacaaaagaacttgaagcacaaatgctcgtaggccatgcagatatagcagtacattctctgaaagatttaccaaccaatttgccaaatggccttaaattaggatgcattacaaaaagggaagatcctgcagatgctttagtagtaaacaaaaaaaataactgttataaattagaaaccttacctgaaggttctattgttggaacaagctctctaagaagacttgcacaattaagaaataagtatccacatcttgttttcaaagatatcaggggaaatgttattacaagagtgaaaaatagatgccgag

SEQ ID NO: 243910 - DNA, 739 bp, Unknown
  Bacterial polypeptide expressing nucleotide sequence isolated from the Sargasso Sea
atggctctcaccgaactgcgcatcgcctcacgtcgcagtcagctggcgatggtgcagaccaactgggtgaaggcggagttggagaaagcccaccctggactcaccatcatggtggaggcgatggccacgcagggggacaagatcctggatgtggctctggccaagatcggcgacaaaggcttgttcaccaaggaactggaagcgcagatgctggtgggacgcgcggacatcgccgtccattccctcaaggatttacccaccaacctgcctgagggcctgatgctgggctgcatcagcgaacgtgaagaccccgccgacgcactggtcgtgaatgccaagaatcaggctttcaagctcgacacccttcccgaaggagcggtggtgggcaccagctccctgcgccggctggcacagctgcgtcaccactacccccacctgatcttcaaggacgttcgcggcaacgtgatcacgcgccttgagaagctcgactcaggcgactacgactgtctgatcctggcggccgctggccttagccgcctgggattcggcgaccggatccaccagatcatccccggtgacatttctcttcatgccgttggccagggcgcccttggcatcgaatgcgtggaagggaaaccagaggttctggaaatcatcaaggtgctggagcacaccaccacctcccgccgctgtctggcagaacgcgccttcctgcgagagctggaggggggctgcccag

SEQ ID NO: 243911 - DNA, 457 bp, Unknown
  Bacterial polypeptide expressing nucleotide sequence isolated from the Sargasso Sea
ctgagaatcgccacccgaggcagcaaactggctctatggcaggcggaacacgtccgcagtttaatcttaaaacaacatcctgacattgcagtggaactggtggtactcaaaaccaagggagacctgattcttgaccgtcccctggctgaagtcggaggtaagggactttttgtcaaagaactggaaagtgcgatgctggaaaatcgtgcggacctggcggtgcacagcctcaaggatgtgcctgctctccttccagaaggcttggaactttccgtcaacctgaaacgtgaaaatccccatgatgtcctggttttccgtgaaatgaacatgaccctggaaaaccttccactaggttccaggatcggtaccagttcgctcagaagagcggcccagcttaaaaacataagacccgatctggaattgacttccctgcgcggaaatgttccaacccggtgaa

SEQ ID NO: 243912 - DNA, 652 bp, Unknown
  Bacterial polypeptide expressing nucleotide sequence isolated from the Sargasso Sea
atgattaattcaataaaaataggaacaagatcaagtaatctagcaatgtatcaggcaaacctagtcaaggaaaaactaactgaaatttttccaaatattaaatattctatagttaagatcaaaacaaaaggtgataaaattcaagaccagaatttagacagaaatctagataaaggtttttttgttaaagaaattcaagatgccttaattgaaggtaaaatagatatagcagttcatagtctcaaagacttacctgtagaggaaaatgaaaaaataaaaacttcagcaattttaaaaagaggcaatcactatgatgtttttttaagtagaaataaaaaaaaacttcatgagttttcagaaaatgaagtgattggcacttcatccttaagaaggaaagctcaacttttacatttgaatcccaatctaaatgtaatcgatataaggggtaatgttgacacaagaattactaagatgcaaaatggagagtatgatggacttattatggctgctgcgggtattgaaagattaggtcttgaaaaatatataacagaatatctcaataataatataatgttaagtgctccagggcaaggagcaattgcaattgagacaaattctaaaagctatgagttagaagctattatctcaaaga

SEQ ID NO: 243913 - DNA, 733 bp, Unknown
  Bacterial polypeptide expressing nucleotide sequence isolated from the Sargasso Sea
aatgcatattcgtatagccacgagaaaaagtgaactggctatttggcagtcgaactacgttcgtcaccttttgactcgtatcaaacccgagttaaagatcgatttaattgaaatgacgacacgaggagaccaaattctcgacagaccgttgtcaaaagtcggtggaaaaagcttgtttactagcgagctggagtttgctattgagaaaggggatgctgacatggccgttcattctcttaaagatatgcccgcggaacttcccgaggaattctgtattgcagcagttttgccgagggacgagccgagagatgttttagtttctccaactggctggagtctgaggaaattgccggaaggacaaaaagtcggcacctcgagtctgaggcgtcaaagtcagttgcttgctcagaggtcagatctaaagatggtcgacataagggggaatgtgcccacaagactagctaaactaactgatggaacgtgtgacgcagttgtacttgcgggtgcaggtttaaaaagactaggtctattagatcgtcggtgtttcattttggatttcgagacggttctgcctgcaatcgggcaaggggcgattgcgatagagtgcagaacccgcgatctagagctgagaaaactactgacgtccttgaattgcgatctcaccgaaaagtcggttatggcagaaagggttatgaatagggttttgggtggtagttgtcagcacgcaatcgct

SEQ ID NO: 243914 - DNA, 643 bp, Unknown
  Bacterial polypeptide expressing nucleotide sequence isolated from the Sargasso Sea
gatgctttagtagtgagcaaaaaaaatgactgttataaactagaaaccttacctgaaggttctattgtgggaacaagctctctaagaagacttgcacaattaagaaataagtacccacatcttgttttcaaagatattagggggaatgttattacaagaattgaaaaattagatgccggagaatttgattgtataattcttgcagccgctggtttaaagagattaggctttgaatcaagaattcaccagattataccaagtgaaatttcccttcatgccgttggccaaggagctctaggcattgaatgtaaatctgatgataaaaaagttttagaaattatcaatgtcttagaagataaacctactagtcaaagatgtctggcagaaagggcttttttaagagaacttgaaggtggatgtcaagtcccaataggtgttaatagtaatattgataatggacagctttaccttactggtatggtcgcctctcttgatggagaaaggctcataaaagatcaagtaattggcaatattaatgaccctgaactggtaggcatagaactagcaaagagactaaagatccaaggtgcagacaaaatactcagcgaaatatttgaagaatttagagaaaacaaaaattagt

SEQ ID NO: 243915 - DNA, 376 bp, Unknown
  Bacterial polypeptide expressing nucleotide sequence isolated from the Sargasso Sea
catgtctgaaaaccgcatacgtatcgctacccgcaagagtccgctggccatgtggcaagctgaatttgttaaagcagaattagaacgcgttcacccaggtattgtggtggagctattgccaatgagcactaagggcgatgttatcttagacacgccattagcgaaagttggtggtaaaggcttgtttgtgaaagaactcgaagtcgctatgctcgaagaccaagccgatatcgccgtacactcgatgaaagacgtgccagtagatttccccgaaggcttagggttggaagtgatttgtgaacgcgaagatccacgcgatgcctttgtgtctaacctttataagtcaatcagtgagctgccactgattgacttataa

SEQ ID NO: 243916 - DNA, 862 bp, Unknown
  Bacterial polypeptide expressing nucleotide sequence isolated from the Sargasso Sea
gaatttattattaaaatctaacccgcaatttgatgataattcaattgaaattaaaataataaaaacttcaggagatatatttcaaaataaaaggatctcagatattggaggtaagggggtattttgtaaacaaatagaagaagaattattagaatacaaaatagatttggccgtccattctttaaaggatttgcccacaaaaatgacagaaggattgaccgtcgatgctgttataaaaagaaacgacccaagagatgcatttttgagtcattcaaacaaatcttttaaagaacttaaatcacaatcaaaaattggcaccagctccttcagaagacatgcacaattaaatctattaagaaatgatttagaaattgttaatatgagaggaaatattgatacaagaattaaaaaattaaaaaataaagattacgacgcaatagttttatctttggcgggaattcaaatgcttaatttgacagagcaagtgaaagaaatttttactattgaacaaatgttgccagccatagggcagggagttattgctttacagtgtaataaagatgatgaaaaaactaaaaatattttaaaagcgatcaataacaaggagacgtattattgtatacaggcagaacgagctctactggaagcaataggtggagattgtgatacagctgttggaggcttagctaaattattaaatgatgaaatatctctaaaaagtgaacttttttcaaatgatgggaagaaaaaatttgaatttcaaagctcaggacactttagtgaagctaaagaaataggttataaagttggtaaagaattattaaaaaaagctggaccaaattttacagtacaggaaaattaa

SEQ ID NO: 243917 - DNA, 613 bp, Unknown
  Bacterial polypeptide expressing nucleotide sequence isolated from the Sargasso Sea
ctggcctcgctgccggccggcgcggtcgtcggtacgtccagcctgcgccgcgaggcatcgctgcgggcgcggtttccgcatctggtcatccaaccgctgcggggcaacctcgatacgcgtctcggcaagcttgaccgcggcgactacgccgccatcatcctggccgccgccgggctcaggcgccttgggctggctgatcgcatccgctcgaccatcgcgccagaagaatcgctaccggcagcagggcaaggcgcgctcggcattgaaattcgcgcggatcgtgaagaggtgcgcgcgtgcctcgcgccgctgcacgatgcgccgacagcgctggctgtaaccgccgagcgcgccgtttcccgcattctgggcggttcatgccaggtgccgctggccgcgttcgcgcagtggtcgggcgcaggcaccttgcgcctgcgtgcctttgtggcgtcgcaggacggcacccgcaaacttgccgcagatggcgaagccacgccatccacgctggccgatgccgacgcgctgggtgtgcgcgtcgcgcagcagatgctggcaggcggcgcacgcgacatcctctccatgctgggcgccgacgcgccacccgctacctaac

SEQ ID NO: 243918 - DNA, 805 bp, Unknown
  Bacterial polypeptide expressing nucleotide sequence isolated from the Sargasso Sea
aattgccactcgcaagagccccttggccctgtggcaggccacttcgtcaaagaccggctggaagccctgtaccccgagttgcaggtcgagctggtgcccatgagcactcagggtgacaagatcctggatacccctctcgccaaggtgggcggcaaggggttgttcgtcaaggagctggaaaccgccatgctggagggacgggccgacatcgccgtgcactccatgaaagacgtgccggtggagttccccgaggggctcggcctgcacaccatctgcgagcgcgaagatccgcgcgatgcctttgtttccaaccgcttcggccagattgatgagctgccgcagggagccgtggtcggcacctccagcctgcgccgccagtgccagctgcgtgcggcacgcccggatctggtgatccgcgacctgcgcggcaacgtcaacacccgtctcgccaagctggacgccggtgaatacgacgccatcatcctcgccgccgccggcctgaaacggctggagatggcgcaccgcatcaccgccttcatcgagccggaacagagcctgcccgccaacggccagggcgcggtcggcatcgaatgccgcctcgacgatcacgagctgcacgccctgctggcaccgctcgaacaccccgagacccggatccgggtgctgaccgaacgcgccatgaaccgcgccctgcaggggggctgtcaggtccctatcggggcctatgccctggtgcaaggggaagaagtgtggctgcgcggcctggtgggcagcccggatggcagccgcgtcatccgcgacgaga

SEQ ID NO: 243919 - DNA, 412 bp, Unknown
  Bacterial polypeptide expressing nucleotide sequence isolated from the Sargasso Sea
tatggaaatggatgagcgcattgccgcattcatgccggcagaagaatcactgccggcgggtgggcagggtgcccttggtattgagtggcgcagtgctgataaagacattcatgccttgctcgcgccgctgcaccacgaagtaaccgcacaatgtgtattggcagaacgtgccatgaaccgccgcctgcaagggggctgtcaggtccccatcgcttgttacgccatcattgatggtgatgaattgtggctccgtggtctggtgggtagcgaagacggccagcaaatgctgcgtaccgaataccggggctcgccagaagacgccgaagcactgggtataaaggcagcagaagacctgttggcgcagggagcgggtgatatcctgcgtgccgtgtatggtcatgacgttcactga

SEQ ID NO: 243920 - DNA, 595 bp, Unknown
  Bacterial polypeptide expressing nucleotide sequence isolated from the Sargasso Sea
aatggcagataaaaatttttttataataggatgccgtggtagcaagctttctttagcttactcaaaccatgttaaggatttgttgataaaatttaatccacattttaatgataattcaattcagttgaaaataataaaaacttcgggagatatatttcaaaataaaaaaatatcagatattggtggcaaaggagtattttgtaaacaaatagaagaagagctattggaatctaaaatagatttagcagttcattcattaaaagatttacctacaagaatgacagatggtttgtgcgttaacgccgtagtaaaaagaaatgatccacgagatgcttttttaagttatgcaagcgaatcttttaaaaagcttaagcccaaatcaaaagttggaactagttcttttagaaggcaagcacaactatatttactgagaaatgatcttgaagtagtcagtatgagaggaaatattgatacaaggataaaaaaattagaaaataaagagtacgatgctatagttttatctttggcaggaattcaaatgttaaatttagaaaatcaagttaaagaaatttttactactgaacaaatgttacca

SEQ ID NO: 243921 - DNA, 718 bp, Unknown
  Bacterial polypeptide expressing nucleotide sequence isolated from the Sargasso Sea
tatgagcagaaaactgagaatagccactagaaagagcccattggccctttggcaagcaaactttgtacgtcagtctttggaaaaaattcacaaggacttacaggttgaacttgtgcctatgagtactcaaggcgacaagattctcgatagtccgttagcaaaaattggtggaaaaggtttatttgtcaaagaacttgaaatggccttattacaagatacggcagatgtggcagttcattctatgaaggatgttccaatggagtttccggaagggttgcagcttgcaggaatctgtaagcgcgaagatcccactgacgctttagtttcaaataagtatcgcaatctggaagaaatgccaaaaggagcgacaattggtacatcgagcttacgaaggcaatgccagttaaagtatattcgcccagatctcgatattatcgatcttagagggaatgttggcacacgtttactcaagttggacgaaggtaattatgatgccatagttcttgctagtgccggcttaatcagattagatcaaaacagcagaattggcagtcgtctagaacctcaagaatgtttgccggcagcaggtcaaggtgcagtcggaatagagtcacgtgtagatgataaagagacgcaaaaaattataagcactatccatgatgctgcaactgcctcttgcgttctagcagagcgcgcggtaaataataggcttcaagaa

SEQ ID NO: 243922 - DNA, 626 bp, Unknown
  Bacterial polypeptide expressing nucleotide sequence isolated from the Sargasso Sea
tatgatagcatctgataaacttcgaattggtacacgcgggagcgcactggcgcttagacaaactggtcaagttttagaacttatgaaaacgaagcacataactttaaatcaaccagcagcaatggagactgtagttattaaaacaacaggggatagggaacaaagccgtttattgtcagaaattgggggtaagggtctattcactaaagaattagatgaggcgatgttgcgaggggaaatagatattggaattcattcaatgaaagatatgccaactgctatgcccgatggaattaatcttcatgctattaccgaaaggcttgatccacgagatgcatttatatccaaaaaagccacaacgatacgcgaattaccaaaaggggcgattgttggaactgcatcattaaggcgaaaagcacagttactttatttaagacctgatctccatatcatgccgcttcggggtaatattgatactcgtttgagaaaaattaatgatggcgagattgacgcaatgctacttgcgtttgccggtttaagtcgcttgggtagagagtgtgatattaagggtttgattgactttaatgaggtgcttccagcagttggccaaggtattttagctgcga

SEQ ID NO: 243923 - DNA, 913 bp, Unknown
  Bacterial polypeptide expressing nucleotide sequence isolated from the Sargasso Sea
atgacagataagaaaaaatttataattggatcacgcggtagtaagctttccctagcttattcaaattatgttaagaatttattgataagatctaacactcaatttgacaataatttgattgagataaaaacaataaaaacctcaggagatatatttcataataaaaaaatatcagatattggaggcaaaggagtgttttgtaaacaaatagaagaggaattactggaatcaaaaatagatttagctgtccattctttaaaagatttgcctacaaaaatgacagacggattatgtgttaatgctgtggtaaaaagaaatgacccaagagatgcgtttctaagttatacgactaaatcttttaaagatcttaaacccaaatcaaaaattggaactagttcatttagaagacatgcacaattaaatttattaagaaaagatcttgatgttgttggcatgagaggaaatattgatacaagaattaaaaaattaaaaaacaaagagtacgatgctatagttttatctttggcaggaattcaaatgcttaacttaataaatgaagttaaagaagtttttactattgagcaaatgttgccagctttaggtcagggagcaattgcattgcagtgtaaaaaaaatgaccaaaaaactttaaatattataaaagccataaatgataaggagacatattattgtattcaggcagaacgtgctttacttgaatcaataggcggagattgtgatacagctataggtggtctagctaaattatcaaatgacaaaatatctttaaaaagcgaacttttttcgaatgacggaaagaaaaaatttgaatttcaaagctcaggacactttagtgaggctaaagaaataggttataaagttggcaaagagttattaaaaaaagctggtccga

SEQ ID NO: 243924 - DNA, 625 bp, Unknown
  Bacterial polypeptide expressing nucleotide sequence isolated from the Sargasso Sea
catgtcccgcgaaattcgcatcgccacccgtaagagcgccttggccctgtggcaggccgaacatgtcaaagcccgcctggaacaggctcatcccggtctgaaggtcagcctggtgcccatggtcagccgcggcgacaagctgctcgacgcgccgctggcgaagatcggtggcaagggcctgttcgtcaaggagctggaaaccgcactgctggaaaacgaggccgacattgccgtgcactcgatgaaggacgtgccgatggactttcccgaagggctgggcctgtactgcatttgcgagcgtgaagacccgcgcgacgccttcgtctccaacacctactccagccttgatgcattgcccgccggcagcgtggtcggtacttccagtctgcgccgtcaggctcaattgttggcgcgccggcctgacctgaaaatccagttcctgcgcggcaacgtcaatacccgcctggccaagctcgatgccggcgagtacgacgccattatcctcgccgcagccggcctgatccgcctggggttcgaggatcgtatccgcagttcgatcagcgccgaggacagcctgccggccggcggccagggcgccgtgggcatcgagtgccgcagtgccgac

SEQ ID NO: 243925 - DNA, 897 bp, Unknown
  Bacterial polypeptide expressing nucleotide sequence isolated from the Sargasso Sea
gagccgcgtttcacccgttggcactgacacaaacccgaatggtacaggcggcattacagtctgcttatccgggcttacagattgatttggaaattattcgcaccactggcgatcgtgttcaggaccgaccattgtccgaaattggcggcaagggactttttaccaaagaaatagaagccgccctgcttgaggaacgcattgatttcgctgtccattctgcgaaagacatggaaacaagattacccgacgggcttgctttgtctgcagttatgcagcgcgaagatccccgggacgtttttatttcgagaaaagcttcgaatttagccgaattgcctgccggtgcagtagtggggaccacgtcgctgcgccggcaagcacaaatattgaatcgttttcctaggcttgaggttgtacccattcggggtaatgtagacacgcgattgtgcaaattgcatgacggcgaggtagacgcgatcctattggcgctagcgggattgaagcggttaggtcgggagtgcgacggcatgacagtccttgatccggattatatgttaccggctgcggcccagggggccataggcattgaaaccagggccgatgatgagcgtgtgattggtatgatggcagcaatcaaccacgagggttcacttaaagttatctctgcggagcgagcattgttagaaacgctggacggtaattgtcggacgcctgtgggcgcacttgcggagatcgaggccgatggggggctgcgcttgagggcgttgcttgccaatcctgacggcgcctggttgcattcaacggagcgtcgaggcgtcatagaagacgctgttatgatggggaaagaagcaggggaagaattgcggaggttagccggcgaggcgtttttagatgactaat

SEQ ID NO: 243926 - DNA, 304 bp, Unknown
  Bacterial polypeptide expressing nucleotide sequence isolated from the Sargasso Sea
atgactaaattaaaattaaagatagctagtagaagaagtaaattagctatggttcaaacgttatgggttaaagaacaattagaaaaaaatattcctgaattagaagtaactgttgaggcgatggcaacacagggtgacaagattctggatgtcgcattagcaaaaataggcgataaagggcttttcacaaaagaacttgaggcccaaatgctagtaggtcatgcagacattgcagtgcattcattaaaagacttgccaactaatttacctcatggacttatattaggatgtatcacaaaaaggg

SEQ ID NO: 243927 - DNA, 550 bp, Unknown
  Bacterial polypeptide expressing nucleotide sequence isolated from the Sargasso Sea
aatgactaattttaaactgaaaatagctagtagaagaagcaaactagccatggttcaaactttatgggttaaagatcaactagaaaaaaatattcccaatttagaggtttctgttgaggccatggcaactcaaggagacaaaattcttgatgtagccttagcaaaaataggtgataagggcttatttacaaaagaacttgaagcacaaatgcttgtaggccaggcagatatagcagtacattctctaaaagatttaccaacaaatttacctagcggtcttaaattaggatgtataacaaaaagagaagaccctgctgatgctttagtagtgaacaaaaaaaatgatagttataaattagaaactttaccagcaggttcaattgtggggacaagctctctaagaagacttgcacaattaaaaaataagtatccacatcttgtatttaaagatatcagaggaaatgttattacaagaatagaaaaattagatgccggtgattttgattgcatcatactggctgccgctggtttaaagagattggggttttga

SEQ ID NO: 243928 - DNA, 304 bp, Unknown
  Bacterial polypeptide expressing nucleotide sequence isolated from the Sargasso Sea
atgtctgaaaaccgcatacgtatcgctacccgcaagagtccgctggccatgtggcaagctgaatttgttaaagcagaattagaacgcgttcacccaggtattgtggtggagctattgccaatgagcactaagggcgatgttatcttagacacgccattagcgaaagttggtggtaaaggcttgtttgtgaaagaactcgaagtcgctatgctcgaagaccaagccgatatcgccgtacactcgatgaaagacgtgccagtagatttccccgaaggcttagggttggaagtgatttgtgaacgcg

SEQ ID NO: 243929 - DNA, 937 bp, Unknown
  Bacterial polypeptide expressing nucleotide sequence isolated from the Sargasso Sea
gcgtatgcctctcgccgcagccaattggcgatggttcagaccgagtgggtgcgtgatgagctcgctaaggctcaccccggtctggagatcagcatcgaggccatggccacccagggcgacaagattctcgatgtggccctggccaagattggcgacaagggactgttcaccaaagagctcgaggctcaaatgctggtgaaccgggctgatatcgctgttcacagcctcaaagatctgcccaccaaccttccagaagggctgatgctcggctgcatcaccgagcgggaagatcccgctgatgccctggtgatgcatgccaaaaacaaagacctcaccctggccaccctgcctgagggtgccgtggtgggcaccagctccctgcgccgtttggcccagctcaggtaccactatccacacctcacctttaaagatgtgcgcggcaacgtgatcacccgcctcgagaagctggattccggtcagttcgattgcttgatcttggcggcagctggtttgggccgcctcggcctgggtgatcgcatccatgagctgattgatccttcgatctcgctgcatgccgtgggccaaggcgccttgggcatcgaatgccgcgatggtgatgcggctgttctcgagcagatcaaggtgctggagcaccgccccaccgccctgcgttgtttggccgaacgcgccttcctacgcaccttggaaggtggctgtcaggtgccgatcggcgtcaacacccgttttgacggagatgagttggtgctcaccggcatggtggccagcctcgatggcaaacaattgattcgcgatgagctccgcgctcctcaagatcaggctgaggacttgggtaatcgcctggctgaattgctacgcagccaaggggctggcgagatcctcgccaagatatttgcggaagcccgccctgaggcctgat

SEQ ID NO: 243930 - DNA, 415 bp, Unknown
  Bacterial polypeptide expressing nucleotide sequence isolated from the Sargasso Sea
gctggccttattcgccttggaatggaatctcgtattcgcatgccgttacccgctgatatttcactacccgccgttggacaaggtgccgtaggtattgagtgccgtaacgacgatgaagagctaattaagttgctacaggcgctgaaccatacggacaccaatacacgcgttactgcggaacgcgccatgaacgagagattggaaggtggctgccaagtacctattggtagctttgccacgcttgatggcgatgtgctgacactaaccggtatggttggtaagccagatggttcagaactgctctttgcttctgctacagcgtcgcgagaaaaagccgcagatattggtgttgaagtagcggaatcccttcttgagcaaggtgccggtgaaatcttaaaggcgctttataactaag

SEQ ID NO: 243931 - DNA, 602 bp, Unknown
  Bacterial polypeptide expressing nucleotide sequence isolated from the Sargasso Sea
aatggaatcccgcaaagtaataattggtagtcggggtagcccattagctctatggcaggcgaattgggttaaagatttattacacactcatcactctgatcttgatgttgatatcaaaataatcaaaacctcaggtgataagatacaaaatatccctttggctaaaatagggggaaaaggactttttgttaaagaaattgaggagggtttattaaaacgtgaggtagattttgctgttcatagcatgaaagatatgcctatttcttttcctttgaatctttgtatagcctgcgtgacaaaacgtgaaaatccatttgatgctctcatttccagaaacaatatagatttgaatgaacttccgaaaggagcaaaaattgggacaggaagcttgaggcgaatgtcacaattgaaatattttcgtccggattttaatttgattccccttcgaggaaacttggaaacaaggttaaaaaaactcaactcagaaggacttgacgcgataattcttgccgctgctggtctgatccgtttaggctggcaagaccggattacagaattgatttcgcctgaaattttattgcctgcaatgggggcaaggtgct

SEQ ID NO: 243932 - DNA, 721 bp, Unknown
  Bacterial polypeptide expressing nucleotide sequence isolated from the Sargasso Sea
catgcttgaaggccgagccgacattgctgtgcactcaatgaaagatgtaccggtggcgttccctgaggagtttgggttacacgccatttgcgaacgtgaaaatccgtttgatgcttttgtgtctaatcactatgacagcgtagatgccttgccaaatggtgccgtagttggaaccagcagcctgcgccgtcagtgccaaattcgcaaacaccgccccgacctcattattaaagacttgcgcggtaacgttaatacccgattagccaaacttgatgccggcgactacgacgctatcattttagcgtcggcgggccttattcgattggaaatgcaagaccgcattaaaatggcattacccgctgaagtgtctttgccagcagtaggccaaggcgctgtgggcattgaatgtcgcaacgacgatgcccaacttatcgagttacttggcgcgttaaaccatgacgaaacccatgttcgtgtaactgcagagcgcgcaatgaatgaacgcttagaaggcggctgccaggtacctattggcagctttgccactctcgacgacaacacattgacactaaccggtatggttggaaaacccgatggcacaacgttactgtttgcctcggctactgcgtcagcagaaaaagcaaaagatattggtattgaagttgccgatgcactgcttgagcaaggcgctggcgaaattttaaaagcgctttacgagtaa

SEQ ID NO: 243933 - DNA, 564 bp, Unknown
  Bacterial polypeptide expressing nucleotide sequence isolated from the Sargasso Sea
gttctctgcggcgcctggcccagctgcgccatcactacccacacctggaattcaaagacgtccgcggcaatgtgatcacccgtctcgagaagctggacaacggtggatacgactgcctgatcctggccgctgcaggactgggtcgccttggtttcgccgaccgcattcatcaactcattcctggagacatctctcttcatgccgtgggccagggagctctcggcatcgaatgcgtggaaggccagccggaagttctggagatcatcaaggtgctggagcatgcccccacatcccagcgatgcctggcggaacgggctttcctgcgggaactggaggggggctgtcaggtgcccatcggggtcaacaccaggttcgaaggcgatcagctcgtcctgaccggcatggtggccagcctggatggactgcgtctgattcgggatcaggccagcggtcctgccgctgatcctgagccgatcggcgtggccctcgccaacactctcaagcagcagggagccggtgagattctccaggagatctttgaagccgtgcggccggaagcctgat

SEQ ID NO: 243934 - DNA, 807 bp, Unknown
  Bacterial polypeptide expressing nucleotide sequence isolated from the Sargasso Sea
catgttagacaaagttttgaaaattgccacacggcaaagcccgcttgcgctatggcaggcgcagtatgttaaagcgcgcctggaacaagcgcatccaggactgaacgtcgagctggtgccgatggttacgcgcggtgatgtcatccttgatacgcccctggcaaaggtgggcggcaagggcttatttgtgaaagagttagagctcgccatgctcgaagggcgggccgatatcgccgtccattcgatgaaagatgtcccggtggaattcccggagggcctggggttggtcaccatctgcgaacgcgacgatccgcgcgacgcgtttgtttccaatcactatgcctcaattgacgaactgccggccggcagcgtcgttggcacgtcaagtttacgccgtcagtgccagctggccgccacccgtccagacctggtgatccgctctctgcgcggtaacgttggtacccggctgagtaaactggataacggtgagtatgacgccattatccttgccgccgccgggttgaagcgcctgaaactggaagcgcgtattcgccagccgctgtcgccggagcaatccctgccggccgtcggccagggcgcggtgggtatcgaatgccgtcttgacgatgcatggacccaggcgctgttagcgcccctcaaccatgcggaaaccgcagtacgcgtgcgcgccgaacgggcgatgaacacccgcctcgaaggcggttgtcaggtgccaattggcagctatgcggaactcgtcaacggcgaactgtggctgcgggcgctggttggcgccccggatggttc

SEQ ID NO: 243935 - DNA, 835 bp, Unknown
  Bacterial polypeptide expressing nucleotide sequence isolated from the Sargasso Sea
atgaaaaataacttcccctctccatcagctccattgcgtattggcacccgcggctctccattagctttggctcaagcatacgaaacaagaaagcgtctggcagaagctttaaatgccagtgaagattctttcgaaatagtagtaatttcaacaagcggtgacagaatcttagatagacccttaaaagaagtaggtggaaaaggcttatttactaaagaaattgagcaagagatgctcgatagaaagattgatatagctgttcactccatgaaagatatgcctgtggagcagccagatggattaacgcttggatgctacttacctcgcgaagatgtcagagatgcttttgtttcgtcagacttcaaaaatgttagcgatttaccaagtggttctaaagttggcacttcatcactaagacgcaaagctcaacttaaattttctagaccggatctggaagtagtcgaatttaggggtaatgttcaaacacgtttaaagaaattaaaagatggtgtcgcttcatgtacttttttagcaatggcaggtttaaatcgtttaggattgggggaagttgcccaaagcgtaataaacccaaatgaaatgttaccagcaatagcacagggcgcgatcggaatagaatggcgagaagcagataaaaaaattaccgatatacttagaaagatacaccacgaagaaacgggacaaaggttaaacgcggaaagagcattccttgccgaattagatggttcttgccaaacaccaattgcaggcttggctacaattgaaggctcgtcattgaaatttactgggcaagttttgcgtactgatggatcagaat

SEQ ID NO: 243936 - DNA, 511 bp, Unknown
  Bacterial polypeptide expressing nucleotide sequence isolated from the Sargasso Sea
aatgactaatcttaagctgagaatagctagtagaagaagtaagctagcaatggttcaaactttatgggttaaagatcaactagaaaggaatattcccaatttagaggtatctattgaagctatggcaacgcaaggggacaaaatcctggatgtagccttagcaaaaataggcgacaaaggcttatttacaaaagaacttgaagcacaaatgctcgttggacatgcagatatagcagtacattctctgaaagatttgccaaccaatttaccaaatggccttaaattaggatgcattacaaaaagggaagatcctgcagatgctttagtagtaaacaaaaaaaataactgttataaattagaaaccttacctgaaggttcgattgttggaacaagctccctaagaagacttgcacaattaagaaataagtacccacatcttgttttcaaagatatcaggggaaatgttattacaagaattgaaaaattagatgcaggagaatttgattgtata

SEQ ID NO: 243937 - DNA, 531 bp, Unknown
  Bacterial polypeptide expressing nucleotide sequence isolated from the Sargasso Sea
aaattaaagccatgcgaccagacctacagatcaaagacttacgtggcaatgttaacacccgcttggcaaaactggatgcgggtgagtttgacgccattattctggcttctgctggtttaatacgtttgggtttgaaagcccgtattgccagctttttagacgttggcaccagtttaccggccaatggtcagggtgctgtaggtattgaatgtcgtagtgatgatttggtggtgcaacagctattagctccgctggaacataaagaaacccgcatttgcgtactggccgaacgggcgatgaaccgcaagctgcaaggtggttgtcaggtgcctattggtgcttttgccgtacttcagcagaatgaactttggctgcgaggcttggtcggacagctggatggttctgaaattttacgttcagaaatcaaaggggaagcgactcaagctgagcagttagggactcaattggctgaacaactactggcgttaggcgcggatcgcattttagatgcggtctaccgtcaggcctgat

SEQ ID NO: 243938 - DNA, 655 bp, Unknown
  Bacterial polypeptide expressing nucleotide sequence isolated from the Sargasso Sea
ttgcaacttgcaggaatctgcaaacgcgaagatcccactgatgctttagtttcaaataggtttcgcaatctagaggacatgccaaaaggggcgacaattggtacatcgagcttacgaaggcaatgccagttaaagtatattcgtccagatctccatattaccgatcttagagggaatgttggcacacgtttactcaagttggaccaaggtaattatgatgcgatagttctcgctagtgccggcttaatcagactagatcaaaacagcagaattagcagtcgtctagaacctaaagaatgtttgccggcagccggtcaaggtgcagtcggaatagagtcacgtgtagatgataaagagacgcaaaaaattataagcactatccatgatgctgcaactgcttcttgcgttctagcagagcgcgctgtaaatcataggctgcaaggaagttgtcaagtaccaattgcgagctatgctgaattgtacaaaaatgaaatgagattgcgtgctttagttggcagggtggatggcacacatatagttagaagcgagcatgtagatgattgtggttctgcttgcgaacttgggctgcgagttgccgacgatctacttaacaaaggtgcgggcaatattctagacgagctccgagaagagtgaa

SEQ ID NO: 243939 - DNA, 786 bp, Unknown
  Bacterial polypeptide expressing nucleotide sequence isolated from the Sargasso Sea
tctggttataggaacgaggggaagtttgctcgctatgacccaagcgagactcgttgagaaagatttaaaaaagattgtcccttcggtgaagatagaattgaaagtgattaagacgaaaggggatatgttgtcttcatcttctaatgaagaaactgacaaatccctctttgttaaagaattagaagagtctcttttgaaagaagaagtggacttggcggttcatagcttaaaagacatgcccagtgaacttccagatggtttagatttgattgctatcccagaaagagaagatcctcatgatgttttgatttcaagagatggagaatcaattcgaaatctctctcctggaagcaaagtaggaacaagtagtttgcgtcgctcctcacagttgaaaaagtatcgtgatgatctgcaggttttccctattcgaggtaatgtggatacgagattagaaaaacttgcgaaaggagatgtagatgcactgattctagcgtctgcaggtttgaaaagattagggaaggaaggagagataatcgaggtcttgtctcctgaaattatgttgccttctccaggtcaaggagcattatgtatagaaggaagggctggcgatgagtccattatcgagtgtcttcagcaattagaccattttgttactagatgtttagtatctgctgaaagaaaagtaatgaagatcgtagaaggaggttgcagggttcctttgggggcctttgctgaaatgaggaatgatcaaatctttttaagagctttgttgttaagtctggatgg

SEQ ID NO: 243940 - DNA, 704 bp, Unknown
  Bacterial polypeptide expressing nucleotide sequence isolated from the Sargasso Sea
taaattaaagatagctagtagaagaagtaaattagctatggttcaaacattatgggttaaagatcaactagaaaatattattcctgacttggaagtatcaatagaggccatggcaactcaaggtgacaaaattcttgatgtcgccttagccaaaataggagataaaggacttttcacaaaagaactagaagctcaaatgcttgtgggacgtgcagatattgcagtgcattccctgaaagatttgcctactaatttacctgatggacttacattaggatgtattacaaaaagagaagacccttcagatgctttagtagttaataaaaaaaataaaatttatcaattagaaagtttacctccaggttcaatcgttggaacaagctccttaaggagacttgctcaattaagatataaatttccgcatcttgacttcaaagatattagggggaacgttattacaagaatagaaaaactagattcaggagaatttgactgtattattctggctgcagcgggtttaaaaagattaggatttgaatcaagaattcaccaaattattcctaatgagatttcccttcatgccgttggccaaggtgctttaggaattgaatgtaaatctgatgataaagaagttcttaaaattataagtgtcctagaagataaggtctcgagccaaagatgtttagcagaaagatcttttttaa

SEQ ID NO: 243941 - DNA, 526 bp, Unknown
  Bacterial polypeptide expressing nucleotide sequence isolated from the Sargasso Sea
cttgagcccctcgccaacgcccaccatcgtcatcgccacgcgcgaaagtcgccttgcactgtggcaggccgagcatgtcaaagcgctgctcgaagcccgtggccacagcgtgcaattgctgggcatgaccaccaagggcgaccagattctggacaagtccctcagcaaggtgggcggcaagggcctgtttgtgaaagagctggaagtggcactggaagaagggcgcgcccacattgccgtgcactcgctcaaggacgtgcccatggagcttcccgagggctttgccctggcctgcgtgatggagcgcgaagacccgcgcgatgcctttgtctccccccgctacgagaacctggacgcgctgccgcagggtgccgtggtgggcacatcgagcctgcgccgccaggtgctgctgcaggccctgcggcctgacctgacaatcgagcccttgcgcggcaacctcgacacccgcctgcgcaagctggacgaaggcagtacgacgcgatcgtgctggccgccgcgggcctga

SEQ ID NO: 243942 - DNA, 686 bp, Unknown
  Bacterial polypeptide expressing nucleotide sequence isolated from the Sargasso Sea
aatgaaaaataacttcccctctccatcagctccattgcgtattggcacccgcggctctccattagctttggctcaagcatatgagacaagaaagcgtcttacagaagctttaaatgcaagtgaagattcttttgaaatattagttatttcaacaagtggtgacagaattttagatagacctttaaaagaagtaggtggaaaaggtttatttactaaagaaattgagcaagagatgcttgatagaaatattgatatagctgtccactcaatgaaagatatgcctgtggagcaaccagatggattaacgctcggatgctacttaccgcgagaagatgtcagagatgcttttgtttcatcaaaattcaaaaatgttagcgatttaccaaatggctcgaaagttggtacttcatcactaagacgcaaagctcaactcaaattttctcgaccagatctagaagttgtcgaatttagaggcaatgttcaaacacgtctaaagaaactagaagacggtgtcgcttcatgtacttttttggccatggcaggcttaaatcgtttaggattggaggaagtggctcaaagcgcaataaacccaaatgaaatgttaccagcaatagcacaaggcgcaattggaatagaatggcgagaagaagacaaacaaataactgatatgcttaaaaaaatacacc

SEQ ID NO: 243943 - DNA, 355 bp, Unknown
  Bacterial polypeptide expressing nucleotide sequence isolated from the Sargasso Sea
tggtcaaggagcactgggtattgaatgcaaatctaatgttaaaaaagttttagagattataaatgtcttagaagaccaacccactagtcaaagatgtctagcagagagggcttttttaagagatcttgaagggggatgccaagttccaataggtgtcaatagtaaaattcaaaatgaacaactttgccttacaggcatggttgcatctctcgatggagaaaggcttattaaagatcagtatataggcaatattaataatcctgagggagtaggcaaagaacttgctaaaaaactaaagctccaaggtgccgacgaaatactaagcgaaatattcgaacaatttagagaaaaataa

SEQ ID NO: 243944 - DNA, 406 bp, Unknown
  Bacterial polypeptide expressing nucleotide sequence isolated from the Sargasso Sea
atggatattaaatcaaataaaagagattttagagcaaataagcttaaaataggaacaaggggttcacctcttgctttggctcaagctttagaagtaaaaaaagaaattacaaatcatcataatttagatgataaatccatagagataattactataagtacaaaaggggataggattctagacaggcctcttacagaaattggtgggaaaggtctttttactgaggaaattgaagaaaaattatataatcatgaaatagatattgctgtccattcgatgaaagatatgccaacagaatttccaaatgggttaggaataaatactttcttaaaaagagaagattttagagattcatttgtttctttaaaatataactcaattaacgaattacctagtggtgcagtgg

SEQ ID NO: 243945 - DNA, 718 bp, Unknown
  Bacterial polypeptide expressing nucleotide sequence isolated from the Sargasso Sea
agtacattctctgaaggatttgccaactaatttgcctgatggccttaaattaggatgtatcacaaaaagggaagatcctgccgatgctttagtagtaagcaaaaaaaacgaaatttataaattagaaactttacctcaaggttctatcgtagggacaagctccctaagaagacttgcacaattaaggaataagtatccgcatcttttatttaaagatattaggggaaatgttattacaagaattgaaaagttagatgccggtgaatttgattgtataattcttgctgcagctggtttaaagagattaggctttcaatcaagaattcaccagattattccaaatgaaatttccctgcatgctgttggtcaaggagcactgggcattgaatgcaaatctgatgataaaaaggttttagaaattataaatgtgttggaagataaacctactagtcaaagatgtatagcagaaagggcttttttaagagagcttgaaggggggtgccaagttccaataggtgtgaatagtagaattaaaaatgaacaacttttacttactggtatggttgcctctctggatggagaaagacttattaaagatcaatatattggcaatattaatgatcccgaagaagtaggcaaagaactagctaaaaaattaaagcagcaaggtgcagagaaaatactaagcgaaatatttgaaaaatttagagaaaaataa

SEQ ID NO: 243946 - DNA, 880 bp, Unknown
  Bacterial polypeptide expressing nucleotide sequence isolated from the Sargasso Sea
catgtggcaggccgagtatgttcaggcacagttattaaagcatcaccctgagtgcaaggtggagctggttcctatgtcgacccagggcgaccgtattcttgatacaccactggcaaagattggcggtaaaggtctgtttattaaagagctcgaaattgccatgctggaagggcgcgctgatatcgccgtgcactccatgaaagatgtgccggtagaatttcccgcagaatttggcctgcatgctatctgcccgcgggaaaatccgttcgatgcctttgtatccaatacttataacaacattgacgaattaccagccggtgccgtagtaggtaccagtagcttgcgtcgtcagtgtcagttaaagcacctgcgcccggatttggtgattaaagacctgcgcggcaacgttaacacgcgactggctaaactggacgccggtgattacgatgccattattctggcctgtgccggtcttatccgtctgggtatggaaaaccgcattacccagcctattccccaggagcagtcgttacctgcagtggggcagggcgctgttggcattgaatgtcgcaatgacgatgccgagcttatagagttactggctgctcttaatgatgccgacaccgcttctcgggtaattgcagaacgcgccatgaatgaacgccttgagggcggatgtcaggtacctatcgggagttttgctacccttgcggatgacacgctgtcgcttactggtatggtaggctcggcggatggtcaaactctgttatacgcgagtacccaaggccaccgcgataatgccgttgcactgggcaaagaggttgctgagtcgttgctggagcagggcgccggtgaaatcttaaaggctttgcatcagtaa

SEQ ID NO: 243947 - DNA, 808 bp, Unknown
  Bacterial polypeptide expressing nucleotide sequence isolated from the Sargasso Sea
tgaaataaatgttgaattattgaccgtaacaactgccggagaccgtaaccagcagcaacccctggctgagattggaggaaaaggactttttgtcaaagaccttgaaaacgctttgcttgatggcagggctgaccttgcagtacacagcatgaaggatgtgaccagcattttacctgaagggctggaaatttctgttatcgctgaaagagatgacccacgggatgcctggatttgcccaaaatacggaagtattgaaaacttaccaaaaggtgcaactgttggaacaagttcattgcgtcggactgcgttcttgaaacattacagacctgatataaaagttcgcagtttgcgtggtaatgtgactacgcggcttggcaaactcgatagaggagaagttgctgccataattttggccgtatctggattaaagcgaataaatctagaaaatcgtatcactgaaatttttccaatgaaatggatgcttcctgcaatcgggcagggagcaattggaattgaaaccagaacaggagaccatagcaccctgagtctggtaaaacacatcaatgatcctgtgactcatggctgtttgcttgcagagagatctttgctatcggagcttgaggggaattgtcaaattccattagcaggctattgcgtcaacacagttgaggaactgcacttaaagtctgcgctttgtgaccctgaaggtaaatcattgatagaatatgaagcaagagcgcaaccacataaagcggtaagtcttggaaaagaatccgcagaatggcttctgaacaatggcggtgatcaa

SEQ ID NO: 243948 - DNA, 844 bp, Unknown
  Bacterial polypeptide expressing nucleotide sequence isolated from the Sargasso Sea
ttgaggccatggccacccaggggcgacaagatcctggatgtcgccctggccaagatcggcgacaagggcctgttcaccaaggaactggaagtccagatgctggtggatcgtgcagacatcgccgtccactccctcaaggatctcccaaccaaccttcccgaaggcctgatgctcggctgcatcaccgaacgggaagaccccgctgacgcgctggtggtgaatgccaagaatcaggcctacaaactcgagacgcttcccgaaggagcggtggtgggaaccagttccctgcgccgcctggcacagctccggcaccactacccgcacctgatcttcaaggacgtgcggggcaatgtaatcacccgactggagaaattggaccgcggcgattacgactgcctgatcctggccgccgctggactcggccgccttggcttcgccgatcggattcaccaactgatccctggcgacatctccctgcacgccgttggacagggagcccttgggattgaatgtgtggagggcaagcctgaactactggaggcgatcaaagtgctggagcacagcaccacctcccgtcgctgtctggcggaacgtgccttcctgcgggagctggagggcggttgccaggtgccgatcggcgtcaacagccagatcaacaacgatgagctcgtcctcacggggatggtggccagcctcgatggcaagcgtctgatccgtgatcaagccagtggtgctgcaaatgagcccgagtccatcggcatcgaactggccggcaagctcaagcagcagggcgcagggaccatcctgaaggaaatcttcgacgaggtccgccctgaagcctgat

SEQ ID NO: 243949 - DNA, 952 bp, Unknown
  Bacterial polypeptide expressing nucleotide sequence isolated from the Sargasso Sea
atgactaaatttaaattaaagatagctagtagaagaagtaaattagctatggttcaaacattatgggttaaagagcaactagaaaaaaatattgctgacttggaagtatcgatagaggccatggcaactcaaggtgacaaaattcttgatgtagccttagccaaaataggagataaaggacttttcacaaaagaactagaagctcaaatgcttgtgggacatgcagatattgcagtgcattccttgaaagatctgcctactaatttacctgatggccttacattaggatgtattacaaaaagagaagacccttcagatgctttagtagttaacaaaaaaaataaaatttttcaattagaaagtttacctcaaggttcaatcgttggaacaagttccttaaggagacttgctcaattaagatataaatttccgcatcttgatttcaaagatattagggggaacgttattacaagaatagaaaaactagattcaggagaatttgactgtattattctggctgcagcgggtttaaaaagattaggatttgaatcaagaattcatcaaattattcctaatgagatttccctccatgccgttggccaaggtgctttaggaattgaatgtaaatctgatgataaagaagttctaaaaattataagtgtcctagaagataaggcctcgagccaaagatgtttagccgaaagatcttttttaagagaacttgaagggggatgtcaagttcctataggagttaatagttgtattcaaaatgatgaaatagccctaataggaatggttgcatctattgatgggaaaagacttattaaagatgaatcgataggaaatattaaatatccagaggaagttggtaagaaattagctgaaaagctaaaactacagggggctgataaaattctttcagaaatatttgaacaatttagagagaaataat

SEQ ID NO: 243950 - DNA, 723 bp, Unknown
  Bacterial polypeptide expressing nucleotide sequence isolated from the Sargasso Sea
aatgacagataagaaaaaatttataattggatctcgtggaagcaagctatctttagcctactccaattatgttaaggatttattgataaagtcaaactctcaatttgatgatagttcaatagagattaaaataataaagacttcgggggatatatttcaaaataaaagaatatcagatattgggggaaagggagtattttgcaaacaaatcgaagaggaattattagaatcaaaaatagatttagctgttcattctttaaaggatttgcccacaaaaatgacagatggattatgtgtcaatgcagtagtaaaaagaaatgatccaagagatgcatttttaagtcactccgacaaatcatttgaagaacttaaacctaaatcaaaaattgggactagctcgtttagaagagaagcacaactgaatttattaagaaatgatcttgaaattgttgcaatgagaggaaatattgacacaagaattacaaaattaaaaaacaaagaatatgatgctatagttttatctttagcgggaattcaaatgcttaacttaaaaaatgaagttaaagaaatttttactattcaacaaatgttgccagctataggtcaaggagcaattgctttacaatgtaaaaaagatgatcaaaaaactttaaatactttaaagaccataaatgataaagagacatactattgcatccaggcagaacgtgcttgctcgaagct

SEQ ID NO: 243951 - DNA, 952 bp, Unknown
  Bacterial polypeptide expressing nucleotide sequence isolated from the Sargasso Sea
atgcccgaatcgcccatcattattgccacccggggcagcgctttggcattggctcaggcaaatttcattttcgaccaatgccgtgcggcctttccgcggttggcgtttgagattcaaatttttaagaccaccggcgacaaactgcaaaccgcgtctctggcgcaggctgggcagtcgttacccaagggattgttcaccaaggaactggaagtggcgctcgtgcggcagaaagccgacatcgccgtgcatagcctgaaggatttacccaccgaattgcccgcaggcctgacgctgggcgctgccaccaagcgcgaggatgtgcgtgatgtgttgatttacaaaaccgatgacggccatggcggaccgattccgcaattggccgagggcgcgcgggtggcgaccagcagcacgcggcggcaggcgcagttggccgccgcgcggccggatctgcagctggaggaaattcgcggcaatgtgcccacgcgattggagaagctggcggagaacgatgaattggccggcaccattttggctgcggccggcttgaaccggttgcatttttccatcaacgccgatggcgcgctggaaggtgacgccgtgcccgatggcattcgtgccgtggcactggatacggacctgatgttgccgtgtgttggacaggcggcgatcggtctggaaattcgcgaggacgacggccggattgccaagatcactgagcgcctgaatcatttcaacactttcgcggctgtgaccgccgagcgggcgtttctacgcggcatgggcgggggttgccaatcgccggtgggcgcgcacgcggtgattgagggcacgacgattcgcatgcaggccgtatcgtttctcaatgataccgtgcagcgcaccgagcaatccggcgccttgcgagagccggaagcgttggggcaggcggtggccgaggccctgcgcgcatgac

SEQ ID NO: 243952 - DNA, 448 bp, Unknown
  Bacterial polypeptide expressing nucleotide sequence isolated from the Sargasso Sea
gctgaggatcgccacccggggcagtaaactggctctatggcaggcggaacacgttcgtagtataatcttaaaaaaaaatcctgacatcgcagtggaactggtggttctcaagaccaagggagatctgattcttgaccgccccctggctgaagtcggaggtaaggggctttttgtgaaagaactggaaagcgcgatgctggaaaaccgtgcggatctggcggtgcacagcctcaaggatgtgcctgccatccttccggaaggtttggaactttccgtcatcctgaaacgtgaaaatccccatgatgccctggttttccgtgaaacgaacatgtccctagaagacctgccgacaggttctaggatcggtaccagttcgctcagaagagcggcccagctcaaaaacatgagacctgatctgaaagtgacttccctccgagggaatgttcca

SEQ ID NO: 243953 - DNA, 715 bp, Unknown
  Bacterial polypeptide expressing nucleotide sequence isolated from the Sargasso Sea
atgactaataatataaaacttgctactcgtaaaagcccgcttgcgttagctcaagctaaaattgtcaaaaactttctaatagataacggtgtttttgataaagttgaccttatatctatgagcacatcaggagatacagtggataataaaatcttcaaaaaagagggtggcaaaggcctttttttaaaagaacttgagaatgcgctcctagagggagaggctgatatagctgttcattctatgaaagatgttcctgcaaagcttgatgagagatttaatatcagcagcattatgaagagagaggatccaagggatgtgtttatctcagataaacacaaaactttgtctgatattgaaactgggattattggttcttccagcccgagaaggcaggcaataataaaacatatgaattcaaatattaaatcaaaagaaataagaggtaacattcaaacaaggcttaaaaaactaaaaaaagaacagttggacggaataattttggctaaatctggacttaaaagaatgggattggatcatgtcgttacagagagtcttaatgtgaatgattttgtgccctcaccagggcaaggaatattatgtatagagtgtttatctaaaaatgattttgttattaagagaatcaaaaaagtggtgcatgcaaatactgaaatatgctgtactgctgaaaggatatttgctaaaaacatggacggcg

SEQ ID NO: 243954 - DNA, 955 bp, Unknown
  Bacterial polypeptide expressing nucleotide sequence isolated from the Sargasso Sea
atggaatataataatactaattctcgcatacgtataggaacccggggatcaaagcttgcgatcgctcaggcgctagagctgcaaaactatctcaaatcggctcacgaggctttaatggaaccgggttctatagaagtggtggtaatcaaaacgactggcgataatgtacaggaccgccctcttgcagaaattggtggcaaaggactttttatgaaagaaattgaagaagccttgttaaacaaagaaatagatttagcactgcattctatgaaagatgtagagaccgacctgactgagggaacaggactggcgtgcattctgccaagagaagagattaatgatgcttttatttctaataaagcccaagatataaatgaattatcttatgggagtatcgttggcacatcttcagttagacgggcagcgcttttaaaaaataaacgtcctgatcttaaaattactcttttccgcgggaatgttgatacgaggctatctaaattggatcgtggagatgttgatgctacatttctagctgtggctgggttaaaaagacttggtcttgaatccaggattacaaaaataatgcccttaaatgaaatgccgccagctgtagctcagggtgctattggtgcccaatgtaggacaccaagaaataagttagatagtcaattgtgggagtggctagaggctattaatcataaagatagtgagatatgcgttgaggctgaacggtcgatgttaaaaacacttgatggttcttgtcagacaccaatagcaggctatgctcaacttggtgacgagcgggaattaaaattgataggttatgttgtttctccgggtggggaaagcttatataaagtggaagggggtggctcaagattagatgcagttgctatcggtcgtaacgttggggaacgcctaaaggctaaagccggttcagacttggtgcgttaaa

SEQ ID NO: 243955 - DNA, 402 bp, Unknown
  Bacterial polypeptide expressing nucleotide sequence isolated from the Sargasso Sea
tatgaaccttgtccgcattgccacccgtaaaagtgctttagctttatggcaagccaattttgttaaagctgaactggaagctgcccacccgggtttacaggtggagctggtgcctatgtcgactcagggcgataaaattctggatactcctttagccaaaattggtggtaaaggtttgtttgtcaaagagttggaaaccgctatgctggaaggccgtgctgatatagcagtgcacagtatgaaagacgtacctgtcgattttcccgaaggcctgatgctgcataccatctgcaagcgtgaagatccgcgggatgcttttgtttccaacacttaccaacaactagccgatctgccgcagggggctgtggtgggaacctccagtttacgtcgccagtgtcaaat

SEQ ID NO: 243956 - DNA, 754 bp, Unknown
  Bacterial polypeptide expressing nucleotide sequence isolated from the Sargasso Sea
atgaataagcaatataaagacagagattttacagataggccactaattattgggactagaggttctcctctcgctgtttcccaggctgaagagacaaaaaatcgcttgatgagagcacataaattagatgaaaaagcatttagaattaagataataaaaaccacaggagatcttgtgcaagacaaacctctttcacagattgggggcaagggtctttttaccaaagaaattgaggaagctcttctctccaaggaaatagacatcgctgtccattcgatgaaggatgtaccaactgttttacctaaggggctggaaataactactttattacccagagaagatgtccgagattcttttttatctaataaggctagttcgattgatgctttacctattggatgcacggttggaacatcttctctaaggcgaaaagcacagctactctcaagaaggcctgacttgaagattgttgaatttaggggcaacgttcaaacccgcttaagaaaattagaaaaaggagtggctcaagcgactttcttagcttgtgcagggttaaaaaggcttggattgaaggaccttattaagcccatttctgtagaacaaatgttgcctgccgttgctcaaggtgctattggtctggagcaaagagaagaagatgaggacgtttttgaatttctttcaccaattcatgatcttaaaacagctatacaattagaagcagaaagggctttcctctctgagctggatggatcat

SEQ ID NO: 243957 - DNA, 934 bp, Unknown
  Bacterial polypeptide expressing nucleotide sequence isolated from the Sargasso Sea
catgtctgaaaaccgcatacgtatcgctacccgcaagagtccgctggccatgtggcaagctgaatttgttaaagcagaattagaacgcgttcacccaggtatcgtggtggagctattgccaatgagcactaagggcgatgttatcttagacaccccattagctaaggttggcggtaaaggcttgtttgtaaaagaactcgaagtcgccatgctagaagaccaagccgatatcgcagtgcactcaatgaaagatgtgccagtggatttccccgaaggcttagggctggaagtgatttgtgaacgtgaagatccgcgcgacgcctttgtgtctaacctttataagtcaatcagtgagctaccacttggcgccacagtcggcacctcaagcctacgtcgtcagtgccaactgcgcgcatcacgcccagacctgattatcaaagatctgcgcggcaacgtgggtactcgcctcgcgaaactcgataacggcgaatacgatgcgattattcttgctgctgcagggttaatccgcctgaaattatctgagcgtattgccagctttatctctgccgaagaatccttacccgctaacggtcaaggcgctgtcggtatcgaatgccgcactaacgatgaacgcgtaaaagcgcttttagctcctttagagcacttagagactcgctaccgagtgatcgccgagcgcgccatgaatactcgcctcgaaggtggctgccaagtacctattggtgcctttgccgaaatccacggtgatgagatgacactgcgcggccttgtgggtaatcccgatggtagcgaaatcatcgaaggcgtgatcactggtccaaagaccgaagcgacgcaactcggtgtcgcccttgcagaagaactgctcagcaaaggcgctaaaagcatcctcgacgctgtttacgcaaaagcctaa

SEQ ID NO: 243958 - DNA, 928 bp, Unknown
  Bacterial polypeptide expressing nucleotide sequence isolated from the Sargasso Sea
atgattaaatcagttaaaattggtactagatctagtaagctggcattatatcagtctaatttggttaaagaaaaattatcaagtttactgccaagcataaaaatttcaatagttgaaatcaaaaccaagggtgataaaatccaagacagaaatatagatagaagtatcgataaaggtttttttgttaaagagatccaagaacatttacttgatgaccaaattgatatagctgttcacagccttaaagatttacctgttgagaattattcaggtgatttagcctcaataattttagaaagaggtaatcattgtgatgtttttttaagtagaaataaaaaaaaactttcagattttgatcatacattaaaaattggaacatcttctctcagaagaaaggcacaattactaaatattaattctgatttaaatattgatgatataaggggtaatgttgatacaagaatctccaaaatgctaaatggagaatttgatggtttagtaatggcagcagctggaatagaaagacttggactccaagagcatgttactgaatattttgacactgatcaaatgcttccagcgccaggtcaaggggctatttcagttgaggttaagaagaaaaataatgaattatttgaaatgctaaaaaatatttgtgatgaagaaacagatctttgcacttactatgaaagatcgtttatgaatgaattaggtggtggttgtaattcaccaattggtgcatattcatttatttcaaacaataaaaagaaaattactggttccattctttcattagatggaaaacaagtttataaaagaagcctggaaaaggatcttagtgatgatattaatattgggaaactattagctgaagatttaattaaatctggagctaaagaaattattaaaaaattaaccattgaataaa

SEQ ID NO: 243959 - DNA, 489 bp, Unknown
  Bacterial polypeptide expressing nucleotide sequence isolated from the Sargasso Sea
catgagtcacctcaacactacccgcaccgttcgaattgctactagaaaaagtgctttagcgctttggcaagcagagtatgtgaaggcaaaattgttggagcattatccgtcaatgaccgttgagcttgtgcctatgagcacgcagggcgacaaaattttagatacacctctggcgaaaattggtggtaaaggacttttcataaaagagcttgaaattgccatgcttgaaggccgtgccgatatagccgtgcactctatgaaagacgtaccggtcgaatttcctgaaggttttggccttcacgctatttgtgagcgagaaaacccgttcgacgcctttgtttcaaataaccacgacagtttagatgccctaccccaaggcgcagtagtaggtacgtctagccttcgcagacagtgccaaattcgcaagtatcgccctgaccttattatcaaggacctgcgcggaaacgtgaatactcgtctcgcgaagct

SEQ ID NO: 243960 - DNA, 919 bp, Unknown
  Bacterial polypeptide expressing nucleotide sequence isolated from the Sargasso Sea
tatgagtaatttaattaggatagcaacacgtaagagtccactggcactagtacaagctaatagagtcaaagagttgatagaaaaacgactgaaagacactacggttaaattgattacaaggtctacatcaggtgatacagtatccaaggcaaaatttaaaaaatctggcggcaagggattgtttcttaaagaattagaagagctcttgctagatggagatgctgatatagcagttcactctcttaaagacgttccggttgtcgtagataagaagttcataattacgacggtagatcttagagaagaggctggagatgtattgatttctaaacagtttaataaaataactgaacttccagacaaatctgttatcggtacatcaagtccaaggaggattgctcagatccgaaataagtataagaatattcaaataaaagaaattagaggcaatgttcaaactagaatagcagaactatcaaatgataaagttgatgcggtaattctagcggcagcaggagttaaaaggctctccctctcagataagatttcacaatacctacctaaagatgattatgttccagcagcaggacagggtgttctttgtatacagactacaaaaaataatgaatatattctaaaaactctcaaaggacttgtattggatgaagttgatagatgtgcgagcgaagagagggattttgtaagacagttcgacggagattgtttttctccgatagcagcacattgttatatcaaaaacaataaatcaacactaattggctatgtaagcagcactgacggtaatagatttattaaaactaagattgttgaaaatgttaatgagatgaggggtatcggcaaaaaacttgctaaaataatgatagaacagggtgcaaaaaaaatcctcgggacaaaatga

SEQ ID NO: 243961 - DNA, 369 bp, Unknown
  Bacterial polypeptide expressing nucleotide sequence isolated from the Sargasso Sea
tatgagcagaaaactgagaatagccactagaaagagcccgttggccctttggcaagcaaactttgtacgccagtctttggaaaaaattcataaggacttaaaggttgagcttgtgcctatgagcactcaaggcgacaagattctcgatagtccgctagcaaaaattggcgggaaaggtttatttgtcaaagaacttgaaatggccttattgcaagatacggcagatgtggcagttcactctatgaaggatgttccaatggaatttccggaaggattgcaacttgcaggaatctgcaaacgcgaagatcccactgacgccttagtttcaaataaatttagcaatctggagggcatgccaaaaggcgcgac

SEQ ID NO: 243962 - DNA, 1168 bp, Unknown
  Bacterial polypeptide expressing nucleotide sequence isolated from the Sargasso Sea
actgcgaaactgcggtcaagcaaccagctacgtgcggcacatccgcgcatcggcgccgcgacccgctcggcggcaggccgggcgcaggctccgggcccgggcgggcaggggcgtgcgtgctaccattgttcgatcctcaatcccgtccttcgatgttccagcaatgaattccgagacccctgcggccgggccgcaacaggcacagtcgcccgcgacgttgacgattgcttcgcgcgagagccgcctggcgatgtggcaagccgaacatgtgcgtgatgcgctgcgcaaattatatccagcttgtgacgtgaaaatcctcgggatgacgacgcgcggcgaccagattctcgaccgtacgctgtcgaaggtcggcggcaagggcctgttcgtgaaggagctggaggccgcgctggccgacggccgtgccgatctcgccgtgcattcgctgaaggacgtgccgatggcgctgcccgacggcttctcgctcgccgcgatcatggagcgcgaagatccgcgcgatgcattcgtgtcgaacgattacgcgtcgctcgacgcgctgccggccggtgccgtggtcggcacgtcgagcctgcgccgcgaggcgatgctgcgctcgcgctacccgcacctcgacgtgctgccgctgcgcggcaatctcgatacgcgcctggcgaagctcgatcgcggcgactacgcggcgatcatcctcgcggccgccggcctgaagcgcctcggcctcgaaacgcggatccgcgcgctgctcgacgtcgaggcgagcccgcccgccgcgggccagggcgcgctcggcatcgagatcgcatcgcaccgcaacgacgtcgccgcatggctcgcgccgctgcacgacccgcagaccgcgctcgcggtcgaggccgagcggatggtgtcgcgcgcgctcggcggcagttgcgaggtgccgctcgccgcgcacgcggtgtggcgcgcaggcgagctgtacctgaccggccgcgtgtcgacgaccgacggcaagcgcgtgctgacggccgaggagtgcggggctgtcgtgaccgtcgccgatgcgctcgcgctcggccgcgcggtgtccgatgcgctcgaggcgcaaggcgcactcgacatcgtccaggcgctgctcgcgggctcgccggccgccggcaagggcgacgcctga

SEQ ID NO: 243963 - DNA, 919 bp, Unknown
  Bacterial polypeptide expressing nucleotide sequence isolated from the Sargasso Sea
tatgagtaatttaattaggatagcaacacgcaagagtccactggctctagttcaagctaatagagttaaggagttgatagaaaaacgactgaaagacactacggttaagttgattacaaggtctacatcaggtgatacggtatccaaggcaaaatttaaaaaatctggcggcaagggattgtttctcaaagaattagaagagctcttgctggatggagatgccgatatagcagttcactctcttaaagacgttccggctattatagataagaagttcataattacgacgatagatactagagaagaggctgcagatgtattgatttctaaacagtttaataaaataactgaacttccagataaatctattatcggtacatcaagtccaaggaggattgctcagatacgaaataagtataagaatattgaaatagaagaaattagaggtaatgttcaaactaggctagcagcactgtcaaatgataaagttgatgcaataattctggcggcagctggacttaaaagactctccctctcagataagatttcacaatacctgcctaaagatgattatgttccggcagcaggacagggtgtgctttgtattcagactatcaagaataaagaaaatattctaaaaactctaaaaggacttgtggtggatgaagttgatagatgtgcaagcgaagagagaggttttgtaagtcagttcgacggagattgtttttctcctattgcagcacattgttatatcaaaaataataaatcaacattaattggctatgtaagcagcactgatggcaatagatttattaaaactaagattgttgaaaatgttaatgagatgaggggtatcggcaaaaaacttgctaaaataatgataagacaaggtgcaaaaaaaatcctcgagacaaaatga

SEQ ID NO: 243964 - DNA, 952 bp, Unknown
  Bacterial polypeptide expressing nucleotide sequence isolated from the Sargasso Sea
atgactaattttaagctaaaaatagctagtagaagaagtaagctagcaatggttcaaactttatgggttaaagatcaactagaaaggaatattcccaatttagaggtatctatagaagctatggcaactcaaggtgacaaaatccttgatgtagccttagcaaaaataggcgacaaaggcttatttacaaaagaacttgaagcacaaatgctcgtaggccatgcagatatagcagtacattctctaaaagatttaccaaccaatttgcctaatggccttaaattaggatgcattacaaaaagggaggatcctgcagatgctttagtagtaaacaaaaaaaatgactgttataaattagaaaacttacctgaaggttcgattgttggaacaagctccctaagaagacttgcacaattaagaaataagtacccacatcttgtttttaaagatatcaggggaaatgttattacaagaattgaaaaattagatgcaggagaatttgattgtataattcttgctgccgctggtttaaagagattaggctttgaatcaagaattcaccagattatcccaagtgaagtttcccttcatgccgttggccaaggagcactaggcattgaatgtaaatctgatgataaaaaagttttagaaattataaatatcttagaagataaacccaccagtcaaagatgtctagcagaaagggcttttttaagagagcttgaaggtggatgccaagtcccaataggtgtgaatagtaaaattcagaatgaacaactttgccttactggtatggttgcatctcttgatggagaaaggcttattaaagatcaatatattggcaatattaatgatcccgaagaagtaggcaaagaactagctaaaaaattaaagcagcaaggtgccgaagaaatactaagcgaaatatttgaaaaatttagagaaaaataaa

SEQ ID NO: 243965 - DNA, 934 bp, Unknown
  Bacterial polypeptide expressing nucleotide sequence isolated from the Sargasso Sea
atgtctgaaaaccgcatacgtatcgctacccgcaagagtccgctggccatgtggcaagctgaatttgttaaagcagaattagaacgcgttcacccaggtattgtggtggagctattgccaatgagcactaagggcgatgttatcttagacacgccattagcgaaagttggtggtaaaggcttgtttgtgaaagaactcgaagtcgctatgctcgaagaccaagccgatatcgccgtacactcgatgaaagacgtgccagtagatttccccgaaggcttagggttggaagtgatttgtgaacgcgaagatccacgcgatgcctttgtgtctaacctttataagtcaatcagtgagctgccactcggtgccacggtaggcacctcaagcctacgccgtcagtgccaactgcgcgcctcacgcccagacctgattatcaaagatctgcgtggcaacgtgggtactcgcctcgcgaaactcgataacggcgaatacgatgcgattatcctggctgcggcgggtttaattcgcctgaaattatcagaacgtattgccagctttatttctgcggaagaatccttacccgcaaacggtcaaggtgctgtcggtattgaatgccgcactaacgatgaacgcgttaaagcattattggcaccattagaacacttagaaacgcgctaccgagttattgccgaacgcgccatgaatactcgcctcgaaggtggttgccaagttcctattggcgcctttgccgaaatcgatggtgatgagatgacactgcgcggcctcgttggtaatccagatggtagcgaaatcatcgaaggcgtgatcacaggtccaaagaccgaagcgacgcaactcggtgttgcccttgctgaagaactactgagcaaaggcgctaaaagcatcctcgacgctgtttacgccaaagcctaag

SEQ ID NO: 243966 - DNA, 946 bp, Unknown
  Bacterial polypeptide expressing nucleotide sequence isolated from the Sargasso Sea
tggcaggcggagcatgtgcgatgtgcgctgcacaaattatatccatcttgtgacgtaaaaatcctcggaatgacgacacgtggcgatcaaattctggatcgcactttgtcgaaggttggtggtaagggccttttcgtcaaggaactggaagcggcgctggccgacggccgcgccgatctggccgtgcattcgctcaaagacgtgccgatggagctgcctgagggctttgcactgtccaccatcatggagcgcgaagatccgcgcgacgcgctggtttccaaccaatacgactcgcttgccgcattgccggcaggggcggtggtcggcacgtccagcttgcgccgcgaggccatgctgcgcatgcgttatccgcatctcgtagtgcgcccgttgcgcggcaatctcgacacccgcctcgcgaaactcgatcgcggcgactatgcggcgatcattctggcggcggccggtttgaagcgtctgggtctcggcgagcgcatccgcgcaaatctggatccggaagacagcttgcccgcagccggccagggcgcgctcggcatcgagattcgcgccgatcgcgcggacctcgcggcatggctcgcgccgctgcatcacgaacatacggcagcggccgtcgaagcggagcggatggtctcgcgcgccctcggcggcagctgcgaagtgccgctcgcggcctacgcgcaatggcatgacggcgcgttgcatctgcgcggcatcgtcgccacgcccgacggccagcgtgtattgagcgcgcaggcatcggcaccggcgcccaccgtcgagcgcgcgattgcgcttggtgaggaagtggcgagcgcgctcgaacagcaaggtgcgatggacatcgtccgtgcgttgagcacggctagcggtcctgcggcagcgtcgtcagacggcgcgccggatagcgcggcgaccggcgagtgat

SEQ ID NO: 243967 - DNA, 871 bp, Unknown
  Bacterial polypeptide expressing nucleotide sequence isolated from the Sargasso Sea
ttggctcaagcatatgaaaccaaagaaagattgatgaagttgcatgacttaggtgatgatgctttcgaaatatgtgtaataaacacaatgggtgataaaatccaagaccgtgcattatctgagattggtggaaaaggtttgtttactaaggaaattgaagaggggttactttctggacaaatagatattgccgtacattccatgaaagacatgccgacggaattaccaaaaaatttggaaatctcagtttttttggaacgtgaagacccaagagattcatttataagtgatgactatagtactatagaagacttaccttctggttcagtagtaggtacttctagtcttaggcgaaaagctcaacttttggcctttcgttcagatctaaaagtaattgaatttcgcggaaatgttcaaacccgattaaggaagttgaaagagaaggtcgccgatgctacatttttagcctgtgctggacttaatagacttttaatgcaagatttgataaaaccaatccctattaagcaaatgcttccggccgtagctcaaggcgttattggaatagagaataaaataggaaataaaaccatagttgatttcattgagccattaaatcataaaaaaacagcaattcaaatgacagtagagagatcgtttttagctgttttagatggttcgtgcagaactccaattggtggtcatgccataattaaggaagaagaaatattgtttcatggtgaaattcttaagtccgatggttcgatagtgcacaaagacgtttggtccggacctatctcggattcaaaaataattggagaaactgcaggtcaaattcttaaagaaaaagggggaaagaatttctttgggtaaa

SEQ ID NO: 243968 - DNA, 952 bp, Unknown
  Bacterial polypeptide expressing nucleotide sequence isolated from the Sargasso Sea
atgactaattttaaactgaaaatagctagtagaagaagtaaactagccatggtgcaaactttgtgggtaaaagatcaactagaaaaaaatattcccaatttagaggtatccatagaggccatggcaactcaaggtgacaaaattcttgatgtagccttagcaaaaataggtgataaaggcttatttacaaaagaacttgaagcacaaatgctcgtagggcaagcagatatagcagtacattctctaaaagatttaccaacaaatttgcctagtggccttaaattaggatgtatcacaaaaagagaagaccctgcagatgctttagtagtgagtaaaaaaaatgattgttataaattagaaactttacctgcaggttcaattgtggggacaagttctctaagaagacttgcacaattaagaaataagtacccacatcttaatttcaaagatatcaggggaaatgttattacaagaatagaaaaattagatgccggagaatttgattgcataattcttgccgccgctggtttaaagagattaggctttgaatcaagaattcatcagattattccgaatgaaatttccctacatgccgttggtcaaggcgcactgggtattgaatgcaaatctgatgataaagaagttttagaaattataaatgtcttggaagataaacccactagtcaaagatgtattgcagaaagggcctttttaagagaacttgaaggaggatgccaagttccaattggtgtgaatagtattattcaagatgaacaactttaccttactggaatggtagcctctctcgatggagaaaggctgattaaagatcagtgtattggcaatattaatgatcctaaaaaagtaggagaagaattagctaaaaaactaaagatccaaggtgccgacaaaatactaagcgaaatattcgaacaattcagggaaaaataaa

SEQ ID NO: 243969 - DNA, 463 bp, Unknown
  Bacterial polypeptide expressing nucleotide sequence isolated from the Sargasso Sea
aatgacacttaaaataagaattgctactcgaaaatcagaactcgctttaagacaagtagatattgttaaaagttattttggagcagatgttgaaactgaaactattaaagttactacatcaggggacaaaattttaaataaatctttatctgacattggaggtaaaggtctttttattaaggaattagagtattttattttaaatggatttgcagacattgctgttcactcaatgaaagatatggaaacagatattgcaaaaaatactgaaatctcagctgttcttccaagaggtgatagaagtgatgtcttgttaggaaattatgattcattcgataatttgccagataaagcaattgtgggaacaagttctgtaagaagagctgcttttgctaaatattataggcctgatttaaacataaaggttctgagaggtaatgttgggactcgaatgaaaagctaa

SEQ ID NO: 243970 - DNA, 913 bp, Unknown
  Bacterial polypeptide expressing nucleotide sequence isolated from the Sargasso Sea
atgaaaaatataattagaattgcaacgagaaatagcccattagcactaaaacaagcaaacatggttaaagacctgctgacgccatcctcagattgcaaaataatttctatgagctcatctggagatacagtctcacagaaagcgtttaaagaacatggtggcaagggcctttttttaaaagaattagaagagtcgctgctaaaaggaaattgtgatatagctgttcactcactgaaagatgtgccggctgtaattgataaaaaatttaaaataatcacgatttctaaaagagaagtttcatcagatgttttagtctcagatgattacgaatcgatagaggaaatgccaaaggactcaataataggcacatccagtcctagaagagcagcaatattaagaaatatatctcaggattttaaaataattgatataagaggaaacatacatactaggcttactaaaatgaataataaaaatttggatggcataatccttgctgcagcaggtctacgccgaatggggttagaaaataagattaggaaatatctttctctagataaatttgtaccttcagctggccaaggcattctatgcattgaattactaagaaacgagaagaaaattgaaaaaatacttgaaaaattatgcgtgaaaaatgttcaagattgtgctgatattgaaagacaatttgttcgggcaatcgatggggattgtatgtcaccaataggtgttcatgcaagaataaacaaaaataaaattataattgatgcttacgtttctactttggatgggaaaagacatattaaagttaagcatgaagatgatgttagcaataagcaaaatgtaggggaagagctcgcagatatatttctaaaacaaggcgcaaagaaattattaggtaaatcagtatgaa

SEQ ID NO: 243971 - DNA, 940 bp, Unknown
  Bacterial polypeptide expressing nucleotide sequence isolated from the Sargasso Sea
tatggaattaaaattaccagatccaaaatcaccattgcgcattggtactaggggctcacctctagcgttagcacaagcatatgaaacaagagagagacttagcatagctttcggattgtcactcgactcatttgaaattgttgtaattaaaacaactggcgataaagtccttaatcgccctctaaaagagattggtgggaaaggactttttaccaaagaaattgaggaagcactgctacaagagagtattgatattgcagtgcactcaatgaaagatatgcccgttcagcagcccgacagtctaattttggacacattcttgcccagagaagatgtgcgagatgcatttgtatcgaggatccacaaaagtttagcagatattccacaaggggctacagtgggcacttcatcgctcagacgaaaagctcaacttatgtcaaagcgtcctgatctaaaaatagtagaatttcgcgggaacgtacaaacaagactgaagaagttagacgacggtgtggctgagtgtacatttttagcagttgccggactaaatcgtcttaacatggaagatataataactgcacctatttcaacagacgagatgcttccagccgtggcacaaggtgcaataggcattgagcgtcgtgaaaaggacataaaaattgcaacaatgctagaagctattcacaattctacaacaggattgctactgtctgccgaaagagctttcttagaagccttagatggttcatgtgagaccccgatcgccgggttggctgagtttaaaaatgagaaccttagatttcgcggcgagattttaaaaactgatgggtctgaggtttatagtgatgagcaagtagttgctaaagaggatgccactctcgtcggcattgaaatggcgcataaactcttaagtcaggcaggcaatgatttcttttcatga

SEQ ID NO: 243972 - DNA, 525 bp, Unknown
  Bacterial polypeptide expressing nucleotide sequence isolated from the Sargasso Sea
aatgttaaaaaaaataactattgcaactaggaaaagccctttagccttatggcaagctgagtatgtagcaagtctcttaaagtccaaaaatcatggtatagaaatttcttttaaaaaaatagtgacagacggtgacaagataattgataagcctctttatgaagttggcggtaaaggactttttttaaaacaactcgaggaagcattattaagtaaagaagcagatatcgcagtacattcaatgaaagacattccagcacagcttcactctgaactaacaatatctgcaatattacgaagagaagatgcaagagatgtttttgtatcaaataaaatgagctcaataaatgaaattcaacctggaaataaaattggctcatcaagtattagaaggatctgtttacttaatgatttttgtcaaaatataaagatatctgagctaagaggcaatatacatacaagacttgaaaagcttgagcaaaaaaatatggacggtatcatccttgcagctgctggcttaaaaag

SEQ ID NO: 243973 - DNA, 973 bp, Unknown
  Bacterial polypeptide expressing nucleotide sequence isolated from the Sargasso Sea
ttggctgtgacagcggagggttcaaaggtgcctgaacgccctatgctgaggatcgccacccggggcagcaaactggctctatggcaggctgaacacgtccgtagtctaatcctaaaacaacatcctgacatcgcggtggaactggtggttctcaaaaccaagggagacctgattcttgaccgtcccctggctgaagtcggaggtaaagggctttttgtcaaagaactggaaagtgcgatgctggaaaaccgtgcggacctggcggtacatagcctcaaggatgtgcctgccctccttccggagggcttggaactttccgtcatcctgaaacgtgaaaatccccatgatgtcctggttttccgtgaaacgaacatgaccctggaagacctgcagatagattccaggatcggtaccagttcgctcagaagagcagcccagctcaaaaacatcagacctgatctggaagtgacttccctccgcgggaatgttccaacccggttgaagaaactggatttcggagaagtggatgcagccgttttagccgctgccggattgatcaggctggaactggaagaccgaatcaatcaggaactttcgacggagcagatgcttcccgctatcggccagggggttttggccttggaaaccaggaaaggtgatgatgcaacccttgaaaaactccgtttcatgaatgatgaaccaaccgaggattgcatgactgcggaacggaaggtgcttgagacccttgagggaaactgtcaggtacccctggcgggattctgcaagcttgaaggaaataatctccatctccgggctttaattgcccaacaggatggaagtaccattttccacgccgaagaacgcgcccgacgggatgaagcagaagaaattggcaccagggtggccaatctattgcttcaacagggaggaggagtgttgctgcaacaactttcagctatggaagaacgatgac

SEQ ID NO: 243974 - DNA, 432 bp, Unknown
  Bacterial polypeptide expressing nucleotide sequence isolated from the Sargasso Sea
ccattatcttagcttctgctggccttattcgccttgtaatggaatctcgtattcgcatgccgttacccgctgatatttcactacccgccgttggacaaggtgccgtaggtattgagtgccgtaacgacgatgaagagctaattaagttgctacaggcgctgaaccatacggacaccaatacacgcgttactgcggaacgcgccatgaacgagagattggaaggcggctgccaagtacctattggtagctttgccacgcttgatggagatgtgctgacactaaccggtatggttggtaagccagatggttcagaactgctctttgcttctgctacagcgtcgcgagaaaaagccgcagatattggtgttgaagttgcggaatcccttcttgagcaaggtgccggtgaaatcttaaaggcgctttataactaag

SEQ ID NO: 243975 - DNA, 955 bp, Unknown
  Bacterial polypeptide expressing nucleotide sequence isolated from the Sargasso Sea
catggccctcaccgaactgcgcatcgcctcacgacgcagccagctggccatggtgcaaaccaactgggtgaaagcggaactggagaaggcacatcccggcctgaagatcactgtggaagccatggccacccagggggacaagatcctggacgttgccctggccaagatcggtgacaaaggtctgttcaccaaagaactggaagcccagatgctggtggatcgtgcggacatcgccgtccactcgctgaaagacctgcccaccaaccttcctgaggggctaatgctcggctgcatcaccgaacgggaagacccggccgatgccctggtggtgaatgccaagaaccaggcgtacaaactcgacacccttcccgaaggctctgtggtgggcacgagttccctgcgccgtctggctcagctgcgtcaccactacccccacctgatcttcaaggacgttcgggggaacgtgatcacccggctggagaaattggatagcggcgattacgactgcctgatcctggctgcggcaggcctgggccggcttggcttcggcgatcggatccaccagctgatccccggcgacatctctcttcacgccgttggtcagggcgccctggggattgaatgcgtagagggcaagcccgaagtgcttgaggcgatcaaagtgctagagcacacccccacctcccagcgctgcctggccgaacgcgctttcctgcgggaactggaaggtggctgccaggtgcccatcggcgtgaacacccgcttcgaaggtgatcaactgatcctcaccgggatggtggcaagccttgatggcaaacgcctgatccgcgaccaggccagtggcgcagcaagcgacgccgaagccatcggcatcgctctggccaacaccctcaaaggtcagggtgctggggagatccttaaagagatcttcgacaccgtccgcccggaagcctga

SEQ ID NO: 243976 - DNA, 163 bp, Unknown
  Bacterial polypeptide expressing nucleotide sequence isolated from the Sargasso Sea
aatggaaaaattattgattagaggtggtaagacacttacaggagagataaattgttcaggtgcaaaaaatgcagcacttccagtgattgcagcatctttgctaacagatgacgatgttgttttacaaaatcttcctcatcttcgagatatcacaacaatgttt

SEQ ID NO: 243977 - DNA, 481 bp, Unknown
  Bacterial polypeptide expressing nucleotide sequence isolated from the Sargasso Sea
atgttaacgataaccgatctcagtttacaacgaggcggcgtctggttgctagaaaacgtcaacctgacagttcaacccggccagcgggtggccattgtgggcgccaacggcgccggtaagtccagtttattcaagctgttactggggcagctggcggcggagcagggtggtgtatccttgcccggcggttgccggattgcccatatggcgcaggaagtcgaagcctcggcacgctcggcccgggattttatcctggatggtgatttcgaactgcgccggctggaacgggaactggccgaggccgaagcccggggcgatgaccacgccatcgcccacgctcacggcgagctggacctgcacgaagcctggtctgctccacggagggcagaagccctgttgcggggcctgggctttgccgacagcgatgcggagcggccggtatcggcgttttccgggggctggcgcatccggctgaacctgg

SEQ ID NO: 243978 - DNA, 709 bp, Unknown
  Bacterial polypeptide expressing nucleotide sequence isolated from the Sargasso Sea
tatggataaatttctgattaatggcccttgtaaaatcaagggcaatgtttcaatttcaggttcgaaaaatgcatccctaccgatattagctgcaacacttttatttgataaacctgtagtaatcaataatttaccaagagttaaagacattaatacaatgttaaatttattaaagtctcttggttctaaaataattttatcaagagataaaaaaacagcaaaaattataaataaaaaaaatatgaaaacttttgctagttattctttagtcaaaacaatgcgtggttctattttagttttaggtccacttatttcaaaatactataaatccaaaatctcgttacctggagggtgtttaattggtgctagaccaattaattatcatctaaaagcattaaaaaaacttggtatgaaatacgaattaaaagatggatatattctagcaaaatcaaaaggaaaacttagcggaacaactataaattttccaaagttaagtgttggggcaacagaaaattctataatagcagcatgtttagcaaaaggaaaaacagttttaaataattgtgcaattgaacctgagatcaaagatcttacaaattttttaaataaagctggagcaaaaattaagtggagtggaagagtctgtaaaattataggtgtaaattctttaaatcaaactgaatattctgtaatggctgatagaatagaa

SEQ ID NO: 243979 - DNA, 316 bp, Unknown
  Bacterial polypeptide expressing nucleotide sequence isolated from the Sargasso Sea
tatgtgtaaggcagttggcaaaagttcaattactgaaagtatttttgaaaatagatttatgcacgttgcagaattgcaaagactaggagcaaaaataagtgttaaaaataatactgctacgatagaaggaaacactaaattcattggtgccgaattaatgtctagtgatttaagagcctctgttgctctggttttagcagctatagtttccacaggtaaatcatatattaatagaatttatcacttagatagaggttatgaaaaaatcgaaaataaattaaaaaaaataggtgttaaaattaaaagattaaaatag

SEQ ID NO: 243980 - DNA, 674 bp, Unknown
  Bacterial polypeptide expressing nucleotide sequence isolated from the Sargasso Sea
aatgaaaaaatttataataaaaggccctaataaagctgctaagggagaggttaatattagtggtgcaaaaaattcctgccttcctttaatggcagcttcaatattgtttaataataaagtaattttaaaaaatgtaccttttgtaaaagatgtttatacaatgaaagacttgttaatctctctaggagccaaggtcgatttctcagagtcagaaaaaataatgataataaataataaaaaaaatcataagttaatggtgccctataaattagtttcaacaatgagagctggagttttaaccatgggtccgttgttagcaagatacccaaaaaaacaaattaaagttgctttaggaggaggttgcgcactaggtgtaagagataccaattggcatttagcaggttttaaaagtttgggggcaaattttgaattagataaaggttatgtaaatatttccagcaaaaaaggattaataggaggtagatataaatttccgaaagttactgttacgggtacatctaatgttataatggcatctattttagcaaaaggtacacattatataaaaaatatttcaattgaacctgaggttatagacttaataaacttcttaaataattctggagcaaatattaaatttttaggaaaaagatctattaaaattaaaggagtaa

SEQ ID NO: 243981 - DNA, 436 bp, Unknown
  Bacterial polypeptide expressing nucleotide sequence isolated from the Sargasso Sea
atggacaagtttttgattaaaggtccctgtaaaattaagggagaagttttaatttcgggaagtaaaaatgcagctttaccaattttggcctctacattgctctttgataaaccggtgaatataaaaaatttgcctagagttaaagatgtagataccatgttaaatttactaaaatcacttggttcagtgattaagtatagtaaaaataaaaaaacagtcacaatttcaaaatcaaaaaaacataacgtttttgttccttattctttagtaaagactatgagggcaggaattttagttttaggtccactaattgcaaaatatcaaaaatctattacgtcattacccggtggttgtttgattggagccaggccagttaattatcatttaaatgcacttaaaaaacttggaatgaaatataaaataaaaaaaaggttat

SEQ ID NO: 243982 - DNA, 379 bp, Unknown
  Bacterial polypeptide expressing nucleotide sequence isolated from the Sargasso Sea
atgaaaagatttctaattaatggccccaacaaaggtgttaaaggtgaaattaatataagtggtgccaaaaattcgtgcctacctttaatggcagcctcaatattgtttaagaaaaaagtcattttgagaaatgtaccttttgtaagggatgttttgactatgaaagatttgcttgtatctttaggttcaaaagttgagcttataaaagaaaaaaaaattattaaaataataaataataaaaaacataaattaattgttccatacaatttagtttctactatgagagcaggtgttttaacaatgggacctttattagcgagatatccaaaaagcaaaattagagttgctttaggtggaggtgtgcgctttaggaattaga

SEQ ID NO: 243983 - DNA, 340 bp, Unknown
  Bacterial polypeptide expressing nucleotide sequence isolated from the Sargasso Sea
cttgcaggcgcaatttatggttttgttatgtttagccggcggaagaagctcaataactgaaagtatatttgaaaatagatttatgcatgtagctgaattgcggagactgggcgctaagatagttgtaaagggcaataaagctatcattcagggacaaacagagtttaaaggagcagaattgatgtctagtgatttaagggcatcagttgcattagttcttgctgcaatggttgcaaagggtcaatccataataaacaggatttatcatttagatagaggatatgagaaaatagaaaataaacttaaaaaaattggggtaaatattaaaagattatcttaa

SEQ ID NO: 243984 - DNA, 478 bp, Unknown
  Bacterial polypeptide expressing nucleotide sequence isolated from the Sargasso Sea
atggatatgtggtgccagaaacttggtgaaatggggatgcgtatttcatcagattcaactggcctctgggctatggcgagtaaaggcctacagtctgttgaccttgcgactcttccgtaccccgggctagcaactgattacaaaccgtttctcgtagcaatgttgtctgtagcagatggtgttggaatcgtaacggagaacctatttagtggacgcttccgttatgttgatgaacttataagaatgggggcggaaattcgcactgaaggccatcatgcggttatacgcggggttcctaaactttcaggtgctccggtgcgagcacacgatattcgggcaggggctgcccttgttactgcagctctaaaagctgacggagaaacagagataagggaccctcaccatatagatagaggctatgaagatcttgtcggaaagctgaaaagcctaggagctgatatagatagagctaactaag

SEQ ID NO: 243985 - DNA, 289 bp, Unknown
  Bacterial polypeptide expressing nucleotide sequence isolated from the Sargasso Sea
tatggataagttagaagtctttggagcaaaaaagctcaaagggaagatttatgtttctggttctaagaatgctgctttacctattttagcagccactattctatcaaataaaaaaattgttttaagaaatgttccaaaggtaaaagatattgaaacaatgcttaagttattacaatctattggatcagatgtgaaatatttaaaaaaaaaaggtttagttataataaaaaacaaaaaaaaactaaaaacatttgcttcatataatttagtaaaaactatgagagctggt

SEQ ID NO: 243986 - DNA, 262 bp, Unknown
  Bacterial polypeptide expressing nucleotide sequence isolated from the Sargasso Sea
tatggaaaaattattaatcaaaggaggtaactcattatcaggtagaatttcatgttcaggtgcaaaaaatgctgctcttcctatgatagcatcgacaattttaagtaatcaaaaggttgtcttaaaaaacttaccttaccttcaagatattacaacaatgtttgaacttcttggttcaatgggttcagagattttgcttgatgaaaatatggattttactatttcctcatataaccttaataatattcaggctagatacgaa

SEQ ID NO: 243987 - DNA, 638 bp, Unknown
  Bacterial polypeptide expressing nucleotide sequence isolated from the Sargasso Sea
aatggataagtttttgatcaaaggaccttgtaaaattaagggccaggtttcaatttcaggaagtaaaaatgcagctttacccatcttagcatcaacaattctttttgaaaatcctgtcacaattaaaaatttacctcgagtaagggatatagataccatgttaaacttacttatctctttaggttctagtgtaagtatttctaaagatagaaaaagagtaacaattaaaaaaaaaaataaaaaaaaaacttttgctagctactctttaatgaaaacaatgagagcaggaatattagttcttggtccattagtttcaaagtatcataaatctattacctcccttccaggtggatgcttaattggggcaagacctgtaaattttcatttaaatgctttgaaaaaacttggaatgaatttcgaaataaaaaaaggttatatatttgctaaatcaaaaggaaaacttattggaaataaaatacggttttctaagattacagtaggtgcaactgaaaattctattattgcagcagttttagcaaagggtaaaacaattcttaaaaattgtgcaattgagccagaaataaaagatcttactaactttctaaattctgccggcgccaacatcaaatggattggaa

SEQ ID NO: 243988 - DNA, 368 bp, Unknown
  Bacterial polypeptide expressing nucleotide sequence isolated from the Sargasso Sea
aatggacaaatttattgttaaaggtccttgtaaaattaagggtgaaatttcaatttcaggatctaaaaatgctgctttaccaattttggcttcaactattttatttgaaaaggaggttataataaaaaatttacctcgcgttaaagacattgacactatgattaaccttttaaaatctctaggatcaaagataaaatttagtaggaacaaaaaaattgtaaaaataacaaagaaaaaaaaacaaagttactttgcatcatattctctggttagaactatgagagcagggatattagtcttaggagcacttgttgctaggtttcaaaaatctattacctctttacctggtggatgtttaattggagcaa

SEQ ID NO: 243989 - DNA, 178 bp, Unknown
  Bacterial polypeptide expressing nucleotide sequence isolated from the Sargasso Sea
catgggagctccagttatggcaacagacttgcgtgcatcggtctccttggttcttgcggggttagcagctagtggtgaaacaactattaatagaatttatcatttagatagaggctatgagagccttgtctctaaattaaaatcctgtggcgcaatgatagatcgagtgagaacttga

SEQ ID NO: 243990 - DNA, 275 bp, Unknown
  Bacterial polypeptide expressing nucleotide sequence isolated from the Sargasso Sea
gatggataaattattaatagatgggcaacaatcattatctggttcagtcagaatctctggggcgaaaaattctgttttacctatgttgtgtgcctcagtaatggtttctaatggtcaagttgaacttgagaatgttcctcaccttcaagacgttacaactacaacgagattactaacccaaatgggtataagtgtcaccatggatgagtttatggatattagtttagatccatcaactattcacaatttatatgcaccctatgagcttgttaaaa

SEQ ID NO: 243991 - DNA, 651 bp, Unknown
  Bacterial polypeptide expressing nucleotide sequence isolated from the Sargasso Sea
tatgaaatttcaaaataataatcttaaatccgctaaattaggttactttttcaaaaactatatcgaagtaaaaggaggaaaccagcttgaaggaaatttaaaaattagcggcgctaaaaattctgctctagtcctaatggcggcctctatcctttctaaaggcaaaataaatctttttaatgttcctaaaatttcagatgttgcaattatgtctaagttattaattgcaatgggcatgaatataaaatcaaatgcaaatgaattagaaataaacactaaaaaaatcatcgttccacctcaagatttattttttgatttatatcatgctattagagtgagttttttttgtattggtccaatccttgcgagatttgggaaagctaaaatacctttaccagggggttgttcaataggagctcgaccaattgatgaacatatagattcactaaaaaaattaggagttgtatttaaattaaaaaataattatgtaactgccgaagtgattactcctaataagagattagttggatcatcaataaattttaaatgtaaaagtgttggcgccaccgagactttactaatggcagcatccttagctaaagggcaaactatattaaacaacgctgcacaagaaccagaaatcatagattt

SEQ ID NO: 243992 - DNA, 802 bp, Unknown
  Bacterial polypeptide expressing nucleotide sequence isolated from the Sargasso Sea
agaaatggatatattttagctaaatcaaacggaagacttaaaggtaaaaaaataaagtttcctaatattagtgtaggtgctacagaaaattctataatagctgcatgtttagctagaggcaaaacaattttaaaaaattgtgccgtggaacctgaaattaaagatttaacacaatttttgaataaagctggagccaatataaaatggtctggcagaacctgcaccatcataggagttaattctctcaatcaaactattcatacagttatggctgatagaatagaggctggaactttttgtgtagcggcaacgcttggtaaaggtattctacaaattaaaaattttgacccaaaaataatttctactgaaatagaactattaaaaaaagtcggagcgaagattaagatttcgaataacaaaatttttataaaaggacccgacaaaattaaaccaattaaaaatataaaaactaaagagtttccaggcattccaacagatcttcaagctcaattaatggtattaatgtgcaagagtgtcgggaaaagttctataaccgaaagtatttttgagaatagatttatgcatgttgctgagttgcaaagattaggtgcgaaaataaatattcaaaataataaagcattgattgagggtaatacaaaatttgttggtgccgaattaatgtctagtgatctaagagccagcgttgccctagtattagccgcaatggtggcgaatggtaaaagtattgttggaagagtctatcacttagaaagaggatatgaaaatattgaaaataaattac

SEQ ID NO: 243993 - DNA, 709 bp, Unknown
  Bacterial polypeptide expressing nucleotide sequence isolated from the Sargasso Sea
ttatgactccggtaaagaaacaattattattgatggtgttaataagcttggcggatgtacccataaagtaattccagaccgaatagaagctggaacttttctaatagctgctgctgcaacttcctcttcaataacaatttctccagtaatccctcatcatcttgaagctgtcactaataagcttcaagagagtgggagtaaagtcacgattaaaggtaattccatttctatcaagagtaaagagattaaaggagtagatattgaaacagctccttttccaggctttcctactgatttgcaggcaccatttacaactctaatgacaatcgcaaatggggaatcaaagataaccgaaacaattttcgaaaacagaatgaatcatatttatttacttaatgaaatgggtgctcatataaaactaaacaaaaatgtagctcacatcaaaggtgttaaaacaattaaaggaatgaatctagttggctcagatttaaggtcatcagctgcattaataattgcaggaatcatcgcaaaaggtagtagtaagatttatggattagaacatttagatagaggttatgaaaattttgaattaaaacttaaaaaattaggtattaaaataacgagagaggttagtaaaagtacttttgagaagaatgaatataaaattgaaactaaatctaaaaaactttcaaaactagaagcagcttaa

SEQ ID NO: 243994 - DNA, 718 bp, Unknown
  Bacterial polypeptide expressing nucleotide sequence isolated from the Sargasso Sea
atgacggctgcggcaatcgcgtctcaagagattctcaagccgcatctcactgttgcaggtggacattccttagggggaaccatccgggtcagcggagccaagaattccgcccttgtgctgatgacggccagccttctgaccgccgacacgcttgagctgtgcaacgtcccggacctgacggatatcggcgggatgagcgagatcctcgtgtccctcggggtgaaggtggagcgtcaggccgatcgcgtccgactcaacgcagccgttctgtccagcgccgaacccccctatgaactggtcaacagcctccgggccagcttcttcagcatcggccccctgctgggccgcctcggacacgccaaggtgcccctgcctggaggctgtcgcatcggggcccgtcctgtggtggagcacatccgggggctgaaggctcttggtgccgtgatccaggttgagcacgggatcattcacgccaacgtgcccggcccgaacaaacgcctcaagggcgcttcgatcatcctggactgcccaagcgtcggcgccacagaaaccatcctcatggctgccgttctggccgagggcaccagcacgatcgagaacgtggctcaagagcctgaagtccaggacctggccaacctgctcaatcgcatgggcgccagggtcagcggcaccggtagccccgtgatcacggtggagggtgtggagtcgctgcacggct

SEQ ID NO: 243995 - DNA, 729 bp, Unknown
  Bacterial polypeptide expressing nucleotide sequence isolated from the Sargasso Sea
tatgaaaacttttgcaagttattctttattcaaaacaatgcgtggttctattttagttttaggtccacttgtttcaaaatactacaaatcaaaaacctctttacctggagggtgtttaattggtgctagaccagttaattatcatctaacagcattaaaaaaacttggtatgaaatatgaattaaaagatggatatattctggcaaaatcaaatggaaaacttagaggtacaaccataaattttcaaaagataagtgttggggcaacagaaaattctataattgcagcatgtttagcaaaaggtgaaacagttttaaaaaattgtgcaatagaacctgagattaaagatcttacaaattttttaaataaagctggagctaaaataaagtggagtggaagggtctgtaaaatcataggtgtaaattctctaaatgaaacagaatattctgtgatggctgatagaatagaagcaggcaccttttgtgtggctgcagcacttacaaaaggtaatttacagataaataatttaaatcctaaaattataggtacagaaataaaattacttaaaaaaattggtgctaaaattaaaactagtgaaaataaaatcttaataataggacctgaaaaaataaaatcaattaaaagcattaaaactaaagagtttccaggcattcctacagatcttcaggcacagctaatggttttaatgtgtaaggcagttggcaaaag

SEQ ID NO: 243996 - DNA, 325 bp, Unknown
  Bacterial polypeptide expressing nucleotide sequence isolated from the Sargasso Sea
tatggtattgttgtgtaaggccaataacagatccttaattactgaggatatttttgaaaatagatttatgcatgttgcggaattaaatcgaatgggtgcacaaattacaattaatggcaataaagtttcaatagaaggaaaaattaaatttgcatctgctgaattgatggcaacagatttaagagcatctgtttcgctaatacttgccgcgttaactgctagaggaaaatcgacaataaatagaatctatcacttggaccgtggatatgaaaatattgaaaaaaaattaaaaaaaattggagcaagaataagaagggtaaattaa

SEQ ID NO: 243997 - DNA, 790 bp, Unknown
  Bacterial polypeptide expressing nucleotide sequence isolated from the Sargasso Sea
catgctaactatcgacccactcgtcgaaccaccaaatgctcgtcttggccttcccggttcaaagagcatcacaaatagggctctggtcgtagctggcttagcagatggcgaatcggacctatcaggcgtattgttctctgaagatactcatgtgatgatggactccttgcagaagatgggggttgaaatccgccagaaacccgatgatctatccgttttgatcaggggcacaggagggagtctgcaaagtccagaggaaactatttgggttcaccaaagtggcaccactgcacgcttctgcttgccgctagcagcgctttgcggacaagaagtaatgatagatggtgatgatcaaataaagaaccgtcctcatgaagagctctgcaaagcccttcaatcattaggtgcgcagatcgaataccttgaagccccgaactcattcccgctcgtagtaaatgggaaggacttacaaggcggtcacatctcacttaacgggggtgtttcaagccaatttatttcagcccttcttttggccgccccatgcttcccagatcaattggagctcaatatagatggggatttggtttcgcgcccatacattgacatgacaatttccgtaatgcaagcattcggtgcacaagtgcaacgagttgacgatcgacgatatgtgatctcgccaactgggtatcgaaattcgagatatgaaatagaacctgatgcttccgcagcgtcctatttcttcgcagctgcagcaatctctggtggcagcatcactgtagaaggtttagga

SEQ ID NO: 243998 - DNA, 306 bp, Unknown
  Bacterial polypeptide expressing nucleotide sequence isolated from the Sargasso Sea
gatggctctattttcactatctagtggaaagtcagtatttgaagaaaacatttttgaaaataggtttatgcatgttccagaattaaacagaatgggtgcccaaattgacgtagaaggcggggtggctactgttaaaggagtaaaaagattaaaaggagccccagtcatggcaacggatttaagagcttcagtaagtctaattttagctggattggcggctcacggtaaaacaattataaatcgagtttatcatcttgatcgggggtacgaaagtgttgaaaagaattatctgcttgcggagcaaaa

SEQ ID NO: 243999 - DNA, 301 bp, Unknown
  Bacterial polypeptide expressing nucleotide sequence isolated from the Sargasso Sea
aattcagaaataattgaaaatatttttgaaaatagatttatgcatgttccagaacttttgagaatgggcgctaatatttcagtcaatggtggtatcgcaaaagtttctggtgttcaaaacttaaaaggagctcaaataatggcaactgatttaagagcatctatatctctaataatcgcggctttaagagcagaaggtgagagctatatttcaaggatttatcaccttgatagaggctatgagcaaattgaacagaaatttcaagattgtggagctaacatagaaagaattacaaattaat

SEQ ID NO: 244000 - DNA, 544 bp, Unknown
  Bacterial polypeptide expressing nucleotide sequence isolated from the Sargasso Sea
ttttgtgttgctgcatgcttgaatggtggaaaattaaaaattaaaaacttcgagccgaaaattattaacacagagataaatttacttaagaaaattggtgcaaagataaagaccacaaaaaatacaattcaaattaagggaccaaaaaaaattagaagtttggattttttaaaaactggagaatatccaaacttccccaccgatttgcaggctcaaattatggtattattaactagagcaaatggaaaaagcacaattgaagaaaatatatttgaaaacagatttatgcatgttccagaattaaaaagattaggtgcaaaaataaatatcaaaggcaacaaggcaattattgaaggaactaataatctagagggagctgagctaatgtctagtgatttaagggcatcagtagctttagttttggcagcttttatttcaagaggaacatctattataaatagagtatatcatttagaccgaggttatgaaaaaattgaaaataaattaaaaaaaattggagtaaaaataaaaagaatatcttagt

SEQ ID NO: 244001 - DNA, 279 bp, Unknown
  Bacterial polypeptide expressing nucleotide sequence isolated from the Sargasso Sea
gtatttttgaaaatagatttatgcatgttgcagaattgcaaagattaggagcaaaaataaatattaaaaataataccgctacaatagaaggaaatactaaattcattggtgccgaattaatgtctagtgatttaagagcttctgttgctttggttctagcagctgtagtttctactggtaaatcatatattaacagaatttatcacttagatagaggttatgaaaaaatagaaaataaattaaaaaaaataggtgttaaaattaaaagatttaaatagt

SEQ ID NO: 244002 - DNA, 652 bp, Unknown
  Bacterial polypeptide expressing nucleotide sequence isolated from the Sargasso Sea
tcaattattgcagccactctagcacaaggaaaaactacattaaaaaattgtgcgattgaacctgaaataaaggatctaacaaattttctgaaatcagcaggtgcaaacataaaatggattggaaaaaggacttgccaaataattggtgtaaattctttgagcccaaccacctattctgtgatgggagacagaatagaaacaggaactttttgtgttgcaacaactttaacaaaaggtgatctgataattaaaaactttaatccaaaactgatccatacagaattaaatctattaaaaagatctggtgcaaaaataaagacgaataaaaacgaaataaagattaaagggccacaaaaaattaaaagtataaatagtattgttacaaaagaatatccaaattttccaactgatttacaagcacagttaatggttttgatgtgcaaagctgatggaagaagttcgataactgaaagtatttttgaaaatagatttatgcatgttgctgagttaagaagattaggcgcaaaaatagttataaaagataacaaagctactattgagggtaatacagaatttataggagcagagttaatgtccagtgacttaagagcttctgttgctttagttttagctgcaattatatcaaaagggc

SEQ ID NO: 244003 - DNA, 867 bp, Unknown
  Bacterial polypeptide expressing nucleotide sequence isolated from the Sargasso Sea
aatgtttatatttcctggatcaaaaaatgcttcattaccaattttagctgctactattttatctaacaaaaaagtcattttaaaaaatctacctaatgtaaaagatattgagacaatgattaaactattaatgtctataggatcttccattaaatattcaaaaaaaaaaaatttgatttcaataagaaataaaaaaaaacttaatactttcgcttcatataatttagttaaaactatgagagcaggtattttggttcttgggccaatgctagcaagatatggcaaggcaaaagtctcaactccagggggttgtagcattggagttagaccaatagatattcacttaaaagctttatcaaaattaggagcaaaatataaaattatcgacggatatgttcatgcctatgttaatggtaagctaaaaggagcaaaaataaaattttcaaaaatatctgttggtgctacagaaaatttaataatagctgcatcaatggcagagggaacaagtattttaaaaaactgtgcaattgaaccagaaataaaagacttagtaaaatttattaacttaatgggaggaaatattaaatggattggtaaaagaactttacaaatacaaggagttaataaatttaatgagataaaatataatataatgcctgatagaatagaagctggaacttatttagtagctgcagcagttacagaaggaaatttaaaaattcatggtataaaacccaatattataaaaacagaaatagatattttaagaaaaattggaataaaaataaaaattgataaacagattataaaaatttatggaacgaaaggtattaaaagcttaaatttaaaaacttcaccatacccagg

SEQ ID NO: 244004 - DNA, 1004 bp, Unknown
  Bacterial polypeptide expressing nucleotide sequence isolated from the Sargasso Sea
aaagagggcatcttcacttagaggctcaattatgattgtaggtcctttacttgctcgatatggcaaaggctttattccaaaaccaggcggtgataaaatcggaagacgcagactagatacacactttgaaggttttgcactacttggtgctaaatttaattatgatgctggagaatacttttattccattgaagcaaaaaaactaaaaggtgcatatattcatttagatgaagcttctgtaactggaactgccaacattattatgggtgctgttttagcagaaggaaaaaccgatttttacaatgctgcttgtgagccatatatacaacagttatgtaaaatgcttaattctatgggtgcaaaaatatctggaattggctcaaactttcttcatatagaaggtgttaaagagttaaaaggatgctaccatagagttcttccggatatgattgaaattggaagtttcattggacttgctgcaatgacaaaatcagaaatcaccattaaagatgtaagctatgacaatcttggtataattcccaatgtttttaaacgaatggggattaaactggaaagaagaggcgatgatatttatgttcctgcacaagatcattatgaaatagatacctttattgatggctctatacttacgatatatgatgctccatggccaggttttactcccgatttgctttcaatcattttggtagttgcaacccaagcaaaaggatcggtattgattcatcaaaaaatgtttgaatccagattgttttttacggataaattaatcgatatgggagctcaaattattttgtgtgatccacatagagcaacagttattgggttaaacagagaatttccgcttcggggaatcagtatgacttctcctgatatccgtgctggagtctctcttttaattgctgcattatcggcagaaggaaaaagtactattcataatattgaacaaattgatagaggatatcaagatattgaataccgattaa

SEQ ID NO: 244005 - DNA, 988 bp, Unknown
  Bacterial polypeptide expressing nucleotide sequence isolated from the Sargasso Sea
atgcataacagttgaattaggttctgatatcggtgctaacgatgataatattgttaatggtggtgcaggttatgcgaatactgacttaacaataactgcaaccgaccctgattcatttgatgcaacaacgaatattacaggtggtacaggtacagacactataacaattactgctgttggtggtggtacagctgacttaacgaatgttactggtattgatgttcttaatatcgttgatttcacaaccaatgctgctgttgttattactgcaggtacaaatgctgcaacaccaatgacagttaatgcaacgactcaggatgctggcgaaggcctaaactttgatggtaacagtatgactggtggattgactattaatgccggtgaaggtgccgattctctcgatggtggtacagttaatgatgtcatttatggtaatggtggaattgacacaatcgatggtcaagagaactcagcaacactcggtgctgatgctatctacggtggtgctggtaatgatattattaatgtttcaactgctgaaactgaattctcaaactcatcaactactgctcttgtaacagatacagttgatggtggtgcgggtacagatacattagcctttggtgccgttgcaactcttactaaagctgagcttgctaacatctctaatattgaaaaattaacattacaaagtacatcatctattactctaagtgatgatttcttgactaataacccaggtgtttcaatcacattagctgcaggtacgatttcagctggtgcaggtacaactgctgatccaacaataacattagctttaaattatattgctggtaatggtgctattaaagttactggtggtactgcagatgattcatttggaaactgcagcggtgcacttattgatgtatctgatacaattgatggtggtgcaggtactgatactattaatgtttacaatgacgcaggatttggatctgcagctact

SEQ ID NO: 244006 - DNA, 795 bp, Unknown
  Bacterial polypeptide expressing nucleotide sequence isolated from the Sargasso Sea
gagccaagatacgttttccaaaaatatcggttggtgctacggagaatttaattattgctgcttgttttgcaaaaggtacaactactttaaaaaattgtgcaattgaaccagaaattttggatcttgttaattttttaaataaaactggatgcaatgttaaatggacctcaaaacgtacagttaagattattggtgttgccagtattaaaaatataaattatcaaatcatgtttgatagaattgaagcaggaacatacatggttgcagcagctttaactgaaggtagtttaaaaatcacaaatattaaaccagacattattcaaacagaaattaaaattttgagaaaaataggtgcaaaaattaaaataagtaaaaataatataaaagttacagggagaaaaaaaattaaaggtttgaatattaaaacagctccttacccaggcctagccactgacatgcaggcgcaaattatggtgttattatgtaaggcaaacaacaaatctactattaaagaaaatatttttgaaaatagatttttacatgttgctgaattaaatagaatgggggctcaaatatctactaaaggaaatatggcttatatacctggtaatataaaatttgctccagcagagttgatggctacagatttaagagcatcagtttcattagtccttgccgctttaaccgctaaaggcaaatcagttatcaatagaatttatcatttagatagaggctatgaaaacatagaaaaaaagttaaaaaaagtaggagcaaaaatacgtcgagttaattgat

SEQ ID NO: 244007 - DNA, 498 bp, Unknown
  Bacterial polypeptide expressing nucleotide sequence isolated from the Sargasso Sea
aatgaaaaaatttataattaaaggccctaacaaaggtattaagggagaagtcaatataagtggtgcgaaaaattcctgccttcctttaatggcagcgtctattttatttaagaataaagtaattttaaaaaatgtaccatttgttaaggatgtttataccatgaaaaatcttttagtatctcttggcgcaaaagtgaatatttctgagtcaaaaaaaataattactatcaataataaaaataatcataaactgatagtaccttataatttagtttcaacaatgagagccggcgttttaacaatgggaccactattagcaagatattttcgaaaaaaaattaaagttgctttaggaggtggctgcgcgttaggagtaagagatataaactggcacttagctggctttagaagtctaggagcaaaaaataatttaagatatgggtatgttaatatttcagcagccagaggcttagttggaaataaatacaaattttcaaa

SEQ ID NO: 244008 - DNA, 796 bp, Unknown
  Bacterial polypeptide expressing nucleotide sequence isolated from the Sargasso Sea
aatggataaatttttgatcaaaggtccttgtaagatcaaaggacaagtcaatatctctggaagtaaaaatgcagctcttccaatattagctgctacattactctttgataaaccagttataattgaaaatttacctagagtaaaagatattgatacaatgttaaatttacttagatcgttaggatctaaaattcaattaagtaaaaataaaaaaactgttaaaattttaaaaactaataaaaaaaaattttttgcatcatactctttagttaaaacaatgcgtgctggaattttagttcttggccctctattggctaaatttaaaaaagctcaatgtagtatgcctggaggatgcaatttaggattaagacctatagatattcatttaaaggcattaactgaattaggtgttaaatataaaataaaaaaaggctatgtttatgcacagacaaaaaaagaaatattgggaaaagaaattaaatttccaaaaattagtgttggtgcaactgaaaacacaattattgcagcctgtttagctaaaggaaaaactattttaaaaaactgtgctattgaacctgagataaaagatttaactaattttttaaagagtgctggatcaaaaataaaatggattggaaaaagaaccttacaaattgaaggtgtaaagtctcttaaaagtataaaatattctgtaatgggtgatagaattgaaacaggaacattctgtgtggccgcttgtctttcaagtggtgatttaaaaattaaaaattttaatcctaaattaataaatacagag

SEQ ID NO: 244009 - DNA, 347 bp, Unknown
  Bacterial polypeptide expressing nucleotide sequence isolated from the Sargasso Sea
tacagaccttcaagcacaattgatggttttgatgtgcaaagcagttggcaaaagctccataaccgaaagtatttttgaaaatagatttatgcatgttgcagaattgcaaaggctaggagcaaaaataaatattaaaaataatactgctacaatagaaggaaatactaaattcattggggctgaattaatgtctagtgatttaagagcttctgttgctttagttctagcagctatagtttcgactggtaaatcatatattaacagaatttatcacttagatagaggttatgaaaaaatagaaaataaattaaaaaaaataggtattaaaattaaaagattaaaatagt

SEQ ID NO: 244010 - DNA, 535 bp, Unknown
  Bacterial polypeptide expressing nucleotide sequence isolated from the Sargasso Sea
atggacaaatttattgttaaaggcccttgcaaaattaagggtgaaatttcaatttcaggttcaaaaaatgctgctttgccaattctagcatcaacgattttatttgaaaaagaggtaataataaaaaatttacctcgagttaaagatatagacacaatgataaatcttttaaaatctcttggctcagaaataaaatttagtaaaaacaaaaaaattgttaagataactaagaaaaaaaagcaaaaattttttgcgtcatattcacttgttagaactatgagagcaggaattttagttttaggagcacttgttgccaagcatcaaaaatcagttacctcattgcctggtggttgcctaataggagcaagacctgtaaattatcatttgaatgcacttaaaaaacttggaatgatatatgatattagaaaaggttatattcatgcaaataccaaaggaaaacttaaaggtgcaaaagttagatttccaagaattagtgttggggcaaccggaaaatacaattatgcagcatgttagc

SEQ ID NO: 244011 - DNA, 265 bp, Unknown
  Bacterial polypeptide expressing nucleotide sequence isolated from the Sargasso Sea
aatggaaaaactaattattgatggtggaacccctttaaaaggaaaggttaaaatctcggggtctaaaaatgccgcactgcctatacttgctgcaactgtcgtatatcccaataaatatagctttaataatataccggatattcaggacgttagaacaatgctggaattattgaaaattttaggcgctaagtataagtttaaaaacaacaaggttgtaattaaacacatagatatcaaaaacacgaggcaccttataatctggtaa

SEQ ID NO: 244012 - DNA, 277 bp, Unknown
  Bacterial polypeptide expressing nucleotide sequence isolated from the Sargasso Sea
ttttgaaaatcgttttatgcatgttcctgaacttaatagaatgggtgcgaagataaaagtttctggaaatctttctacaataaatttttccgaagaattaaatggagctgaagtaatggccactgatttaagagcttcagtaagtttagttttagctggtttaattgcaaaaaatagaacaattataaatagagtttatcatttagatagaggttatgaaaatttagaaaaaaagctcagaaactgtggagcaaaaattaccagagtaaacaattaa

SEQ ID NO: 244013 - DNA, 489 bp, Unknown
  Bacterial polypeptide expressing nucleotide sequence isolated from the Sargasso Sea
tatggataaatttctgattaatggcccttgtaaaatcaagggcaatgtttcaatttcaggttcgaagaatgcatctctcccaattttagctgcaacattattatttgataaacctgtggttatcaaaaatttaccaagagttagagacattaatacaatgttaaatttattaaagtctcttggttctaaaataattttatcaagagataaaaaaacagcaaaaattataaataaaaaaaatatgaaaacctttgctagttattctttagtcaaaacaatgcgtggttctattttagttttaggtccacttatttcaaaataccataaatctaaaatctctttacctggagggtgtttaattggtgctagaccagttaattatcatctaacagcattaaaaaaacttggtatgaaatatgaactaaaagatggatatattttagcaaaatcaaaaggaaaacttagtggaacaactgtaaactttccaaa

SEQ ID NO: 244014 - DNA, 445 bp, Unknown
  Bacterial polypeptide expressing nucleotide sequence isolated from the Sargasso Sea
aatggataaatttttgattaaaggtccttgtaaaatcaagggagaagtttcgatatcaggaagtaaaaactctgcactaccaatattggctgcaactatactttttgataagccggtattaataaaaaatttgccaagagtaaaagatattgacactatgcttaatctattaagatcgctggggtcaaaaatatatataagtaaaaataaaaaaatagttaaaattgtaaaaagtaaaagacaaaaattttttgcatcttattctttagttaagacaatgagagctggaattttagttttaggacctttaattgcaaaacatcataaatctataacatctttgccaggaggctgtttaataggtgcaagaccagtaaattatcacctaaatgcattaaaaaaactaggaatgaaatatgaaataaaaaaaaggttatatacatgc

SEQ ID NO: 244015 - DNA, 510 bp, Unknown
  Bacterial polypeptide expressing nucleotide sequence isolated from the Sargasso Sea
taaaaattagaaactttgagccaaaaattatcaatactgagataaatttacttaagaaaattggtgcaaagataaaaactacaaaaaatacaattcaaattaagggaccaaaaaaaattaaaagtctaaattttttaaaaactggagaatatccaaatttccccactgatttgcaagctcaaattatggtattattaactagagcaaatgggaaaagcacaattgaagaaaatatatttgaaaacagatttatgcatgttccagaattaaaaagattaggtgcaaaaataaatattaaaggtaacaaggcaattattgaaggaactaataatctagagggcgctgagttaatgtctagtgatttaagggcatcagtagctttggttttagcagcttttatatcgagaggaatatctattataaatagagtatatcatttagaccgtggttacgaaaaaattgaaaataaattaaaaaaaatcggagtaaaaataaaaagaatatcttagt

SEQ ID NO: 244016 - DNA, 427 bp, Unknown
  Bacterial polypeptide expressing nucleotide sequence isolated from the Sargasso Sea
tgaaaataaaattttaattaaaggacctaaaaagattaaatctataaaaagcattaaaactaaagcgtttccaggcatacctactgatcttcaagcacaattaatggttttaatgtgtaaagcagttggcaaaagttcaattacagaaagtatctttgaaaatagatttatgcatgttgcagaattacagaggctaggtgcaaaaattaatgttaagaataatactgttacgatagaaggaaatactaaattcattggtgccgaattaatgtctagtgatttaagagcttctgttgctttggttttagcagctatagtttctaatggtaaatcatatattaacagaatttatcacttagatagaggttatgaaaaaatagaaaataaattaaaaaaaataggtgttaaaattaaaagattaaaatag

SEQ ID NO: 244017 - DNA, 423 bp, Unknown
  Bacterial polypeptide expressing nucleotide sequence isolated from the Sargasso Sea
tatggataaatttgtaattaaagggccttgtaagattaagggcaaagttgacatatcaggtagtaaaaacgcttccttaccaatattagctgcaacgcttctttttgatgaagctgttgagataaaaaatttacctagagttagagatatagatacgatgctaaatttgattagctcacttggtttttcagtaaaaagaaattataaaaataactctgttaaaattacaaaattaaaaaaaataaaaacaatagcatcatactctttagtaaagacaatgagagcaggaattttactcctgggacctttagtttcaaaatatagaaaagcgattacatcattaccaggaggatgtttgattggagcaagacctgtcaattatcatttaaaagttttaaaaaaacttggtatgaaatattcaat

SEQ ID NO: 244018 - DNA, 585 bp, Unknown
  Bacterial polypeptide expressing nucleotide sequence isolated from the Sargasso Sea
aatgaaacaatttataattagaggccctaataaagctattaagggtgaagttaatataagtggtgctaaaaattcttgtctgcctttgatggcttcatcaattttgtttaaaaataaaatcattcttagaaatgtgccttttgtgaaagatgtgtatactatgaaagatcttttagtttcactgggtgccaaagttgatttttcagtctcacaaaaaatgatgataataactaacaaaaaaaaacataagttagttgtgccgtataatttagtttcaacaatgagggcaggtgttttaactatgggaccacttttagctagatacccacggaaaaaaattaaagttgcactaggtgggggctgcgcacttggagttagagatacaaattggcatttatcaggttttaaaagtttaggagcaaataataatttagagaaaggatatgtaaaaatttcatcaaaaaatggtttgaagggaggcaattataaatttccaaaggtaacagttactggaacttcaaatttaatcatggcatcaatttttgcaaaaggtgaacatttaataaaaaatatatcaattgaacc

SEQ ID NO: 244019 - DNA, 428 bp, Unknown
  Bacterial polypeptide expressing nucleotide sequence isolated from the Sargasso Sea
aatggacaagtttttgattacgggcccttgtaaagtcaagggacaagtctcaatcagtggttcaaaaaatgcagcattaccaattttagcttcaacattattatttgataaacctgtggttatagaaaatcttccaagggtaagagatatagatacaatgttaaatcttctaaagtctcttggctcaaaaattaaattctcaaaaaataaaaaaactgtaaaaatttataaaacaaaaaagcaaaattattttgcttcttactcgttagttaaaacgatgagagcagggatattggttttaggacctttaatttcaaaatatcataaatctataacatcattaccaggaggatgcttaatcggagcaagaccagtaaattttcacctaagtgcacttaagaaacttggaatgaaatacgaaattaaaa

SEQ ID NO: 244020 - DNA, 829 bp, Unknown
  Bacterial polypeptide expressing nucleotide sequence isolated from the Sargasso Sea
aatgcagctttgccaatttttggcatcaacaatattgtttgataagtctgtaactattgaaaatcttccaagagttagagatatagataccatgttaaaattattaaaatctctaggttccaagattgaattttttaataataaaaaaactgtaaaaatttcaaaaaccaaaaaacaaaaatatttagcaccctattctttagtgaaagttatgagaggttcatttctaagtttgggagctttgcttgccaagcatcataaagcaataatttctttgcccggaggatgtttgataggtgccagaccagtaaactatcatttaagtgctttaaaaaaacttggaatgaaatatgaaatcaaaaaaggttatatccatgcaatttcaaaaggaaggcttaaaggaacaaattttaagttttcaaatattagcgttggagcaacagaaaactctattattgccgcttgtcttgcaaaaggaaaaactattttaaaaaattgtgcaatagaacctgagataaaggatttaactaattttcttaattcagcgggtgcaaaaattaagtggataggaaaaagaactgtacaagtagaaggagtaaaaattttaaatagcattaagtactcagttatgggagataggatagaagcaggaacattttgtgtagcggcttcccttactgctggagatttattaattaaaaattttgactcaagtttaattcaaacagaattaaatcttttaaaaaaaattggttcaaaaattaaaacatttaaaaaagaaatttatattaaaggaccaaataaaattaaaagtataaataatattgtt

SEQ ID NO: 244021 - DNA, 463 bp, Unknown
  Bacterial polypeptide expressing nucleotide sequence isolated from the Sargasso Sea
gttggaaaattaacgtctgccggcgctatcgttacctcaatccacaacggaatccgagtgcagatgaaccagcgccctaaagcgatagatgttgcaacacttccctatccaggatttgcaaccgacttgctgccattcataattggcatgaatgcaatcgcagaaggccattccatagtgactgaaaatgtctttgaatcacgctttatgtttgtcaacgaactcatgcgattaggcgctcaaatcactattgacggtcaccatgcttcaatcgacggcattcctcagctatctggagcccctgttgaagctactgatattcgtgccggcgcaggactggtattagcggcgctcgtttccgatggtgaaacaactgtagatggagcttttcatattgatcgaggttacccaaactttgccgaacaattagttagcttaggcgcgaaagtttcacgagaataga

SEQ ID NO: 244022 - DNA, 343 bp, Unknown
  Bacterial polypeptide expressing nucleotide sequence isolated from the Sargasso Sea
agaccttcagcacaattgatggttttaatgtgcaaagcagttggcaaaagttcaataaccgaaagtatttttgaaaatagatttatgcatgttgcagaattgcaaagactgggagcaaaaataaatattaaaaataatactgctacgatagaaggaaatactaaattcattggcgccgaattaatgtctagtgatttaagagcttctgttgctttggttctggcagctatagtttctaatggtaaatcatatattaacagaatttatcacttagatagaggttatgagaaaatagaaaataaattaaaaaaaataggtgttaaaattaaaagattaaaatagt

SEQ ID NO: 244023 - DNA, 859 bp, Unknown
  Bacterial polypeptide expressing nucleotide sequence isolated from the Sargasso Sea
aaaaaacttggtatgaattataaaattaaagatggatacattttagccaaaacaaaaggaagactcaaaggtaatacgataaagtttcctaaaataagcgtcggtgcgacggaaaattcaattattgcagcatgtttagcaaaaggtaaaacaattttaaaaaattgtgctatagaacccgagataaaagatctcacaaattttttaaattcagcaggcgcaaaaattagatggtctggaagaatgtgtaaaattctgggtactgactcattaaatcaaactgaatatacagttatggctgatagaatagaagcgggtactttttgtgtagctgcaactctcactaaaggtaatcttgaaataaaaaattttaatcccgatattatcaaagcagagcttgagttattaagaaaagttggagcaagaattaaaattgatagcaataagttaacagtaattggacctgaaaaaataaaacctattaaaaatattaaaacaagagaatggccaggtgtagccactgatatgcaatcacaattaatggtcttaatgtgtagggcagatggtaaaagttcaattactgaaaatatttttgaaaacagatttcttcacgttggagaacttcaaagacttggtgcaaatatcgaaattaagaagaataaagcttttattaacggaaatacaaaatttattggtgcagaattaatgtctagtgatttaagagcgtcagtcgcgcttgttctagcggcaatgatttcaaatggtaaatcttctattaatagaatttatcatttagatagaggatatgaaaatttagagataaaattaaaaaaaattggcgttaaaataaaaagactta

SEQ ID NO: 244024 - DNA, 533 bp, Unknown
  Bacterial polypeptide expressing nucleotide sequence isolated from the Sargasso Sea
tggatgtatctccccaaatagaataactataacaaatgccaaagtggaggaccttaaagaagttttatcgacaataagattaatgggagcaaaagtagaaacaagaaaagcttcaatcaaaataaccccacctaaggctattcgaccaattcaggttcaaacaaatccttttccaaaattccctacagatcttcaagcacaactaatggcggtattaatttttgctaaaggtgtatcaaaaattcaagaaaatgtttttccgaacagatttatacatgtcgcagaactcagaaaactaggggcaaacattacaataaaggaaaatgccgctaaaattataggtgtaaatgggctagctggggccaaaatacaagctagtgacctaagggcaagtgcggggcttatactttcggctctttcatctaaaggtaaaactgaaatttttagaatatatcatcttgacaggggttacgaacgaatagatgataaacttaaactaattggagcaaaaatttggagaaaaaaagagtaaa

SEQ ID NO: 244025 - DNA, 109 bp, Unknown
  Bacterial polypeptide expressing nucleotide sequence isolated from the Sargasso Sea
ctcagggaaactacaatagaccgtatttatcatttagatagaggttacgagtctttggaaaccaaatttaacaaattaggcgctaaaattgagagaatatcatcatgat

SEQ ID NO: 244026 - DNA, 310 bp, Unknown
  Bacterial polypeptide expressing nucleotide sequence isolated from the Sargasso Sea
tcagaggttcggtcagtaattaaagaaaatatttttgaaaatagatttatgcatgtaagtgagttaagaaggatgggtgctaatttaaaacaaaaggggtcaaaaataattattaatggtgtaagtgaaatatacggagccgaggttatggcaactgacttaagagcctcgtcatcattaattattgctggattaatggcttctggtaatacgacagttaatagggtatatcatcttgacagaggatatgaaaatttggaagagaaactgaagagttgtggagtaaaaataaggagatattctgaatgaa

SEQ ID NO: 244027 - DNA, 702 bp, Unknown
  Bacterial polypeptide expressing nucleotide sequence isolated from the Sargasso Sea
taaaatcaatggtccctccaagattagaggagaggtatcaatttcaggaagtaaaaatgctgctcttccgatactagctgcgactttactctttgataaacaagttacaattaaaaatcttccacgagttaaagatatagatacaatgcttaatttactaaaatcactaggaagaaaaatcaactttaaaaataataaaaaaattgcgacaatctcaaaaggaaaaaaaaataatttttttgcaccttattctttggtcaaaacaatgagagcaggaattttagtccttggtcctttattagcaaaaaataaaaaagcaaaagtaagtagcccaggaggttgtagtataggagtaagaccaatagacatacatttaaaagctatatcaaagttaggtgttaaaatacaaattgaaaaaggatatgttaatgcaaaagcacaaaagggattagttggttcagaaataagattttcaaaaatatctgttggagctacagaaaatttaattcttgctgcttgtcttgcaaaaggaacaacaacaataaagaattgtgctatagagcctgagatcaaggatctgacaaattttcttaaaacagctggcgccaagattaaatggatcggcaaaagaactttaaaaatagagggtgttaaaacattaaaaagaataacttactcgataatgaatgatagaattgaagc

SEQ ID NO: 244028 - DNA, 530 bp, Unknown
  Bacterial polypeptide expressing nucleotide sequence isolated from the Sargasso Sea
attggcaaaaggaaatttgaagatatcaaattttgatgcaaaaattatcaaaaccgagctagaattattaaaaagatttggtgcgaaaattaaagtgcaaaaagaaaaaatttttatcaaaggtccagaaaaaattagatctattaaagatataaaaactaaagaatatccaggcgtagcaactgatctacaatcgcaacttatggtcctgatgtgtaaagcaaatggaaaaagttctatgactgaaaatatatttgaaaatagatttatgcacgtagcagaacttcgcagactcggcgcaaaaatagatgtaaagaataataaagcttacatttatggaaacacgaaatttataggtgctgaattaatgtctagtgatttaagagcatctgtttcattggtattagcagcaatggtttctaaaggtaagtcaataattaataggatttatcatttagaccgtggttatgaaaatattgagcataaattaaaaaaaattggagttaaaataaaaagattaaaacagtgag

SEQ ID NO: 244029 - DNA, 394 bp, Unknown
  Bacterial polypeptide expressing nucleotide sequence isolated from the Sargasso Sea
ataaaatcaattaaaagtattaaaactaaagagtttccaggcattcctacagaccttcaagcgcaattgatggttttaatgtgcaaagcagttggcagaagttcaataactgaaagtatttttgaaaatagatttatgcatgttgcagaattgcaaagactaggagcaaaaataaatattaaaaataatactgctacgatagaaggaaatactaaattcattggtgccgaattaatgtctagtgatttaagagcttctgttgctttagttctagcagctatagtttctaatggtaaatcatatattaacagaatttatcacttagatagaggttatgaaaaaatagaaaataaattaaaaaaaattggtgttaaaattagaagattaaaatagt

SEQ ID NO: 244030 - DNA, 97 bp, Unknown
  Bacterial polypeptide expressing nucleotide sequence isolated from the Sargasso Sea
attgactcaacagcaatgtaataacccagaagctccatacgatcttgttaaaaatatgagggcatctttttatgttttaggccctcttcttgcacga

SEQ ID NO: 244031 - DNA, 392 bp, Unknown
  Bacterial polypeptide expressing nucleotide sequence isolated from the Sargasso Sea
aatggaaaaatttttgattaaaggcccttctaagatcaggggacaggtcaatatctcaggaagtaaaaatgctgcccttccaatattagcagcaacattgctttttgataaaccagttacaattagtaatttaccaagagtaaaagatattgatacaatgttaaatttattaagatccttaggttcaaaagttgagttaagcagaaataaaaaaatagtaaaaatatctaaaacaaataaaaaaaaaatatttgcatcttattctttggttaaaactatgagagcaggaattttagtgcttggacctttattagcaaaatttaaaaaagctcaatgtagtatgcctggaggttgcaatttgggattaagaccaattgatattcatttaaagg

SEQ ID NO: 244032 - DNA, 609 bp, Unknown
  Bacterial polypeptide expressing nucleotide sequence isolated from the Sargasso Sea
tatggataaatttctgatcaatggcccttgtaaaatcaagggtagtgtttcaatttcaggttcgaaaaatgcatctctaccaatattagctgcaacactattatttgataaacctgtattaatcaaaaatttaccaagagtaagagatattaatacaatgttaaatttattaaagtctcttggttctaaaataattttatcaaaagataaaaaaacagcaaaaattataaataaaaaaaatatgaaaacatttgccagttattctttagttaaaacaatgcgtggttctattttagttttaggtccacttatttcaaaataccataaatcaaaaacctctttacctggaggatgtttaattggtgctagaccaattaatcatcatctaactgcattaaaaaaacttggtatgaaacatgaattaaaagatggatatattttagcaaaatcaaaaggaaaacttagtggttcaactataaattttccaaggataagtgtcggggcaacagaaaattctataatagcagcatgtttagcaaaaggtaaaacagttataaaaaattgtgcaatagaacctgagattaaagatcttacaaattttttaaataa

SEQ ID NO: 244033 - DNA, 649 bp, Unknown
  Bacterial polypeptide expressing nucleotide sequence isolated from the Sargasso Sea
aatgtcatcctttaatcttgttcaaattatcccttctttagactctggcggtgtagaaagaggtactgttgatgttgcaaattttttatcaacaaagaaattatctaatcatatcatttcaagtggcggcagtttagtgcaagaaattgataaaaaatatacatcacattacttgctacctgtaaatagtaaaaattttcttcgctatcctattattgctaatcaaatagccaaatatataaagttgaataatataaatattgtgcatgtgcgctcacgagcccctgcatggatgacctctttgatttttaaaagaaatataaaaactgtttctacttttcacaatgtatatggaggagatttttttttaaaaaaaatttacaatagccaaatggcaaatgttaatcatatcattgctatttcaaattatgtaaaaaataaaattatagaaaaatataatttagacccagaaaaaattactgtaataaatagaggtgttgatactgatttctttaatgatgatatccaagaagacaaaaaacaaatgttcttaaaagaatataatattaccaaagaaaaaaaaaattattttgtaccctggtcgcataacagaatggaaaggacaaataaattttttaaattatattga

SEQ ID NO: 244034 - DNA, 370 bp, Unknown
  Bacterial polypeptide expressing nucleotide sequence isolated from the Sargasso Sea
aatggacaaatttattgttaaaggtccttgcaaaataaagggcgaaatttcaatttcaggctcaaaaaatgctgccttaccaatcttggcatcaacaatcttattcgaaaaagaggtcataataaaaaatttacctcgtgttaaagatatagatacaatgataaatcttttaaaatctcttggctcagaaataaaatttagtaaaaatagaaaaattgttaaaataacaaagaaaaaaaaacaaaatttttttgcatcatactcacttgttagaacgatgagagctggaatattagttttaggagcacttgttgccaaacatcaaaagtctattacttctttgcctggtggctgcttaataggagcaaga

SEQ ID NO: 244035 - DNA, 487 bp, Unknown
  Bacterial polypeptide expressing nucleotide sequence isolated from the Sargasso Sea
atgtcatcctttaatcttgtacaaatagtcccctctcttgattctggaggtgtcgaaagaggcacggtagatgtggctaattttttggctcagaaacaaattaagaattttattatcacctctggtggcaaaatgattaaagaacttgatgacaattttgttcatgttcatcaattacctgtatcgagcaaaaactttttttcatacccttcaatagcacgtaacataaataaatttattcaagcaaataatattaatttattgcatgttcgatctagaggccctgcttggatgataaatttcatgtcaaaaaataatattaaaacaatttctacttttcataatgtgtatggtggtaattcctttattaaaaaaatgtataataagggattgtctaaaatggatcatctgattgcaatatcagattatgtaaaagaaacagttatacaaaaatataatattacgaataaaaatatatcagtcatca

SEQ ID NO: 244036 - DNA, 608 bp, Unknown
  Bacterial polypeptide expressing nucleotide sequence isolated from the Sargasso Sea
aggagttaattctctcaatcaaactattcatacagttatggctgatagaatagaagcgggaactttttgtgtagcggcaacgctcgctaaaggtattctacaaattaaaaatttagacccaaaaataatttctactgaaatagaactattaaaaaaagtcggggcgaagattaagatttcgaataacaaaatttttataaaaggacctgacaaaattaaaccaattaaaaatataaaaactaaagagtttccaggcattccaacagatcttcaagctcaattaatggtattaatgtgcaagagtgtcgggaaaagttctataaccgaaagtatttttgagaatagatttatgcatgttgctgagttgcaaagattaggtgcgaaaataaatattcaaaataataaagcattgattgagggtaatacaaaatttgttggtgccgaattaatgtctagtgatctaagagccagcgttgctttagtattagccgcaatggtggcgaatggcaaaagtattgttggaagagtctatcacttagaaagaggatatgaaaatattgaaaataaattacaaaaaattggtgttaaaattaaaagattgaaataat

SEQ ID NO: 244037 - DNA, 616 bp, Unknown
  Bacterial polypeptide expressing nucleotide sequence isolated from the Sargasso Sea
aatggacaaatttattgttaaaggccctagcaaattaaagggtgaagttgcaatttcagggtccaaaaatgctgccttgccaattctggcatcaacaattttatttgaaaaggaagttataattaaaaatttaccaagggttaaagatataaatacaatgattaatcttttaaaatcccttggatcaataataaaatttagcaaagataaaaaaattgtaaaaataacgaagaaaaaaaaatataatatttttgcatcatattcacttgtaagaacaatgagagctggaatattggtactaggtgccctggttgctaagtatcaaaaatctattacatctttgccagggggctgcttaattggtgcaagacctgttaattatcacctgaatgctcttaaaaaacttggaatgaattacgaaattaaaaaaggttatatccatgcaaatactaaaggaaaactaaaaggcgcaaaaataagattttcaaaaattagtgttggagctacagaaaatactattatagcagcatgtttagccaatggaactacaatcttgaaaaattgtgcaattgaaccagaaataatagatttaataaattttttacagtcaggtggg

SEQ ID NO: 244038 - DNA, 442 bp, Unknown
  Bacterial polypeptide expressing nucleotide sequence isolated from the Sargasso Sea
catggaaagattaataattaagggtggaaaccatcttcaaggagaaatagactgttccggtgctaagaacgcaggcttacctatcctagcctcaacaatattgcttgacggctcagctttaataggcaacttgccacatttgcaagatataactacaaaactggaattgttaaattctatgggttctcaaataaattttcacgaagatggttatattgagattaattcttcaaatattcttttgcctgaagctagatatgagctcgttaaaacaatgcgtgcctctattttagttatgggtcctttagtggcgaaatatgggaaagccaaaatctcgcagccaggtggttgtgatattggcactcgaccaattgatttccatctttctggtttagaaaaaatgggagctgaattaagtcagattcaaaatatatttatttaa

SEQ ID NO: 244039 - DNA, 955 bp, Unknown
  Bacterial polypeptide expressing nucleotide sequence isolated from the Sargasso Sea
aatggacaaatttattgttaaaggtccttgtaaaataaagggcgaaatttcaatttcaggctcaaaaaatgctgctttaccaattttagcatcaactatcctatttgaaaaagaggtcataataaaaaatctacctcgcgttaaagatatagatacaatgattaacttattaaaatctcttggctcagaaataaaatttaacaaaaatagaaaagttgttaaaataacaaagaaaaaaaagcaaaatttttttgcatcatattcacttgttagaacgatgagagctggaatattagttttaggagctcttgttgctaaacatcaaaaatctattacttctttgcctggtggctgtcttataggggcaagacctgtaaactatcatttgaatgcgcttaaaaaacttggaatgaaatttgatattaagaaaggttatatccatgcacatacgaaaaaaaaacttaaaggaacaaaaatcagattttcaaaaattagtgtcggagcaactgaaaatacaattatagctgcatgtttagcaaatggcgttacccttctaagaaactgtgcaatcgaacctgaaataattgatttaataaattttttaaaatcaggtggagcaaaaataaaatttataggcaaacgtactttgaagatagaaggcattaaatctttagatagtacaagttattctgtgatgtcagatagaatagaaacaggaactttttgtgtagcagcatgtttaactggaggtaatttaaaaataaataattttgatccaaaaattataaaaacggaattatcattactaaaaaaagttggggcaaaaattaaattagccaaaaaccaaattcatatatctggtccaaaaaaaatcaaaaatttaactaatctagttaccaaagaatatccaaactttccacagatttacagcacagtttatggttctactttgtaa

SEQ ID NO: 244040 - DNA, 953 bp, Unknown
  Bacterial polypeptide expressing nucleotide sequence isolated from the Sargasso Sea
ctcggacgatcgtacagaatggttgctaccctcggcgaacgtatctttgtcgccgatcacgctgtttcaggcgccttctagtgaagcttctttttataacaatatgacgtggtcgggtgccggggggttccgacgtaacgctgtagatcgtcttcagtcccccggtgacacgattacctccttggcggggctagacagggaggtgatgacggggacgctgcggagtaatctcagccttggcaggctgacactttcgcaggcagtggatcttacagaggatagaacggctggtgcactggacaacgcattcttggtgattcctgactcaacccaagaagcacagctgatgacaggggatttgactgaggccgaactgcgctggtctaccagtgtgaattatcagcagcaactgattgggtcgactacgattacgccacgtctatctctatcgggcaatatgctccggtcgaatacggatcccttagcccagaattttgtgtccgcgccctcccggatcgccttcggcgctcagttgaagaccgacatttacggctttttcgggggggtcggtccgttcgaggccatcaggcacaagatcactccggcgatcgactacgcttggagccctgagtcagcaccgacagatatgcagcgggcggtattcggagcgcgagcactccaacctaagaatgctatttctgtatcactaacacagacttgggaagctaagccacgtgagccagaggtagaggaacaggtggtgtctctaggattagagagtgaggccccgcttggggatgctctcggcgcaggcttaggcccttctcagcctgattcactggaggcagcacccgacaatgccgagggaggactacagcggggtcaacaggttccagcgatgaccttgcttgcgtggcgcacaagcgtaattcagtacgatttcgtgcaagcgg

SEQ ID NO: 244041 - DNA, 814 bp, Unknown
  Bacterial polypeptide expressing nucleotide sequence isolated from the Sargasso Sea
tatgaaaaaatttataattactggcccaagcaaagccataaatggaatagtaaatataagtggtgcaaaaaactcatgtcttccacttatggcggcatctattctttttaaaaagcaagtaattttaagaaatgttcctttggttcaagacgttcttacaatgaaagatcttttaatttccttaggttctaaagtaaaaattttagagaaaaaaaaaattatgattattacaaataaaaaggatcataaattaactgttccctacaacttggtatctacaatgagagcaggagttctaaccatgggttccttacttggaagatatccaaagaaaaacataagagttgctcaaggaggaggttgtgcattaggaattcgcgatacatcttggcatctcgaaggtttcaaaagtttaggggctgaacatattttggaaaagggatacgtgaaaatatcttcaaagaatggtttagtaggtaagagctataagtttccaaaagttacagttacaggtacgtcaaatttaatcatgtcttcagtttttgtaagaggttcccatgttttaaaaaatatatctttagaacctgaggtaacagatcttataaaattcctaaacaactcaggcgcaaatataaagtttattggcaaaagatctttaagaattaaaggtgttaaagagctattaagcggcaatcataaaattattggtgataggatagaagcatttagttatctatgtataggagcaattacaaagggtagtgtaaaggtgatgaatatagatcctaaatttttaccttcagaattaaagata

SEQ ID NO: 244042 - DNA, 1141 bp, Unknown
  Bacterial polypeptide expressing nucleotide sequence isolated from the Sargasso Sea
atgcaatcaaaaatttgcgtattacaagtaatacctaatcttgatgtaagtggtgcttctcaaggatgtgttgatgttgcaaattttttgtcagagaagaactataattcttatattcttactcattcagggcctaaatcaatagaagtaaaagactctaatgaaaaagttttttatgcccccgttaactctaaaaacccacttaaaatttttttgaatacaattaaaattatacaacttattaaaaaactaaatataacaattgttcacgctagaagtagagcacccgcatggagctcatactttgcatgtgctgtaactggcgcaaaatttattacaacatttcatggcacatacaattttagtaacccactaaaaaaatactataactctattatgctaaaaacaaatggaacaattgcaatttcagaatttattaatgatcatataaataattgttacccaactaaaaataataatattagaactattgctagaggagtagatctggatttttttgatccaaataactgtaaaactcagcaagtagaattaattataaaagaattcaatattgataatgatgcaattaagattcttcttgctggaagaataacgggatggaagggacataaacttcttcttcaagcgatttctagtattcttaaaaaaacaaatcataaattcgagataatttttgttggtcccgatgaaaatcataaacttaagacttcattaaaaaattttgcaaacgaacataaccttgcaaaatctcttcattttgtgggccccaggaatgatttaaataatttttatagtctggctgatttagtaatatctgcgtcaacagacccagaagcttttggcagaatttctgtcgaggcccaagcaatgggtaaatttgtaatagcgtcaaatcatggagggtcagtcgagactgtgaaagatggcgaaacaggctatttatttgaaaacaataactctgaggatctatgtgaaaaaataattgaggcaatttctaatgaaaaacataaatcagataagacttcagaagcgtgcatttcacatgttagagaaaaatattcaaaaattaaaatgtgtgaagagacaataaatttttacgaagaaattataaattaaa

SEQ ID NO: 244043 - DNA, 541 bp, Unknown
  Bacterial polypeptide expressing nucleotide sequence isolated from the Sargasso Sea
atggaaagacttattattaagggcggtaatcagcttcatggagaagtgaattgttcaggagcaaaaaattctggattaccaatattggcttcaacgattcttttagatacgcctgcaaaaataggcaatttaccccatttgcaggatataactacaatgcttgagcttctaaattctatgggagcattaattaattttgatgaggacggttatatagagattgattcatctaatatttctgtgcctgaagcaagatatgaattagttaaaacaatgagagcatctatattggtaatgggtcctttagttgctaaatatggcaaagcaaaaatatcacagccaggtggttgcaatataggaacaaggccaatagattttcatctggatgggctagagaaaatgggtgcaaaaattaagtccgatgcaaaatatatttatcttgaagcagataaattaaatccaatagattttagttttccaaaaatatcagtaactggcacagaaaatttaatgatggcagctgccatcattgaaggtaaaa

SEQ ID NO: 244044 - DNA, 592 bp, Unknown
  Bacterial polypeptide expressing nucleotide sequence isolated from the Sargasso Sea
atggaaagacttattattagaggcggtaatcagcttcatggagaagtaaattgttcaggagctaaaaattctggattaccaatattggcatcaaccattcttttagatacgcctgcaaaaataggcaatttacctcatttgcaggatataactacaatgcttgagcttctaaattctatgggagcattaattaattttgatgagaacggctatatagagattgattcatctaatatttctgtgcctgaagcaaggtatgaattagttaaaacaatgagggcatctatattggtaatggggcctttagttgctaaatatggcagagcaaaaatatcacaaccaggtggttgcaatatagggacaaggccaatagatttccatctaagcggactagaaaaaatgggggcaaaaattaagtccgatgcaaaatatatctatcttgaagcagatagattaaatccaatagattttagttttccaaaaatatcagtaactggtacagaaaatctaatgatggcagccgccataattgaaggtaaaactgtattaaaaaattgcgctaaagagcctgaggttgttgaattagcaaatt

SEQ ID NO: 244045 - DNA, 625 bp, Unknown
  Bacterial polypeptide expressing nucleotide sequence isolated from the Sargasso Sea
atggacaaatttttaataaatggtccttgtaaaattaaaggctcagtaaaactctcaggaagcaagaatgcttcattgccaattttagctgctactattttatttgacgagccagtagaaataaaaaatttgccaaatgttaaagatatcgaaacaatgttaaatttaataaaatccttgggttttattgttaaaaaaaaaaaatttaataattctgtaataataaagaagaaaaaaattaaaacatttgcctgttattctttagtaaaaactatgagagcgggaatattagtattgggtccacttatatcaaaatatagaaaagctattacatcactaccaggaggatgtctcattggtgttcgaccggttaattttcatttaaatgttttaagaagacttggtatgaaacatgagattaaaaaaggatatatatatgcaaatgccaaaaaggggttgaaaggttcaacaataaaatttccacaaatttcagtaggtgcaacagaaaatgcaatgctcgccgctactctagcagatggaaaaacaatattaaaaaattgcgctatagagccagaaatcaaactcgatttaacaaattttttaaataaagctggtgcgaaaatca

SEQ ID NO: 244046 - DNA, 466 bp, Unknown
  Bacterial polypeptide expressing nucleotide sequence isolated from the Sargasso Sea
atgtcatcctttaaacttgttcaaattgttccttctttagactctggtggtgttgaaaggggcactgttgatgtggctaattttttagctgaaaaaaagatacataactttatcattacttccggcggtaaaatgataaaggaacttaataaaaattttacgcatattcatcaattacccgtagatagtaaaaactttttttattatccttttatagctaaaaaaattaatcaatttattaaagccaacaatattaatatagctcatgttcgctccagaggtcctgcctggatgattaatttaatggcaaaaaataatatcaaaacaattgctacattccataatgtttatgcgggaaactcttatgtaaaaaagttctataataaaggtttatctaaaatggatcatctcgtagcaatctctgactatgtaaaagaaacaattataaaaaaatataacctttcac

SEQ ID NO: 244047 - DNA, 462 bp, Unknown
  Bacterial polypeptide expressing nucleotide sequence isolated from the Sargasso Sea
tatggataaattttctatcaccggtccttgtcgagtgatgaaaggtaaagtttcaatttcaggatctaaaaatgctgctttaccaatccttgctgcaacactcttgtttgacaaacctgtaattatcgaaaatctccctagggtaagagatattgatacaatgctgaatttattaaaatctcttggatcaaatattcagtttttaaataataaaaaaacggtaaaaattacaaagactaaaaagcaaaagcagttcgcatcttattcaatagttaaaacaatgagagcaggaatacttgtgcttggaccgttagttgccaaatatcataaatctatctcaagttttccaggtggatgtgttttgaatggtaattctggtagaccaattaatttacatttggaagccttgaaaaaacttggaatgaattacgaaataaaaaaaggttatatccatgcgaaatc

SEQ ID NO: 244048 - DNA, 139 bp, Unknown
  Bacterial polypeptide expressing nucleotide sequence isolated from the Sargasso Sea
gcatcattaatcattgcagcactcgcatctaaaggagaaactcaaatcagtagagtatatcacatagatagaggttatgagaatattgaacaaaaatttgagggtcttggtggagatatacaaagaatatcagaataaa

SEQ ID NO: 244049 - DNA, 420 bp, Unknown
  Bacterial polypeptide expressing nucleotide sequence isolated from the Sargasso Sea
aatggagaaattaatcatcaaaggtggaaaccagctccatggagaaataaattgttctggagcaaaaaatgcaggtttgccaatccttgcctcaagcattttattttccgattcaattcaagttggaaaccttccacatctaaaagatatctcaacaatgcttgagctgctaaattccatgggttcaaatatctgtcttgaagagaatggcatgcttacaattgattcatcaaaccttaccaatccagaagcaagatatgaattagttaaaacgatgagagcttccattctggtgatgggtccccttttagctaagtatggtagagcaaaaatttcacagcctggtggttgtaatattggaaccagaccaatagatttccacttgtccggcctcgaacaaatgggagctgaaattaaaat

SEQ ID NO: 244050 - DNA, 904 bp, Unknown
  Bacterial polypeptide expressing nucleotide sequence isolated from the Sargasso Sea
aataggggcaagacctgtgaattatcacttgattgcattaaaaaaattaggaatgaaatataaaattagggatggatatatcatagctaagtcaaatggaagactaaagggtaagacaataaagtttcctaaaataagtgttggtgcaacagaaaattcgataattgctgcatgtttagctaagggtaaaacaattttaaaaaattgtgcaatggaacctgaaattaaagacttaacacaattcttaaataaagctggcgcaaatataaaatggtccggaagaacttgtataattacaggaattgattcacttaatcaaacaactcatacagttatggctgatagaatagaagcaggtactttttgtgtggcagcaacacttgccaaaggtaacttacaagttaaaaatttagatccaaatataataaatactgaattggaattattaaaaaaagtcggggctaaaattaagactaccaataacaaaatttttataaaaggacctaataaaattaaatctattaaaaatataaaaactaaagagtttccaggaattccaacagatcttcaagctcaattaatggtattaatgtgtaagagtgtagggaaaagttctataaccgaaagtatttttgaaaatagattcatgcatgttgcagagttgcaaagattaggtgcgaaaataaatattaaaaataacaaagcatttattgagggaaatactaattttataggtgctgagctaatgtctagtgaccttagagccagtgttgctttagtactagctgcaatagtagctaatggaaaaagtattgtcggacgagtctatcatttagaaagaggatatgaaaatattgaaaataaattaaaaaaaatcggtgttagaattaaaagattaaaataa

SEQ ID NO: 244051 - DNA, 883 bp, Unknown
  Bacterial polypeptide expressing nucleotide sequence isolated from the Sargasso Sea
catggaaaaatttatagttcaaggtccttgtagattaaaaggatcagtcgaaatttctggaagcaaaaatgcatctctgccaattctagctgcaactttactttttgatgatgttgtcgagttaaaaaatttaccaaacgttaaagatatatatacaatgctttctttacttgagtcactaggatcaaaagtaaaaataaataagcagaagaaaattataaaaatttacaaatctaaaaaaattaaaacttttgcatcatataatttagttaaaacaatgagagcaggaattttagttttaggaccattaatagcaaaatataaacaagctattacttcattaccgggtggatgttctataggtgcaagaccagtaaatcaccacttaaattcgttaaaaaaaatgggaatgaagtattttattaaaaagggatatattcatgcaaaagtagataaaactttaactggaaacttaattagattaccaaaaatttctgtaggtgccactgaaaatctaataatagcatcatgcttggcaaaaggaaaaactataataaaaaactgtgctatagaacctgagataaaagatcttagtaattttctaataaaagcaggagcaaaaatcagatggattggaaaaagaactgtcgaaattataggagttaaatctttaagaagtataagttataatgttatgggtgatagaatagagtgtggaacattctgtgttgctgctgctcttactgaaggtaatctaaaaattaaaggatttaatccaaaactaattaatactgaacttaatatattaaaacaaactggtgcaaaaattcaattaaagaaagatgaaataaatattaaaggtaataatattattaaaaatatt

SEQ ID NO: 244052 - DNA, 332 bp, Unknown
  Bacterial polypeptide expressing nucleotide sequence isolated from the Sargasso Sea
tatggataaattttctatcaccggtccttgtcgagtgatgagaggtgaagtttcgatttcaggttctaaaaatgcagctttaccaatacttgccgctacactgctgtttgacaaacctgtaattatcgaaaacctacctagtaggacaagagatatccaggtaatgctgaacttattaaaatctcttggatcaaatattcaatttttaaataataaaaaaacagtaaaaattacaaagactaaaaagcaaaagcagtttggttcatattcaattcttaagacaatgagagctgggatactgatcctgggacccttagtttctaagtatggaa

SEQ ID NO: 244053 - DNA, 673 bp, Unknown
  Bacterial polypeptide expressing nucleotide sequence isolated from the Sargasso Sea
aatggacaaatttattgttaaaggccctagtaaattaaagggagagattgcaatttcaggttctaaaaatgctgctttaccaatattagcatcaacaattttatttgaaaaagaagttgtaattaaaaatttaccaagagtgaaagatatagatacaatgattaatcttttaaaatcccttggatcaatagtaaaatttagtaaagataaaaaaactgttaaaataacaaagaaaaaaaaacataaattttttgcctcatattctcttgttagaacaatgagggctggaattttagttttaggtgccctggttgctaagtatcaaaaatctattacctctttgcccggaggctgcttaattggagcaagacctataaattatcatttaaatgcacttaaaaaacttggaatgaagtatgaaatcaaaaaaggttacatatatgcaaattctaaaggaaaactaaaaggcgcaaaaataagattttcaaaaatcagtgttggggcaaccgaaaatacaattatagcagcatgcttagcgaatggaattacaatacttagaaattgtgcaattgaaccagaaataattgatttaataaattttttaaagtctggtggtgctaaaataaaatttattggtaagcggactgtgaggattgagggagtaaaattttaa

SEQ ID NO: 244054 - DNA, 127 bp, Unknown
  Bacterial polypeptide expressing nucleotide sequence isolated from the Sargasso Sea
aatggattattttgaaataaaggaatcaaaaaaactttacggttcagttaaagttagtggagcaaaaaatgctgtgttgcctttaatggctgcatcaattcttaatagaaaaaaattaaaattttaa

SEQ ID NO: 244055 - DNA, 169 bp, Unknown
  Bacterial polypeptide expressing nucleotide sequence isolated from the Sargasso Sea
attggaaaaattattaattaaaggcggaaaaagtctttcaggtcagattgactgctcaggagctaagaatgctgctttgccagtaattgcagcatcaattctttcgtcagatgatataacgcttaaaaatcttccatatcttcaagacattactaccatgttgaactaa

SEQ ID NO: 244056 - DNA, 607 bp, Unknown
  Bacterial polypeptide expressing nucleotide sequence isolated from the Sargasso Sea
attttttaaaattcaggtgggtgcaaaaatcaaatttataggtaaacgtactttgaaaatagagggtattaaatctttagaaagtacaagttattctgtgatgtcagacagaatagaaacaggaactttttgtgtagcagcatgtttaactgaaggtaatttaaaaataaataattttgatccaaaaattataaaaacagaattatccttattaaaaaaaattggagccaaaattaaagtagctaaaaaacaaattcatatatctggtccaaaaaaaatcaaaaatttaaccaatttagttactaaagagtatccatattttcctacagatttacaagcacagtttatggttttactttgtaaggccaaaggtaaaagttcaataactgagagtattttcgaaaatagatttatgcatgtagctgaattaagaaggttaggtgctgagataatagtaaaaaaaaataaggcctttatttcaggtaatacaaattttcaagcagctgaattaatgtcaagcgatcttagagcctcagtagcgttagttttagctgcgatagttgcaaaaggatcatctataattaatagaatttatcaccttagatag

SEQ ID NO: 244057 - DNA, 679 bp, Unknown
  Bacterial polypeptide expressing nucleotide sequence isolated from the Sargasso Sea
agttgtagatcttataaagatgttaaaaaatatgggtgccgatataacaggtgagggcagtagcgaaatagtaattaatggagtaagtacattaaagagtacaaatcacaaagtcattggagaccgcatagttgcgggaacatatattggtgcttttttatcaacaaatggaaacggtaagatagttggaattaatccagatcatttacctatggaaattaaaaagtttacagagatgggagcaaaatttgaaattagcagcgattctattgaggttgaatcacctaaacaactatcgccaattgatatttctacacttccatttccaggcattgctactgatttgcaaccaatatttggagcctcactattaaaagccaatggaacatcaataatcacagaaaatgtttacgatcaacgttttcagtggattccagaagtgcagagaatgggtgccgatatacaaatagggtggcaacatgcaatgattaaaggtgtagataaattatcaggagcacctgttcactccacagatattagaactggtgcaagccttataattgctgctttacaagcagacggtgaatcaacaatttcgggaatagatcatatagaaaggggatatgaaaatattgtctctctactaagttctattggtagtgaaattgaatataattaa

SEQ ID NO: 244058 - DNA, 298 bp, Unknown
  Bacterial polypeptide expressing nucleotide sequence isolated from the Sargasso Sea
tattaccgatacagtttaccatgatcgttttagtcatataccagaactaaaccgttttggagctaatatcaagtctgataacaatactgcttttgttagaggtgtaaatgaactgattggtgcacctgttatgtctactgatataagagcaagtgcttcattgatcattgcaggacttatagctaaaggtcaaacaactgttagtcgaatttatcatatcgataggggttatgagaaaattgaagagaaatttcgcgctcttggtgcaaatataattagagataattcacctggataa

SEQ ID NO: 244059 - DNA, 891 bp, Unknown
  Bacterial polypeptide expressing nucleotide sequence isolated from the Sargasso Sea
aatgtcatcctttaatcttgtacaaatagttccctctcttgattctggaggtgtcgaaagaggcacggtagatgtggctaattttttggctcagaaacaaattaagaattttattatcacctctggtggcaaaatgattaaagaacttgatgacaattttgttcatgttcatcaattacctgtatcgagcaaaaacttttttttatatccttcaatagcacgtaaaatatataaatttattcaagcaaataatattaatttagtgcatgttcgatctagaggtcctgcttggatgataaatttcatgtcaaaaaagaatattaaaacaatttctacttttcataatgtgtatggtggtaattcctttattaaaaaaatgtataataagggattgtctaaaatggatcatctgattgcaatatcagattatgtaaaagaaacagttatacaaaaatataatattacaaataaaaatatatcagtcatcaataggggaattgatactgaatattttaatcaacctatcaataaaacctataaagaagattttataaatagacatcaaattgacaagtcaaaaaaaattattctttttccagcacgactaacacgttggaaaggtcagttggaatttgttgatgttataagaaaaattaccacagaaagtattttagttctttttgctggagatactaaaaatgacagttatacaaaacaactccgtgaaaaaataaataaaagtaatttaaacgataccttcaaaatattaggaagcattaaccaagaggagatgcgtctattatttgacattgcagatttatcagtgtcgctgccattgagagctgaaggttttggcagaactataagtgaatcgttatattcaggcacacc

SEQ ID NO: 244060 - DNA, 1243 bp, Unknown
  Bacterial polypeptide expressing nucleotide sequence isolated from the Sargasso Sea
taataaagcaatcaagggtgaggttgatataagtggtgctaaaaattcttgccttcctttaatggcagcatccattttatttaaaaataaaataattttaaaaaatgtgccatttgtaaaagatgttcacacaatgaaagatcttctaatttctttaggttcaaaagttgaattttcagagaaaaaaaaaattatgacaataatcaacaaaaaaaaacataaattaattgttccctacaaattagtatcaacaatgagagcgggtgtgttaaccatgggtccgttgttagcgcgatatcctaaacaaaaaataaaagttgcaatgggtggaggatgtgcgctgggtgtaagagatactaattggcatttagcaggctttaaaaccttaggggctaacaatagtttagaaaaaggatacgtaaatatttctgctaaaaaaggactaaccggaagtcattataaatttccaaaagtaacagtgacgggtacctcgaatttaattatggcctctgtttttgtgaaaggtacacacttcatcaaaaatatttcaattgaacccgaagttatagatttaattaattttttaaataattcaggtgcatccataaaatttttaggaaaaagatccatcaagattataggtgttaaagcacttgataatggcaatcataccatcataggcgataggatagaagcttttagctatttatgcgttggtgcagccacaaatggaaaaattaggataaaaaatattaatccaaaatatcttagatctgagattaatgtacttaaaaaagttggttataaaattgaaactaaagataattcaattagaatttctcctggccttaaattaaaacctataaaattaagaacgggtccatttcctaattttgcaactgacaacatgccacttatattggctgtgttaacaactataaaaggaaaaagccaaatagaagaaacaattttttccaatcgatttatggcagcccctgaattaaatagaatgggggcaaaaattacaattaaaaaaaacaaagcaattataattggtcaaaaaaaattaaattcagctgattgtatctcttcagatttaagaagtacattctcaattataattggggctatatcggcttacggttcatcatctatatcaagaatctatcatggtttaagaggatattacaatcttgaacttaaactcaaaaaaattggaatcaaaataatatcaaaaatataa

SEQ ID NO: 244061 - DNA, 184 bp, Unknown
  Bacterial polypeptide expressing nucleotide sequence isolated from the Sargasso Sea
ccatctaagttgaccggagcagaagtaatggcaacagatttaagagcctctgtatgtttagtattggctgggttagttgctgataatagaactataattaatagaatatatcatctagatagaggttacgagactttggaaaaaaaattaagatattgtaaagcacggataaaaagaatttaaa

SEQ ID NO: 244062 - DNA, 361 bp, Unknown
  Bacterial polypeptide expressing nucleotide sequence isolated from the Sargasso Sea
cctgggttttccaacagatttacaagctcaaattatgtctctgatgagtatagtaaacggtaactcagaaattaaagaaactgtttttgaaaatcgatttatgcatgttcctgagcttaatcgtttaggtgcagaaataaatttaaataaggacatagcttttatcaaaggaaataaaaagtttaaaggtgcacaggtaatggcaagtgatttaagagctagtgtcagtttagttcttgcagcattatgtgctgaaggtaaaactacaattaaccgtgtttatcacttggatagggggtatgcagaaatagaaaaataccttggaaaacttggagctaaaataatgagacagaaaatttaa

SEQ ID NO: 244063 - DNA, 303 bp, Unknown
  Bacterial polypeptide expressing nucleotide sequence isolated from the Sargasso Sea
aatctaaatcacaaataactgaaaatatttttgaaaacagatttatgcatgttccagaattaaaccgcatgggcgctaatattgaaaccaaaggcaaaacagcaataattaatccatgcaaagggtttatttcagctcaggtcatggcaactgatttacgggcttcggtaagtttaattttagccggattagttgctaaaggtgaaacaacattgaaccgaatttatcatcttgatcgaggttatgagaaaatagagaaaaaattgcaagcttgtggtgcagatattcggagaataaattagg

SEQ ID NO: 244064 - DNA, 574 bp, Unknown
  Bacterial polypeptide expressing nucleotide sequence isolated from the Sargasso Sea
aatgcaaaaacttattgttaaaggcaacaaaagcttagttggaactgtaaaaatatccggctcaaaaaacgcaaccttgccaattttagcagcagcaattttaagtaatgaaaaaattgaattaaataatgttccattagttaatgatgtttttactatgactaaacttttaagtcatattggttcaaatattaaatttaatcataggaaaaaaaaaattttaatacataataaaaaaaaaaattttaaaacaacagctccttataaattattaaaaactatgagagcaggcgtaatagtattgggcccacttctatcaaaatttaaaagagcaaaagtttcgttgcctggaggttgtgctatcggaactagaccagttgatatacatctttttggtttaaaaaaattaggtgcaaaaattaaaattaaaaatggttatattattgccgaagcaagaaatggtcttaaaggcactaatataaatttaccatctatatctgttggagctacagagaatgttatcatagccgcaagttatgcaaatggtgtaagttatattaaaaactgcgcttgt

SEQ ID NO: 244065 - DNA, 502 bp, Unknown
  Bacterial polypeptide expressing nucleotide sequence isolated from the Sargasso Sea
gttaaaaatattaaaactaaatatctagaatctttaattcaaaccctaataaaaatgaaagccaatttaattgtcaatgataacgatattacaatattaccctcaaaaaaaataataggtattaatatagaaacagctccttacccaggttttccaactgatcttcaggctcaaataatggctttaatgtgcatagcaaatggaccatctacaattaaagaaaaaatatttgaaaatagatttatgcatgtatctgaattaaatagattaggcgcaaatataaaaattaaaaaagatatagcatatgtagcaggaaatacgaaatttaaaggagctcaagtaatggctagtgatttacgagcaagtgttagtttagtacttgctggtctttgtgcaaaaggagagactacagtaaatagagtatatcatttagataggggatatgaaaaaattgaggaaactcttggtatttgtggtcctatcataagaagagaaaaataaa

SEQ ID NO: 244066 - DNA, 634 bp, Unknown
  Bacterial polypeptide expressing nucleotide sequence isolated from the Sargasso Sea
atggacaaatttattgttaagggtccttgtaaaataaagggcgaaatttcaatctcaggctcaaaaaatgctgccttaccaattttggcctcgacaattttattcgaaaaagaagtcataataaaaaatttacctcgtgttaaagacattgatacaatgataaatcttttaaaatctcttggttcagaaataaaatttaataaaaatagaaaaattgttaaaataacaaaaaaaaaaaagcaaaatttttttgcatcatattcacttgttagaacaatgagagctggaatattagttttaggagcacttgttaccaaacatcaaaagtctattacttctttgcctggtggctgcctaataggggcaagacctgtaaattatcatttgaatgcgcttaaaaaacttggaatgaaatatgatattaagaaaggctatattcatgcacatacgaaagaaaaactcaaaggtgcaaaaatcagattttcaaaagttagtgttggagcaactgaaaatacaattatagctgcatgtttagcaaatggaattactgttcttagaaactgcgcggttgaaccagaaataattgatttaataaattttttaaaatcagctggtgctaaaataaaattatagg

SEQ ID NO: 244067 - DNA, 899 bp, Unknown
  Bacterial polypeptide expressing nucleotide sequence isolated from the Sargasso Sea
aagtctattacttctttacctggtggctgcctaataggggcaagacctgtaaattatcatttgaatgcgcttaaaaaacttggaatgaaatatgatattaagaaaggctatatccacgcacatacgaaagaaaaactcaaaggtgcaaaaatcagattttcaaaaattagtgttggagcaactgaaaatacaattatagctgcatgtttagcaaatggaattaccattcttagaaactgcgcaattgaaccggaaataattgatttaataaattttctaaaatcaggtggtgcaaaaataaaatttataggcaaacgtactgtgaagatagaaggtattaaatcatttgaaagtacaagttattcagtgatgtcagatagaatagaaacaggaactttttgtgtagcagcatgtttaactggaggtaatttaaaaataaataattttgatccaaaaattataaaaacagaattatcattactgaaaaaagttggagcaaaaattaaagtagccaaaaaacaaattcatatatctggtcctaaaaaaatcaaaaatttaactaatttggttactaaagaatatccaaactttcctacagatttgcaagcgcagtttatggttctactttgcaaggctaaaggtaaaagttcaataactgaaagtattttcgaaaatagatttatgcatgtagctgaattgagaagattaggtgctgagattctaataaaaaaaaataaagcgtttatttcaggtgatactaactttcaagctgctgaattaatgtctagtgacttaagagcttcggttgcattagttttagctgcaatagttgcaaaaggatcatctataatcaatagaatttatcacttagatagaggatatgaaaatatagagagtaa

SEQ ID NO: 244068 - DNA, 774 bp, Unknown
  Bacterial polypeptide expressing nucleotide sequence isolated from the Sargasso Sea
aatggacaaatttattgttaaaggtccttgcataataaagggcgaaatttcaatttcgggttcaaaaaatgctgctttaccaattttggcatcgacaatcttattcgaaaaagaggtcataataaaaaatttacctcgcgttaaagatatagatacaatgattaaccttttaaaatctcttggctctgaaataaaatttaataaaaatagaaaaatcgttaaaataacaaagaaaaaaaagcaaaatttttttgcatcatattcacttgttagaactatgagagctggaatattagttttaggagcgcttgttgctaaacatcaaaagtctattacttctttgcctggtggctgccttataggggcaagacctgtaaattatcatttgaatgcacttaaaaaacttggaatgaaatatgatattaagaaaggctatatccacgcacatacgaaaggaaaactcaaaggtgcaaaaattagattttcaaaaattagtgttggagcaactgaaaatacaattatagccgcatgtttagcaaatggaattaccattcttagaaactgtgcaatcgaaccagaaatagttgatttaataaattttttaaaatcaggtggtgcaaaaataaaatttataggaaaacgcactttaaagattgaaggtattaaatctttagaaagcacaagttattcagtgatgtctgatagaatagaaacaggaactttttgtgtagcagcatgtttaactggaggtaatttaaaaataaataatttgac

SEQ ID NO: 244069 - DNA, 689 bp, Unknown
  Bacterial polypeptide expressing nucleotide sequence isolated from the Sargasso Sea
tgaaataaaggatctaacaaattttcttaaatcagcaggcgcaaacataaaatggattggtaaaaggacttgtcaaataattggtgtaaattccttgaacccaaccacttattctgtaatgggagatagaatagaaacaggaactttttgtgttgcagcaactttaacaaaaggtgatcttacaattaaaaactttaattcaaaattgatccagacagagttaaatctattaaaaagatctggtgcgaaaataaagacgtataaaaacgaaataaaaattaaaggcccacaaaaaattaaaaatataagtagtattgttacaaaagaatatccaaactttccaactgatttacaagctcaattcatggttttgatgtgcaaagctaatgggagaagttcgataactgaaagtatttttgaaaatagatttatgcatgttgctgagttaagaagattaggcgcaaaaatagttataaaagataacaaagcaattatggaaggcaatacagattttaccggggcagaactaatgtctagcgacctaagagcttcggttgctttagttttagctgcaattatatcaaaagggcagtcagtaattaatagaatataccacttagacagaggatatgaaaaaattgaaaataaactaaaaaaaattggagttagaataaaaagattatcttaat

SEQ ID NO: 244070 - DNA, 862 bp, Unknown
  Bacterial polypeptide expressing nucleotide sequence isolated from the Sargasso Sea
aataaagggcgggaaccatctcaaaggagaaatagactgctctggtgctaagaatgctggattacctatactagcctcaacgatactgcttgacggctcagctttgatagggaacttgccacatttacaagatataactacaaaactagaattgttaaattccatgggttctcaaataaattttcatgaagatggttatattgagattaattcttcaaatatttttttgcctgaagctagatatgagctcgttaaaacaatgcgtgcctctattttagttatgggtcctttagtggcgaaatatggaaaggccaaaatctcgcagccaggtggttgtgatattggcactcgaccaattgatttccatctttctggtttagaaaaaatgggagctgaaattaagtcagattcaaaatatatttatctaaaagcaaaaaaacttaatcccatagatttctcttttcccaaggtttccgtcactggaacagaaaatttaatgatggccgcaacattaattgagggaaccactacattaagaaactgcgcaaaagaaccagaagtattggagctcgcaaactatctcaataactgtggtgcaaagattagtggggcaggaaaatccgaaattatagttcagggagtaaaaaaattagaagcaagcaggtggaatgttttatttgacagaattgaagctggcacatatctggttgcaggcgctattacaaatggccatgtaaaagtaaataaaattgaccccgaaactattaatatagttagtgaaaaattgatagatatgggcgtcgaagtaaatattggctcagattttgttgaagttgatgcaacttcttcagatttgaaagcc

SEQ ID NO: 244071 - DNA, 283 bp, Unknown
  Bacterial polypeptide expressing nucleotide sequence isolated from the Sargasso Sea
aatattttcgaaaatagatttatgcatgtacaagaacttgtaagaatgggcgctaatattaaattagataaagataaggcacttataagaggtgatagaagtctaaatggagcaaatgttatggcaacagatttaagagcttcagcttcactaataatagcaggactagttgcaataggtaaaactacaattagtaggatttaccatttagatagaggattctataatttagaatgtaaattaaataattgtggagcgtcaataaagaggattagcgaataat

SEQ ID NO: 244072 - DNA, 685 bp, Unknown
  Bacterial polypeptide expressing nucleotide sequence isolated from the Sargasso Sea
ggagcgactgaaaatacaatcatagctgcatgcttagctaatggtattacaatccttagaaattgtgcaattgaaccagaaattatcgatttaataaattttttaaagttaggtggcgcaaggataaaatttattggtaagcgaactttaaaaattgaaggagttaagtctttagaaagtgttagctattctgtaatgccagatagaatagaaacaggaacattttgtgttgccgcatgcttaacaggtggtaaattaaagattaaaaattttgaccctagattaattaaaacagaattgtcattgttaaaaaaagttggagcaaaaattataacatctaaaaaacaaattcttatttcaggaccaaaaaaaatcaaaaatataactaacttagttactaaagaatatccaagctttcctacagatttacaagctcagtttatggttctgctttgtaaggcaaacggaaaaagtttgataactgaaagtatttttgagaatagatttatgcatgtagctgaattgagaaggttaggtgctgatattacaattaaaaaaaacaaggcttttatttctggcaatactgattttcaagctgctgaattgatgtccagtgacttgagagcatctgttgcattagttttagcctgcaattgttgcaaaaggatcgtccacaatcaataga

SEQ ID NO: 244073 - DNA, 571 bp, Unknown
  Bacterial polypeptide expressing nucleotide sequence isolated from the Sargasso Sea
gatgtctgatagaattgaagccggaactttttgcgtggcagcgacacttacaaaaggaagtttagagataaaaaattttaactctaaaataataaattcagaaataaatttattaaagaatgttggtgcaaagattaaggtctataataataaaatttttattaaaggacccagtaaaataaagaacatcaaaaatataaaaacaaaagaatttccaggtatacctactgacctccaagcacaattgatggttttaatgtgtagagcagttggcaaaagttcaataactgaaagtatttttgagaatagattcatgcatgttgcagaattacaaagactcggagcaaaaatttatgttaaaaaaaataaagcgttcatacagggaaatactaaatttattggagcagaattaatgtctagtgacttaagagcttcagttgctcttgttttagcagctatggtagcaaatggtaaatcgtatataaatagaatttatcatttagatagaggttatgaaaaaattgaaaataaattaaaaaaaattggtgttaaaatcaaaagattaaaatag

SEQ ID NO: 244074 - DNA, 963 bp, Unknown
  Bacterial polypeptide expressing nucleotide sequence isolated from the Sargasso Sea
ttttgataaaccagtagaaatttctaatcttccaggtgtcaaggacatagaaacaatgctaaaactattggaatctttagggttaaaagttaatcgacataaaaaaaacaagtctgtaaaaattttcaaatcaaaaaaaattaaaactcaagcttcatattcattggtaaaaacaatgagagcgggaattttagttttaggtccacttataactaaatacaaaaaagccataacatcattacctggaggttgcttgataggtgaaagaccagtgaaccaccatttaagtgcattaaaaaaattaggaatgaaatacaatataataaaaggttatatacatgcaactgcacacaaaaatttaaatggaaaaaaaataattttttccaaaatttcggttggagccactgaaaatcttatcatggctgcttgtttagcaaaaggaactaccatcttaaaaaactgtgcaattgaacctgaaataagagacttgattaattttttaaacaaagcgggagcaaaaataaagtggataggaagaagatcaattaaaataactggagttaaatctctcaatcaagttaaatataaagtaatgggtgacagaattgaatgcggaactttttgtgtagcagcagttttgacatctggcaatcttcaaatcaaagggtttgatccaaaattaataaggactgaacttaatttattaaaaaaaattggagctaaaattaaaactagtttaaatgagattaacattcagggaaataaaaatcttaatagtcttaaaaatttagcaactaaagaatatcctgattttcctacagatcttcaagctcaattcatggttttattatgtagagcaaatggaatatcaaaaataacagaaaatatatttgaaaatagatttttacatgttggcgaattaaaaagattaggagcaaaaataaatgtaaagaataatcaggc

SEQ ID NO: 244075 - DNA, 685 bp, Unknown
  Bacterial polypeptide expressing nucleotide sequence isolated from the Sargasso Sea
tatggataaatttgtaatcaagggtccatcaaagattaaaggagatataagaatttcaggaagtaaaaatgcagctctacctatacttgctgctacactgctattcagcaaacctgttgagctaaaaaatgttcccaacgttcgtgatattcaaacaatgttaaatctgctaagatttttcaaaaaaaaaataaaaatttcaaaaaataaaaatactataaaaatttataattcaaaaaagattagaacttacttaccatattcaatatcaaaaactatgcgtggatcaataatttgtctcggaggattagtttcaaagtatggaaaagcaatatcagcatatcctggtggatgtgcaattggaacaagaccgattaattatcatttagacgcacttaaaaaacttggaatgaaatacgaaattaaaaaaggatatatttatgcaacagcaaaaaatggtttaaaaggaaacaatattaaatttaaaaaaatatcggttggagctacagaaaattcaattattgctgcaagtctagctaaaggaaaaaccattttaaaaaattgtgcaatcgaaccagaaataaaagatcttacaaaatttttatcatctgctggagctaatataaaatggattggaaaaagaactgttcaaattattggagtacaaaaattaagaagtataaat

SEQ ID NO: 244076 - DNA, 373 bp, Unknown
  Bacterial polypeptide expressing nucleotide sequence isolated from the Sargasso Sea
atgcaaagacttataattaagggaaaaaataatttaaaaggaactataaaaatttcagggtctaaaaatgcaacacttccaattttagcggcttgtatcctatcagatcaatcagaaataaaaaacattcctttagtgaatgatatttttactatgattaaacttctagattttatcggacttaatgtcagcttatcaaaaaaaaataaaaccgttaaaataaagaaccatttaataaaatcaaaaaaaaatatagttgctccctataaacttgtaaaaacaatgagagcgggtgttttagtactaggaccaattttaaacagatgcggaaaagctaaagtttcactgcctggaggttgcgcgattgggacta

SEQ ID NO: 244077 - DNA, 355 bp, Unknown
  Bacterial polypeptide expressing nucleotide sequence isolated from the Sargasso Sea
tcctactgatatgcaggctcaatttatggcattgaattcgatatcacatggcagttcaattattgaagaaacagtttttgaaaatagatttcagcatgtaattgaattaaggaaaatgggagcaaatatagatcttgaaaaaaataaagcaaaaataattggagtccccaatctcgtagggtcagtcgttaaggcatcagatttaagagcatctgctagtttagttctagccggtttagttggtaaaaatcgaactcaaatcgatgatatattccatatagataggggctatgaatgcattgaagaaaaattgaataaactgggagctgaaatcattagggagccagtactctag

SEQ ID NO: 244078 - DNA, 604 bp, Unknown
  Bacterial polypeptide expressing nucleotide sequence isolated from the Sargasso Sea
gttaaatctcttaaaaaagttgagtactcaattatgggggataggatagaatgtggaacattctgtgtagccgctactctaacccaaggaaatttaaaaattaaaggttttaatccaaaattaattaatactgaattaaaacttttaaaaaaagttggagctaatataaaaattttcaaaaaagaaattaatattcgaggtccgaaaaaaattaaaaacataagatttcttaagacaaaggaatatcctttttttgcaactgacctacaagcccagtttatggtattgttctgtaaaggactgggtcgttcaacaatattggaaactatttttgaaaataggtttatgcatgttggagaattaagaagactaggcgcaaaaataagtataaaaaataataaagcaattatagagggcggtgcaaattttgaaggcgccgaattaatgtccagtgatttacgagcttcagtagcgctagtattagccgcgttatcagcagaaggtaaatcaattataaacagaatttatcacttagatagaggctatgaaaaattggaatataaattaaagaaaattggagcaaatattaaaagaataaattaat

SEQ ID NO: 244079 - DNA, 326 bp, Unknown
  Bacterial polypeptide expressing nucleotide sequence isolated from the Sargasso Sea
aatggagaagttgttaatcaaaggagggaatcaactctctggaaaaataacatgctcaggcgcaaaaaatgcagccttaccgatgattgcatcgacgattttgtctgatgagaaagttactttaaaaaatcttccatatcttcaagacataaccacaatgtttgagcttttaggttctatgggtgctgatatcttattagatgaagatatgaatttcacaatacaatcaaataatctcaaagatattgaagctaggtatgaattagttaaaacaatgagagcttcaatattagttttaggtcctttgcttgctaaatatggtaaag

SEQ ID NO: 244080 - DNA, 895 bp, Unknown
  Bacterial polypeptide expressing nucleotide sequence isolated from the Sargasso Sea
aaataaaaaaaatatgaaaacttttgctagttattctttagtcaaaacaatgcgtggttctattttagttctaggtccacttatttcaaaataccataaatctaaaatctcattacctggagggtgtttaattggtgctagaccagtaaattatcatctaacagcattaaaaaaacttggtatgaaatatgaactaaacgatggatatattctagcaaaatcaaaaggaaaacttagcggaacaactataaattttcctaagataagtgttggggcaaccgaaaattctataatagcagcatgtttagcaaaaggaaaaacagttttaaaaaattgtgcaatagaacctgagattaaagatcttacaaattttttaaataaagctggagcgaaaataaaatggacaggaagaatttgtgaaatcataggtgtaaattctttaaatgaaactgaatattctgtaatggctgatagaatagaagcaggtacattttgtgtagctgcaacacttgcaatgggtaatttacaaataaataatttaaatcctaaaattattggcacagaaataaaattattaaaaaaagctggcgctaaaattaaaactagtgaaaataaaatcttaattaaaggacctgaaaaaataaaatcaataaaaagtattaaaactagagagtttccaggcattcctacagaccttcaagcacaattgatggttttgatgtgcaaagcagttggcaaaagttcaataaccgaaaatatttttgaaaatagatttatgcatgttggagaattgcaaagattaggagcaaaaataaatattaaaaataatactgctacaatagaaggaaatactaaattcattggcgcagaattaatgtctagtgatttaagagct

SEQ ID NO: 244081 - DNA, 607 bp, Unknown
  Bacterial polypeptide expressing nucleotide sequence isolated from the Sargasso Sea
ggtgttaaaacattaaaaagtataacttactcaatcatgaatgatagaattgaagcaggcactttttgtgttgctgcatgcttgaatggtggaaaattaacaattaaaaatttcgaacctaaaattattaacacagagataaatttactaaagaaaattggtgcaaagataaagaccacaaaaaatacaattcaaattaagggaccaaaaaaaattagaagtttggattttttaaaaactggagaatatccaaacttccccactgatttgcaagctcaaattatggtattattaactagagcaaatggaaaaagcacaattgaagaaaatatatttgaaaacagatttatgcatgttccagaattaaaaagattaggtgcaaaaataaatatcaaaggcaacaaggcaattattgaaggaactaataatctagagggagctgagctaatgtctagtgatttaagggcatcagtagctttagttttggcagcttttatttcaagaggaacatcaattataaatagagtatatcatttagaccgtggttacgaaaaaattgaaaataaattaaaaaaaattggagttaaaattaaaagaatatcttagt

SEQ ID NO: 244082 - DNA, 755 bp, Unknown
  Bacterial polypeptide expressing nucleotide sequence isolated from the Sargasso Sea
aatggacaaatttattgttaagggtccttgtaaaataaagggtgaaatttcaatttcaggctcaaaaaatgctgccttaccaattttggcatcgacaattttattcgaaaaagaagtcatagtaaaaaatttacctcgtgtgaaagacattgatacaatgataaatcttttaaaatctcttggttcagaaataaaatttaataaaaatagaaaaattgttaaaataacaaagaaaaaaaagcaaaattattttgcatcatattcacttgttagaacaatgagagctggaatattagttttaggagcacttgttgccaaacatcaaaagtctattacttctttacctggtggctgccttataggggcaagacctgtaaattatcatttgaatgcgcttaaaaaacttggaatgaaatatgatattaagaaaggctatattcatgcacatacgaaaaaaaaactcaaaggtgcaaaaatcagattttcaaaagttagtgttggagcaactgaaaatacaattatagctgcatgtttagcaaatggaatttctgttcttagaaactgcgcgattgaaccagaaataattgatttaataaattttttaaaatcaggtggtgctaaaataaaatttataggcaaacgtactttgaagatagtaggcgttaaatctttagaaagcacaagttattctgtgatgtcagatagaatagaaacaggaactttttgtgtagcagcgtgcttaactggaggtaatc

SEQ ID NO: 244083 - DNA, 775 bp, Unknown
  Bacterial polypeptide expressing nucleotide sequence isolated from the Sargasso Sea
tatgaaaacttttgctagttattctttagtcaaaacaatgcgtggttctattttagttttaggtccacttatttcaaaataccataaatctaaaatctctttacctggaggatgtttaattggtgctagaccagttaattatcatctaacagcattaaaaaaacttggtatggaatacgaaataaaggatggatatattttagcaaaatcaaaaggaaaactaagtggaacaactataaattttccaaagataagtgttggggcaactgaaaattctataatagcagcatgtttagcaaaaggaaaaacagttttaaaaaattgtgcaatagaacctgagattaaagatcttacaaattttttaaataaagctggagcgaaaataaaatggacaggaagagtttgtaaaatcataggtgtaaattctttaaatgaaactgaatattctgtaatggctgatagaatagaagcaggtacattttgtgtagctgcaacacttgcaaaaggtaatttacaaataaataatttaaatcctaaaattattggtacagaaataaaattactacaaaaagttggtgctaaaattaaaactagtgaaaataaaatcttaattaaaggacctgaaaaaataaaatcaataaaaagtattaaaaccaaagagtttccaggcattcctacagaccttcaagcacaattgatggttttaatgtgtaaagcagatggcaaaagctcaataaccgaaagtatttttgaaaatagatttatgcatgttgca

SEQ ID NO: 244084 - DNA, 654 bp, Unknown
  Bacterial polypeptide expressing nucleotide sequence isolated from the Sargasso Sea
aagctggagcaaaaattaggtggagcggaagagtttgtaaaattataggtgtaaattctttagatgaaactaaatattctgtaatggctgatagaatagaggcaggcaccttttgtgtagctgcaacactttcaaaaggtaatttacaaataaataacttaaatcctaaaattattgatacggaaataaaattactaaaaaaagttggtgctaaaattaaaactagtgaaaataaaatcttaattaaaggacctgaaaaaataaaatcaataaaaagcatcaaaaccagtgagtttccaggcattcctacagaccttcaagcacaattgatggttttaatgtgcaaagcagttggcaaaagcttaataaccgaaagtatttttgaaaataggtttatgcatgttgcagaattgcaaagactaggagcaaaaataaatattaaaaataatactgctacgatagaaggaaatactaaattcattggtgccgaattaatgtctagtgatttaagagcttctgttgctttggttctcgcagctatagtttctaatggtaaatcatatattaacagaatttatcacttagatagaggttatgaaaaaatagaaaataaattaaaaaaaataggtgttaaaattaaaagattaaaatagt

SEQ ID NO: 244085 - DNA, 364 bp, Unknown
  Bacterial polypeptide expressing nucleotide sequence isolated from the Sargasso Sea
gccttatccaggttttccaacggacctccaggctcaaattatggttttaatgactaaggccaatggcatttcaaaaattaaagaaaatatatttgagaaaagatttatgcatgttccagaattaaataggatgggagcaaaaattgaaatttcaggagatacatcatatatttatggtccccaacaattgaatggtgcagaagttatggccacagatctaagagcatctgtgagtttagttctcgctggcttatccgcggatgataaaacaataataaaccgagtttaccatttagatagaggttatgaaaaattagagacaaaactaagaaagtgcagggcaaatatttatagagtaaattaa

SEQ ID NO: 244086 - DNA, 499 bp, Unknown
  Bacterial polypeptide expressing nucleotide sequence isolated from the Sargasso Sea
gacaggcatagaaacaaaaattttaaaaaaagagatttcaatattaaaaaaaatgggtgttaaacttaaaataaatagtaattatataattgtaaaaaattcaaataaaattaaacctatctcaataagtacagagccttacccaggtttccctacagatttacaagctcaaataatggttttaatgacaaaagctaacggtatatcaaaaattaaagaaaatatttttgaaaaaagattcatgcatgtcccagagttaaataggatgggagcaaaaataaaaatattcgggggtagttcatttatatatggtccacaacagcttaatggtgcagaagtaatggctacggatctaagagcttcagtaagtttagttttagcggcattagctgcaaatgataaaacaattatcaacagagtatatcatttagatagaggttacgaaaaattagaaaagaaactaacaaaatgtaatgctgatatttttagaactcactaa

SEQ ID NO: 244087 - DNA, 686 bp, Unknown
  Bacterial polypeptide expressing nucleotide sequence isolated from the Sargasso Sea
agaaattaaggatctaacacattttttaaataaagctggcgcgaatataaaatggtctggcagaagctgtacaattataggggttaattctctaacacaaacaactcatactgtgatggctgacagaatagaagcaggtactttttgtgtggcggcagcaatttctaagggtaatttagaaattaaaaattttgatccaaatttaattaaaacagaattaaatatattaaaaaaaattggtgcgaaaataaaaacttttagagacaaaatccatatacaaggaccacaaaaaattaaaagtattggcaatataaccactagagagtacaatggtttcccgacagatctccaacctcaatttatggcacttctttgcaaagcaaatggtattagctctatcactgaaaatatttttcaaggaaggtttattcacgtcatggagctccaaagacttggtgccaaaataacgattaaagacagcactgcaataattgaaggaaatacaaatttaagtggttcagaagttatgagctctgatcttcgagcctctgctgcattggtacttgcaggcatagtttctaaaggaaaaacaacaatttcaagaatatatcatttggatagaggttacgaaaaaatagaaaataaactaaaaaaaattggtgttaaaattaagagattgaaataat

SEQ ID NO: 244088 - DNA, 493 bp, Unknown
  Bacterial polypeptide expressing nucleotide sequence isolated from the Sargasso Sea
aattcctgagcacttagaaagtgtaattaattgtttattaaatgccaatattgacataaatgtcagagataattcaatttttataaagtcagatggaaaaaatatttcatcaacaaatattgaaactaatgagtatccgggctttccaacagatttacaagctcaatggatgatgctcatgtgcaaagcggacggtacatctactatcaaagagaatatttattatgatagattcacacatattatggagttaaatagattgggttgtaatattaagcttgaagattctgtcgcaataattgaaggaaataaaaaccttattggagctgatgttatgtcaactgatataagagcatctgcagctttaattattgctgcattatgcgcagaaggaacaacaaaaattagtagaatttatcacattgatagaggttatgataaaattgaagaaaaactgactgatattggtgctaaaattattagaaaaaaataa

SEQ ID NO: 244089 - DNA, 319 bp, Unknown
  Bacterial polypeptide expressing nucleotide sequence isolated from the Sargasso Sea
atggaccgaattttggttaagggaggctctcctttgtctggagaaatatcactttcaggcgcaaaaaatgcatgtttagctctaatgcccgccgctttactcaccagtgaaccgctaacattaactaatactccatttctttctgatattacgacaatgaaagaattacttgcttcgcttggttgtgaggtcgcaggactacaaaataaccgtataattgcaatagctgcaggcagtatttccaatcatatagcacaatatgatattgtgaggaagatgcgagcctcaatcctggttttgggccccattgttggctagg

SEQ ID NO: 244090 - DNA, 496 bp, Unknown
  Bacterial polypeptide expressing nucleotide sequence isolated from the Sargasso Sea
aaaaaagaattattgggtgagttttggaatagtctagaacgttcgggcctagaaatttcagaaacagcgcatggtataagagccaaaagggtaaacgacacaattaaagctgtcgatgtgaagaccgaagtatatcctggttttgcaactgacttacaagctcagtttatggcgttgatgtgcttggatgatggcatcagtcttttggaagagaccttatttgaaaatagatttatgcatgctcaagaattggtgagaatgggagcaaaaatagacgtgcaaggtggcacagcgaaagtgcagggtgtgtcaaaattgaaaggtgcacctgtaatggcgacggatttgcgtgcatctgtttctttgattttagcgggtttggtagatgaaggtgaaacaaaagttgccagagtttaccatctcgatagaggatatgaaaatttggtcagtaaattatctaatgcgggtgcaaaaatagagaggatctcagattaat

SEQ ID NO: 244091 - DNA, 106 bp, Unknown
  Bacterial polypeptide expressing nucleotide sequence isolated from the Sargasso Sea
ggcgatacgctgatcgaccgcatctaccacatcgatcgtgggtacgagtgcatcgaagagaagctgcagctgctcggcgccaagatccgccgcgtgccgggttgat

SEQ ID NO: 244092 - DNA, 527 bp, Unknown
  Bacterial polypeptide expressing nucleotide sequence isolated from the Sargasso Sea
aattacaaagagttcactagaattatgtaattgtgagccaaaacatcttaagagcttatccaaaaaactaattaatgcaggtgtaaattgggaaagtgataaggatataattaaaattacatctgatggtatattaaaacctgtaaatgtccaaacatcagagtatcctaattttcctacagatttacaagcacaatttatgactttaatgaccgtcgctaatggcaattcagaaataattgaaaatatttttgaaaatagatttatgcatgttccagaacttttgagaatgggtgctaatatttcagtcagtggtggtgtcgcaaaagtttctggtgttcaaaacttaaaaggagctcaaataatggcaactgatttaagagcatctatatcattaataatcgcggctttaagagcagaaggtgagagttatatatcaagaatttaccaccttgatagaggctatgagcaaattgaacagaaattcctagattgtggagccaacatagaaagaataacaaattaat

SEQ ID NO: 244093 - DNA, 871 bp, Unknown
  Bacterial polypeptide expressing nucleotide sequence isolated from the Sargasso Sea
tatgaaaacttttgctagttattctttagtcaaaacaatgcgtggttctattttagttttaggtccacttatttcaaaatataataaatctaaaatctctttacctggtggatgtctaattggtgctagaccagttaattatcatctagctgcattaaaaaaacttggtatgaaatatgaattaaaagatggatatattcttgcaaaatcaaaaggaaaacttaatggaataactttaaattttccaaagataagtgttggggcaactgaaaattctataatagcagcatgtttagcaaaaggaaaaacagttttaaaaaattgtgcaatagaacctgagattaaagatcttacaaattttttaaataaagctggagcgaaaataaaatggaaaggaagagtttgtaaaatcataggtgtaaattctttacatgaaaccgaatattctgtaatggctgatagaatagaagcaggtacattttgtgtagctgcaacacttgcaagagggaatttacaaataaataatttaaatcctaaaattattaatacagaaataaaattattaaaaaaagttggtgctaaaattaaaactagtgaaaacaaaatcttaattaaaggacctgaaaaaataaaatcaataaaaagtattaaaactaaagagtttccaggcattcctacagaccttcaagcacaattgatggttttaatgtgcaaagcagttggcagaagttcaataaccgaaagtatttttgaaaatagatttatgcatgttgcagaattgcaaagactaggagcaaaaataaatattaaaaataatactgctacaatagaaggaaatactaaatttcattggtgccgaattaatgtctag

SEQ ID NO: 244094 - DNA, 860 bp, Unknown
  Bacterial polypeptide expressing nucleotide sequence isolated from the Sargasso Sea
catgcaaaagtttttaattaatggtccttgcaaggttaaaggagagatttcaatttcaggaagcaaaaatgcagctttaccaatattggctgcaacacttctttttgacaaatctgttactataaataatttacccaaagtgagagatattgatacaatgttaaatctaataaaatctctcggaagaaaaattaaattcttaaataataaaaaaacagttgtgattaaaaatacaaaaaaaaaaaatttttttgcatcgtattctttggtaaaaactatgagagcaggaatattagttttaggtccaatgatcgcaaaaaactataaatctataacctctttgcctggtggttgtcttattggggcaagaccagttaattatcatttaaatgctctaaaaaaactaggaatgaattataatataaaaaaaggttatatttatgcaaattcaaaaggtaaacttataggaacaaatataaagtttccaaaaattagtgtgggagctactgaaaattctataattgcttcatgtttggctaaaggaaaaacaactttaaaaaactgtgcaattgaaccagaaattaaagatttaactaattttttaaaaatggcaggagcaaatataaagtgggtaggcaaaagaacagttgaaataatcggtgtcaaatcctttaaaagcatcaactactctattatgagtgatagaattgaggcaggtacattttgtgttgcggcatgtatttcacaagggaatttaaaaataaaaaattttaaccccaagataattcaaacagaattgaatttgttaaaaaaaatgggtgcaaaaataagtaaaattaagaatgagatacatataaaag

SEQ ID NO: 244095 - DNA, 131 bp, Unknown
  Bacterial polypeptide expressing nucleotide sequence isolated from the Sargasso Sea
attgaaaaaattagcaattaatggtggatatccccttaatgggtcgataaaaatatcaggcgctaagaatgcagcattaccaatgatgaccgcatctattttatcagatcataatattgtccttgatggca

SEQ ID NO: 244096 - DNA, 688 bp, Unknown
  Bacterial polypeptide expressing nucleotide sequence isolated from the Sargasso Sea
aatgcaaaaacttttagtcaaaggtaaaaaagtcttatctggagttgttcaaatatctggctcaaaaaatgcaactctaccaattttagccgcatcaatattaggagataaaaaaattgagattaaaaatatacctttagtaaaagatgtcatcacaatgacaaaccttttaaaatatatggggtccaacattaatattaactttaaaaaaagaaaaattttaatacataaccaaaaaaaaaaactaaaaactattgcaccatacaatttcgtaaaaactatgagagcaggagtacttgtgcttggttcgttactcgcaagattcggaaaagccaaagtttcattacctggtggttgcgcaattggaacaaggccagtgaatctacatctttttggattaaaaaaacttggtgcaaatataaaaattaaaaatggttatatttcagcagaagctaaaaatggacttgtagggagcaagattaactttccttctatatctgtaggtgctactgagaatgtaattatagccgcaagtttagcaaaaggagtatcactcctaaaaaattgcgcttgtgaaccagaaataaaaaatcttacaaattttttgattaaaatgggggtaaaaattacctgggttggtaaaagagaaattaaaattataggtagtgaaaagttaagaactgtaagt

SEQ ID NO: 244097 - DNA, 691 bp, Unknown
  Bacterial polypeptide expressing nucleotide sequence isolated from the Sargasso Sea
tgaaatccaacaattatgtgaaatgttaaatgaaatgggagctaatatttcaggaattggatctaacacccttaaaattgagggtgtgagtgctctgaattctatttcaaatgtttctgttattccagatagaattgaagcaggaacattcttaattgctgctgcagctgttggtggagaagttgaagtaacaaatatcatacctgggcacttagatagtgtgataaaatgtctccaaaaagctaatattcaattagaagtaaaagataactcaatagttgttaggtcaaatataaatgatatattatccacaaacattgagaccaatgaatatcctggttttccaaccgacttgcaagctcaatggatgatgttaatgtgtttagcaaagggcaattcgacaataaaagaaaatatttattatgatagatttacacatataatggaacttaatcgacttgggtgtaatattaagcttgaagattctgttgctattattgaaggacatagaaagctgattggggcagatgtaatgtcaacagatattagagcatctgctgcattgattattgcagctttatgtgcaaagggtacttctagaataagtagagtttatcatattgatagaggttatgataaaatcgaagaaaaattaaccaatattggtgctgaaatttttagaaaaaaataa

SEQ ID NO: 244098 - DNA, 163 bp, Unknown
  Bacterial polypeptide expressing nucleotide sequence isolated from the Sargasso Sea
atggcaacagatcttcgtgcgtctgctagcctaatactggcaggattatgcgctaatggagaaacaatcgtagatcgcatttatcatatagatagaggatatgaaagaattgaagagaagctttcttatctcggcgctgacataactaggcttccaaactaat

SEQ ID NO: 244099 - DNA, 728 bp, Unknown
  Bacterial polypeptide expressing nucleotide sequence isolated from the Sargasso Sea
aaaatcaaaaatggttatatttttgctgaagtgaaaaaagaattaaaagggaaaaaaataaaattaccttcaatatctgtcggagcaaccgaaaatgccctgatagcagcgagttatgctaaaggaacaacctatctaagtaattgtgcatgcgagccagaaattaaagatttggcaaattttttaaaaaaaatgggagttaagattaaatggattggcaatagaaaaataaaaatttcaggaaatcaaaatttaaaatcaacaaagcataaagtaatgtttgatagaatcgagtctggaactttcattatagccggagctcttgctggaaatagattgaaaatttcaggcattgaaaccaaaattttaaaaaaagaaattactattttaaaaaaaatgggtgttaaaatcaaagttagtaaaaatgatgttattgttctaaattccaaaaacattaaaccagtttcaattaaaactgagccatatccaggtttcccaacagatttacaagctcaaattatggtattaatgaccaaagcaaatggggtttccaagataaaagaaaatatatttgaaaaaagatttatgcatgtcccagaactaaatcgtatgggtgcaaaaattaaaatttttggtgactcatcttttgtctatggtcctcagaaattaaatggtgcagaagttatggctactgatttaagagcatctgtaagtttagttttagccgg

SEQ ID NO: 244100 - DNA, 368 bp, Unknown
  Bacterial polypeptide expressing nucleotide sequence isolated from the Sargasso Sea
tgctccttatcctggatttccaactgatttacaggcacaaataatggtattgttgtgcaaagctaaaaaaagttcagttatacaagaaaatatttttgaaaatagatttcagcatgctgctgaattaaatagaatgggagctaaaattttaattaatggaaataaagctatagttcaaggagacataaattttgcttctgctgaattaatggcaactgatttaagagcatcagtatcattaattttagcagcattaactgccaagggaaaatcaattattaatagaatttatcatttagatagaggctacgaagacatagaaaaaaaattaaaaaaagtaggtgcaaaaataagaagagttaattaat

SEQ ID NO: 244101 - DNA, 691 bp, Unknown
  Bacterial polypeptide expressing nucleotide sequence isolated from the Sargasso Sea
gatgtattactaatacataatgtgcctaagctaacagatacaaaaacgcttacatttatactggaggagcttggcgcaagcataaatcaaattagggtaaaaaatagtgatctcagcggtcctatttccatcaatatggctaacatagccagcacaacagctgggtacgaaaatgtttccaaaatgagggcaagctttttggtaattggccctttacttgcaagagagggttatgctcgtgtttcaatgcctggtggctgtgctattgggacgcgcccggttgatattcatttaaacggtctaaaaacattaggtgcagatatcaaagttgagaagggatttgttatagcggaggccaagaaaggcctgacaggtaaccgtattcaattagaaaaaccatctgtgggcgcgactcaaaatttaattatggcgtcaacacttgcaaagggcgagacgaaaataagcaacgcatcaattgagcctgaagttttagatttgattgattgcttaaaaaaaatgggagcaaatattgagatagacaaaaaaaatatacttattgatgggcaagaaacacttcatggtgcatcgcattcagttatgtttgacaggatagaggctgcaacttttgcaatcgcagcatgtattacaagaggaaatttaatattacagggttgcgacccaagtatctgga

SEQ ID NO: 244102 - DNA, 805 bp, Unknown
  Bacterial polypeptide expressing nucleotide sequence isolated from the Sargasso Sea
cctattaggcaaactaataaaatttccaaaaataagcgttggtgcgactgaaaatttaattattgcagcttgtttagctaaaggaaaaactattttaaaaaattgtgcaattgagcctgaaataaaagatttaacaaattttttgaattcagctggagctaatattcagtggaacggaagaatatgtacaattaaaggtgttaaatctttaaatcaaactaaatactcggttatgtctgatagaatcgaagctggcactttttgtgttgctgctgctctcacaaaaggaaatttagagatcaaaaatttgaatgccagtataataaaatctgagttagatttattaaaaaaagtaggagcaaaaataagtttttataaagatagaatatttgtaaagggacccaaaaaaattaagtcaataaaaataataaatactaaagaatatcctggtataccaacagatctccaagctcagttaatggttttaatgtgtaaagcaaatggaaaaagtttgataacggaaaacatattcgaaaacagattcatgcatgtcgctgaacttcaacgacttggtgcaaaaataaacgtaaaaaataataaagcaattatcgaaggtggcaacaaccttaagggtgctgagttgatgtctagtgatttaagggcttctgttgcccttgtcttagcggctatggtatccgatggaagatctataattaataggatttatcatttagatagaggatatgaaaaaattgaaaataaactaattaaaattggcgtaaaaattaaaagagtaaataagtga

SEQ ID NO: 244103 - DNA, 510 bp, Unknown
  Bacterial polypeptide expressing nucleotide sequence isolated from the Sargasso Sea
tatggataaattattaattaagggaggtagagaattatctggagagatttatgcttcaggtgcaaagaactcagctttaccaattttggctgcgtctttattagctgattcttccatgagaataggtaatttgcctcatttaaaagacgttacaaccatgattgaattatttgggtctatgggagtagatgtagctctaaacgacgacatggaagttttaatcgattcttctcaaataaaaaacctaaatgccaggtacgaattagttaaaacaatgagggcctctattttggtgttaggtcctttgctttcaaaatttaaacaagcagatgtagctttacctggaggctgtgctataggcagtagaccagtaaaccttcatatagatgctatgaaaagaatgggagccaaagtagtcattgaagatggatatattaaagcgagcacaaaagatagtttaaaggcagctgatatttatctagatccagtaagtgtaactgctacagaaaa

SEQ ID NO: 244104 - DNA, 160 bp, Unknown
  Bacterial polypeptide expressing nucleotide sequence isolated from the Sargasso Sea
aatggcaacagatttaagagcttctgcagctttaattcttgccggtcttattgcagaaggagaaaccataattgatcgcatttatcatcttgatcgcggatatgagagtgttgaagaaaaactatcaaatgtcggtgcaaaagttagaagaattgactaa

SEQ ID NO: 244105 - DNA, 331 bp, Unknown
  Bacterial polypeptide expressing nucleotide sequence isolated from the Sargasso Sea
aatgactgcattaaattgtattgcagatggagatagctctgtgaaagaaaatatttttgaaaatagattcatgcatgcacaagagctaataagaatgggagcaaagataagagttcatgacaacattgcagaaatatctggtagaaaagagttactcggtgcacctgtaatggctaccgatctgagggcttctgcgagtttaattttagctggtcttgctgcaagaggaaccaccgagattggtcgggtttatcatatcgatagagggtatgactgtattgaagaaaaacttcagttaattggtgctaggatttcaagaaaacctatgtaa

SEQ ID NO: 244106 - DNA, 720 bp, Unknown
  Bacterial polypeptide expressing nucleotide sequence isolated from the Sargasso Sea
ctcggatgttaaacggctagaagaaaatactatttttcaagatactcctattttcaaagttaatagtagatcaaaaaaaggaattgatgagcttagggaaactattatctcattatctgaatctataaaatttgaaaataaatctgaatttttcaaaatgcatattgatagagtattcagtaaaaaaggttatggcacagtggttacagggactgtaaaaagtggtagactcagtgttggtcaaaatgtggaaatattgcctcagaatttaaaagctaaagttagaggaattcagactcatggtggcgctgtgcaagaggtacataatggttatcgagctgcaataaatttaacgaaagtagctttgagtgtactaaaaagagggtcgacattagcaaatcctggtttgattgtggttactgataagctattagctcgaatcaatatgtttgcaaatacggactggtctttaaaaaataatcaaagagttagaatacacattggcacgaatgagatacttgctagggtaaaaatttaccaaaagaaaattaaaaaagatgaatcatgtaatctgattatatatcttgagaaatcggttggtgctactataaatgatttaattattatgcggtcttattctccattagatacaattgctagtggaattattttagaaactgactttaaatgtgaaaaacaatatgttgaaaattgtccttt

SEQ ID NO: 244107 - DNA, 403 bp, Unknown
  Bacterial polypeptide expressing nucleotide sequence isolated from the Sargasso Sea
aatggataaattgttagtcgagggcggttttcagcttaacggttctattacatcatccggagcaaaaaattctgccttgccaatcctggctgcatcaatactccttgatgatccaataattataagaaatattcctcatcttaatgatgtcactactatgcttgaattacttggttctatgggtgtcgatatgactttatctgaagacatggaagtagaattagatccatccggtttgaatgatgtaggtgcaagatatgaattggtaaaaacaatgagagcttccgttctagttttggggccacttttagcaaaaactggctacgctaaagtagctcttcctggtggatgcgcaatcgggagtcgtccagtcaatcttcatatagatattatgaagaaaatg

SEQ ID NO: 244108 - DNA, 872 bp, Unknown
  Bacterial polypeptide expressing nucleotide sequence isolated from the Sargasso Sea
tcatttaaaatcattaaaaaaactaggaatgaaatattatataaagaaaggatacatatatgcaaatgtaaaaaataatttaattgggactgaaattaaatttccaaaaatatcagtgggtgcaactgaaaatttgataatagcatcttgtttagctgttggtagaactattttaaaaaattgtgcaatagagcctgaaattaaagatcttactaattttttaacaaaagcaggggccaaaattaaatggacaggtaaaagaagagttcaaatagatggagtgaagtcattaaatgaaattagttataatgttatgggtgacagaatagaatgtggtacattttgtgtagccgcaacattaacagcaggtgatttaaatattaaaggctttaatccaaagctaatcagaacggaacttaatatgctcagaaagattggagctagaataattacaaaaaaaaatcaaatatttataaaaggcgcaaaaaatttgaaaaatttaaaaaatgtaataacaaaagaatatcctgcttttccaactgatttacaggcacaatttatggttttattgtgtaaggcaaatggcagatcatctataaaagaaaatatttttgaaaatagatttatgcatgttgcagaacttaggagattaggtgcaaaaataacaataaaaaaaaatatagcaatcatagaaggaaaaactaaatttgaaggagctgaacttatgtcaagtgatttgagagcttcagttgcgctggtgcttgcagctattgtagctaaaggtaaatcaaaaattaatagaatatatcatttagatagaggttatgagcagttagaaaataaaataaaaaaaataggtgttaaaataaaag

SEQ ID NO: 244109 - DNA, 745 bp, Unknown
  Bacterial polypeptide expressing nucleotide sequence isolated from the Sargasso Sea
tataatagcagcatgtttagcaaaaggaaaaacaattttaaaaaattgtgcaatagaacctgagattaaagatcttacaaattttttaaataaagctggagcgaaaataaaatggaaaggaagagtttgtaaaatcataggtgtaaattctttatatgaaactgaatattctgtaatggccgatagaatagaagcaggtacattttgtgtagctgcaacacttgcaaaaggtaatttacaaataaataatttaaatcctaaaattattggtacagaaataaaattactaaaaaaagttggtgctaaaattaaaactagtgaaaataaaatcttaattaaaggacctgaaaaaataaaatcaataaaaagtattaaaactaaagaatttccaggcattcctacagaccttcaagcacaattgatggttttgatgtgcaaagctgttggcaaaagttcaataactgaaagtatttttgaaaatagatttatgcatgttgcagaattgcaaagattaggagcaaaaataaatattaaaaataataccgctacaatagaaggaaatactaaattcattggtgccgaattaatgtctagtgatttaagagcttctgttgctttggttctagcagctgtagtttctactggtaaatcatatattaacagaatttatcacttagatagaggttatgaaaaaatagaaaataaattaaaaaaaataggtgttaaaattaaaagactaaaatag

SEQ ID NO: 244110 - DNA, 847 bp, Unknown
  Bacterial polypeptide expressing nucleotide sequence isolated from the Sargasso Sea
gaaattaaaaaaggttacattcacgcaagttcaaaaggtaagcttaagggcactcaaattaaattttctaagataagtgtaggagctacggaaaatacaattatagcttcctgtcttgctaaaggcaaaaccactctaaaaaattgtgctattgaacctgaaattaaagatttaacaaatttccttaattcaggaggtgcaaaaattaaatggattggaaaaagaacgtgccaaattattggagttgagtctttaaatcaaactagatattcagtaatgggtgacagaattgaaactggaacattttgtgtagcagcaacaatttcaaatggagatttaaagataaaaaatttcaaccctaaaattattcagactgaaattaatattttaaaaaaaactggtgctaaaattaaaacatcaaaaaatgaaattcatattaagggacctaaaaatattaaaaatattaatagtataattactaaggaatatccaaattttcccactgatttacaggcccaattcatggttttattatgcaaagctaaaggacgaagctcaataactgaaagtatttttgaaaatagatttatgcatgtcgctgaattaagaagactaggagctaaaattttaattaaagagaacagagcaatcattgagggaaatacacagtttataggagctgagctaatgtcgagtgatttaagagcttctgtagcattagtgttagctgcaatagtctctaaaggcaaatcaacaattaatagaatttatcatttagatagagggtatgaaaaaattgaaaagaaattgcaaaaagtaggagtaaaaattaaaagattaacttaat

SEQ ID NO: 244111 - DNA, 602 bp, Unknown
  Bacterial polypeptide expressing nucleotide sequence isolated from the Sargasso Sea
aatggattcactaattataaatggcggaaagaaactaataggtaatattcctatttctggctcaaagaatgcatgtttaccgatgatgatagcatcattattgacgaatgaaaaaatgactttgaaaaacatacctatgttatcggatgtaaaaacacttatatcaatccttgaatccttaggtgccaaaatagaatataaaaaaaataattttacccttcatactaaagatataattaatcatagagcatcttatgatttagttaaaaaaatgagagcaagtttttgggttcttgcacctctattagctaaaagtggttatgctgaggtttctttacctggaggttgtgcaattggaacaaggccaatagatctatatttaaaaatcctgaaagaaatgaatatcaattatacaataaataatggttatattgttgcaaaaagagaaggcccgattaaaggattaaattttaaactagaaaaaaaatccgttgggtgtacacatttttttcttatgcttgcatgtttagcaaatgggacatctaaattatcaaatgcatcatgtgagcctgaagtaatccatcttggattgctgttaaata

SEQ ID NO: 244112 - DNA, 796 bp, Unknown
  Bacterial polypeptide expressing nucleotide sequence isolated from the Sargasso Sea
caaaaaatgagagcttcaattattgtattaggacctttgctggctagaaagggagaggcaaagatagcttttcctggcggtgaccaacttggccctagacctgtcaagatgcatttagaagcacttgaaaaaatgggtgctaattttgaattagatcacggtgttctaattggaaaaactgatggcttgaaaggtgtagaaatcaatttaccttatgcctctgtaggagcaacagagaatactttattagctgctgtactagctgatggtacaacaactatagaaaacgctgctcgagaaccagaagttgtagatttagtaaaaatgttaaaaaatatgggtgctcaaattgaaggcgagggtactagcgaacttgtaattcatggagtggatgcactaaaaagtactaatcacgaagtaattggtgacagggttgttgccggtacatatttagcagctttcttagcaacagggggcagtggtgtagtaaaaggtgtagatcataattgtttaccaatggaattaaaaaaattccaagaaatgggtgcaattttaaacatcactgatgactcgatagagatagaaagttcaaaagaaatttcttcaattgaaatatcaacattacctttccctgggatagctactgatttacaaccaatttttggtgcttgcttgttaaaagcaaatggaacctctattatcactgaaaatgtttatgaccaaagatttcagtggattcctgaagttcaaagaatgggtgcagacatacaaacaggctggcaacatgcaatgataa

SEQ ID NO: 244113 - DNA, 356 bp, Unknown
  Bacterial polypeptide expressing nucleotide sequence isolated from the Sargasso Sea
aatggatcagatcgtcattcagggcggcaatcgtcttagcggagagattgcaatcagcggcgcgaaaaatgccgcgctgccgcttatggcagccagtttgctcagctccgaacctctaaaactcgcaaatctgccgcggctggcagatatttcgactatgtctaaattactggcgcagcatggggtcgaggttcagcaatcggacggcgagggtcgaggggtgaccatgaccttcgatgccgccggggtgaataacaccattgcaccgtatgaccttgtccgccgcatgcgagcctccgtacttgtgctcggcccgctggtcgcccggttcggtaaggcaaaggtttccctaccgg

SEQ ID NO: 244114 - DNA, 532 bp, Unknown
  Bacterial polypeptide expressing nucleotide sequence isolated from the Sargasso Sea
gctggtgcaactatggggcgatataactcttaataattgcaatccaaaacatttagaagatattatcaataaattaaaactatcaggagcaaaaatttcttctactgaaaattcattatcaattgagaaaattgattcagtagaagctgttgatatgactacggaggtttatccgggttttcccacggacttgcaagcccaatggatggcatttatgtctattgcaaacggaaaatcaacaattattgatacagtatatcatgatagattcactcatattcctgaattaaatagattaggtgctgatattcgattgacagataataaagctacagtgaatggggtaagaaaattaactggtgcgcaagttatgtctacagatattcgtgcaagtgcggcattaatattgggagcaataatcgcagaaggtaaaacagaaattagtagagtatatcatatagatagaggatatgattcaattgagaaaaaatttcaatctttaggtgctgatattgcacgtattaatgaataa

SEQ ID NO: 244115 - DNA, 445 bp, Unknown
  Bacterial polypeptide expressing nucleotide sequence isolated from the Sargasso Sea
gaggtcacagaacagagggaaggcataagcgtaaaaaggttaagtgaaacaataaaagctgttgacgttaagacggaggtatatcctggttttgcaactgatttacaagcacagtttatggctttgatgtgtttggctgacgggactagtcttttagaagaaactttgtttgaaaacagatttatgcatgctccagaattaatgcgaatgggggcaaaaattgatgttcaaggtggcatagcaaaagttcagggtgttccaaaattgaaaggtgctcctgttatggctacagatttacgtgcttctgtttcgctgattttagctggtttagcagcagaaggcgaaacaagagttgcgcgggtttatcacctcgataggggatatgagaacttagtaagcaagctgtccaatgtgggcgcaaatatacaaaggatctcagattaat

SEQ ID NO: 244116 - DNA, 473 bp, Unknown
  Bacterial polypeptide expressing nucleotide sequence isolated from the Sargasso Sea
aatgcaaaaacttctgattaaaggaaagaaagaattaaaagggaatatatatatttctggatctaaaaacgcaactttacctatattagcatcgacgattttagcatcagaggtgagactattaaatgtaccatttgtaaaagatatttttacaatgcttgaacttctaaaattcataggaataaaagtaaaaatgaaaagaaataagaatattcttgtattgaagaatgaaaaaaaagaaataaataccttagcaccctacaaattagttaaaactatgcgtgctggtgttttagttcttggacctcttctgactaaatttaaaaaagcaaaagtatcactacctggaggttgtgctattggtactagaccagttgacctacacttatttgctttaaagaaacttggtgcaaaaattaagattaaagatggttatataattgctgaagcgaggaaggggttaatgggtgcaa

SEQ ID NO: 244117 - DNA, 848 bp, Unknown
  Bacterial polypeptide expressing nucleotide sequence isolated from the Sargasso Sea
cttgggctcaaaaattaaattttctgataataaaaaaacagtaaaaattacaaaaaataaaaagcaaaaaatatttgcatcttattctttagttaaaactatgagagcaggaattttagttcttggaccaatgattgccaaacatcataaatcaataacttcgttgccaggtggatgtttgataggagctagaccagtaaattaccatctaaatgcattaaaaaaacttggaatgagatataaaataaaaaaaggttacattcatgccatttcgaaaggcaagcttaaaggagcaagttttaaattttcgaatataactgttggtgcaactgaaaattcaattattgcagcttgttttgcaaaaggaaaaactatcttaaaaaattgtgcaatagaacctgagataaaagatttaactaattttcttaattcagcaggtgcaaaaattaaatggataggaaaaagaactgttaaaatagaaggggttaaatcattgaatagcattaaatatacagtaatgggagataggattgaggcagggacattctgtgtagcagcagcacttactgctggtgatttgttgataaaaaactttaattcaaatttaatactgacggaattaaatcttttaaaaaaaattggatcagaaattaaaacttcaaataaagaaatttacattaaaggaccaaataaattaaatagcataagtaatattattactaaagaatatccaaattttcccacagatttacaagcacaatttatggttttgttatgcaaagctaatggaataagcactattacagaaagtatttttgaaaatagatttatgcatgtagcagaactta

SEQ ID NO: 244118 - DNA, 675 bp, Unknown
  Bacterial polypeptide expressing nucleotide sequence isolated from the Sargasso Sea
aatggaaaaactggaaattaaaggtggaaaaaaaatatctggcacaattacaatttctggatcaaaaaattcaaccttacctattttagcatcaactattttaactaataaaaaaattattattaaaaatatacccttagtgaaggatgtaaaaactatggtagagcttttaaatattttaggttctaaggtaaaattagattataaaagaaaaataattaaaattataaataaaaaatcattaaaaacttttgcaccttattatttattaaaaacaatgcgagcaggtgttttagttcttggaccactgcttgcaaaatatggtattgcaaaagtatctcttcccggtggctgcgctattggcgccagacctgtaaatcttcatttagatgctttaaaaaaaatgggagctaatattaaaattaagaatggctatattgttgcttctgcaaaaaatggtttaaagggttgtactattaaatttccaaaaatttctgtaggagcaaccgaaaatgttctcattgcatcttgtttagcaaaaggaattaccaaattaagaaattgtgcactagaaccagaagtaaaagatttggtgaagtttttgataaaaattggatgtaaaataaaatgggtaggatcaagaggtttagatgtggaaggggtaaaaaaaattaa

SEQ ID NO: 244119 - DNA, 835 bp, Unknown
  Bacterial polypeptide expressing nucleotide sequence isolated from the Sargasso Sea
atgggatatattctagcaaaatcaaaaggaaaacttagcggaacaactataaatttttcacagataagtgttggtgcaactgaaaattctataatagcagcctgtttagcaaaaggaaaaacagttttaaaaaattgcgcaatagaacctgagattaaagatcttacaaattttttaaacaaagctggagcgaaaataaaatggacaggaagagtttgtaaaatcataggtgtaaattctttaaatgaaactgaatatgctgtaatggctgatagaatagaagcaggcacattttgtgtagctgcaacacttgcaaaaggtaatttacaaataaataatttaaatcccaaaattatcggtacagaaataaaattactaaaaaaagttggtgctaaaattaaaacaagtgaaaataaaatcttaattaaaggacctgaaaaaataaaatcaattaaaagtattaaaactaaagagtttccaggcattcctacagaccttcaagcacaattgatggttttaatgtgtaaagcagttggcaaaagctcaataaccgaaagtatttttgaaaatagatttatgcatgttgctgaattgcaaagactaggagcaaaaataaatattaaaaataatactgctacgatagaaggaaatactaaattcattagtgccgaattaatgtctagtgatttaagggcttctgttgctttggttctagcagctatagtttctaatggtaaatcatatatcaacagaatttatcacttagatagaggttatgaaaaaatagaaaataaattaaaaaaaataggtgttaaaattaaaagattaaaatagt

SEQ ID NO: 244120 - DNA, 550 bp, Unknown
  Bacterial polypeptide expressing nucleotide sequence isolated from the Sargasso Sea
cggtactttttgtatagctgcctgtcttagtaatggagacttagagattcaaaatgtaaatcctaaaatgattaatgcagagctaaatttattaaaaaaaattggagctaatgtaaaaacaactgataataaaattttcatcaaaggcccaaaacaaataaagaatatacaaaatattaagactaaagaatttccaggaatagcaactgatttacaaagtcaattaatggttctaatgtgtaaggctaaaggaaaaagtactataacagaaaatatatttgaaaatagattcatgcatgtcgctgaactaagaagacttggggcaaaaataactattcaaaataataaagcaataatagagggaaatactttatttaaagcctgtaaacttatgagttctgatcttcgtgcatccatagcccttgtacttgctgccatgacagcagaaggagtaagtcaagtagaccgtatctatcatctcgatcgtggagctgaaaattttgaaaataaattaaaaaaaattggtgtcaaaattaaaagactcaagtaa

SEQ ID NO: 244121 - DNA, 429 bp, Unknown
  Bacterial polypeptide expressing nucleotide sequence isolated from the Sargasso Sea
taaataaaagtgatattactgttttaaattctaaaaaaattaaacctatatcagttaatactgaaccatatccaggatttccaacagatcttcaggcacagataatggttttgatgaccaaagctgacggagtttcaagaataaaagaaaatatttttgagaaaagatttatgcacgtaccagaattaaatcgaatgggggcaaaaattaaaatttttggagacacatctttcgtatatggacctcagcagctaaatggtgcagaagttatggcaaccgacctaagagcttctgtaagtctagttttagctggtttaagtgctgaggataaaacgataatcaatagagtttatcatttagacagaggttatgagaatatagaattaaaattaagaaagtgtagggccaatatctttagaaaaaaataga

SEQ ID NO: 244122 - DNA, 472 bp, Unknown
  Bacterial polypeptide expressing nucleotide sequence isolated from the Sargasso Sea
aatgatttgcgtaagcaaaaagaagtcatatcttaaatctcaaaatttaaagatttttggccaaggtaaattacatggaaaagttcaaataagtggcgccaagaattccgccttagttttattggcctcatcattgctaactgatgaaagggtaattcttgagaatgttcctcgtcttaccgatatagaaaaaatggggaatatcctaaagagtttaggtattaaattaatacaaaaagacaatcgcttagagatagatccaaaaaatatttctattaaagatcttccatatgaatttgttaatggattaagagctagtttcttttgtataggtgcattgttaagtaaatatggagaggctaaagtccccttacctggaggttgcaatattggctccaggcccatagatgagcatataaatggacttcaagccttaggagcggaaattcttattgaagaaggaattgtcaaa

SEQ ID NO: 244123 - DNA, 756 bp, Unknown
  Bacterial polypeptide expressing nucleotide sequence isolated from the Sargasso Sea
gatggagaagtttttgattaaagggccctgtaaaattaagggtcaagtttcaatttcaggaagtaaaaatgcagctctgccaatcttagcttcaacaatactatttgataaaacagtcactataaaaaatcttccaagagttagagatatagatacaatgttaaaattattaaaatctcttggttccaaaatacaattttttaataataaaaagacagttaaaattataaataataaaaaacaaaaaatatttgcaccttattctttggttaaaactatgagggcagggattttagttcttggaccaatgattgcaaaacatcaaaaatcaataacttcactacctggtgggtgcttaataggtgctagaccagtaaattaccatttaagtgccctaaaaaaacttggaatgaaatatgaaattaaaaaaggatacatttatgcaaattcaaaaggtcaactgaagggagcaaattataaattttcaaatataagtgttggagcaacagaaaattctataattgcagcttgttttgcaaaaggaaaaactattttaaaaaattgtgcaatagaacctgagattaaagatttaactaattttcttaaaacagctggtgcaaaaattaaatggattggcaaaagaaccgtccaaatagaaggtgtaaaatcattaaatagcattgaatatacaatcatgggagacagaatagaagcaggaacattttgtatagcagcttctctaacagctggaaattt

SEQ ID NO: 244124 - DNA, 133 bp, Unknown
  Bacterial polypeptide expressing nucleotide sequence isolated from the Sargasso Sea
tttaattcttgcgggtctttgtgcaaaggtgagacaattgttgacagaatttaccatattgatagaggatatgaacgaatagaagaaaaattaaactatcttggggcggatataataagactgcctagttaga

SEQ ID NO: 244125 - DNA, 726 bp, Unknown
  Bacterial polypeptide expressing nucleotide sequence isolated from the Sargasso Sea
tatggataaatttttgattaatggcccttgtaaaatcaagggcagtgtttcaatctcaggctctaagaatgcatctctaccgatattagctgcaacactattatttgataaaccagtagttatcaaaaatttgccaagggttagagacattgatacaatgttaaatttattaaagtctcttggttctaaaattattttatctagaaataaaaaagtagcaaaaatagttaataaaaaaaaaatgaaaacttttgccagttattctttagtcaaaacaatgcgtggttctattttagttttaggtccattaatttcaaaataccacaaatccaaaacttctttacctggaggatgtttaattggtgcaaggccaattaattatcatctaacagcattaaaaaaacttggtatgaaatatgaattaaaagatggatatattcttgcaaaatcaaaaggaaaacttagtggaacaataataaattttccaaagataagtgttggagcaacagaaaattctataatagcagcatgtttagcaaaaggaaaaacagttttaaaaaattgtgcaatagagcctgagattaaagatcttacaaattttttgaataaagctggagcgaaaatcaagtggactggaagagtttgtaaaatttcaggtgtaaattctttgaatgaaatagaatactccgtaatggctgatagaatagaagcaggcaccttttgtgt

SEQ ID NO: 244126 - DNA, 705 bp, Unknown
  Bacterial polypeptide expressing nucleotide sequence isolated from the Sargasso Sea
aatgcaaaaacttattattaagggaaaaaaaagtttaactgggactgttaagatatcgggttcaaaaaatgccaccttaccgatattagcatcaacaattcttagtaataataaaattactataaaaaatgttccgtttgttaaagacgtaataactatgtctgaacttttaaaatacttaggatcagatataaaattaaatttcaaaaaaaaaaaaatttttataaataacaataaaaaatcttttaaaaccttagccccatataattttgtaaaaactatgcgggcaggtattattgttttgggccctttattatcaaaatttggtaaagcccgagtatctctacctgggggctgcgcaattggaacaaggccagtggatattcatctttttgggttaaaaaaattaggcgctaaaattaaaattaaagacggttacatttacgctgaagcaaccaatgggctttttggtaacaagataaaattaccgtcaatatcagttggagctacagaaaatttaattattgctgctacttacgcatatggaacaactttaataaaaaattgtgcttgcgaacctgaaataaaagatttgataaactttttaaaaaagatgggtgctaatattaaatggactggaaaaagagagattgaagttattggaacacggaatttcaatgcagttaattactctgtcatgtttga

SEQ ID NO: 244127 - DNA, 556 bp, Unknown
  Bacterial polypeptide expressing nucleotide sequence isolated from the Sargasso Sea
atggataaatttttgattagaggtccttgtaagattaagggacaagtatttatttcgggcagtaaaaatgctgctcttcctatactggctgcgaccttactttttgataaaccagtaataatagaaaatttacctagagtcagagatattgatacaatgctaaatttgttaaaatcattaggttcaaaaattcaatttagcaaaaacaaaaaaactgttaaaatttcaaaaaataagaagcaaaaaatttacgcatcatattcattggtgaaaacaatgagagcagggattttggttcttggtccattattagcaaaatttaaaaaagctcattgtagcttgcctggaggatgtaatttaggattaagaccaattgatcttcatttaagagcattaacaaagctaggcatgaattataaaataattagaggttatgttcatgctagtgcaaaaaaaggaattattggaaaagaaattaaattctcaaaattaagtgttggagctacagaaaatacaattattgcagcctgtctaggaaaaggaaaaactatactaa

SEQ ID NO: 244128 - DNA, 454 bp, Unknown
  Bacterial polypeptide expressing nucleotide sequence isolated from the Sargasso Sea
attgagaaaaatgggagtaaaaataattattaccaaaaactcaataataatatctaagtcaaaaaaactaaagagaatgaatataaccactgaaccatttccaggttttcctacagacttgcaggctcaattcatggttttaatgactcaagctagaggattgtcaaaaataaaagaaaacattttcgaaaatagattcatgcacgttcctgagctaaggagaatgggagcggatatcgaaataaaaaataaaacagcatatataactggtccatcaaaattaaatggagcagaagtaatggccacagaccttagagcttcagtaagtttagttttagcaggtctgattgcaaataatagaacaatagtaaatagaatttaccatttagacagaggctatgaatttttagaaaaaaaacttaaaatttgcaatgctgaaataagaagaatttaa

SEQ ID NO: 244129 - DNA, 155 bp, Unknown
  Bacterial polypeptide expressing nucleotide sequence isolated from the Sargasso Sea
tatggataaatttattgtaaatggaggtaatcaaatttctggtagcgttgatataagtggagcaaaaaatgctgtcttacctttaatgactgcagcactacttgttgatggtaatactacgataaacagcgttccagatcttcgagatactagaa

SEQ ID NO: 244130 - DNA, 718 bp, Unknown
  Bacterial polypeptide expressing nucleotide sequence isolated from the Sargasso Sea
atgaagaaacttctaatagatgggaaaaatatcttatctgggagtattaatatctcaggctcaaaaaactctaccttacctattcttgcagcgacaatacttaataattacaccacaattaaaaatattccgctagtaaatgatatattgactatgctcaacctacttaaatttataggtcttaaatttaagttatcaaaaaaaaaaaattctgtaagagtaattaatcctaataaaaatattaatacggttgcaccttataaactagtaaaaacaatgagagctggggttttagttttgggacctttacttgctaaatataaaaaggctaaaatctcattaccaggtggttgtgcgataggaacgcgaccagttgatctacatttatttgctcttaaaaaacttggagcaaatattaaaatcaagaatggatatatttttgcctcagcatccaaaggactgaaaggggcaaaatttaaatttccaagcatttcagtcggcgctactgaaaacgcaattttagctgcagttttagcaaaaggtaaaaccataatggaaaattgtgctattgagccagaaataaaggatttaattaattttttaaaaaaacttggggctaaaattaaaattgatgtaagaaaaatttcaatagaaaagtctataatacaaaaaaaaatttctcataaagttatttgtgatagaattgagctaggcacct

SEQ ID NO: 244131 - DNA, 784 bp, Unknown
  Bacterial polypeptide expressing nucleotide sequence isolated from the Sargasso Sea
atggaaagattaataattaaaggaggaaatcagcttcatggagatgtttattgttcaggagctaaaaatgcaggtctgcccataattgccgccacaattctacttgaaaaaacaattgaaattgaaaatctaccacatcttaaagatatctctaccatgctcgaattgctaaactccatgggatctgaaattaattttcttgagagtggaggtatagagattaattcttcaaatattaacttaccggaggctcggtatgagcttgttaaaactatgagagcttcggtgcttgtgatgggacctcttttggcgaagtatggaaaagcgaaaatttctcagccaggaggatgtaacattggaacaaggccaatcgatttccatttaaaagggcttgaaatgatgggggctaaaatcgagtctgataaaaaatttatatatcttaaagctcaaaaacttaatccaattgacttcacatttccaaaagtttctgtaacaggtactgaaaatttaatgatggcagcatcattaacactaggtaaaacagtattgagaaattgtgctaaagagcctgaggttgctgaattagcaaattttttgaattcttgtggagcgagaatctctggtgcaggaggatctataattgaaatagagggaactgaacttcttaatggtcaaaaatggaaaattctttcagatagaatcgaggcaggaacttatttaattgcagccgcgatgactaatggacatgtcaaagttaataatatatctccttctactataaaaa

SEQ ID NO: 244132 - DNA, 340 bp, Unknown
  Bacterial polypeptide expressing nucleotide sequence isolated from the Sargasso Sea
tacaagcacaaatgatggttttattatccttcttggaaaatctaaatcacaaataactgaaaacatttttgaaaacagattcatgcatgttccagaactaaaccgtatgggtgctaatattgaaaccaaagggaaaacagcaattattaatccatgtaaagggtttatttcagctcaagtcatggcaactgatttacgggcctcggtaagtttaattttagctggattggttgctaaaggtgaaacaacattgaaccgaatttatcatcttgatcgaggttatgagaaaatagagaaaaaattgcaagcttgtggtgcagatattcggagaataaattag

SEQ ID NO: 244133 - DNA, 695 bp, Unknown
  Bacterial polypeptide expressing nucleotide sequence isolated from the Sargasso Sea
aatagaacctgagattaaagatctaacaaattttttaaataaagctggagcaaaaataaaatggagtggaagaatctgcaaaattataggggtaaattatttaaacgaaactgaatatactgtaatggctgatagaatagaagcaggcactttttgcgtagccgcaacactagcaaaaggtaatttacaaataaataatttaaatcctaaaattattgatacagaaataaaattattaaaaaaaattggtgctaaaattaaaactagtgaaaataaaatcttaattaaaggacctgaaaaaataaaatcattaaaaagtattaaaactaaagagtttccaggcattcctacagaccttcaagcgcaattgatggttttaatgtgtaaagctgttggcaaaagttcaataactgaaagtatttttgaaaatagatttatgcatgttgcagaattacaaagacttggagctaaaataaatattaaaaataatatagctacgatagaaggaaatactaaattcattggcgccgaattaatgtctagtgatttaagagcttctgttgctttagttttagcagctatagtttccaatggtagatcatatattaacagaatttatcacttagatagaggttatgaaaaaatcgagaataaattaaagaaaattggtgttaaaattaaaagattaaaatagt

SEQ ID NO: 244134 - DNA, 895 bp, Unknown
  Bacterial polypeptide expressing nucleotide sequence isolated from the Sargasso Sea
aacatttgcgtcctataatttggttaaaactatgagggggagcattttagttttaggtccgttgttagcaaaatttaaaaaagctaaagtaagtagccctggcggttgctcgatcggggtaagaccaatcgatattcatcttaaagcattatcaaaactaggtgttaaatataaaattgatcaaggttatgtcattgcaactgcaccaaaaggattaattggcaattcaattcgattttcaaaaatatctgttggggcaacagaaaatttaattattgctgcatgttttgcaaaaggcattacaacactgagtaattgtgcaattgagcccgaaatagaagatttagtaaattttttaattaagatgggatgtaatattaggtggatttcaaaacgatcacttaaaattgttggaattgatgaagttaaagaaacaaattattcagtaatgtttgacagaatcgaagctggcacttatttgattgctgcagctgttaccgaaggaaacttgaccattaaaaaaattattccaaaaattattaaaacagaaatagacatgttaaaaaaagttggtgcaaaaattgttataaaaaaaaatgaaataaatattattggtaagaagaaaattaatagtattaatattaatacagcaccttttcctggtgtagcaacagatattcaggctcaaatgatggtgctattatgtaaggcaaataaaagatcaataataactgaaaatatctttgaaaataggtttatgcacgttgctgaattaaatcgtatgggtgcaaacattataattaatggaaaaaaagcaatagttaatggtaatactattttcgccccagctgaagttatggcaactgatcttagagcctcagtttcattaattctt

SEQ ID NO: 244135 - DNA, 761 bp, Unknown
  Bacterial polypeptide expressing nucleotide sequence isolated from the Sargasso Sea
aaaagtaagtagcccaggtggttgtagtataggggtaagaccaatagatatacatttaaaagctatatcaaagttaggtgttaaaataaaaattgaaaaaggatatgttaatgcaacagctcaagaaggattagttggttcagaaataagattttcaaaaatatcagttggagctaccgaaaattcaattctcgctgcttgtcttgcgaaaggaataacaacaataaaaaattgtgctatagaacctgagatcaaggatttaacaaattttcttaaaacagcaggtgccaagatcaaatggattggtaaaagaactttaaaaatagagggtgttaaaacattaaaaagcataacttactcaatcatgaatgatagaattgaagcaggcactttttgtgttgccgcatgtttggatggcggaaacttaaaaattaaaaacttcgagccaaaaattatcaatacagagataaatttacttaagaaaattggtgcaaagataaaaaccacaaaaaatacaattcaaattatgggaccaaaaaaaattagaagtttagattttttaaaaactggggaatatccaaactttcccactgatttgcaagctcaaattatggtattattaactagagcaaatgggaaaagcacaattgaagaaaatatatttgaaaacagatttatgcatgttccagaattaaaaaggttgggtgcaaaaataaatattaaaaacaacaaggcaattatgaaggaactaataatctaga

SEQ ID NO: 244136 - DNA, 445 bp, Unknown
  Bacterial polypeptide expressing nucleotide sequence isolated from the Sargasso Sea
aatgggtgttaaaatgaaaattaaaaaaaatttcattgaggtatttaaatcgaaaaaattaaaaaaaattgatattaaaacagaaccctttcccggttttccaacagatttgcaagctcaaataatgattttaatgacacaagctaatggattatcaaagatcaaagaaaatatttttgaaaacagattcatgcatgtccctgagctgagaagaatgggggcaaaaatcgaaataaaaaataatacagcctatatttttggaccaaattcattaacaggagcagaggttatggccacggacctaagagcttcggttagtttggttttagcaggtttaatagcagataacagaacaaatataaatcgaatatatcatttagacaggggatatcaggatttagaaaaaaaattaatcaaatgtaaagcgagtataaaaagaatttaa

SEQ ID NO: 244137 - DNA, 703 bp, Unknown
  Bacterial polypeptide expressing nucleotide sequence isolated from the Sargasso Sea
aatgcaaaaattattgattaacggaaaaaaagaactatctggaaagatttcaatttctggatctaaaaatgcgactttaccaattttagcagcatctattttatctgaccaagtaaaactaacaaacatacctttagttagagatatttttacaatggtggagttgttaaaatttataggattaaagattaatattttaaaaaagaaaaatacaattgaaataaaaaatataaataaaaatatcaaaacattagctccttataagttagtaaaaaccatgcgagctggagtattggtactgggaccacttttagccaaatataagaaggctaaaatttcacttcctggaggatgcgcaattggaactagaccagttaatttacatctttttgcactaaaaaaactaggagcaaaaattaaaataaaaaatggatacattgttgccgaagcaaagaatggattaaagggagcaaatatttcttttccaagtgtttctgtaggagccactgaaaatgcagtgctagcagcattcaatgctaacggcaaaacaacacttaacaattgtgcaatagaaccagaggttaaagatcttattaaatttttaaatacactaggcggcagaattaaagttgttggacgaaaaattttaattattggatgcaaacaaattaagaaaaatataatacacgaagttattttttga

SEQ ID NO: 244138 - DNA, 451 bp, Unknown
  Bacterial polypeptide expressing nucleotide sequence isolated from the Sargasso Sea
aatgggagcaaaattaaaagttaagaaaacttctattcaaattatgccaacaacaaatttatttggtattaagattcaaacatctccttatcctggctttccaactgatttacaagcacaaattatggctttaatgagtttggtgaatggaaattcgcaaataaaagagaacatatttgaaaatagattcatgcatgttcctgaacttaatagattgggagcaaagataaaagtgaaaaaagatctagctttaataactggtaatagaaatttaaaaggcgcacaagtaatggctagtgatttaagagctagtgtgagtctggtgcttgctgctttgtgtgcagaaggcgaaagtataattaaccgagtttatcatcttgatagaggatatgaaaaaattgagtatacccttggtagtttaggtccatcaataaaaagagaaaaatattaa

SEQ ID NO: 244139 - DNA, 251 bp, Unknown
  Bacterial polypeptide expressing nucleotide sequence isolated from the Sargasso Sea
gcggcttgccttgcttctggggagacggttatagagaatgcagcacgagagcctgagaatgttgatttggcttcttttttgattaaatcaggggctattattgaaggggctggctcatctacaattcatatacaaggggttcaatcacttaagggggtttctgagtatcatgtaatgcctgatcgaatagaaattggaacgtatttgaaagcagctgggaatacgcaaggggaaattatagtaaccgatgt

SEQ ID NO: 244140 - DNA, 637 bp, Unknown
  Bacterial polypeptide expressing nucleotide sequence isolated from the Sargasso Sea
catgcaaagacttattatcaaaggaaaaaaaagtttaaatgggactataaaaatttcaggttcaaaaaatgcaagtttaccaattttggctgcaactattttttttgatgaagtagaaataaaaaatataccgttggttcgagatatttttactatgatcgatcttcttaattttattggtttaaaagtcaaatttttgaaaaatagaggatctttgaaagttaaaaataacaaactcaaattaaatactgttgcgccttacaatttagttaagactatgagagctggcatcctcgttcttggacctctaattgcaaaatataaaaaagccaaaatctctttacccggtggctgcgctattgggacaagacctgtagacttacatttactcgttttaaaaaaacttggagcaaaaataagaataaaaaacggctatatacacgcaacagcaaaagagggacttagaggatgtaattttaaatttccaaaaatttctgtaggtgcgactgaaaatggaattttagccgcatgttttgctaaaggtaaaacagtattatctaattgtgcaattgaacctgaaattatcgatttgataagttttttaagaaaggcaggtaataagataattgttcaaaaa

SEQ ID NO: 244141 - DNA, 568 bp, Unknown
  Bacterial polypeptide expressing nucleotide sequence isolated from the Sargasso Sea
aatgcaaaaacttattattaagggtaataaaaatttatctggaactgttaagatatcaggttctaaaaatgcaaccctaccaatattagcatcaacaattcttagcaataacaaaattactattaacaatgttccatttgtgaaagatgtaattaccatgtctgaacttttaaaacatttaggatcaaatataaaaactaattctaaaaaaaaaaaaatttttataaataattctaaaaaatctttaaaaactttagcaccatataattttgtaaaaactatgcgggctggtataattgttttgggccctttgttatcaaaatttggtaaagctcgagtatctttacctggaggctgtgcaatcggaacaaggccagtagatatccacctttttggtttaaaaaaattaggtgctaaaattaaaattaaaaatggttatattcacgctgaggcaaccaacggcctttttggttgcaagataaaactaccatcaatatcagtaggagcaactgaaaatttaattattgctgctacttacgcgcacggaacaactttaattaaaaattgt

SEQ ID NO: 244142 - DNA, 496 bp, Unknown
  Bacterial polypeptide expressing nucleotide sequence isolated from the Sargasso Sea
atggataaattaataataaagggaaatgctaaactttcaggatcagttaatgttcatgggtcaaaaaattctgcacttcctataatagtatcctcaattttatctgaaaatactatcaaactttcaaatgtacctaatgttgttgatgttttaaatttaataaaattactaaaaaattatggcgttaaaattgaatataaaaaagataaattaaaaataaacccaaaaaaaattaaaaatttatcagcagattatgatgttgtaagaaaaatgagagcttctattttaatactaggacctttactttctcgatttggtgacgccagaatatctctgccaggagggtgtgcaattggaactagaccaatagatatacatctccaaggtttatcaaagctaggagctaattttgaaattcaaaatggttttgttgttggtagtgtgaaatcacaattagttggaaataaaattaaattaccctttccaagtgttggcg

SEQ ID NO: 244143 - DNA, 376 bp, Unknown
  Bacterial polypeptide expressing nucleotide sequence isolated from the Sargasso Sea
aatggactcactaattataaatggcggaaaaaaactaataggtaatattcctatttctggatctaaaaatgcctgcctgccaatgatgatagcatcactaatgacagacgaaaaaatgactttaaataacatacctatgttgtcagatgtgaagacactaatatctattctaaaatctttaggtactaatattgagtataaaaaagataaccttcatcttcacacaaaagaaataattaatcataaggcatcatatgatttagtaaaaaaaatgagggctagtttttgggttcttgctcctcttttagcaaagaaaggatatgcagaagtttctttgcctggaggttgcgcaattggaacaaggccaatagatatt

SEQ ID NO: 244144 - DNA, 778 bp, Unknown
  Bacterial polypeptide expressing nucleotide sequence isolated from the Sargasso Sea
tctttttgtgattaatggcccttgtaaaatcaagggtaatgtttcaatttcaggttcgaaaaatgcatccctacctatactagcagcgacactattatttgataaagctgtagttatcaaaaatttaccaagagttagagacattaatacaatgttaaatttattaaagtcccttggttctaaaataattttatcaagagataaaaaaacagcaaaaattataaataaaaaaaaaatgaaaacatttgctagttattctttagtcaaaacaatgcgtggttctattttagttttaggtccacttatttcaaaataccataaatctaaaatttctttacctggagggtgtttaattggtgctagaccaattaattatcatctaacagcattaaaaaaacttggtatgaaatatgagctaaaagatggatatattctagcaaaatcaaaaggaaaacttagcggaacaactataaattttccacagataagtgttggagcaactgaaaattctataattgcagcctgtttagcaaaaggaaaaacagttttaaaaaattgtgcaatagaacctgagattaaagatcttacaaattttttaaataaagctggagcacaaataaaatggacaggaagagtttgtaaaatcataggtgtaaattctttaaaagaaaccgaatattctgtaatggctgatagaattgaagcaggtacattttgtgtagctgcaacacttgcaaaaggtaatttacaaataaataatttgaatcctaaaattatt

SEQ ID NO: 244145 - DNA, 571 bp, Unknown
  Bacterial polypeptide expressing nucleotide sequence isolated from the Sargasso Sea
aatggctgatagaatagaagcaggcacattttgtgtagctgcgacacttgcaaaaggtaatttacaaataaataatttaaatcctaaaattattggtacagaaataaaattactaaaaaaagttggtgctaaaattaaaacaagtgaaaataaaattttaattaaaggacctgaaaaaataaaatcaataaaaagcatcaaaactagagagtttccaggcattcctacagaccttcaagcacaattgatggttttaatgtgcaaagcagttggcaaaagttcaataacagaaagtatttttgaaaatagatttatgcatgtcgcagaattgcaaagactaggagcaaaaataaatattaaaaataatactgctacgatagagggaaatactaaattcattggcgccgaattaatgtctagcgatttaagagcttctgttgctttggttctagcagctgtagtttctactggtaaatcatatattaacagaatttatcacttagatagaggttatgaaaaaatagaaaataaattaaaaaaaataggtgttaaaattaaaagattaaaatag

SEQ ID NO: 244146 - DNA, 403 bp, Unknown
  Bacterial polypeptide expressing nucleotide sequence isolated from the Sargasso Sea
gaacttatttcaaaagatatatcaactaaaccatttcctggctttcctactgacatgcaagcccaatttatggcattaaattcaatatcaaatggatcttcaattattgaagaaactgtttttgaaaatcgctttcaacatgtaggcgaattaaaaaaaatgggcgcagatatatctctagacaagaacaaagcatcagttaagggagtttcaaatcttgttggtgctattgtttcagcatctgatctaagagcttcagcaagcttagttctggcaggtcttgtgggaaaaaatagaactcagatcgaagatatatatcatattgatagaggttatgagtgcatcgaagagaagctaactaaattaggagctgaaatatttagagaacctgcggaatattagg

SEQ ID NO: 244147 - DNA, 747 bp, Unknown
  Bacterial polypeptide expressing nucleotide sequence isolated from the Sargasso Sea
ccgccaccttagctgagggcaatacaacgatttataatgctgcgcgtgagcctgagattatagacttgtgccgatgtctccaaaaaatgggagccaatattgaaggagctggcactgaaataataacgattataggcgtttctaaattacatggcgcctgtcattctgtaatggctgatagaattgaattaggtaccttcatgttggtacctgctctaactggcggtgaaatttttctagagggggcaagtcttaaagatatcagctgttttcaaaaaaaaataatagagatggggctaaatgtttccgaacgtaaagaaggaattagagttaaaaaaggggataaaaatttaaaaggcattgatatttctactgatcctttccctggatttccgacggacttacagccccttatcatggctgccttgggtttggcagatggaaaatctattatcaatgaaggtatttttgagaaccgtttcatgcatgctccagaactaattagaatgggtgcgaacattgaaattcgaggaaaaaaagcaataattttgggtgtttcagaatatagaggggtgcctgtagtggccagtgacttaagggctgctgcaagcttggttttggctggtttggctgcaaaaggtaaaactataatagagggagtacatcatttggatcgtgggtatgagcagatggaagagaaattggctctctgtggcgcagatatatatagaagtggcgataactaat

SEQ ID NO: 244148 - DNA, 213 bp, Unknown
  Bacterial polypeptide expressing nucleotide sequence isolated from the Sargasso Sea
actcttttggcaagatatggaaaagctaaagttgcacttcctggaggatgctctattggtgcgagaccggtagacctccacataatggcgcttaaggagttaggtgccaatttctctatggaaaatggatacgtaaatgccagcgtttcaggttctttggtgggtgcaaagatcaatttccctataaaatccgtaggtgccacagctaatact

SEQ ID NO: 244149 - DNA, 603 bp, Unknown
  Bacterial polypeptide expressing nucleotide sequence isolated from the Sargasso Sea
taaattttttgaactctactagttattctgtaatgggagacaggatagaaacaggaactttttgtgttgcagcaactttagcaaaaggtgacctgacaattaaaaactttaatccaaaattgatccagacagaattaaatctattaaaaagatctggtgcaataataaagactaataaaaatgaaataaagattaaagggccacaaaaaattaaaagtattaatagtattgttacaaaagaatatccaaattttccaactgatttacaagcacagtttatggttttgatgtgtaaagcaaatggaaggagtacgatcacggaaagtattttcgaaaatagatttatgcatgtcgctgagttaagaagattaggcgcaaaaatagttataaaagataacaaagctactattgagggtaatacagattttataggggcagaattaatgtcaagcgacttaagagcttcggttgctttagttttagctgcaattatttcaaagggacggtcagtaattaatagaatatatcatttagatagaggatatgaaaagattgaaaataaactgaaaaaaattggagttagaataaaaagattatcttaat

SEQ ID NO: 244150 - DNA, 124 bp, Unknown
  Bacterial polypeptide expressing nucleotide sequence isolated from the Sargasso Sea
agccggattagtcgcaaaaggacagacagttgtcgatcgtatttatcatattgatcgcggttatgaaaccattgaagaaaagctttcacagttaggagctaatatcaaacgcattccagattaa

SEQ ID NO: 244151 - DNA, 893 bp, Unknown
  Bacterial polypeptide expressing nucleotide sequence isolated from the Sargasso Sea
agttaattatcatctagcagcattaaagaaacttggtatgaaatatgaactaaaagatggatatattttagcaaaatcaaaaggaaaacttagcggaacaactataaattttccaaagataagtgttggggcaactgaaaattctataatagcagcatgtttagctaaaggaaaaacagttataaaaaattgtgcaatagaacctgagattaaagatcttacaaattttttaaacaaagctggagcgaaaataaaatggacaggaagagtttgtaaaatcataggtgtaaattctttaaatgaaactgaatattctataatggctgatagaatagaagcaggtacattttgtgtagctgcaacacttgcaaaaggtaatttacaaataaataatttaaatcctaaaattattagcacagaaataaatttattaaaaaaagttggtgccaaaattaaaattagtgaaaataaaatcttaattgaaggacctgaaaaaataaaatcaataaaaagtattaaaactagagaatttccaggcattcctacagaccttcaagcacaattgatggttttaatgtgtaaagcggatggcaaaagctcagtaactgaaagtatttttgaaaatagatttatgcatgttgcagaattgcaaagactaggagcaaaaataaatattaaaaataatactgctatgatagacggaaatactaaattcattggtgccgaattaatgtctagtgatttaagagcttctgttgctttggttctagcagctatagtttcaactggtaaatcatatattaacagaatttatcacttagatagaggttatgaaaaaatagaaaataaactaaaaaaaataggcgttaaaattaaaagattaaaaaagtgaa

SEQ ID NO: 244152 - DNA, 747 bp, Unknown
  Bacterial polypeptide expressing nucleotide sequence isolated from the Sargasso Sea
acctagagtaagagatatagatacaatgttaaatttattaaggtctctcggttctaaaataattttatcgaaagataagaaaattgtaaaaattcaaaataaaaaaaagatgaaaaaattggccaagtattcacttgtcaaaacaatgagagcatccatacttgttttaggaccattaatatcaaaatttcataaatcaattacatcatatcctggtggctgcaatattggatcccgtccagtaaattttcatctgtcagctttaaaaaaacttggaatgaaatatgaaattaaacagggttatattcatgcaaaatctaatggaagattaaatggtgcaaaaataaattttccaagaataagtgtaggcactacagaaaatacaattcttgcagcttctttagctagtggaaaaacaatcttaaaaaattgtgcaattgaacctgagataaaagatcttacaaattttttaaatgctgcaggagctaagattaaatggagtggaagaacttgttcaattattggggttaagtcactaaaagaaatcaattattctgttatgggagacagaatagaggctggcacattttgtatagcagctactttagctgaaggtgatttacagataaaaaacttcaatccaaaaaatatagcaacagagttaaaactattaaaaaaagcaggtgcaaaatttaaaacttatgaaaataaaattttcattcaaggaccaaaaaaaattaagtcaat

SEQ ID NO: 244153 - DNA, 218 bp, Unknown
  Bacterial polypeptide expressing nucleotide sequence isolated from the Sargasso Sea
attgaaaaagttagcaattaatggcggattccccctcaacgggagtgtaaaaatatctggcgctaagaatgcagcattgccaatgatgaccgcatctattctatcagatcatgatattgtccttaatggtgttcctaatttggctgatgttagaacaatgattaccttattagaatctatggggattgagacaagtaaaagccataaagattctctta

SEQ ID NO: 244154 - DNA, 730 bp, Unknown
  Bacterial polypeptide expressing nucleotide sequence isolated from the Sargasso Sea
caaaggttcttcctctaaaggagttaaaggcctcattaactgcagtggagcaaaaaatgctgtactacctttaatggcttcttctatcttgtttgacgatacggttacattaacaaatgttcctttaggagcaaatgatattcagactatgattattttattaaaatctttaggatcaaaaatacagataataaaaaaaaaaaaaatactaaaaataacaaataaaaaaaaacataaactattagtaaagtacaagtatatttccactatgagagctggtgttcttgccatgggagctttgcttggcaaatataataaatgttcgacagctttatcaggtggttgtagtttaggtccaagaccaatcggatatcatttggagggatttaaaaaactaaactgcaagtataacttaaataaaggttatataaatattatctcaccaagcgggataaaaggcggtcattttcgttttcctaaagttagtgtaacaggaacatcaaatttaattttagcatctgttttagctaatggacaagtgattaccttaaaaaatatttcgatagagccagaggtactagatttaataaaatttttaagaaatggaggggcaagaatttataatacaggcaaaaggacaatcaaaatatatggagtaaaaaaattaaatggacatcaacatgaagttattggagatagaattgaagcattttcatatttatgtgctgca

SEQ ID NO: 244155 - DNA, 460 bp, Unknown
  Bacterial polypeptide expressing nucleotide sequence isolated from the Sargasso Sea
atggataaattacttataagaggaggttcgcctttgaatggagagatttatgcttcaggtgcaaaaaattctgcattaccaatcctggctgcatctttgttggcagattctcctcttaaggtaggaaaccttccacatttaaatgatgtaactacaatgcttgaattgttgggttctatgggtgttgatgtcatgttaagtgacgaaatggaagtacaagttgatacttctaatatccaaaatctcaatgcacgttacgaactagtcaaaaccatgagagcatcaattcttgttctgggacctctattggctaagtttcagcaagcttcagttgctcttcctggtggatgcgctattggaagtcgtcctgtaaatcttcatatagaggccatgcaggcaatgggtgcagaagtaagtattgtggatggaaatatcaaagcaaaagttgatgggcgttgaa

SEQ ID NO: 244156 - DNA, 442 bp, Unknown
  Bacterial polypeptide expressing nucleotide sequence isolated from the Sargasso Sea
aatgaaaaaattggaagtctttggagcaaatatgctcaaggggcaagttagaatctcaggttcaaaaaatgcttcattaccaatactagcagcaactttgctttcagataaaaaaatacacttaagcaatcttccaaaagtaaaagatattgaaactatgttgctacttttaaaatctctagatacaaaaataaaatatattaaagacaagaaatcagttttaattaaaaataataaaaaaaataaaacgtttgtttcttatagcttagttaaaacaatgagagctggaattttagttcttggtcctttgcttgcaaaatattcaaaggctaaagtctcattgccaggtggttgtgcaataggaactagacctatagatattcatttaaaagccttatcaaaacttggtgtaaattataaaatttttcaaggatatgttcat

SEQ ID NO: 244157 - DNA, 898 bp, Unknown
  Bacterial polypeptide expressing nucleotide sequence isolated from the Sargasso Sea
attttagcatcgaccatccttttcgaaaaaccggtaataattaaaaatcttccaagagtcaaagatatagatactatgctaaatttattaaaatctcttggctcaaagatccaatttcttaataataaaagtactgtaaaaattacaaaaaacaaaaaaaagaaaatatttgcatcatactctctagttaaaactatgagggcagggatattagttcttggaccgatgattgctaaacatcacaaatcgataacttcattacctggtggctgtttaattggagcaaggccagtcaactatcatttaaatgcactaaaaaaacttggaatgagatatgagataaagaaaggatatatacatgcaatttccaagggaaaactcaaaggggcaattattaagttttcaaatataagtgttggagcaactgaaaattccattattgctgcttgccttgcaaagggcaaaactattttaaagaattgcgcaatagaacccgagataaaagatcttacagattttcttagatctgcaggtgcaaaaattaaatggatagggaaaagaactgtacaaatagatggggtacaatcattaaatagtattaagtattcagttatgggagataggatagaggcaggaacattttgtgtaatagcatcaatttctaacggaaatttattgattaaaaattttgatccaaatttaattaagactgaattaaatcttttaaaaaaaattggttcaaaaataaaaatatttaaaaaagaaatttatattcaaggaacaaataaaataaaaaatataaacagtattattaccaaagaatatcctaactttcctactgatttgcaagcgcagtttatggttttattatgtaaagctaatggacgaaaagtataat

SEQ ID NO: 244158 - DNA, 462 bp, Unknown
  Bacterial polypeptide expressing nucleotide sequence isolated from the Sargasso Sea
tttgcttcctatagcttggtcaaaacaatgagagcaggaatattagttttgggtcctttacttgcaaagtttggtgatgcaaaagtttcactaccaggaggatgcgcaattggtactagaccagtggatattcatttaaaagctttgtcgaaacttggtgttaaatataaaattatccaaggctatgttcatgcaacagcacctaaaggtttaatgggttctaaaattcgtttttcaaaaatttcagtaggagctacagaaaatttagttattgctgcaagttttgcaaaaggaacttctattttaagcaactgtgctatcgaacctgagattaaagatttagttaaatttttaaataaagctggatgtaatttaaaatggacttcaaaacgaactcttaaaattgttggagttaaaaaaataaatgaaataaattattcaatcatgtttgatagaattgaa

SEQ ID NO: 244159 - DNA, 463 bp, Unknown
  Bacterial polypeptide expressing nucleotide sequence isolated from the Sargasso Sea
tatctgactttggttggaggcgaaatttcttctggtagtgattggattcagattaatagtaaagatgtgttgacttcgttagatgttgtgacaagtccttttcctggctttcctacagacttgcaggctcagtttatgtctttgatgtgtgttgcaaacggagaatcaaaaattactgaaacaatatttgaaaatagatttatgcatgttgcagaattgaatcgaatgggagggaagattgttctttctggtaggaatgctaaaatatctggtgtgagtaatttgaatggtgctcctgtaaatgctaccgatctaagggctagtgcatcactagtattggctggtttagctgctaaaggagaaacagttataaattctgtttttcacttagatagaggatatgaatcattggaagtaggactgagaaatttaggtgcaaaaattgaaaggattgattcatgaa

SEQ ID NO: 244160 - DNA, 863 bp, Unknown
  Bacterial polypeptide expressing nucleotide sequence isolated from the Sargasso Sea
tatggaagcattaggcgctaatataaaatttgactcaggttttatagttggttctgtgccttcagaaggtttaagaggcgctaaaataaattttccaaaaatttcagtgggagcaacagaaagtgccattatgactgcagtcctagcaaaaggacaaacaataatttctaatgcagctcaagaacctgaaattgtagatattgtaacttgccttaataaagcaggcgcaaatattgtgggtgagggaagtaatacaatcattataaatggagtagaggagttaaaaaagctccaacatgaggtggttgcagataggatagaagcgggatcttttgcaatagctgctagtataacaatgggtgatattgaaataaaaaatataataccaaaatatttagaaaggtttttaaaagctttagaaaatactggtagtaaagttgaaatttataaaaattcaataaatatttgtgcttctaaaagaccattaccctataatatatttacagaagaacacccgggttttcctactgatcttcaagcacaatacatgacacttatgtcaatagcagacggcgagtgtgaaataagggaaaacatatttgagaatagatttatgcatgtacctgaactaattagaatgggagcgagaatatccgttaaaaatcaaacagcaactgttacaggtgttaattacttaaaagcatccaaggtaatggcctcagatttaagggcttctatgtgtttgattttaggtggtttatcagcgttgggcacaagtgaagtagatggtatatatcatttagacagagggtacgaaaatttagaaggcaaattatctgatcttggcgcaaatattcgaagat

SEQ ID NO: 244161 - DNA, 397 bp, Unknown
  Bacterial polypeptide expressing nucleotide sequence isolated from the Sargasso Sea
agaccaaaagcggtggatattgtgaccgagccgtttccggggttcccgaccgatatgcaggcccagttcaccgcattgaatacggtggcgcagggaacatcctgtgttaccgaggccgtctttgaaaaccgcttgatgcaagcccatgaaatgaagcgtatgggtgctgatatcgtcattgagggggacagcgcccgtattaccgggcggcccagcttgcagggggcacccgtaatggcgtcggatttgcgcgcttcagccagtctggtgattgcaggcttggtggcatcgggtgagacccgaatcgatcgcatctatcatatcgaccgcggttacgaaaatatcgagggtagattgcaatgtctgggcgccgatatccgtcgtatatcgacttgag

SEQ ID NO: 244162 - DNA, 340 bp, Unknown
  Bacterial polypeptide expressing nucleotide sequence isolated from the Sargasso Sea
catggaaaaacttaaaattattggaggaaataaactatctggatccatttcttgttctggagcaaaaaatgcagctttgcctatgttggcggcaacaatattaactgatcagcagattacttttaaaaatttaccttaccttcaagatattacaaccatgtttgaaatcttgggttcaatgggagctgaaattacattaaatgagggcatggacttcataatttcaacatctaaactccatgactttgaagctaggtatgagttagttaagacaatgcgtgcttcaattttagtattgggttctcttgtcgctcgtcatggttttgcaagaattgctctt

SEQ ID NO: 244163 - DNA, 410 bp, Unknown
  Bacterial polypeptide expressing nucleotide sequence isolated from the Sargasso Sea
aatgcaaaaattattaattaaaggtaagagagagttgaacggttcaatttcaatttctggatctaaaaatgcaacattacctattttagccgcttctattttagctaatgaaatcaaacttacgaatgttccacttgtaaaagatatttttacaatgcttgagcttttagaatttataggaattaaagctaaagttaagaaaaaagagaaaactatagaacttaaaaataaaaaaaaaaacataaatactcttgctccttataaattagtaaaaactatgagagctggtgttttggttctaggtccactcctaaccaaatacaaaaaagcaaaggtgtcactcccaggaggttgtgctatcggtacaagacctgtagatcttcatttactcgcacttaaaaaacttggtg

SEQ ID NO: 244164 - DNA, 199 bp, Unknown
  Bacterial polypeptide expressing nucleotide sequence isolated from the Sargasso Sea
atggataaacttatcatacatgggcagaaaccattatctggatcggtaaagataagtggtgccaaaaatgctgtactacccataatgacagcagctattatggcagagggtaaaagtagaattgaacgtgttccagaccttagaaatacacgaacaatgataaagttgttggaaatagtaggcgcaaaatgcaattttt

SEQ ID NO: 244165 - DNA, 484 bp, Unknown
  Bacterial polypeptide expressing nucleotide sequence isolated from the Sargasso Sea
ttaattcaaaatgaattaaaccttttaaaaaaaattggatctaaagtaaaatgctttaaccaagaaatttatattaaaggacctagtaaaattaaaaatataaataatattacaactaaagaatatccaaattttcccacagacttgcaagcacaatttatggttttgttatgcaaagcaaatggaagaagtagtattactgaaagtatttttgagaatagatttatgcatgttgcggaactaagaaggttaggtgcaaaaatcaccattaaagataataaggccataatagaaggtaatactgaatttttaggagcagaattaatgtcaagtgatctaagggcatctgttgccttagttcttgcggcactagttgcgaaaggtcattctgttataaatagaatttaccatttagatagaggatatgaaaaaattgaaaataaacttaaaaaaattggagtaaatattaaaagattttcttaat

SEQ ID NO: 244166 - DNA, 643 bp, Unknown
  Bacterial polypeptide expressing nucleotide sequence isolated from the Sargasso Sea
caggagagggttcaagcactggttgagatccaaggtgtagatactttaggcggaactactcatcctgtggttgttgatcgaattgaacttggcacctacatgatcgctccagcaatggccggcggccaggttgatttgattggtgggaaaaagaatttgttaggcgagttttggaatagtctagaacgctctggtttagagatttcagaaacagcggatggtataagagccaaaagggtaaatgagataattaaagctgttgatgtaaagactgaagtatatcctggttttgcaactgacttacaagctcagtttatggcgttgatgtgtttggctgatggaactagtcttttggaagaaaccttatttgaaaatagatttatgcatgctccagaattaataagaatgggagcaaaaattgacgtgcaaggtggcatagcgaaagtgcaaggtgtgtcaaaactaaaaggtgctcctgtaatggcaactgatttacgtgcatctgtgtctttgattttagcgggcttggcggcagagggtgaaacaaaagttgccagggtttaccatctcgatagaggatatgaaaatttggttagtaaattatctaatgtgggtgcaaaaatagagaggatctcagattaat

SEQ ID NO: 244167 - DNA, 870 bp, Unknown
  Bacterial polypeptide expressing nucleotide sequence isolated from the Sargasso Sea
ttaaaaaacttggaatgaaatatgatattaagaaagggtatatccacgcacatacaaaagaaaaactcaaaggtacaaaaatcagattttcaaaaattagtgttggagcaactgagaatacaattatagccgcatgtttagcaaatggaattaccattcttagaaactgtgcaatcgaaccagaaataattgatttaataaattttttaaaatcaggtggtgcgaaaataaaatttataggaaaacgtactttgaagattgaaggcatcaaatctttagaaagtacgagttattccgtgatgtcagatagaatagaaacaggaactttttgtgtagcagcatgtttaactggaggtaatttaaaaataaataattttaacccaaaaattataaaaacagaattatcattactaaaaaaagttggagcaaaaatcaaagtagctaaaaaacaaattcatatatctggtccaaaaaaaatcaaaaatttaaccaatttaattactaaagaatatccaaactttccaacagatttgcaagcacagtttatggttcttctttgtaaggctaaaggaaaaagttcaataactgaaagtattttcgaaaatagatttatgcatgtagctgaattaagaagattgggtgctgagattttaattaaaaaaaataaggcatttatttcaggtgatactaactttcaagctgcagaattaatgtctagtgacttaagagcttcggttgcattagttttagctgcaatagttgccaaaggatcttccacaattaatagaatttatcaccttgatagaggatatgaaaatatagagaataaactaagaaaagttggggtaaacattcgacgtgttaattgat

SEQ ID NO: 244168 - DNA, 238 bp, Unknown
  Bacterial polypeptide expressing nucleotide sequence isolated from the Sargasso Sea
atggataagtttttgataaatggcggaagacctttaaacggtactgtgaaaataagtggagccaagaatgcagttttaccattaatggctgcgacgataatcgtccccggggtgtatagaataaatagagttccgaacctaaaggacacccgaactatgatcaaattacttgagataatagggtgcgatattgaatataagggaacaaatttaattattgactcaacagcaatgtaat

SEQ ID NO: 244169 - DNA, 553 bp, Unknown
  Bacterial polypeptide expressing nucleotide sequence isolated from the Sargasso Sea
gcaggaacattcttaattgctgctgcagctgttggtggcgaagtagaagttgcaaatattatacctgagcacttagatagtgtgataaaatgtctagaaaaagccaatatacaattagaagtaaaagatagctcaatagtcgttaggtccaatgcaaataatatattgtccacaaatattgaaaccaatgaatatccaggttttccaaccgacttacaagctcaatggatgatgttaatgtgcttagcaaaaggaaattcgacaattaaagaaaatatttattacgatagatttacgcatataatggagttaaaccgtctagggtgtaatattaagcttgaagattcggttgcaataattgaaggagatagaaagttgattggagcagatgtaatgtcaacagatattcgagcatctgcagcattaattatcgctgctctatgtgcaaaaggtactaccaaaataagtagagtatatcatattgatagaggctatgataaaatcgaaaaaaaattaaccaatattggtgctgtaatttttagaaaaaaataac

SEQ ID NO: 244170 - DNA, 292 bp, Unknown
  Bacterial polypeptide expressing nucleotide sequence isolated from the Sargasso Sea
aaataacctgaaaaccatttttgaaaacagattcatgcatgttccagaactaaaccgtatgggcgctaatattgaaaccaaagggaaaacagcagttattaatccatgcaaagggtttatttcagctcaagtcatggcaactgatttacgggcctcggtaagtttaattttagctggattggttgctaaaggtgaaacaacattgaaccgaatttatcatcttgatcgaggttatgagaaaatagagaaaaaattgcaagcttgtggtgcagatattcggagaataaattag

SEQ ID NO: 244171 - DNA, 344 bp, Unknown
  Bacterial polypeptide expressing nucleotide sequence isolated from the Sargasso Sea
acacttgatgctgtgctatccaaactgcaacaggccggggcagtgattacaaccggtaaagactggattgagctggaccgtcgcaccacaccgttaactgctgtaaaagtaaaaaccgcgcctcacccgggctttcctaccgatatgcaggcgcagtttgtggcgcttaatgccgttgcaaaaggcaccggcgtgattacagaaaccatctttgaaaaccgttttatgcatgtgcctgagttacagcgcatgggcgcggaaatcgcgctggaaactaacagtgcgggaagtaaaggtgagtcttcgttgaaaggcgcgcccgtaatggcaaccgacctaacagc

SEQ ID NO: 244172 - DNA, 276 bp, Unknown
  Bacterial polypeptide expressing nucleotide sequence isolated from the Sargasso Sea
tatggataggtttgaaatagttggaggaaatcagctcagtggcgaggtcgagataagcggagctaaaaacgctgttctaccaatgatggctgcttcaatgctatctcctggtaaaactattatcgaaaatacacccaaccttcgagatacaagaacatttataaatcttcttaatattttaggtgttgagtctttttttgaagattcaaaattaaccttaaatacagataatatatctttttttgaggctccttatgatttagtaaaaaccatgag

SEQ ID NO: 244173 - DNA, 595 bp, Unknown
  Bacterial polypeptide expressing nucleotide sequence isolated from the Sargasso Sea
aatggacaaatttattgttaagggtccttgtaaaataaagggtgaaatttcaatttcaggctcaaaaaatgctgccttaccaattttggcatcgacaattttattcgaaaaagaagtcatagtaaaaaatttacctcgtgtgaaagacattgatacaatgataaatcttttaaaatctcttggttcagaaataaaatttaataaaaatagaaaaattgttaaaataacaaagaaaaaaaagcaaaattattttgcatcatattcacttgttagaacaatgagagctggaatattagttttaggagcacttgttgccaaacatcaaaagtctattacttctttacctggtggctgccttataggggcaagacctgtaaattatcatttgaatgcgcttaaaaaacttggaatgaaatatgatattaagaaaggctatattcatgcacatacgaaaaaaaaactcaaaggtgcaaaaatcagattttcaaaagttagtgttggagcaactgaaaatacaattatagctgcatgtttagcaaatggaatttctgttcttagaaactgcgcgattgaaccagaaataattgatttaata

SEQ ID NO: 244174 - DNA, 841 bp, Unknown
  Bacterial polypeptide expressing nucleotide sequence isolated from the Sargasso Sea
atgaaaacttttgctagttattctttagtaaaaacaatgagaggatctattttagtcttgggtccattaatttcaaaataccacagatcaaaaatttctttacctggtgggtgtttaattggtgcaaggccaattaattatcatttaacagcattaaaaaaactaggtatgaaatataaattaaaagatggttatattttggcaacatcaaaaggtaagcttaaaggtacgattataaattttccaaagataagcgtaggagcaacagaaaattctataattgcagcatgtttagcaaagggcaaaactattttaaaaaattgtgcaatagaacctgagattaaagatcttacaaattttttaaataatgcaggagcaaaaattaaatggtcaggaagaacatgtaaaattataggagttaattttttaaataagactgagtatgctgtaatgagtgatagaatagaggcaggtactttttgtgtagccgctacacttgcaaaaggtaatttaaaaataaaaaatttaaatcctaaagttattagaactgaaataaatttattaaaaaaagttggtgctaaaattaaaacttgccaaaatgagattttagttaagggacccgaaaagataaaatcaataaaaagtattaaaactaaagagtttccaggtattcctacagaccttcaagcacaattaatggttctaatgtgtaaagcaacaggaaaaagttcaattactgaaagtatttttgaaaatagatttatgcatgtcgcggaactgcaaagactcggggctaaaataattgttaagaacaacactgcgataattgagggaaaaacta

SEQ ID NO: 244175 - DNA, 922 bp, Unknown
  Bacterial polypeptide expressing nucleotide sequence isolated from the Sargasso Sea
ccttcctggtggttgtgcattggcacaagacctattgacatacatctgaaagctttatcaaaattaggtgttaaatataaaattaagcagggatatgtacatgcaacagcaccaaaaggtttaaaaggatcaaaaatacactttcccaaaatttctgttggtgctacagaaaatttgattatagctgctagcatggctaaaggaatttccatcttgagcaattgtgcgatagagccagaaataatagatttgataaattttttaaaaaaaatgggttgtaaattaaaatggatttcaaaacgttcactaaaaattactggtgtaaattatttagatgatgcaagttacactgtaatgtttgatagaattgaagctgggacatacttaatcgcagcagctgttactgagggtaacttaaagataagaaaagtaaatcctttaacagtaaaaaaagaaatagatattttaaaaaaaatagggtctagaattaaatacagaaataatgagatacatataattggttctaaaaatataagaagtataaatttaaaaactgctccttggcctggtttagctacagatttacaggctcagatgatggtactactttgcaaggcaaataaaaaatctgtaattcaagaaaatatttttgaaaatagatttatgcacgttggagaattaaatagaatgggtgctaaaattttaataaaaggaaataaagcaataataggtggaagaatcaaatttatagcagcagagctaatggctacagatttaagagcatccgtctctttagtgcttgcagctttgtcagccagtggaaaatctattattaatagaatttatcatctcgatagagggtatgaaaatattgagaaaaaattgagaaaagtgggtgcaaaaataagaagaattcattaat

SEQ ID NO: 244176 - DNA, 793 bp, Unknown
  Bacterial polypeptide expressing nucleotide sequence isolated from the Sargasso Sea
tcagatcgtgctcgactgccccagcgttggcgccaccgaaaccattctgatggcagcggtgctggccgatggggtttccaccatcgaaaacgctgctcaggaacctgaagtgcaggacctggccaacctgctcaacagcatgggcgcccaggtgagcggcgctggcggcccggtgatcaccgttcaaggggtggagcggctccgtggatgcaccaactattcggtgatcccggatcgcatcgaagccggaacgttcctgatggcggcggccatcacgcgctcaccactggtggtggagcccgtgattcccgagcatctcagcgctgtgatccaaaagcttcgcgattgcggctgctccatcgagatcaaggggagagccgtgacgatcacccccggcgagatcacggccgtggacatcaccacccaaccgtttcccgggtttccaaccgatcttcaggcaccattcatggccctgatgtgcaccgcgaagggcaccagcgtgatcagcgagaagatctatgaaaaccggctgcaacatgtggccgagctgcagcgcatgggggcatcgattcggctcaagggcagcacagccatcgttgaaggcgtggctcagctgagcgcggcgcccgtcaccggcaccgacctccgtgcagccgctgccatggtgctggctggcctctccgctaaaggaatcaccgaagtagctggtctgaagcaccttgatcggggctacgacgacctcgaagccaagctcaacgctgccggcgctgaggtgaagcgcaacatcctctga

SEQ ID NO: 244177 - DNA, 856 bp, Unknown
  Bacterial polypeptide expressing nucleotide sequence isolated from the Sargasso Sea
aatgaagtatcagataaaaaagggctatattcatgcaagctcaaaaggataccttaaaggttgtaaaataaaattttctaaaattagtgttggagcaacagaaaactcaatcattgctgcatgtctggccaaaggtaaaacaattttaaggaattgtgctattgaaccagaagtaaaagatcttacaaattttttaaaattagctggagcaaatataaaatggattggaaaaagatctgtaaaaatagaaggtgtaaagtctttaaatagtatcaattattcagtcatgagtgatagaatagaagctggaacattttcaattgccgcttgtctttcagagggaaatttaacaattaaaaactttaatcctaaaataattcaaactgaattagatttattaaagaaaacaggcgcaaaaataaaattttttaaaaaagagataaatattaaaggtccaaagaatataaagaaattaaaaaatatcataactaaggaatatccatcttttcctacagatcttcaagcccaactgatggtattgttatgtaaagcaaatggtagaagcattattacagaaaacatttttgaaaatagatttatgcacgtcgcagagttgagaagattaggggcaaaaattacaattaataataataaagcaataatagatggaaaaacaaattttcaaggagcagagttaatgtccagtgatcttagagcatctgtagctttagttctagctgcgatagtagccaatggtcattcaataataaatagaatttatcatttggacagaggttatgaagaaattgaaaaaaaactaagaaaaattggggttaaaataaaaagaatttcctaa

SEQ ID NO: 244178 - DNA, 544 bp, Unknown
  Bacterial polypeptide expressing nucleotide sequence isolated from the Sargasso Sea
atgcaaaaacttttaattaaaggaaagaaagaaatatctggatcaattaagatatctggttctaaaaatgcgacactaccaatattagctgcatctattttagctaaaaatattactttaaataatgcaccgttcgtaaaagatatttttacaatgattgaattattaaaatttattggaataaatgtaaaaattgcgagcaaaaaaaataatataaagttaataaataaaaaaaaaaatattaatactttagcgccatataaattagttaaaactatgcgtgccggagttttagttcttggtccacttttaacaaaatataaaaaagcaaaagtatcactacctggtggttgtgcaattggtactagaccagtaaatttacatttgtttgctcttaaaaaactaggagcagatataaaaattaaagacggttatattattgcagaagctaaagatggtttgattggtgcaaaaattaactttccttccatttctgttggcgcaacagagaacgctttactggcagcattggcgcaaaaggaaa

SEQ ID NO: 244179 - DNA, 382 bp, Unknown
  Bacterial polypeptide expressing nucleotide sequence isolated from the Sargasso Sea
atgcaaaaattacttgtcaaaagtacaaaaaacttaactggtgttgtccgaatatccggttcaaaaaatgcaactttgcctattttagctgcttcaatattaagtcaaaaaaaaattgaattgagaaatatacctcttgtgaaagacgtaattacaatgtctgagcttttaagacacataggttctaatataaaaataaatccaaaaaaaaaaaaaattttaatagagaataaaaataataagtttaaaacaacagcgccttattcttttgttaaaactatgagagctggcgtaatcgttctcggccctcttttgactcgatttggaaaagccaaagtatctttgcctggaggttgtgcgattggtacaagacccagttgat

SEQ ID NO: 244180 - DNA, 259 bp, Unknown
  Bacterial polypeptide expressing nucleotide sequence isolated from the Sargasso Sea
catggccaagatcgtagtgaccggcggcaagccgctgcacggtgaagtgaacatttccggcgccaagaacgccgtcctccccatcctgtgcgcgaccctgctggccgatgcgccggtggagatcaccaacgtgccgcacctgcacgacgtggtcaccaccgtgaagctgctcggcgagctcggcgccaaagtcaccatcgaccagggcacgctgtcgcgcggcagcgcgatcgtggtcgacccgcgcacgtcaaccagc

SEQ ID NO: 244181 - DNA, 179 bp, Unknown
  Bacterial polypeptide expressing nucleotide sequence isolated from the Sargasso Sea
tatggatggtctaagaattgagggtggtaagccgcttcgcggcgatattacgataagtggagcaaaaaatgcggccttaccacttttatgccttggtttaatgacaagcgataggctagtgctaaaaaatgtacctaatctcgccgatacagtgtcaatggaagggctgttgcgccatc

SEQ ID NO: 244182 - DNA, 594 bp, Unknown
  Bacterial polypeptide expressing nucleotide sequence isolated from the Sargasso Sea
taaaaagtataacttactcaattatgaatgatagaattgaagcaggtactttttgtgttgccgcatgtttgaatggtggaaacttaaaaattaaaaactttgagccaaaaattatcaatacagagataaatttacttaagaaaattggtgcaaaaataaaaaccacaaaaaatacaattcaaattaagggaccaaataaaattaaaagtctaaattttttaaaaactggagaatatccaaatttccccactgatttacaagcgcaaattatggtattattaactaaagcaaatgggaagagtacaattgaagaaaatatatttgaaaatagatttatgcatgttccagaattaaaaagattaggtgcaaaaataaatattaaaggtaacaaggcaattattgaaggaactaaaaatttagagggagctgagttgatgtccagtgatttaagggcatcagtagctctagttttagcagcttttatttcaagaggtacatcaattattaatagagtatatcatttagaccgaggttacgaaaaaattgaaaataaattaaaaaaaattggggtaaaaattaaaagaatatcttagt

SEQ ID NO: 244183 - DNA, 395 bp, Unknown
  Bacterial polypeptide expressing nucleotide sequence isolated from the Sargasso Sea
aatggatagattgataataaaaggtgaggctgatttaagaggatcaataagtattaaaggatcaaaaaattctgctttaccaattatggtaagtgctcttttatcatttaacactttaagattaaaaaatttacctaaactggatgatataaataatatgtcaaaacttcttagaagctatggtgcaattataaaatctagaaaagataatttggaaataaattgtgaaaagatcatcaataaagaagcttactatgacatagttagaaaaatgagagcttcaattttaattttaggacctttattagctagatttggagaagcaaaaatttcacttccaggaggctgtgcaatagggacaaggcctattgatattcatttagaaggtctcaaaa

SEQ ID NO: 244184 - DNA, 910 bp, Unknown
  Bacterial polypeptide expressing nucleotide sequence isolated from the Sargasso Sea
ggatcgaaaattattttatctaaagataaaagagtcgctagaatacacaataaaaaaaatcttaaaacatttgcaagttattctcttgttaaaacaatgagaggttcaattttggtcttaggtcctttaattgctagatattacaaatcaaaaatttctttacccggtggatgtttaattggagcaagaccaataaattatcatttagactctttgaaaaaacttgggatgagctatattttaaaagatggctatatcttagctaaatccaatggtaaattaaaaggaactactataaagtttcccagactaactgtgggagctacagaaaattctataattgcagcttgtttagcaagtggtactactattttaaaaaattgtgcaattgaacctgaaataaaagatttaacaaagtttttgaactcagcaggagcaaagatttcctggattggtagaacatgtaagattgttggagtaaaaactttaaatccaacagaatattcagtcatggctgataggatagaggcaggtaccttttgtgtagcagcaacattggcaaaaggaaacttgaagatatcgaattttgatgcaaaaattatcaaaaccgagttagaattattaaaaaggtttggtgcaaaaataaaagcacataaagaaaaaatttttatcaaaggtccacagaaaattagatccattaaaaatattaaaactaaagaatatccaggtgtagcaactgatttacagtcacaacttatggttttgatgtgtaaggcaagtggaaaaagctctatcactgaaaatatatttgaaaatagatttatgcatgtagctgaactgcggagacttggtgcaaaaataaatgtaaagaacaataaagcttacatttttggaaatactaaatttattg

SEQ ID NO: 244185 - DNA, 582 bp, Unknown
  Bacterial polypeptide expressing nucleotide sequence isolated from the Sargasso Sea
aatgatttgcggaagcaaaaagaagtcatatcttaaatcacaaaatttaaagatttttggccaaggtaaattaaatggaagagttgaaataagtggcgcaaaaaattcagccctggttttgctggcggcatcattactaactaatgaaagaataattcttgaaaatgtacctcgtctcactgatattgaaaaaatgggtaatattcttaggaatttaggagttaatttagtagataaaaacaataaattagagatagattcagaaaatatttctattaaagaacttccttatgaacttgttaatggactaagagctagtttcttttgtattggagctctattaagtaaatttggagaggctaaagttcccttacctggaggttgcaatattggttcaaggccaatagatgagcacattaatggacttaaagcattaggagcagaaattcttattgaagaaggaattgtcagagcaaaaataaaaggaaagaaaaataaactttgtggtactcatataaaattaaagtgtccaagcgtaggggcaactgaaactttaataatggctgcatctctagccgatgg

SEQ ID NO: 244186 - DNA, 1051 bp, Unknown
  Bacterial polypeptide expressing nucleotide sequence isolated from the Sargasso Sea
atcgcgacaatctcaaaaggaaaaaaaaataatttttttgcaccttattctttagttaaaacaatgagagcaggaattttagttcttggtcctttgttggcaaaaaataaaaaagcaaaagtaagtagcccaggtggttgcagtataggagtaagaccaatagatatacatctaaaagctatatcaaagttaggtgtaaaaataaaaattgaaaaaggatatgttaatgcaaaagctcaagaaggattagttggttctgaaataagatttccaaaaatatccgttggagctaccgaaaatttagttcttgctgcttgtcttgcaaaaggaaggacaacaataaagaactgcgctatagagcctgaaatcaaagatctgacaaattttttaaaaacagctggtgctaaaatcaaatggatcggtaaaagaactttgaaaattgagggtgttaaaaaattaaaaagtataacttactcaatcatgaatgataggattgaagcaggtactttttgtgttgctgcatgtttgaatagtggaaatttaaaaattaaaaactttgagccaaaaattataaacacagagataaatttacttaagaaaattggtgcaaagataaagaccacgaaaaatacaattcaaattaagggaccaaaaaaaattagaagtttgaattttttaaaaactggagaatacccaaactttcccactgatttgcaagctcaaatgatggtattactaaccagagcgaatggaaaaagtacaattgaagaaaatatatttgaaaatagatttatgcatgtcccagaattaaaaagattgggtgcaaaaataaatactaaaggaaacaaggcaattattgaaggaactaataatttagagggagccgagctaatgtctagtgatttaagggcatcagtagctttagttttggcagcttttatttcgagaggaacatctattattaatagagtatatcatttagacagaggttatgaaaaaattgaaaataaattgaaaaaaattggtgtaaaaataaaaagaatatcttagt

SEQ ID NO: 244187 - DNA, 1229 bp, Unknown
  Bacterial polypeptide expressing nucleotide sequence isolated from the Sargasso Sea
ttcgatttcaggttcaaaaaatgctgctttgccaatacttgccgcaacactgctgtttgacaaacctgtaattatcgaaaacctacctagtaggacaagagatatccatacaatgctgaatttattaaaatctctcggatccaatattcaatttttaaataataaaaaaacagtaaaaattacaaagaccaaaaaacaaaaacagtttgcatcttattcaattgttaaaacaatgagagcaggaatacttgtgctaggaccattagttgccaaatatcataaatccatttcaagttttccaggtggatgtgttttgaatggtaattctggtagaccaattaatttacatttggaagctttaaaaaaacttggaatgaagtatgaaataaaaaaaggatatatccatgcgaaatctaatggtaaattaaaaggtaataaaataaagtttccatcaataagcgttggggcttcacaacaactccttatgtcagcagttttagcgaaaggcaaaactttgttacataacctagcatgtgaaccagaaataaaagatttaactaattttttaatttctgcaggtgctaaaattaaatggattggtaaaagaacctgtcaaatcattggtgtaaattctcttaaagaaacaaaatatacagtaatgggcgatagaattgaaactggaactttttgtgttgcagccacattagcaaaaggagatttgttaattaagaattttgatccaaagttaattaaaactgaattaaatttactaaaaaaagttggggcaaaaattaaattatttaaaaatagcattaatgttaaaggaccagaaagaataaaaagtataaaaaatattactactaaggagtaccctggatttcctacagatcttgcccctcaatttatggtccttctttgtaaggctagcggcacaagctcaattacagaaaatatatttcaaggtagatttttacatgcgatggagcttcagcgactaagagctaaaataactataaaaaatagaaccgcaaaaatagagggtaataccaactttatagcagcagaagtaatgtcgagcgacctcagagcatcggctgctttagtgcttgctggtatcgtttcaaaaggcaacacagtagtaactagagtttatcattgtgatcgaggttatgaaaattttgaaaataaactaaaaaaaattggtgtgaatattaaaaggctaaaatagt

SEQ ID NO: 244188 - DNA, 921 bp, Unknown
  Bacterial polypeptide expressing nucleotide sequence isolated from the Sargasso Sea
aatggataaatttattgttagaggccctagtaaattaaagggtgagattgcaatttcaggatctaaaaatgctgcattaccaattttggcatcaacaattttatttgataaagaagttataattaaaaatctacctagggtaaaagacatagacacaatgattaatcttttaaaatcccttggttcggaaataaaatttagcaaagataaaaaaattgtaaaaataacgaagaaaaacaaacacaaaatttttgcttcgtattctcttgttagaacaatgagagctggaatattagttctaggtgcactggttactaagtatcaaaaatctgttacttctttacccggtggatgcttaataggagcaagacctgtaaattatcacttaaatgcacttaaaaaacttggaatgaaatatgaaattaaaaaaggttatatttatgcaaatactaaaggaaaactagaaggtgctaaaataagattttcaaaaattagtgttggagctactgaaaatacaattatagcagcatgtttagctaatggagttacaatacttagaaattgtgcgattgaacctgaaatagtcgatttaataaattttttaaaatcaggtggtgcaaaaataaaatttattggcaaacggacattaagaattgagggaattaaatctttaaaaagcacaagttatgcagtcatgtctgatagaatagaggctggaactttttgcgtggcagcatgcttgactggtggtaatttaaaaataaataatctatatccaaaagttataaaaacggaattgacattactgaagaaagttggagctaaaataaaaacaactaaaaaacaaattcacataataggtccaaaaaaaattaaaaacataagtaatttagtcaccaaagaatacccggattccaacag

SEQ ID NO: 244189 - DNA, 1111 bp, Unknown
  Bacterial polypeptide expressing nucleotide sequence isolated from the Sargasso Sea
aatgctaaaattattaaaatctcttggctctaaaattgaattttttcaaaataaaaaaactgtaaaaataacaaagagtaataaacgacaaattcttgcatcttactcactagttaaaactatgagagcaggcattctggttctcggaccaatgattgcgaagtacaataaatcaattacttcattgcccggaggatgcttgataggagcaaggccagttaattatcatttaaatgcattaaagaaacttggaatgaaatatgaaattaaaaaaggatacatccatgcattttcaaaaggaaaattaagaggagcagatataaaattttcaaaaataagtgttggtgcaactgaaaactcaattattgctgcttgtctcgctaaaggaaaaactattttaaaaaattgtgcaattgagcctgagattaaagatttaacaaattttcttaattctgcaggtgcaaatattaaatggataggaaaaagaacagtaaaaataattggagtagattctttaaaagaaataaaatattcagttatgggagatagaattgaaacaggaacattctgtgttgctgcaactctatctaagggagatttattaattcaaaactttgatcctaaattaatccaatcagaacttaacctattaaaaaaaattggtgctaaaataaatatttttaaaaataaaattcatataaaagggccaaaaaaaattaaaaatataagtagtattgagacaaaagagtatcctagctgtttatcaacagatttgcaggcacaatttatggtattgttatgtttagctagtggaagaagctcaataatagaaaatatatttgaaaatagatttatgcatgttgctgagctacgaagattaggtgctaaaataactataaagcgcaataaggctataattgaaggcccttcagaatttactggggcagaattaatgtctagtgatttaagagcatcagttgcattagttttagcatcaatagtagctaaaggaaaatctgtaataaatagaatttatcatttagataggggatacgaaaagatagaaaataaactaaaaaaaattggagttaatattaaaagattatcttaa

SEQ ID NO: 244190 - DNA, 844 bp, Unknown
  Bacterial polypeptide expressing nucleotide sequence isolated from the Sargasso Sea
atggaaagattagaagtctttggagcaaaaaagctcaaaggaaaaatttttatttcaggatctaagaatgcagcattgccaatattagcagcaactattttgacaaataagaaaattgttttaaaaaatctaccaaatgtaaaagatatagaaacaatgattaaacttttagagtcaattggatctacaattaaatattcaaagaaaaaaaatttaataacaataataaataagaaaaaattaaaaactttcgcatcttacaatttggttaaaactatgagggcaggaattttggttctaggacctatgatagcaagatatggcaaagcaaaagtttctaccccaggtggatgcagcataggagttagacctatagatattcatttgaaatctttagcaaaattaggtgtcaagtttaagatagttgacggatatgtttatgcctcttcaaaaaaaagattagaaggtaataaaattaaatttacaaaaatatcagtaggtgcaacagaaaatttaattattgcttcatctatggcaaaaggaactactattctttcaaattgtgctattgaaccggaagttaaagatttaattaattttattaattgcattggtggaaaaataaaatggataggaaagagaactttgaggatcgatggagttaatgattttaaaaaaggtgagtatagcattatgcctgatagaattgaagctggaacatatttaattgcaggagcaataacaagaggcaatataaaaatttttggaataaatccgaatattattagaactgaaattaatattttaaaaaaaataggttcaaaaattaaaatagaaaaggatc

SEQ ID NO: 244191 - DNA, 1270 bp, Unknown
  Bacterial polypeptide expressing nucleotide sequence isolated from the Sargasso Sea
atgaaaagatttttaataaatggcactaataaaggtgttaagggtgaaataaatataagtggtgctaaaaattcttgtttgcctttaatggcagcttcaattttgtttaagaaaaaggttattttgagaaatgcaccttttgtaaaggatgttttgaccatgaaagatttgcttatatctttaggctcaaaagttgagctcaaaaaagaaaaaaaaattattaaaataacaaataataaaaaacataaattaactgttccatacaatttagtttctactatgagagcaggcgttttgacaatgggacctttattagctagatatccaaaaagtaaaattagagttgctttaggtggaggttgtgctttgggtattagagacacttcttggcatctttcaggatttaaaagtcttggtgcagataatactcttaacagaggttatgtgaacattttctcaaaaaacggtttaaaaggaaatatttttaaatttccaaaagttactgttacaggaagttcaaatttgattatggcatcagtgcttataaaaggagaacacataatcaaaaatatttcgatagaacctgaagttaaagatttgattaaatttttaaataattctggggcacaaataaagtttataggaaaaagatctataaaaattcatggagttaatgaacttgtaaatggcgatcatactattataggtgataggattgaagcttttagttacttatgcgttgcagcgacaacgaatggaagagtcagagtaaaaaaaattgatcccaaatatttaaacgcggaattaagaatattaaaaaaaatcggatacaaaatagaagttaatgtgaattcaatcatgatttcaccaggtaaaaaaacaaaacctgtatcgattaaaactggtccttggcctcaatttgccaccgacaacatgccaattattcttgcagttttaacaaaggtttctggaaaaagtgtaattgaagaaacaatattctcaaatagatttatggcagttccagagttaaaaagaatgggcgcaaaaatatcaataaagaaaaataaggcatttattattggacaaaaaaaattaaacgctgcagattgtatttcatcagatttaagaactacattttcaataattttaggagcaatatcggccgagggatcctctacaatatctagaatttatcatggtttaagaggttatgaaaacttacaaatcaagctcaaaaaattgggtattaaaattaaattaaaaaaataat

SEQ ID NO: 244192 - DNA, 441 bp, Unknown
  Bacterial polypeptide expressing nucleotide sequence isolated from the Sargasso Sea
aaataaaaacaattaaaaatgaaatacatataaaaggattaaaaaaaattaaaagtatttcaaatatcaaaacaaaagaatatccaagctttccaacagacttacaagcgcaatttatggttttgctttgtaaagcaaatggtagaagctctataactgaaagtgtgtttgaaaatagatttatgcatgttgcagaattaagaagactaggagctaaaattttaataaaaaaaaataaagcaattatttatggtggtgaaaattttcagggagccgagctaatgtctagtgaccttagagcctcagttgctttagtattagcagctataattgcaaggggcaaatctgttataaatagaatttaccatctagatagaggatatgaaaaaattgaaactaagttaaaaaaaattggtgtaaatattaaaagaatttcttgat

SEQ ID NO: 244193 - DNA, 664 bp, Unknown
  Bacterial polypeptide expressing nucleotide sequence isolated from the Sargasso Sea
atggacaaattagaggtttttggaggtaataaacttaaaggtaaagtaaatatttctggttcaaaaaatgctgcgctcccaattttagcagcaacaattttatcaaataaaaaaattgttttaaataatcttccaaatgtaaaagatattgaaacaataattaaattattagaatctataggttcaattgttaaatattcaaaaaataaaacttcaataactatacaaaataaaaaaaaattaaaaacatttgcgagctataattttttgcgaacaatgaggggatcttttttagttttagggtcaatgttagcaaggtatggcaatgcgaaagtttcaactccaggaggctgtagtattggtgtaagacctatagatttacacttaaaagctttagcaaaattaggagtaaattataaaataattgatggatatgtccatgcaaaatcaaagaaaaaattaaaaggtacaaaaattaaatttcctaaaatttcagtaggagcaactgagaatctagttatagcttcatctatggcacaaggaactactattttatctaactgcgctattgaacctgaaataaaagatttaataaattttattaattgtatgggaggtagaataaaatggattggaaaaagaactttaagaattcaaggtgtta

SEQ ID NO: 244194 - DNA, 409 bp, Unknown
  Bacterial polypeptide expressing nucleotide sequence isolated from the Sargasso Sea
aatggtccaaagaatattaaaaaaatattaaatttaaaaacaaaagaatatccatcttttcccactgatctacaggctcagttcatggtattgttatgtagggctaatggaaaaagtacaattacagaaaatatttttgaaaatagatttatgcattgtgctgagctaagaagattgggggcaaaggtgttaataaaaaaaaatactgcaattattgaaggtaatacagattttcaaggagcagaattaatgtctagtgatttaagagcttccgtcgcactagttttagcagctatggttgctaaaggaaaatcagttataaatagaatttatcatttagacagaggttatgaaaatattgagactaaattaagaaaaataggtgtcaatataagaagaattaaatagt

SEQ ID NO: 244195 - DNA, 460 bp, Unknown
  Bacterial polypeptide expressing nucleotide sequence isolated from the Sargasso Sea
aatggaaaaactggaggttataggagtcaaaaaacttacaggaactataaaaatttctggttctaagaattcttcattacctattttggcagcatcattattatcaaacaaaaaagttaaaatactaaatcttcctaatgtaaaagatataataacaatgattttattattgcagtcattgggttcaaaaattaattataataaaaaaaataaatcagttgaaattgataattcaaaaaacattaggacattcgcttcttataatttagttaaaacaatgagagcaggcatcttagttttggggcctttattagcaaggtttaataaagcaaaagtttctttgcccggaggttgtgcgattggtgctaggccagtaaatattcatttaaaagccctatcaaaattaggagtaaaatataagattgttcaaggatacatatatgctaaagcacccaaaggt

SEQ ID NO: 244196 - DNA, 787 bp, Unknown
  Bacterial polypeptide expressing nucleotide sequence isolated from the Sargasso Sea
aaagtttcctagactatctgtaggagctacagaaaattctatagttgcagcttgtttagcaaaaggtacgactattttaaaaaattgtgcaattgaacctgaaataaaagatttaacaaagtttttaaattcagcaggagcaaagatttcctggattggaagaacatgcaaaattaatggagtaaaaactttaaatccaacagaatactcagtcatggctgacaggatagaggctggtactttttgtgtggcagcaacattggcaaaaggaaacttgaagatatcgaattttgatgcaaaaattatcaaaacagaattagaattactaaaaaggtttggggcaaaaataaaagcacataaagaaaaaatttttataaaaggtccagaaaaaattagatccattaaaaacattaaaactaaagaatatccaggtgtagcaaccgatctacagtcacaacttatggttttgatgtgtaaagcaagtggaaaaagttctatcactgaaaatatatttgaaaatagattcatgcatgtagcagaactacgcaggctcggcgcaaaaatagatgtaaagaataataaagcttacatttacggaaatactaaatttataggtgccgaattaatgtctagcgatttaagagcatcggtttcattggtattagcagcgatggtttctaaaggtaagtcaataattaataggatttatcatttagaccgtggttatgaaaatattgaacataaattaaaaaaaattggagttaaaataaaaagattaaaacagtga

SEQ ID NO: 244197 - DNA, 483 bp, Unknown
  Bacterial polypeptide expressing nucleotide sequence isolated from the Sargasso Sea
aatgcaaaaattattgattaatggaaaaaaggaattattcggaaaaatttcaatttctggatctaaaaatgctaccttaccaattttagcagctactattttatctggtcgagtacaattaacaaatataccgttagtaagggatatttttacaatggtggagcttttaaaatttataggattaaaaattaatatttcaaaaaaaaaaaatttaattgagataaaaaatataaataaaaatattaaaacactagctccttataaattagtaaaaactatgcgggcgggagtattagttttaggtccactgttagcaaggtataagaaagctaaaatttcactccctggaggatgtgcaattggaactaggccggttaacctacatctttttgcactaaaaaaacttggagcgaaaattaaaataaaaaatggatatattattgctgaaagcaaaaatggattagtgggagcaaatattacttt

SEQ ID NO: 244198 - DNA, 608 bp, Unknown
  Bacterial polypeptide expressing nucleotide sequence isolated from the Sargasso Sea
aatgcaaaaattagaagtctttggagcaaataagctcaaagggcaggtcaaaatttcaggctctaaaaatgcctctcttccaattcttgcagctactcttttgtctaatagtaaaataaatctatctaatgttccaaaagtaaaagatatagaaaccatgattgaattattaagatctttaggttcaaagattaaatttgataaaaataaaattgatatcgataattcaaatcaatttaaaaaatttgcatcatataatttagttaaaacaatgcgtgcaggaattttagttttaggacctttgttggctaaatttggttctgctaaagtatctctacctggaggatgtgcaattggtacacgacctgtcgacattcatttgaaagcattgtcaaaacttggtgtgaagtttaaaattcttgaaggatacgtttatgctaatgcaccaaaaggattaaaaggatctaaaataaaattttcaaaaatttcagttggagcaacagaaaacttgattattgctgcttgttttgcaaagggtgaaacagttttatcgaattgtgctattgagccagaaataaaagatttagtgaattttttaaaaaaagtgg

SEQ ID NO: 244199 - DNA, 652 bp, Unknown
  Bacterial polypeptide expressing nucleotide sequence isolated from the Sargasso Sea
atggataagttaattatttcaggtaacgctaaactaaaaggatcaatagctgtaaaaggatcaaaaaactctgctcttcctttgctcgtttcaagtttgctgactaacaaagaccttattctaagaaatttaccagaccttgaagatataaacaatatgcaaaaattacttaaagaatatggagttagtattaaaaataaaaaaaatgaaattactttgaatggaaaaaatatttttaatcgtgtggccgattatgacattgtaagaaaaatgagagcttcaattttaatcttaggaccattattgagtaaatttggtgaagctaaaatttcacttcctggtggttgtgcaataggaaccagaccaatagatattcatcttttaggtttaaaacaattaggagcaaaatttcaaattgaaaacggatttgtgataggtaaagttaacaaacatttaattggtagtaatgtagatttaccatttcctagtgtaggaggtactgaaaacatattgatggcttcagttttagctcaaggaaaaacaaaaattattaatgatgcaaaagagccagagataattgatcttgtaaattcacttaattcgatgggtgcaaaaatttttggagcaggttccaaaaattatacttattgaa

SEQ ID NO: 244200 - DNA, 498 bp, Unknown
  Bacterial polypeptide expressing nucleotide sequence isolated from the Sargasso Sea
actttgatccaaagattattaaaactgaaattgattttttaaaaaaaactggcgctaaaattaaaacttctaaagatgaaattcacattaaaggaccaaaaattattaaaaatataactagtattaccaccaaagaatatccaagttttccaactgatttacaggctcaatttatggttttattatgtaaagcaaagggaaggagcgttataacagaaagtatttttgaaaatagatttatgcatgttggagagttaagaagactaggtgcaaaaatttcaataaaagaaaataaagcagtcattgaaggaagtactcaatttgtaggagcagaattaatgtctagtgatttaagagcttctgtagcacttgttcttgctgccatggtctctaatggtaaatcaacaataaataggatctatcatttagatagaggatatgaaaatatagaaaaaaaattgcaacaaataggagtaaaaattaaaagattaacttaat

SEQ ID NO: 244201 - DNA, 1174 bp, Unknown
  Bacterial polypeptide expressing nucleotide sequence isolated from the Sargasso Sea
gagtctcctcatagacgaggtcttggaactcacaaatgttcccaatctcaccgatatcgcaggcatgggccggatcctgtcagcccttggcgtccaggttgaacactccgttgacagtgtctccctgaatgccggaactctgagcagccacgaacccccctatgaactggtcaacagccttcgcgccagtttcttttgcatcggctcacttcttggacgactggggcacgccagggtgccactgcccggtggttgtcgcatcggcgctcgtcccgttgtcgagcacatccggggactcaaagcgttgggggcgcacgtcagtgttgaacacggcattgtcacggcttgcctcaagggcagcagcaagcggctcacgggtgcatccatcgttttggattgtccgagcgtgggggccactgaaacactgctgatggcggcagtactggccagcggcaccaccacgattgaaaacgccgcccaggaacccgaggttcaggatctggccaacctgctgatccagatgggtgcggacatcagcggcgccgggggaccggtgatcaaggttcggggtgtcgagcgtctccacggcgtgcggaactacccggtcattcccgaccggatcgaagctggcacctttttgatcgccgcagcgatcacccgatcaccgctgcgggtggaaccggtgattcctgagcacctcagtgctgttctgcaaaagctgcgggactgtggctgccagctggagatcgatcagacaggtatctccatcaccccaggtgacattcaggcggtcgacatcaccacccaaccgttccctggcttcccgaccgatcttcaggccccattcatggcgttgatggccaccgcccaggggactagcgtgatcagcgaaaagatttatgagaacaggcttcagcacgtcgcggaacttcagcgcatgggagcctccatccgcgtggacggcagcaccgccatcattgaaggtgttgtacagctcagtgcagcgcctgtcacgggcagtgacctgagagccgcagcagccatggtgttggcaggtctcgccgcgaatggcaccaccaaggtgtctggccttaagcatctcgatcgcggctacgacaacgtcgaagcgaagctgaacgccgttggtgcgcagctcgaacggcagcgtggctga

SEQ ID NO: 244202 - DNA, 364 bp, Unknown
  Bacterial polypeptide expressing nucleotide sequence isolated from the Sargasso Sea
aatggataaattattaattagaggcggaacaaaattaagaggcgaaatatatgcctcaggtgcgaaaaactctgctctccctatactggctgcttcattgcttgcagattcacctttgaaagtaggaaatctacctcacttgaatgacgtaacaacaatgctagaacttcttggttcgatgggtgttgatgtaatgttgagtgatgaaatggaagttcaggtggatacctcaagtatcaataatcttaatgcgcgttatgaactggtaaaaactatgagggcttcaatcttggttttaggacctttgttagctaagtttcaaaaagcaacagttgctcttccgggtggatgcgctatcggaagt

SEQ ID NO: 244203 - DNA, 835 bp, Unknown
  Bacterial polypeptide expressing nucleotide sequence isolated from the Sargasso Sea
agatggatatattctggcaaaatcaaagggaaaactttgtggaacaaccataaattttccgaaaataagtgttggggcaacagaaaattctataattgcagcatgtttagcaaaaggaaaaacagttttaaaaaattgtgcaattgaacctgagattaaagatcttacagattttttaaataaagctggagcaaaaattaagtggagtggaagagtttgtaaaatcataggtgtaaattctttaaatgaaactacttattctgtaatggctgatagaatagaagcaggcacattctgtgtagctgcaacacttgcaaaaggtaatttacaaataaataatttaaatcctaaaattattggtactgaaataaaattactaaaaaaagttggtgctaaaattaaaactagtgaaaataaaatcataattaaaggacctgaaaaaataaaatcaataaaaaacattaaaactaaagagtttccaggcattcctacagaccttcaggcacaattgatggttttaatgtgcaaagcagtgggcaaaagtttaattacagaaagtatttttgaaaatagatttatgcatgttgcagaattgcaaagattaggagctaaaataaatattaaaaataatattgctacgatagaaggaaatactaaatttattggtgctgaattaatgtctagtgatttaagagcttcagttgctttggttctagcagctatagtttctactggtaaatcatatattaatagaatttatcatttagatagaggttatgaaaaaatcgaaaacaaattaaagaaaattggtattaaaattaaaagattaaaatag

SEQ ID NO: 244204 - DNA, 913 bp, Unknown
  Bacterial polypeptide expressing nucleotide sequence isolated from the Sargasso Sea
aatggataaatttaaaataaatggtccctctaagatcagaggagaggtatcaatttctggaagtaaaaatgctgctctaccaatacttgctgcgactttactctttgataaaaatgtaacaattaaaaatcttccaagagttaaagatatcgatacaatgcttaatttgctaaaatcactaggaagaaaaattagctttaaaaataataaaaaaatcgcgacaatctcaaaaggaaaaaaaaataatttttttgcaccttattctctagttaaaactatgagagcaggaattttagttcttggtcctttattggcaaaaaataaaaaagcaaaagtgagtagcccaggtggctgcagtataggagtaagaccaatagatatacatttaaaagctatatcaaagttaggtgttaaaatacaaattgaaaaaggatatgttattgcaaaagctcaagaaggactatttggttcaaaaataagattttcaaaaatatctgttggagctaccgaaaattcaattcttgctgcttgtcttgcaaaaggaacaacaacaataaagaattgtgctatagagcctgagatcaaggatctgacaaattttcttaaaacggctggtgccaatattaaatggattggtaaaagaactttaaaaatagagggtgttaaaacattaaaaagtataacctactcaatcatgaatgatagaattgaagcaggcactttttgtgttgctgcatgtttgaatggtggaaacttaaaaattaaaaacttcgaaccaaaaattattaatacagagataaatttacttaagaaaattggtgcaaagataaaaaccacaaaaaatacaattcaaattcagggacctaaaaaaatcagaagtttggattttttaaaaactggaggaaatatccaa

SEQ ID NO: 244205 - DNA, 517 bp, Unknown
  Bacterial polypeptide expressing nucleotide sequence isolated from the Sargasso Sea
aggtgaagttgagattaaaaatataattcctgaacatttagaaagtgtaactaattgtctattaaaggccaatattgatataaatattagagatagctcaattactataaagtcagatggaaaaaatatattatcaacaaatattgaaactaatgaatatcctggctttccaacagatttacaagctcagtggatgatgctaatgtgtttggcagatggaacatcaacaattaaagagaatatttattatgatagatttactcatattatggaattaaataggctgggttgtaatatcaagcttgaagattctgttgcaataattgagggaaataaaaatcttattggagctgacgttatgtcaaccgatataagggcgtctgcagcattaattattgctgctctttgtgcaaaaggagtaacaaatattagtagagtttatcacattgatagaggttatgataaaattgaaaaaaaattgaccaatattggtgcaaatattattagaaaaaaataa

SEQ ID NO: 244206 - DNA, 769 bp, Unknown
  Bacterial polypeptide expressing nucleotide sequence isolated from the Sargasso Sea
atgcatctgtggagcaacagagaacaccttacttgcagctgtattagcagaaggaaaaacagtaatagaaaatgctgctagagaacctgaaatagttgatttggtcgaaatgctgaaaaaaatgggagcagaaataacaggtgccggcactagtgaaataattatagaaggagtaaaaaaattaaagccaacaaatcataaggttgttggagatagaattgcagctggaacttttttatcagcttttcttgctactcatggatcaggagttgtacgaggaataaatccggaaaacttacctatggaaataaagaaattaaaagaaattggtgcaaaaatcaaagcggaggataattcaattgaaatatcatatgatggtaatttgaatgcagtagagatttctacacttccatttccaggtattgcaacagatcttcaacctgtatttggttcacttttgttaaaagcatctggtacttcaataattactgaaaatgtctacgatcaaaggtttcagtggataccagaagtccaaagaatgggcgctagtgttcaaaccggatggcagcatgcaatgattaaaggagtgaataatttatctggtgcccctgtaaattctacagatattagaacaggagcaagcttagtaattgcagctctacaagctgatggttcctcgaaaattacagggatagaacacataaatagaggttatgaagatattgttgcctcattaaattcacttggctcgaaaattgaatataattaa

SEQ ID NO: 244207 - DNA, 535 bp, Unknown
  Bacterial polypeptide expressing nucleotide sequence isolated from the Sargasso Sea
ctggtgccttgggttggtaaaaaaattaaaatcactagtattgatactaatatattaaaaaaagaattagatattctaaaaaaaatgggtattaaatttaaaactcaaaaaaataaaataataatttttttttcaaaaaatattaaacctatttctattaaaactgaggcttacccaggctttccaactgatttgcaagcacagattatggttttgatgaccaaagcgcatggggagtcaaaaattaaagaaaatatttttgaaaatcgttttatgcatgtccctgagctcaatagaatgggagcgaagataaaagtttctggtaacctttctacaataaatttttctgaagaactaaacggagctgaggttatggccactgatttaagagcttcagtaagtttagttttagctggtttaattgctaaaaatagaacaattataaatagagtttatcatttagacagaggttatgaaaatttagaaaagaaacttagaaactgtggagcaataattactagagtaaattattaat

SEQ ID NO: 244208 - DNA, 1159 bp, Unknown
  Bacterial polypeptide expressing nucleotide sequence isolated from the Sargasso Sea
tatggacaaatttctgattgacggtcctagcaaaatcaagggcaaagtttcaatatcaggttctaaaaatgcatcattgccaatattagcagccacattactttttgatttaccggtaactattaaaaatcttccaagagtaaaagatattagtactatgcttaatttacttaagtctcttggatcaaaaatcgaactttctaaagataaaaaaactgcaaaaatttcaaacaataaaaatatgaaaacttttgctagttattcattagttaaaacaatgagaggttcaattttagtattaggaccattagttgcaaaatatcataagtcaaaaacatcattaccaggtggttgcttaattggtgcaagaccagttaattatcatttgtcagctttagaaaaacttgggatgaattatgaaattaaagatggttacattttagcaaaatcttttggcaaacttaaaggtggattaattaaatttcctaaaattactgttggagctactgaaaattctataatcgctgcatgcttagcaaaaggaaaaacagtattaagaaactgtgctgttgagccagaaataaaagaccttactaattttcttaattcggcgggtgcaaaaattaattggaaaggaagaacatgtaccattagcggagtaagttctttaaaatcaacaacttattctgtgatggctgatagaattgaggctggtactttttgtgtggcagcaactctagctaaaggaactctagaagttaacaatttagatccaaaaataataaatacagaacttaatttattaaaaaaaacaggagctaaaataaaagtaagcaaaaataaaattcatattaatggaccagaaaaaattaagtctattaaaaatattagaacaaaagagtttcctggaattccaacagatctacaggcgcaattaatggtcttgatgtgtaaagcaaaaggaaaaagttcaatcacagagaatatttttgaaaatagatttatgcatgttgctgaattacaaagattaggtgcaaatattattaccaaaaataataaagcttatattgagggtaatacgaaatttattggtgccgaagttatgtctagtgatctaagagcatcagtggcacttgtcttagcagcttcagttgcacaa

SEQ ID NO: 244209 - DNA, 1264 bp, Unknown
  Bacterial polypeptide expressing nucleotide sequence isolated from the Sargasso Sea
tatggacagattttttataagtggtccttctaaaataaagggaactataaaactttcagggagtaagaatgcttcattgccaattttagcagccacaattctttttgatgagccagtagaaattaaaaatttacctaacgtaaaagatatctcaacaatgttagatttgataaaatctctaggttttattgttacaaaaaataaagttaaaaattctgtaacaattcaaaaaaaaaatattaaaacatttgcatcttattcccttgtaaaaactatgagagctggaatcttggttcttggtccgcttgtatctaaatacagaaaagcaataacttctctacctggaggctgtttaattggagccagaccagttaattttcatctaaatgctttaggaaaacttggaatgaaacatcagattagaaaaggatatatttacgcaaacgcgaaaaaaggtttaaaaggatcaataattaaatttccacaaatttcagtaggcgctacagagaatgcaattcttgcagcaacattagctaagggaaaaacaatattaaaaaattgtgcaattgaaccagaaatcaagattgatcttacaaattttttaaataaagctggtgcgaaaattaaatggataggaaaaagatctattgaaattgaaggagtaaaaaaattaaatagcgttagctattcagttatggcagatcgaatagagtgtggtactttttgcgttgtagccgcaatatcaaaaggagaacttaaaataaacggtttaaacccaaaagtaattagaacagaaataagccttttaaaaaaaattggagcaaaaataaaaacttttgatgaatctatttttattaaaggaccaaaaaaaataaaaaatataaaatttttagaaaccaaagaatacaacggatttccaactgatcttcaagcgcaatttatggcgttgttatgtaaagctaacggaaaatcagttatacaagaaaaaatatttgaaaatagatttactcatattggggagttaaaaaggcttggggccaaaatatcaataataaaaaataaagccataattatgggaaattcaaatttcgaaggtgctgagctaatgtctagtgatcttagagcttcagtagcgttagtcatagctgcaattgtcgcaaaaggaaattcaattataaatcggatctaccatttggatagaggttacgaaaatatagaaaataagcttagaaaagtaggcgtagatataaaaagaatatcttaa

SEQ ID NO: 244210 - DNA, 555 bp, Unknown
  Bacterial polypeptide expressing nucleotide sequence isolated from the Sargasso Sea
aatggataaaataattatagaaggtcaaaatcctttatctggtacggtaagtatcagtggtgcaaaaaatgccgttttacctattatgacagcagctcttatggcagatggcatcagcaggatagatcgagtaccagatctcagagacacgcgtacaatgataaaactaatggagatcgtaggtgcaaagtgctcatttgaaaaaggatctcttaaaatagatggttccagcgtagacaatcctgaagctccttatgaccttgttaaaactatgcgtgcctcattctatgttttaggcccactactggcccgttttggttcggtcaaagtgtcattgccaggtggatgtgcctggggaccacgaccagttgatttccatttgaaaggactggaaaaattaggagctaagatcactttgagtagtggatatataatggctgaggcaaaaagattaaagggtgcgaagataagttttgagttcccttcagtgggtgcaacaggaaatattgtaatggctgcagctactgcagaaggaacaactgttatagaaaatgc

SEQ ID NO: 244211 - DNA, 245 bp, Unknown
  Bacterial polypeptide expressing nucleotide sequence isolated from the Sargasso Sea
aaacagaatgggttgcgacatttctgttaaaggcaatcatgctgttattcaaggagttaaatcaatttatggagctcaagtaatggcgactgacctaagagcttctgcaagtttgatccttgctggcctgtgcgctgagggcgaaacagttgttgataggatttatcatattgatagaggatatgaaagaatcgaagaaaagctaaactatttaggtgcaaatattattaggctcccaagttaat

SEQ ID NO: 244212 - DNA, 527 bp, Unknown
  Bacterial polypeptide expressing nucleotide sequence isolated from the Sargasso Sea
tatggaaaaaattgtcataacaggaggagaacctctcagtggcaatattacaattggtggttctaaaaatgcaatcttaccaattatggccgcatgcatcttaactgatgaggccgttcatttaacaaacgttcctaatcttcaagatattcagacaatgataaaggttttggagtcacttggtgtaaaggctgatatttcaaatctgagtcaaaataaattaactgtttgctatgaagatattaacaaaaatattgcagagtatgacttagttaggaaaatgcgtgcaagtgttctcattttaggccctttgcttgcaagaaaaaaagaagcttcagtatcacttcctggtggttgtgctataggagcgcgaccaattgatatgcatattgatgcgctcaaaaaattaggcgccgaatttgtccttgatagcggctatgtaaactgtaaggcaccaaaaggtttaaaaggaaataaaattgatttaaaaaaaatttctgttggagcctctgaaaatataataatgg

SEQ ID NO: 244213 - DNA, 640 bp, Unknown
  Bacterial polypeptide expressing nucleotide sequence isolated from the Sargasso Sea
aagggtgcagggtcagatacaatagtagttgaaggtgtagactctcttaaaggaacaactttcgcagtgatgccagatagagttgaagttggaacttatttaaccgcaacggctatgactggtggaaatgtaaaagtaaaatccgctaagcctgaatacctttcctctgtaatttctaaacttgagtcaactggagcccaaatacaaacaggcaaagactgggttgaaatttcgatggaaagggaaagaccaatttctacaagtttaacgacaggaccttacccgtcctttccaactgatatgcaggctcaattcgttgctctaaatgcaattgcgcaaggaaattctacagttaccgaaactgtgtttgaaaacagattcatgcatgtgcaggaaattgcaagaatgggaggggatataactctaaaaggaaatacagcggttatttcaggtattgataaccttaagggagcacctgttatggcaactgatttgcgagcttctgcaagcttggtgttggcagggttagttgctcaaggttccacaattattgataggatttatcatattgacagaggttacgaaagaattgaagaaaagttaaaaatgttgggtgctgacatagaaagaatatcctagg

SEQ ID NO: 244214 - DNA, 328 bp, Unknown
  Bacterial polypeptide expressing nucleotide sequence isolated from the Sargasso Sea
gttttgtgtacttaatgcgctagcgcagggcacggcaaccattaccgagaccatcttcgaaaaccgctttatgcacgtgccagaacttatccgtatgggcgctaccatggagcttgaaggcaatacctgtattatccaagggattgagtctttaagcggtgcacaggtgatggcgacggatttacgcgcgtcagccagtctagtgattgccggtttagtcgctgatggtaagactatcgtcgatcgtatctatcatttagatcgcggttacgagcatatcgagcagaaattccaaggattgggcgcgcatgtagagcgcgtacaataa

SEQ ID NO: 244215 - DNA, 290 bp, Unknown
  Bacterial polypeptide expressing nucleotide sequence isolated from the Sargasso Sea
tgtcacagaaactgtatttgagaatagattcatgcatgtacaggaaatagcgagaatgggcggaaatattgctctaaaaggtaatacggcagtaattaacggtataaataaattaaaaggagctcctgtaatggctacagacttaagagcatcagctagtttggttttagctggactagtagcagagggagatacgacaattgataggatttatcatattgatagaggttatgaaagaatagaagaaaagctaaaaatattgggagctgacattgaaagaatctcttaaa

SEQ ID NO: 244216 - DNA, 919 bp, Unknown
  Bacterial polypeptide expressing nucleotide sequence isolated from the Sargasso Sea
gaggtcagagtagacagttcttcaatcaaaaatttagatgctcgttatgaattggttaagactatgagagcatctatattagttcttggtccgcttctagctagatatcaggaagccactgtagctctgccaggtggttgtgcgataggaagcagaccagtaaatctacatattgaagccatgagtgcaatgggagcagtgataaatattgaagatggttatataaaagcttctgttgatggaagattaaaaggtaataaaattttatttgatccagttagtgtaacagctacagaaaatgtaattatggcagctagtttggctgaaggagtaacaacaatacaaaatgccgctaaagagccagaggtagtagatctagcaaattgtttgataagtatgggagctaatattaagggtgcagggtcagatacaatagtagttgaaggtgtagactctcttaaaggaacaactttctcagtgatgccagatagagttgaagttggaacttatttaactgcaacggctatgacaggtggaaatgtaaaagtaaaatccgctaagcctgaatacctttcctctgtaatttctaaacttgagtcgactggagcccaaatacaaacaggcaaagactgggttgaaatttcgatggaaagggaaagaccaatttctacaagtttaacgacaggaccttacccgtcctttccaactgatatgcaggctcaattcgttgctctaaatgcaattgcgcaaggaaattctacagttactgaaactgtgtttgaaaacagattcatgcatgtgcaggaaattgcaagaatgggaggggatataactctaaaaggaaatacagcggttatttcaggtattgataaccttaagggagcacctgttatggcaactgatttgcgagcttctgcaa

SEQ ID NO: 244217 - DNA, 379 bp, Unknown
  Bacterial polypeptide expressing nucleotide sequence isolated from the Sargasso Sea
atggaaaaattattaattaaaggtggcaactccctaaaaggaaaaattacttgttctggagcaaaaaatgctgcattacccatgatagcttcaaccatattatgtgatgagaaagttacacttagaaatctgccttatcttcaagatattacaacgatgtttgaattattgggctcaatgggggctgaaattttacttgatgaaaatatgcatttcacaatttcatcagctaatttaaaagatacagaggctagatatgaattagtgaaaacaatgagagcatccatattagttcttggcccattgatagcaagatatgggaaagcaaggattgctctgcctggtggttgtgctataggcaccaggccggttaactttc

SEQ ID NO: 244218 - DNA, 849 bp, Unknown
  Bacterial polypeptide expressing nucleotide sequence isolated from the Sargasso Sea
aatgatagtggaaaaacatatatcaatagaaggtaaccataaattaagtggtgaaataacagtaaaaggtgcaaaaaatgctgttttaaaagaaatgattcttccaattctttgcgaaggtgactatatcataaagaatgtcccttcgattgctgatgtatcttacatgcaagaagttctaaatgtacttggtattaaatcagaattttcaaataataatttatcaatttcctctccatcacaaatcgggatagaagctccatatgaaatagtccaaaaaatgcgagcatcaataatcatccttggcccattattagctagagaaggagaggcaagaattgcttttcctggaggggatcagcttggacctagacctgtccaaatgcatttagatgctttagaaaaaatgggagcaaagtttgaacttgatcatggcgttctaattggaagaacggaagggcttaaaggtgttgaagttaatcttccttatgcatccgtaggggcaactgagaacactttattagctgcagtattagctgaaggaaagactgtaattgaaaatgcagcaagagaacctgaaatagtagatattgtaaatatgctaaaaaaaatgggagcaaatatttcaggtgaggggactagtgaaataataattgaaggagttaagaaattaaatcctacagatcacgaagtaatcggagacagagttgcagcgggtacatttttagcaactattttttctactaaaggttctggaaaaataaacggtgtaaatccagaacacttgccaatggaattaaaaaaaatccaagagatgggagcaatagttgaatttgaagaatcttcaat

SEQ ID NO: 244219 - DNA, 521 bp, Unknown
  Bacterial polypeptide expressing nucleotide sequence isolated from the Sargasso Sea
tctgattatccggggtgggaatcgccttgagggcgtgctgaccgcttcgggcgcaaaaaatgctgccttgccgatactcgcagcgaccctgctgacctccggagtctgttccctgcggtcggttcctgtgttgcgagacatcaccaccatgctgacattgcttgccagcctcggcgcaaaaaccgcgcgccgcgaagatggagaggtgttgatagagagtgagtcggtgcaagagttcacggcgccttatgatctggtgaaaaccatgcgcgcctctatcctcgtgttgggccccttgctggcaagacatgggcaagcgcgcgtgtcattccccgggggctgtgcgattggcagccggcctgtggacctgcatatccgcgcactggaagcgatgggagccgccatcacgatcgagggcgggtatatcgtggccagcgcgccggaaggtttacagggcgtcgacttcacctttgatacggtcacggtggggggcaccgaaaacgccgttatggcggcgtcac

SEQ ID NO: 244220 - DNA, 886 bp, Unknown
  Bacterial polypeptide expressing nucleotide sequence isolated from the Sargasso Sea
ctgagtgaaaaaaatttaaatcttactaatattccaaagctgcaagatataaaatccatgatactattattggaaagttttggcgtaaaaataaatgaaaatgattctaaacttactttgaattctaaagatttaaaaaataatattgcagattatgatttagttagaaaaatgagagcatctattttagttttgggccctttacttgctcgttttaaaaaagctaagatttcgttaccaggaggatgctcaatcggtactagaccaattgatattcatttaaatagtttgaataaattaggtattaattttgaaattgaaaagggttttataagtggattagttaaaaatgaattaattggaaatataattgatttaccatttccaagtgtaggggcaactgaaaatgtaatgatggcagcaatattagcaaaaggaaaaacaataattaataatgcagcaaaggaaccagagataatagatttaggtgaatgtcttaattctatgggtgcaaaaattattgggcatggaactaatacaatttatattgaaggagtgagtagcttacatgattcaagctatgatattatgtttgataggatagttgcaggtacatatattttggctgcagttatgattaataaaaaatttaatgttaaaaatattaagcctaaatatctagaatctttaattcaaaccctgataaaaatgaaagctaatttaattgttaatgataacgatattacaatattaccttcaaaaaaaataataggtattaatatagaaacagctccttatccaggtttcccaactgatctccaggctcaaataatggccttaatgtgtatggcaaatggaccttctacaattaaagaaaaaatttttg

SEQ ID NO: 244221 - DNA, 919 bp, Unknown
  Bacterial polypeptide expressing nucleotide sequence isolated from the Sargasso Sea
accaggcggatgcgccataggttcccgaccagtagatatacacctttttgtattaaaaaaattgggtgcaaaaataaaaattaaaaacggatatattttagccgaaacaaaaaaaggtttaattggaaaaagaattagattaccgtcaatatcagttggggcaactgaaaatgctttaatagcagcaagctatgccaagggtacaacttatttgagtaactgtgcgtgcgagcctgagataaaagatttaacaattttcctaaaaaaaatgggaattaaaattcaatggattggagaaagaaaagtaaaaatatccggaagtcataatttaaaatctgtatctcatacagttatgtttgatagaattgaagcaggaaccttcgtaatagccggggcgttgacaggaaaaaaattaaaaatttctgggatagatacaaaaattttaaaaaaagaaatttcagttttaaaaaagatgaatgtaaaattacgagtaaataaaaatgatataactattttaaattctaaaaatataaaacctgtctcaattagcacacagccatatccgggttttcctaccgatcttcaggcccaaataatggtattaatgaccagagcaaatggaatttcaaaaataaaagaaaatatatttgaaaaaagatttatgcatgttcctgagcttaatcgaatgggagcgaaaataaaaatctctcgtgatacatctttagtttatggaccacaacaattgaacggtgcagaagttatggctacagatcttagagcatcagtgagtttagttttagctggattagcagctgaagacgagacaataattaacagagtttaccatttagatagaggatacgaaaaattagaaaataaattaagaaaatgtaaagctaatatttttagatctaactaa

SEQ ID NO: 244222 - DNA, 922 bp, Unknown
  Bacterial polypeptide expressing nucleotide sequence isolated from the Sargasso Sea
ttgccaattatggttagtgctcttcttactaaaagtcctttaaagttaaaaaatttacctaaacttgatgatattgataatatgtcaaagctccttagaagttatggagcaaacattaaatccaaaaaagataatttagaaataaaatgcaataatattactaacagagatgctgattatgatattgtaagaaaaatgagggcctcaattttgattttaggtccgttactcgctaggtttggaaaagccagaatatccctcccaggaggatgtgcaattggtacgaggccaattgatattcatttagagggtctaaaaaaactaggtgctaattttagtgttgaaaatggttatgttgtaggtgctgttgaagatgaattaataggtaaacatatcactcttccgttcccaagcgttggtgcaactgaaaatattttaatggctgcttcaattgcaaaaggaaaaacaataattgaaaatgcagcaagagaaccagaaattaatgatctagcttttgccttgaacaagatgggcgcaaaaattaatgtaaaaaataatggaattataaaaattgatggagttaattcactaactcaagctacacacaagattatgagtgacagaatagttgctggtacatttgtgatagcagctgtcatgttaaataaaaaatttgaagtaaaagagattattagcagtaatttagaagctttaacatcattattgattaagatgggagcaaaattaaaaattaaaaaaacttctattcaaattatgcctagtaaaaaattaaatggaattaaaattcaaactgccccttatccaggttttccaacagatttacaggcgcaaattatggctttaatgagtttagcgaatggaaattcacaaataaaagaaaatatattgaaaatagatttat

SEQ ID NO: 244223 - DNA, 464 bp, Unknown
  Bacterial polypeptide expressing nucleotide sequence isolated from the Sargasso Sea
tatggataaattgataataaatggcatggtaccccttaatggtgaagtatcagtttctggtgccaagaatgctgttttacctatgttatgtgcttctgtaatggcaagtaatacctgcgttactctaaaaaatattcctcatcttcatgatgtgacgacaactgttagattgcttagacaaatgggagtaagtgtgacacttgatgataagatgaatattgatctagatccatcaacaatcaaaaattattatgctccatatgatttagtcaaaaccatgagatcctcgattttagttttaggtccactattagcaaagtatggtcaagccaaagtttctttgcctggtggctgtgctataggaacaagaccagttgaaatgcatttagaagctctagctaaaatgggtgcatccatagagatagataacggctacataagcgctattgcaaaagaattagtag

SEQ ID NO: 244224 - DNA, 532 bp, Unknown
  Bacterial polypeptide expressing nucleotide sequence isolated from the Sargasso Sea
atggatcgcattctcattcgcggcggcaatcgcctgtcgggccgtctccccatctccggcgcgaagaacgccgcgctgactctgatgccatgcgccttgctgaccgaagagccagtgacgttgcgcaaccttccccgtctggcggatgtggacagcttcggccatttgctcaaccagcttggctgttcgacccgaatcgaaggcgcgcgtcccgaggatttcgggcgcgtcatgacgattcgcgcaggcaagctgaccgccaccgaagcgccctatgacattgtgcgcaagatgcgcgcgtcgatcctggtgctgggcccgctgatcgggcgcgcgggcgaggcacgcgtctcgctgccgggcggctgtgcgatcggcaaccgccccattgatttgcatctgaaggcgctggaagcgattggcgcgcagctcgaaatggcggcgggctatgtgaaggcggtggccccgggcgggcggctgtcgggcggcaaatacaccttccccatcgtctcggtcggtgcgaccgagaatg

SEQ ID NO: 244225 - DNA, 487 bp, Unknown
  Bacterial polypeptide expressing nucleotide sequence isolated from the Sargasso Sea
atggataagctggttgtaaatggcggaagagagctaagaggacgggttaaaatttcaggggcaaaaaatgctgttttacctattatggcatcctctctattggtcgagggtattacagtaataaaaaatgttccaaatcttagagatacaagaacttttattgatcttctaagtattttaggtgcaaaatgtaattttgaaaattcaacacttacaattgatgctaccaatattacttcaattgaagcgccatacgacttagtaaagactatgagagcttctttttatgtaatggggccactactcggtagatttggagaaacaaaagtctcgctacccgggggatgtgcttggggccctagacgtgttgattatcacctaaaaggctttgaaagcttgggagcaaagattgactttaatcaggggtatattttagcgcattatgataatttaaaaggaggtagtatttcatttgagatcgcatcag

SEQ ID NO: 244226 - DNA, 640 bp, Unknown
  Bacterial polypeptide expressing nucleotide sequence isolated from the Sargasso Sea
catggataaattgatcatcaccggtggccagcggttggacggcgacattcgcatttctggggctaagaatgcggcgctgccgattctggcagccactttgttggctgacgagccggtaacggtgggcaacctgccgcatttgcaggacgtgaccaccctgatcgaattgttgggccggatgggtgtccatgtggtgatcgatgaccgcatgaacgtggaagtgaacgccaccaccatcaaggaattgacggccccctatgagctggtgaaaaccatgcgtgcctcgattctggtgctgggtcccatggttgcgcattttggtaaagcatcggtatcgctgcccggcggttgtgctattggctcgcggccggtggatattcacctgcgtggcttggaggccatgggcgcggatatcgaggtgactaacggttatgtgaatgcttctgtggatggccgcctcaaaggagcacgcatcgtcatggatgtggtcaccgtaaccggtaccgaaaacttgatgatggccgcggcgctggccgaagggactacctaccttgaaaatgcagcccgagagcctgaagtggtggatctggccgatttcatcaatgccatgggcggcaagatcagcggtgcgggcaccgat

SEQ ID NO: 244227 - DNA, 796 bp, Unknown
  Bacterial polypeptide expressing nucleotide sequence isolated from the Sargasso Sea
gatggataaattattgataagaggaggttcgccattaaatggagagatctatgcttcaggtgcaaaaaattctgcattaccaattctggcttcttccttattggcagattctcctctaaaggtaggaaaccttcctcatttaaatgatgtaactacaatgctcgaattgttgggttctatgggtgttgatgtcatgttgagtgatgaaatggaagttcaagttgatacttctaacatcaaaaatctcaatgcacgttatgaactagtcaaaacaatgagagcatcgattcttgttctgggacctctattggctaggtttcagcaagcttcagttgcacttcctggtggatgtgcaataggaagtcgacctgtaaatcttcatatagaggctatgcaggcaatgggtgcagaagtaagtattgtagatggaaatatcaaagcaaaagttcatggacgtttgaaaggtgcaagaataatatttgaacctgtaagcgttacaggaacagaaaatgtcattatggcagcgagtttagctgaaggtgtcacaatcatcgaaaatgctgccagagagcctgaagtaatagatttagcaaactgtctcatacaaatgggtgcaaatattaaaggtgcaggaactgacgttattacgatagaaggagttgatagactggaaggtgcaacgtttagtgttatgcctgatagagttgaagttgggacatatctcaccgcagtagccatgaccggtggtttagtaaaaataaaatctgccaaacctcaatacctttcttctgttata

SEQ ID NO: 244228 - DNA, 965 bp, Unknown
  Bacterial polypeptide expressing nucleotide sequence isolated from the Sargasso Sea
cagatcgatggtcgttgtactctcaacggcgaagtgaccatctctggcgccaagaacgccgctctgccgatcctgttcgctaccctgctgtgtgatgaggagatccacctctccaacgtgccgcgcctgaaagacgtgggcaccaccatcaagctgctggagatgctgggcgccaccaccaaggtgaacggcaacgtcaccgtgttgaccggtgcggtgaacaaccatgtcgccccctacgagctggtgaagaccatgcgcgcctccatcctggcgctgggcccgctggccgcccgttttggcgcggctgacgtctccctgcccggtggctgcgccatcggtgcccgtccggtcaacctgcatgtgcacggtctggaactgatgggcgccaagattgccatcgaagatggttacatcaaggcccgtgtcgatggccgcctgaaaggcgcccacatcctgatggacatggtttccgtcaccggtaccgagaacctgatgatggccgccaccctggctgacggccgcactgtgatcgaaaacgccgcgcgcgagccggaagtggtcgatctggccaacttcctcaacgcgctgggcgccaagatccagggcgcgggcaccgacaccctgaccatcgacggtgtcgagcgtctgcatggcggcagctacagcgtccagcccgaccgtatcgaaaccggtaccttcctggtgggcgcagcggtcaccggcggcaagatcacctgccgcaagaccgacccgaccctgctggaagcggtactggtcaagctggaagaggctggcgccctgattgagaagggtgaagactggatcaccctagacatgactggtcgcaccctcaagccggtcaccatcaagaccgccccctacccggccttcccgaccgacatgcaggcccagttcaccgtgctgaacgcggtggctaagggcaccggcatggtcaccgagac

SEQ ID NO: 244229 - DNA, 631 bp, Unknown
  Bacterial polypeptide expressing nucleotide sequence isolated from the Sargasso Sea
aatggaaacgttagataaacttataattaatggaaataaacccttatttggggaggtaaatattagtggagcgaaaaatgcagctctaccacttatgactatttccttattaattgaaaagggttttgaattaaataatgtcccggatttaatagatactcaattaatgaacaaaatgattaatgagttaggtattaaatcttgtaataaattgggtaaaattcaattccatggtaaagctcaaaaaattgaggcctcagaaaacctagtaaaaaaaatgcgagcttcaatattaattttatcccctttattacaatcaaaaaaaatagcaagagtgcctttgccaggtggatgcgctataggcagtaggccaatagatattcatttagaagtaataaaaaaattaggagcaactgtcgagtttaaggataattttttagaagcaaggcttccaaaaatgaacttttttggaaataatattaaatttccaattgtttctgtaggtgcaacagagtgtgctattttagcagctgttttagcaaaaggaaaaaccacattatcaaatgcagcaaaagaaccagaagtagttgatttaggtaattgtttaattaaggcaggggcaagtataaat

SEQ ID NO: 244230 - DNA, 751 bp, Unknown
  Bacterial polypeptide expressing nucleotide sequence isolated from the Sargasso Sea
aatgaaaaaaataattatttatggaggaaaaaaactccatggcagcataagtgtatctggttcaaaaaattcttcattagctattttagcttcatctctgttatttgaaaaaaaagtggttttaaaaaacattcctgtagttgaggatataaagacaatgataaagttattaatttaccttggaaaaaatattaaagttaaaaaaaaaacaattgagataactaattctaaaaaatttggtaaatcatttattgcaccctatgaattagtaaaaactatgcgagcaggtatactggtactaggtccattaatatcaaaatttaaaaaagcaaaagtatctttaccaggtggatgtgcaattggagcgcgtcctatagatttgcatttaaaatttcttaaatcaataggtgtaagaaatcatatagacaaagggtatgttatttctaaattaaataatataaaaaaaaaaaatatatacagattccaaaagatttcggtaggtgcaacaataaacagtattttagctagttgcttaatcccaaataaaattattttaaataatattgctatagaaccagaaattattgatttaataaaatttttaaaaaaagctggaataaaaataaagtttcttagtaatagaaaaattgagatattaggtaaaaaacatttaaaccagatatcttatgagataatgcctgatcgaattgaagcaggtacatatatgattgcttcggccataactaatagc

SEQ ID NO: 244231 - DNA, 633 bp, Unknown
  Bacterial polypeptide expressing nucleotide sequence isolated from the Sargasso Sea
gcacctggacgcgcgcggcccgggcacggtgctcgtggacgcctccgagctcacctcggacgcccccgatccggacgcggtgcggaaactccgcgcgagcttcttcgccgcggggcccatcctcggccgcctcggaagcgtgcgcatgcccctcccggggggatgcgccatcggcgcccgcccggtggacctccacctcgccgcgttcgaggccctgggcgcggacgtcgaggtcaccccggacggcgtcgtgatcgccagggcgacgagccggggcgagggcggcggcgacaaaaaacgcggaggaggcgaacgcggcgacgcgaaccgaccccggctccgcggcgccggcgccttccgcgcgcggtacccgagcgtcggcgccacgctcaacgccgtcgtcgccgcggcgctggcggacggggagacgatcgtggcgaacgccgcggcggagccggaggtggtggacctgtgcgcgatgctcgtcgccgcgggcgcgaagatcgcgggcgcggggacgtccgagattcgcgtcgagggcgtcgcgtcgctgcgcgggtgccgacacgacgccatcccggaccggatcgaggcggggacgctcctggtcgccgcggcgtgcacgcgctcgac

SEQ ID NO: 244232 - DNA, 232 bp, Unknown
  Bacterial polypeptide expressing nucleotide sequence isolated from the Sargasso Sea
gcttcaattagggtagagggtaatacggtaatagtcgaaggggttgattcgctgaagggtgcaccggttatggcaaccgatttgagagcttcagcgtcactcattatcgcaggtctagtttcaggcagcgaaacttgtgtcgataggatctaccatattgatcgtggttacgaatgtattgaagaaaaattacaacttttaggtgcaaaaatcagaagggttccttcataaa

SEQ ID NO: 244233 - DNA, 915 bp, Unknown
  Bacterial polypeptide expressing nucleotide sequence isolated from the Sargasso Sea
cgaatccctcggggtcacgatgaatcgtggcgatggattcgttgaactcaacgcatcaggactgaaccagtcttcacctccttacgacctggtgaatggccttcgggccagctttttctgcattggtcctctgctggcccgcaccggtgtcgcccgcgtcccccttcctggtggctgccaaatcggcgctcgccccgtggttgagcacgtcaaaggtctcaaagcgctcggcgctcaagtcaccatcgagcatggtgttgtctcagcggtggtccccggccgcgggcatcgcctcaccggcggcaagatccatctggattgccccagcgtcggcgccacggaaaccttgatgatggccgccgccctagctgacggcgaaaccaccattgataacgctgcccaggaacctgaggtggtggacctggcaggcctgatcatcgccatgggcggcaaggtccgcggagcggggacacccaccatcacgatcgtggggatggagcgcctgcacggcgctgactacatggtcattcccgatcgcatcgaagccggaaccctgctgctcgcgggcgccattacccgttccaatctgcgcatcacaccgctcattcccgagcatctcggggccgtgctgagcaagttggaagaggctggctgcacgctggaatctgacggcattggcatgaccattgccgctgaacagatccgagctgttgatctgcgcacccaaccatttcccggcttccccaccgacctgcaagcccccttcatgagcttgctggcaacggcccagggcaccagcgtgatcactgaggcgatctttgaaaaccggctacagcacgtcgctgagctgcagcgcatgggagcggccattcgcacccagggcaacacggccttcattgaaggggttccctgcct

SEQ ID NO: 244234 - DNA, 322 bp, Unknown
  Bacterial polypeptide expressing nucleotide sequence isolated from the Sargasso Sea
catgaacgcggttgccgaaggtaccggcaccgtgattgaaaccattttcgaaaaccgcttcatgcacgttcaggaaatgaaccgcatgggcgcgcgtatcctggtcgagggtaataccgccgttgtcaccggtgtagagcagttgaaggcggcgccggtgatggccacggacctgcgcgcctccgccagcctggtgattgcaggtctggtagcagagggcgacaccatggtcgatcgcatctaccacattgatcgcggttacgaatgtattgaagagaagctgcaagccctgggcggtatcatccgccgggtcccagcctga

SEQ ID NO: 244235 - DNA, 957 bp, Unknown
  Bacterial polypeptide expressing nucleotide sequence isolated from the Sargasso Sea
tgtttcttcattgttaagtgataaaaatttaattttaaaaaacgcccctaaagttgatgatattaataatatgcttatgctacttagtggttatggagcaaaagtaataaaaaataaaaattcattaacattaaattgtatgaatataaaaaatatttctgctgattatgacattgtaagaaaaatgcgagcctcagttttaattttaggccccctattatcacgttttggttattcaaagatttccctcccaggcggttgtgcaattggcacaagacctatcaatatacatttagaaggcttaattaagcttggtgcaaatttcaaaattgaaaatggatttattattggaaatgtaaaaaataaattaaaaggaaataaaataaagctaccttttccaagtgttggcgcaactgaaaatattttaatggcttctgttttggctaaaggagagacaattattgatcaggctgcaagagaacctgaaattgaagacttggggaactgcttgatatctatgggagctaaaattcaaggtcttggaacaaataagatattaattcaaggagtagacagcttaaaagaagcaaagcataatataatttcagatagaatagttgcaggcacttacattattttagcaataatgttgaattgcaaatttgaaattaagaattttaatcccaatcatataatttctttaattgatgttcttaaaaatatgggttgtaatttagaattattagatagatcaataaaaatctatcctagtaaaaaattaaaatctacaaatgttgtaacagctccatatccaggttttcctactgatctacaagcacaattaatggccttgatgagtattgtaaatggtaattcacaaataaaggaaactgtttttgaaaatcgttttatgcatgtgcctgaatttagtagattaggtgctaatattaaattaag

SEQ ID NO: 244236 - DNA, 754 bp, Unknown
  Bacterial polypeptide expressing nucleotide sequence isolated from the Sargasso Sea
aatgcaaaaattggaaataacgggtggcaagaaaatctctggatcagttacgatttctggttcgaaaaatgctacccttcctattttggcagccacgatacttacaaacaaaaaaattaccataaccaatgttccaattgtacgtgacgttgaaacaatggtaagactattagactcgctaggttcaaaaattaaattagataaaaaaaaaaaaattataaaaattcgtaataaaaaaagtttaaaaacttatgcatcctacaacctcttaaaaacaatgagggccggcgttctagttctaggacctttattagcaaaatttggcgaagcaaaagtatcattgccaggaggatgtgcaattggttcaagacctataaatattcacctagatgctttaaaaaaaatgggagcaaaagtaaaaataagaaatgggtacattattgcttccgccaaaaaaggtctaaaagggactctaataaaatttcccaaagtttctgtgggagcgactgaaaatattttaatagcttcatgttttgcaaaaggaaagtcaagtttaagaaattgtgctttagaacctgagataaaagatttaattgtttttttaaaaaaagcaggatgtaaaatcaatattaaaggaagaaacattgatgtggttggaaactcagaatttaaaccaataaagcataagggtatttttgatagaatagaagctggcacatatataattgctgcagctctaacaatggaaaattaa

SEQ ID NO: 244237 - DNA, 912 bp, Unknown
  Bacterial polypeptide expressing nucleotide sequence isolated from the Sargasso Sea
aatgactctatctttaattattaataaagattttaatcttcataatgttcctgacttagctgacaccagattaatgtctaacttgttaattgatttaggtattgaaataaactggaaaaaaggaaatttaacctttaatggaaaaccaaaaaaagatgaggcgtcttatgatttagttaggcagatgagagcttcaattcttgttttaggacctttgctagcatcaaaaggttcagcaaaagttcctcttcctggtggttgcgccattggcagtaggcctattgatttacacgttatggtaatggaagcgcttggagcaaatgttacgtttgatagtggttttataattagttctttaaacaatgaaggtttaaaaggtggtgttattaattttcctaaagtttcagtaggcgccactgaaagtgcaataatgactgctgtgttggcaaaagggcaaactaaaatatttaatgcagcaatagaaccggaagttactgacctggcaaattgcttaaaaaaagcaggtgcagatataaaaggtgtaggaactgatattttaataattaatggtgtaaaagaattgaaccaagtttctcattcagtagtgtctgatagaatagaggcaggatcttttgcaatagcatctagtattactatgggtaacgtagaaattaataatattaatcctaaaaatttaactgagtttacaaatgttctcaaattgactggtagtaaagttgaaatttttgaaaattcaattaaagtttcttgttcacaaagacctaaaactcataatgtggagacagaaccttaccctggatttcctacggatttacaagctcaatatatggcactaatggctatagcgaatggaaaaacattaattagagaaactatttttgaaaataggtt

SEQ ID NO: 244238 - DNA, 961 bp, Unknown
  Bacterial polypeptide expressing nucleotide sequence isolated from the Sargasso Sea
gggaaaaagctgacaggctcaataccaatttctggtgctaagaactcatgcctaaccttaatgcctgcctcattgttaagtgaaaatagtttgactttgaataatgcaccatttctttctgatgttgatacgatgaaagaactccttgagagcctcggctgtagtgtatctcatagtaagtctaaaaagaaaattaatttgcacatggtgaatgaaggtacatttctagcagactatgaaatagtaaaaaaaatgagggcatctattttggttttaggtccactattggctcgatttgggcaagcggtagttgctcttcctggtggttgcgctattggcgcaagacctgttaacctacatttgatggcattggaagcactcggagcgagtttttcaatagaaaacggttatatcaagggcaaagtacatagctcgctgaagggttgcaaaatcaaatttccctttgagtcagtcggagcaacagcaaacactattatggcagccgtcctagccaaaggaactacagagttggttaatgtagctagagaaccggaaataaaagatttgtgtgagtgtttaaaatcaatgggttgtcaaattgagggtgcaggagagcacacaataataatacagggtgtaagcaacttaaaagaaactattcatgatgtagtaatggatagaattgaacttggtacctatatgatcgctggcgctatttctgatggagatataaagttgactggtggtaatgttgctttgcttgaaaactttatcgataaactcaatgaaataggtattgaaattaatcaatgcaaagattacttacgtgtgcggagaataaaaaattcgtcaattaactgtactaatatttcgaccgaaccttttcctgggttcccaaccgatcttcaagctcaaatgatggccttattgtctattgctgatggagtttcccaatattgag

SEQ ID NO: 244239 - DNA, 821 bp, Unknown
  Bacterial polypeptide expressing nucleotide sequence isolated from the Sargasso Sea
attgacatcaaaaacactacgtttaaccaatctgcctcatttggccgatatcacgaccatggtccatctgctggccgagcttggcgtcagtgtgaatatggttgaagaagtatcaaatggtgggcatgtgggccgtgtgctgtccctgtcggctaccgaaccccgagataaaacggcgccttatgacctcgtgagacgtatgagagcgtccgttctagtgttgggccctctgttggcgcgctggggagaggccagggtctcactgcccggtggatgcgccattggaacacgcccagtggatttgcacttggacgctttaaaggcgctcggtgccgaaattgagctggcggagggctatatacgggctgttgctcaccggggcctgaagggcaataaagtgcattttccatcggtttctgttggggcgacggaaaacgccctaatggcagcggtcttggcggacggcgaaacgattattgcaaacgcggccagggagccagaggtgggtgatcttgcccattgtctgattgcaatgggtgcaaaaatttcaggcgttggcacggacaccttgttcgtgagtggggtctcgcaactaaatggagcagaacatcgcgtaattccagaccgcatcgagaccggaacctatgccgttgcctctgccataaccggggggaatattctcctggagggtagccatatggagttgatcggggcggtctcagatacgctgtccaaagccggcgtggaggtcaccgaggagaaagttgggattcgggttcggcgccattcagaaaaaaccctgggaacggatgtcatgactg

SEQ ID NO: 244240 - DNA, 742 bp, Unknown
  Bacterial polypeptide expressing nucleotide sequence isolated from the Sargasso Sea
atgaaaaaaataattatttatggaggaaaaaaactccatggtagcataagtgtatctggttcaaaaaattcatcgttagctattttagcttcatctatgttgtttgaaaaaaaagtggttttaaaaaatattcctatagttgaggacataaagacaatgataaagttattaatttatctcgggaaaaatattaaagttaaaaaaaaaacaattgagataactaattctaaaaaatttggcaaatcatttatcgcaccctacgaattagtaaaaactatgcgagcaggtatactagtactaggtccattaatatcaaaatttaaaaaagcaaaagtatctttaccaggtggatgtgcaatcggtgcacgtcctatagatttgcatttaaaatttcttaaatcaataggtgtaaaaaatcatatagataaagggtatgttatttctaaattaaataatattaaaaaaaaaaatatatatagatttcaaaaaatctcggtgggcgcaacaataaatagtattttagctagttgcttaattccaaataaaattattttaaacaatattgctatagaaccagaaattattgatttaataaaatttttaaaaaaagccggagtaaaaatacagtttcttagtaatagaaaaatagagatattgggtaaaaaaaatttaaatcagatatcttacgagataatgcctgatcgaattgaagcgggtacatatatgattgcttcggcgataa

SEQ ID NO: 244241 - DNA, 721 bp, Unknown
  Bacterial polypeptide expressing nucleotide sequence isolated from the Sargasso Sea
ttaggtgcaaaaattaaaataaaagatggatatatattagctgaagcaaaaagaggacttgttggtgcaaaaattaaatttccatctatttccgtcggagcaacagaaaatgctttaatagcatcctttaacgcgaaaggaacaacaatcttaaaaaattgtgcaatagaaccagaaataaaagatttgatttcatttctaaataaactaggggcaaatataaatttaaaaggtagaacaatctctataaaggaaagtaaatctaaaagtttaaaaattcatcatcaggttatttttgacagaattgaacttggtacctatatgatagccgccgcattattggcaaaaaaaaaattattaattgataaaattgatactaaaattgttaaatgtgagatagatattttaaaaaaaataggtgttagaatgataataaagaaaaattctataattattaaaaagggaaagagactaaaaaaaattaacataattacaaaaccatacccaggttttcctacagatttacaagctcaacttatggttcttcttacccaggcaaatggcgtatctaaaataaaagaaaacatattcgaaaatagatttatgcacgtgccagaattgaaaagaatgggtgcagaaattgaaataaaaaataaaacagcgattataaaaggacctacactattaactggagctgaagtaatggctactgatttaagag

SEQ ID NO: 244242 - DNA, 523 bp, Unknown
  Bacterial polypeptide expressing nucleotide sequence isolated from the Sargasso Sea
aatgggaaaaattacaatcaaaaagattgactcagctagaatgggctcaattatagaaactcttcaaaaagccggggccgaagtgtgtttaaacgaaaattctatttcactagatatgacgaaaaatactataaagcctgttgatattgtcacagctccttttcctggatttccaacagatatgcaagcgcagtttactgttctaaactgcatcggaaacggcgaatccagtgtaaaagagactatatttgaaaataggtttatgcatgtgcaagagcttaatagaatgggtactgatattacaattaatggaaccactgcgctaattaatggagttgattctatttctggggctcaagtaatggcaacagatttaagggcatcagcaagtttgatattggcgggacttatagcaaaaggagaaactattgtagataggatttatcatattgatagaggctatgaaagaatagaagaaaaattatcaaatcttggtgcagaaataataagattacctaattag

SEQ ID NO: 244243 - DNA, 805 bp, Unknown
  Bacterial polypeptide expressing nucleotide sequence isolated from the Sargasso Sea
aagaaaaatttaacaggtgttataaaggtatccggttcgaaaaatgccacattaccaattttggcagcctcaatattaaatgataatcgtatagaattaaataatgtgccattagtaaatgatgtttttacaatggtaaagttactgaagcacattggctcaaatattaagatagatttaaaaagaaaaaaaatttttatacataataagaataaaatatttaaaactttagctccttacagtttgcttaaaaccatgagagctggggtgatagttttaggcccgcttttatctaagtttagagtagccaaggtgtccttacccggaggttgtgcaatcggtacaaggccagttgatattcatctttttggattaaaaaaattaggtgcaagaataaaaataaaaaatggttatattttagccgaagcaaaaaatggtcttattggaacaaaaattagacttccatcaatatcagttggggcaacggaaaatgtaattattgcagcaagttatgctaaaggtattacttatattaaaaattgtgcatatgaacctgaaattttaaatctaattgattttttaaaaagtatgggcgtaaaaatagtttggttaggaaaaagatatattaaaatagtaggcaataaggatttaaaatctttaaagcatcaaattatgtttgacaggattgaggcaggaacgtttattattgcgggtgctttaacttcaaaaaaattggtagtgagtaaaatagttccaaaagttattaaaaaagagcttaaaattttaaaaaagaatgggtgttaat

SEQ ID NO: 244244 - DNA, 730 bp, Unknown
  Bacterial polypeptide expressing nucleotide sequence isolated from the Sargasso Sea
tcattattaagtaatcaaaatttaaccttggagaatattcctaatgttgctgatataaataatatgttaaaattattagagggttatggtgttaaaataattaaaaacaaaaactcattaataataaatagcaagaatttaaaaaatatttctgctgattacgacattgttagaaaaatgagagcatctgttttaattttaggacccttgctatctcgttttggaaattgtaaaatttctcttcctggtggttgcgctattggaacaagaccaattgatatacatctaaaaggacttaagaagttaggtgcaaaatttgaaattgaaaatggatttgttgttggtcaagtttctaaaaacttaataggaaataaaattaaatttccctcaccaagtgttggtgcgactgaaaatattttaatggctgcagtaatggctaagggagaaacttttatagatcaggcagcaagagaacctgaaatagtagatttaggaaatttcttgatatctatgggtgctaaaatagaaggactcggatctaataaaatttatatccaaggtgtagataatcttaaagaaacaaaatataaaataatatctgatcgaatagttgctggaacatttataattttagctgtgatgattaattctaaaattcatgtcaaaaactttaaccctaatcatttaaaatcattgataaacattttaaaaaaaatgggtgcaaatatgg

SEQ ID NO: 244245 - DNA, 934 bp, Unknown
  Bacterial polypeptide expressing nucleotide sequence isolated from the Sargasso Sea
aaggctaaagtatcacttcctggtgggtgtgctataggatcaaggcctgtagatttacatttgtacgctttaaaaaaattaggggcaaaaattaagattaaagatggatatattatagctgatgccaaaaaaggattagttggtacgaatattaaatttccatctaattcggttggagcaactgaaaacgctttaattgcagctcatggcgcaaaagggaaaactaccctattaaattgtgcagttgaaccagaaatattagatcttatatcgtttcttaagaaattaggaagtaaaattaaaatttcaggaagaaaaattactattaccaggagagaaattagtagaaaaaaaattaatcataaggttatttttgacagaatagaagcaggaacatatttggttgccagcgctttaataggaggaaaaattactataaaaaaaattattcctaaaattttgaaaaatgaaataaatattttaaaaaaaatgggggcacatataattttaaataaaaattctattacaatcaaaaaaacaaataatttaaaaaaaattattgtctctactaagccataccctggttttccaacagacttacaagctcaattaatggttttgatgacacaagctaaaggtttgtctaaaattaaagaaaatatttttgaaaatagatttatgcacgtccctgaattaaaaagaatgggagcaaaaatagaaataaaaaataaaatggcttatatatacggcccaacaaaattaactggagcagaagtaatggctaccgatttaagagcatctgtaagtttggttttggctggtttgatagcagataaaaggacaacaattaacagaatttatcatctagatagaggttatgagtctttagagagaaaacttaaaaattgtggcgcagagattaaaagaatttaaa

SEQ ID NO: 244246 - DNA, 733 bp, Unknown
  Bacterial polypeptide expressing nucleotide sequence isolated from the Sargasso Sea
tttggcgaaaggaacaaccacaattaaaaacgctgctagtgagcccgagatctcagatttgtgtctcttcctaaataaaatgggggcaaaaatcactggctttggtagtgatacagttataattcagggtgtagattctcttaagggtactaaacataaaccactgcctgatagaattgaagcagggacatttatggtagcggcggcaattacaaaaggtgacattgaaataaataacattgtcccagagcatagtcgtgcagtgatagataaacttatccaatcaggagcagatataaaaatactcaaagattctgtgagggtaaaaatgaaaaaaagacccaaggctataaatattgagactaacgcgtatccttttttccccacagatatgcaagctcaaatgactgcattaaactgcattgcagatggagatagctctgtaaaagaaaatatttttgaaaatagattcatgcatgcacaagagctcataagaatgggtgcaaatataagagtacatgataacattgcagaaatatctggtagtgaagagttacttggcgcacctgtgatggctactgatctgagggcttcagcaagtttgattttagcaggccttgcagcaaaaggtgtcaccgagattggcagggtttatcatattgatagaggatatgactgtattgaagaaaaacttcagttaattggtgctaggatttcaagaaaacctatgtaa

SEQ ID NO: 244247 - DNA, 733 bp, Unknown
  Bacterial polypeptide expressing nucleotide sequence isolated from the Sargasso Sea
aaaattaaaataaaaaatggatatatagttgcatcggcaaaaaaaggtttaaaaggttgtttaattgaatttcccaaaatatccgttggagctactgaaaatattttaatatctgcatgtttagctaaaggcaaaactaaattaagaaattgtgcttctgaacctgaagttagagatttaattagttttttaaaaaaaattggatgtaagattaatatggttggaaaaagaagcatagatgtagttggggtaaataaattaaaatcaacagtgcataaagtcatttttgatagaattgaagctggcacttatattattgcttctgccttaacagatggaaatttaaagattaaaaacatagatccaaaaattatatcatgtgaagttagtttattaaaaaaaatgggtgtaaaaataattacaaaaaaaaattatttaacagtgaaatccgcaaaaaatttaaaaagcgcttacatcattactaaaccataccctggttttccaacagatttacaagctcaaatgatggtgttaatgaccaaagcaaacggaatatcaacaataagggaaaatatatttgaaaatcgttttatgcatgtttctgaattaagaagaatgggagttcgtatagatacaaatggtagtaaagctaaaatttatggaaagcgcaaactaaacggagcagaattaatggctactgaccttagagcgtctgttagtttagttttagcag

SEQ ID NO: 244248 - DNA, 800 bp, Unknown
  Bacterial polypeptide expressing nucleotide sequence isolated from the Sargasso Sea
tggtacaagtatgagatttccatccatatctgtaggagcaacagaaaatgttataatagcagctagttttgccaaaggaacaacgtatttaaaaaattgtgcttgtgaaccagaaataaaaaatttgaccgattttttaaaaaaaatgggaatcaaaataacttggttaagtaaaagaaaaataaaaattataggaaatcaaaaattaaaagcagttagtcacaatgttatgtttgatagaattgaagcgggtacttttattatcgcaggagctttagcaagtcgaaatctaaaaattgtgggcgttgaaaccaaaattcttaataaagaattaaaagttttaaaaaaaatgggagtaaaattcaaaataaagaaaaacgaaattaaggttttggattccaaaaatatcaggtcagcctatatcaaaacagaaccatatcctggttttccaactgatctacaggctcaaattatggttttaatgacaaaggccaaaggaatttcaaaaataaaagaaaatatttttgaaaatagattcatgcacgttcctgaactgaacagaatgggtgcaaaaataagaacttcaggaaactcatcttttattcatggtccgcagaatttgaatggagcagaagtaatggccacagatttgcgagcttctgtcagtttagttctggcagggttaattgcaaaaaataaaacaattgtgaacagagtttatcatttagatagaggttacgaagaactagaaaaaaaacttagaaaatgtaaagcaaatatttcaagagtttatagctaat

SEQ ID NO: 244249 - DNA, 895 bp, Unknown
  Bacterial polypeptide expressing nucleotide sequence isolated from the Sargasso Sea
ccagttgatattcatcttttcggactaaagaaactaggtgcaaaaataaaaattaaaaatggctatattcaagctgaagctaaaaatggacttgttggcacgaagattaaacttccaaagatttcagttggagctacagaaaatttaattatagcagcctgttatgctaagggcacaacaattttaggaaattgtgcgtgtgaacctgaaataaaagacttaactaattttttaataaaaatgggtgcaaatgtaaaatggacaaaaaaaagagaaattaaaatagttggcagtaaagaatttaaaccagtaaaccatgcagtaatgtttgatagaattgaagctggaacctttataattgctggcgcattaattgcaaaaaaacttaaaattacgggtatagacacaaatatactaaggaaagagataaaaatattaaaaaaaatgggtgttaaattaaaaataaaaaaaaatgaaattacaatttttaattcaaaaaacattaaacccacattcattaaaacagaaccttacccaggttttcctaccgatcttcaggctcaaataatggtacttatgacaaaatcaaacggagtatcaaaaataaaagaaagtatttttgaaaatcgctttatgcatgttcctgagttaaatagaatgggagcaaaaataaaagtatatggcaacatatctaaaattgaaggtttaaaaaatttaaatggagctgaggttatggcaacagacttaagagcctcggtaagtttagttttagctggtctaattgctaaaaatagaacaattataaatagagtttatcatttagatagaggatatgaaaatttagaaaataaacttaaaaaatgtggcgctcatatttctagagtaaattattgat

SEQ ID NO: 244250 - DNA, 891 bp, Unknown
  Bacterial polypeptide expressing nucleotide sequence isolated from the Sargasso Sea
taagtggtgcgaaaaatgcagtacttcctgtaatggcagctacattattggctcctgggaaatattcaattgagaatgttcctgacttgcgagatacaaggacaatgatgaagcttttgaatattattggtgcaaaaacaatatttgataaaggattattgaatattgattccacacctgcaaataatccagaagctccttatgatctggttaagacaatgagagcatcgttttatgttttaggtccattgatatctagattcggtagagtcaatgtgtctttgcctgggggttgtgcatggggacctaggccagttgattatcatctgaaaggtttagaacagttgggagctaaattaaaccttgatggtggtaatattcatgctgaagcaaaagagataataggaaatgatatacattttgaatttccttctgtaggagcaacaggaaacctcgcaatggctgcagtaaaggctagcggaactactaggctttataattgcgctaaagagcctgagataacacaattatgtgagtttttaaatagtatgggtgccaatattgaaggtataggaacagaaaccctaattattcatggagtagatgaacttcattctgcagacatagatattattcctgatagaattgaagctgggacatttttaatggctggggcgttattaggtgaaattgaagttagcgacattattccaaaacatcttgataaggtggttcataaattgcgtgaaacaggatgtttattaaaaataaatcaaaaaagtattataattactccccctgaaaaaatcaaacctatcgatatgacaaccgctgtatatcctggttttccaacagatttacaagctcagtgggttgcaattattctctagc

SEQ ID NO: 244251 - DNA, 726 bp, Unknown
  Bacterial polypeptide expressing nucleotide sequence isolated from the Sargasso Sea
caatgattactctattggagtctatgggaatagagacaaataaaaactacaaaggttctcttacattaaattcctctggaattgattcaagatttgcatcatatgaacttgtcaaaacgatgagggcttcaatcatggtccttgggccattgctcgcaaagtatggagaagcgaaagtctctttgcctggaggttgcgctattggagctcgaccggttgatctccatatacagggattagaaaaattgggagcgaggatagaaatcaaggatggatatctactggcttcagcagatcgattgataggttcgtcatattgttttccaaaaaagagtgtaactggaacagcaaatattttgatggctgcaaccttagcagagggagaaacaaagattgtaaattcagcttgtgagccagaaatcattcaacttggtgagcttcttaatgccatgggagcaagaattgaaggcctaggagaagattgcataacaatacaaggagtagaaaaccttgtgggcgctgaaattgaaattattcctgatcgaatcgaggcaatcacaatgattattgccggaatcataacccaaggtgaaatcgagattgaaaatatcaatccttcacatatagaggaacctattaagttgatcaggcaatgtggcgcaattcttgagatatctgatcagagtttatttgtgaaaggctctgatgagattcttccccattagt

SEQ ID NO: 244252 - DNA, 733 bp, Unknown
  Bacterial polypeptide expressing nucleotide sequence isolated from the Sargasso Sea
tattaaagctaaaggcaaaactatcctaaaaaattgtgcagttgaaccagaaataattgatttaatttttttcttaaaaaagttaggcgcgaggataaaaatcaatggacgaacaattactatacttgaaagtaaaattaaaaactcaaaaattactcataaagttatttttgatagaatagaacttggcacctatatgattgctggcgctcttttagcaaaaaaaaaattatcgattaatggtattaatcctaaaattataaaaagtgagatagatgttttacgaaaagtagggactcaaatattaactaagaagtcatcgatcataatcaaaagaaataaaaaattaaaaaaaataaatttaacaaccaaaccttatccaggttttcctactgatttacaagcacaattgatggtacttttaacccaatcttatggaacatctaaaattaaagaggatatatttgagaatagatttatgcatgtgccggagttaaaaagaatgggagcgaatatagagataaaaaataaaactgctactattaaaggaccaacaaaattaactggtgcagaagtaatggcaaccgacttgagagcatccgtaagtttagttttagcaggtctagttgctgaaaatagaacaataataaatagaatctaccacctcgatagaggttacgaatttttagaaaaaaaactgaaaaattgtaaagctgagattaaacgaatttga

SEQ ID NO: 244253 - DNA, 565 bp, Unknown
  Bacterial polypeptide expressing nucleotide sequence isolated from the Sargasso Sea
gatagaatagaggccggcacatatattatcgctgcagctataactaaaggtagaataaatatattaggcattaatccaaaaataattaaaactgaactagatatattaaaaaaaattggagtaaaaattaaaatagaaaaacaaaaaataaaaattatcggaggacaatttataaaaagtattaacttgaagactgcaccttatccaggctttccaacagatcttcaggctcaattaatgacattgctatgtaaggcaaagaagcactcaataatatgtgaacaaatatttgagaacagatttatgcatgttggcgaattaaatagaatgggtgccaaaataaaaacaattggtaataaggcgataatatcaggcaatacttattttaaaggtgcagaagttatggcaacagatttaagggcctcagtttcattagttctagccgcactcacttgtaaagaaagatcaataattaatagaatatatcatttagatagaggttatgaagaaatagaaaaaaaattaagaaatgttggagcaaggattagaagaatttctaaatgaa

SEQ ID NO: 244254 - DNA, 655 bp, Unknown
  Bacterial polypeptide expressing nucleotide sequence isolated from the Sargasso Sea
aaaatgggatgtaaattaaaatgggtctctagacggtctattaggattgatggggtagataaaactaaaaaaacaatttataaaattatgtttgatcgtattgaagctggaacatacttagtagcagcgtcagtaactgaaggagatttaagaattaaaaatataattccacaaataattaaaactgagattgatactttaagaaaaattggggcaaaaattacatataaaaaaaacgaagttcatattattggaaaaaaaaaggtaaaaaatataaatttaaaaacagctccttacccaggtttcccaacagatctacaggcccaaattatggttttattgtgtaaaggagataaaaaatcggtgattactgaaaatatttttgaaaatagatttatgcatgtagcagagctaaaccgaatgggcgcaaagatttcaattagaggcaataaagcttttgtagagggcaaaattaagtttgcagcagcagaattaatggctacagatcttagagcatctgtttctcttattcttgctgcactatcttcaagtggtaaatcaattattaatagaatttatcacttagatagaggttatgaaaatttagagagaaaacttaaaaaagtaggagctaaaatcagaagaataaattaat

SEQ ID NO: 244255 - DNA, 448 bp, Unknown
  Bacterial polypeptide expressing nucleotide sequence isolated from the Sargasso Sea
atggataagctggttgtaaatggcggaagagagctaaaaggacgggttaaaatttcaggggcaaaaaatgctgttttacctattatggcatcctctctattggttgaaggtattacagtaataaaaaatgttccaaaccttagagatacaagaacctttattgagcttctaagtattttaggtgcaaaatgtaattttgaaaattcaacacttacaattgatgctaccaatattacttcaattgaagcgccatacgacctagtaaagactatgagagcttctttttatgtaatggggccattactcggtagatttggagaaacaaaagtatcgctacctgggggatgtgcttggggccctagacctgttgattaccacttaaaaggctttgaaagcttgggcgcaaagatcgaccttaatcaggggtatattttagcgcagttctgat

SEQ ID NO: 244256 - DNA, 244 bp, Unknown
  Bacterial polypeptide expressing nucleotide sequence isolated from the Sargasso Sea
atggataaatttcgtgtacaggggccaacgcgcctccagggcgaagtcacaatttctggcgcaaaaaacgccgcgctgccaatcctctttgctgcgctgctggctgaagagccggtagaaattcagaacgtaccgaagctgaaagatatcgacaccaccatgaagctgctcacccaactgggcacgaaagttgagcgtaacggttccgtctggatcgacgccagcaaggtgaacaactttcagc

SEQ ID NO: 244257 - DNA, 439 bp, Unknown
  Bacterial polypeptide expressing nucleotide sequence isolated from the Sargasso Sea
agttttgatgataattctatttctatctctatgaataaggatcgtccagatccagtagatataactactgctccatttcctgaatttccaacagacatgcaagcacaattctcagttataaatgctatatctagaggagtttcaaacatttatgaaaccgtttttgaaaatagatttatgcatattttagaacttaacaggatgggatgcgatattgaagtgaagggcaatcatgcaattattaatggagttgagtcaatttatggagcagaagtaatggctactgatttaagagcttctgcgagtttaattcttgcaggcttgtgtgcgaaaggagagacggttgttgatagaatctatcatatcgatagaggttatgagcgtattgaggagaaattgaattatttgggtgcaaatattgtcaggcttccttcttagg

SEQ ID NO: 244258 - DNA, 580 bp, Unknown
  Bacterial polypeptide expressing nucleotide sequence isolated from the Sargasso Sea
atcttactcggttatgtttgatagaatagaggcgggaacatatttgatcgctgcagcagtaactaaaggccacttaaaaattaaaaatgttattcctggaatattaaagacagaaattaaagttctcaaaaagttaggctcaaaagtaaatgtcaaaaaaaaagaagttgaaatttttggaagtaaaaaaactaagtgtattaaaataaaaacagcgccatatcctggatttccaactgatctacaagcacaaattatggtcttattatgtaaagcgaataaaagctcaattgttcaagaggatatatttgaaaatagattcatgcatgttgctgagttaaatagaatgggagctaaaattaaaattaatggtaataaagcaacgttgaagggaaatattaattttgcaccagcagaattaatggcaacagatttaagagcgtctgtctcattaatcttagcagcattaacagcaaaaggaaaatcagttatcaatagaatttatcatttagatagaggttatgaaaatatagaaaaaaagttaaaaaaagttggtgctaaaatcaaaagagtgaattaa

SEQ ID NO: 244259 - DNA, 847 bp, Unknown
  Bacterial polypeptide expressing nucleotide sequence isolated from the Sargasso Sea
atgcaaaaaatattgataaatggaggaaaccttctccagggttctgttcctgtcagtggatcaaaaaatgcatctctaccaataatggccgcaagtattcttactaatgaaaatttagaactcgaaaacgtaccagatttagttgatgtaaatacaatgtcagcagttttatcatcgcttggtgtcaatgttacaaaaaaagatgctaaaacaaatcgtcttacactttgttattcagactctgaaagtacaatagcggagtacgatttagttagaaagatgagggctagtatattagttcttggaccattacttgcacgcaaaagacacgctagcgtatctcttccaggggggtgcgcaataggtgctcgaccagtagatttgcacatagatgcattgacgaaacttggcgcagcatttgaattagatggtggatatattaaatgtagcgctcctaatggcttaaaaggaaataaaattaatttttcaaaagtatcagtaggagctactgaaaacataattatggctgcatctcttgctagaggagaaagtgaaattagaaatatcgcaattgagcctgaggttatggaccttatagactgtcttaataaaatgggtgctaaaatcgaattaggagaaaatagaaatgttcacattcaaggtgttgaccaactccaaggcactgtccactcgattatccctgatcgcatagaggcaatcacatacataattggaggaactataattggtaacgatctcaagattacaaatctgaaccttgagcatatcagcaatgtattggaattattgaatgagttgtctattaattactcaatgggtgagaata

SEQ ID NO: 244260 - DNA, 451 bp, Unknown
  Bacterial polypeptide expressing nucleotide sequence isolated from the Sargasso Sea
tatggaaaaacttagaattgttggcggaaataaactctcgggaactatttcttgctctggtgcaaaaaatgcagctttaccgatgttggctgcaactatattaaccgacgaacaaattacttttaaaaatttaccttacctccaagatattactacaatgtttgaaattttaggttcaatgggagctgaaattactctaaatgagtgcatggactttataatttcaacatcaaaaatccatgattttgaagctaggtacgagttagtcaagactatgcgcgcttcaattttggtattgggttctcttgttgctcgtcatggttttgcaaaaattgctctccctggtgggtgcgcaataggaacaagacctgttgactttcatttggatgcattaacaaaacttggtgcaaagattgaattaaaaaatggttatattgaagctacagcaaaa

SEQ ID NO: 244261 - DNA, 762 bp, Unknown
  Bacterial polypeptide expressing nucleotide sequence isolated from the Sargasso Sea
tatggataaactgatcattaccggcggcgctcgcctcgatggcgaaatccgcatttccggtgcgaagaactctgctctgccgattctggcagccaccctgctgggcgacgcccccgtcaccatctgcaacctgccgcacctgcatgacatcaccaccatgatcgaactgttcggtcgcatgggcatcgagccggtgatcgacgagaagctggcggtggaagttgacgcccgcgccattaagaccctggtcgcgccttacgaactggtaaaaaccatgcgcgcctcgattctggtgctcggccccatggtcgcgcgtttcggtgaggccgaagtggcgctgccgggcggctgcgccatcggttcgcgtccggtcgatctgcacatacgtggcctggaggccatgggcgcgatcatcgatgtcgaaggcggctacatcaaggccaaggcgccggaaggtggcctgcgtggtgcgcacttcttcttcgatgtggtcagcgtgaccggcaccgagaacatcatgatggccgcgaccctggccaagggccgcagcgtgctggaaaacgccgcgcgtgagcctgaggtggtcgatctggccaattgcctgatcgccatgggcgcgaagatccagggtgccggtaccgacaccatcatcatcgacggcgtcgagcgtctgcatggcgcgcgtttcaacgtcatgcccgaccgtatcgagaccggtacctacctggtggccgctgccgttaccggtggtcgagtcaaggt

SEQ ID NO: 244262 - DNA, 658 bp, Unknown
  Bacterial polypeptide expressing nucleotide sequence isolated from the Sargasso Sea
gatgggagcaaaaattaatggagcaggttcagataagatcactatccaaggcgtcgaaaaacttagaggaacctcttttgaaatacctgctgacagaatagaagctggaacttatcttgcagctgcagcagtaactaaaggagatataaaaattgaaggtattaacccaaatagacttatgaaagttattgataaattaattaatactggtgcaaaagttgactatgatgaagattccatttcatttatcatgacagatgatattcctgatccagtagatatcacaacagctccatttcctgaatttccaacagatatgcaagctcaattttctgttataaatgcaatttcaagtggtactgctaatatttatgagactatttttgaaaatagatttatgcatattcttgaactaaacagaatgggatgtgatatttcggttaatggtaatcatgcaataattaaaggagtgaagtcattatatggtgctgaagttatggcaacagacttaagagcatctgcaagcttaatacttgctgggctatgtgctaaaggtgagacagtcgtcgatagaatttatcatatagatcgtggatatgaaagaatagaagaaaaattaaattatttaggtgcagatatagaaagacttcctagttag

SEQ ID NO: 244263 - DNA, 505 bp, Unknown
  Bacterial polypeptide expressing nucleotide sequence isolated from the Sargasso Sea
atcaataaaattgattcatctagaatgggaaacatgattgaaaaatttcagttaatgggtgcgtttgttgaattaaaagaaaatactatccatatcatgatggagaagaatattgagccagtagacgttattactgagccttttccaggatttcccacagacatgcaagcacaatttacactaattaattctattgcaaatggtagtgccactgtgacagaaaaaatatttgaaaatcgtttcatgcatgttcaagaacttgtacgcatgggttgtgatataacggtaaatggaaacagcgcccttataaatggagtgaaaaagatttatggagcgcaggttatggctacagatttgcgggcatctgcatgcctgattctagcaggtttatgtgccgagggagagacaattgttgacagggtataccacattgataggggatatgagcgtattgaagaaaaattatctttccttggagcaaatattgagagattgcctagataga

SEQ ID NO: 244264 - DNA, 978 bp, Unknown
  Bacterial polypeptide expressing nucleotide sequence isolated from the Sargasso Sea
gcctagcaatggagttgtggaattagaaaatgtacctcatttacaagacgttacaactactacaaggttattaacacagatgggtgtaagcgtcagtatggacgaatttatgaacattagtcttgatccatcagcaattaataatttttatgctccttatgatttagtaaaaacaatgagatcatccatactagttttaggaccattgcttgcaagatttggtgaagcaaaagtctctctccccggtggatgtgctataggattgagaccagtggacatgcatctaaaagcacttgaaaaaatgggcgctgaaattaaagttgagagaggttatatcactgcacaatcaaaaagattaaaaggggctaatataacttttgacaaaaaatcggttactggaacagaaaatattataatggccgcttcattagctaaaggattaacgaaaattaataatgctgctaatgagccagaaatttcagatttatgtctgtttttaaataaaatgggagctaagataagtgggcatggcactgacgtaattgaaattaatggagtagatgcactaaagggaactaagcatcaaccattgccagatagaatagaagcgggaacttttatgatagcagctgctataactagaggagatgtagagataaacaatattgtgcctgaacattctaacgcagttattgaaaagctcatagaagctggagcagaaattacctctacaaataattctataagagtgaaaatgagacaacggccaaaggctgttaacatagagactaatgcttacccatattttctcacagatatgcaggctcaaatgaccgcactaaattctcttgcaaaaggcgagagtttcgttagagaaaatatatttgaaaatcggttcatgcatgttcaagagctcgaaagaatgggcgcttcaataaaggttaatgataacaccgctacaatatctgggacaaaaaa

SEQ ID NO: 244265 - DNA, 514 bp, Unknown
  Bacterial polypeptide expressing nucleotide sequence isolated from the Sargasso Sea
aaggtcaagataaaatctgctaaaccagaatctctatcttctgtaataactaagctagagtcatcaggtgctattatacagactggagaagattgggttgaaattacaatggaaagggataggcctatttctaccagccttactacaggcccttatccttcctttcctactgacatgcaagcacagtttgtggcattaaattctattgcaagaggaaattctactgttactgaaacggtttttgagaatagattcatgcatgtacaagaaattgcaagaatgggaggagatattactctgaagggcaatacagcagtaattgaaggaattgaaacacttataggtgcacctgtaatggctactgatttaagggcttcagctagccttgtgctagctggtttagtagctaaaggctctaccattatcgataggatttatcatattgatagaggctatgaaaggattgaagagaaattgaagatgctaggtgcggatatagaaagaatttcttaat

SEQ ID NO: 244266 - DNA, 813 bp, Unknown
  Bacterial polypeptide expressing nucleotide sequence isolated from the Sargasso Sea
gatgcattgaagaaattaggagtaaatataaatgttgataatggctttgttaaagcggaagtaaaagattttttgaaaggtaataatattaatttatcatttccaagtgttggggctactgaaaatttattaatgtcatctatttttgccaaaggtgaaactataattaataatgcagcaagggagcctgaagtagttgatttggctaaatgtttaaaatcaatgggcgcagacataaaaggtgaaggaactaacgaaatcaaaatcaaaggtgttttgaagttaaatgaatctaaacatgaaataataagcgatagaatagttgcaggaacttatataattgctgctgttatgttaaatagtgaatttgaagttaaaaatataaaaactgaacatattgaatccttaacagttcttttaaaaaaaatgggtgctaatttaatagttaataaggatgcaataaaaattttaccatcaaataaccttaaaggaacattcatagaaacggctccttatcctggattcccaactgatttacaggctcaaattatggcattaatgagcattgtaaaaggaaactctgaaattattgaaaagatttttgaaaatagatttatgcatgtttctgaattaaatagattaggagcaaatataaaaatacataaacaaaaagctataattactggaggtagaaattttaaaggagctcaagttatggctagcgaccttagagctagtgtgagtttagttttggcaggattgtgtgcttcaggaactacaactataaatagggtttaccatttagatagaggc

SEQ ID NO: 244267 - DNA, 877 bp, Unknown
  Bacterial polypeptide expressing nucleotide sequence isolated from the Sargasso Sea
gcaagatatgaacttgtaaagactatgcgagcttctatcttagttctgggatctatggtggctaaatatggatatgcgaagatcgcattgcctggaggatgcgctatcggaagtcgtcctgtgaattatcaccttaaagctcttgaaaaacttggtgcagaaatatctctcaataatggatatattgaggcaaaagctaaaaaattaactggagcaaatatagagtttgagggtgttactgttacgggcacagaaaacctaatgatggctgcttcactagctgagggattaacaactttaacaaatgttgcaaaagagccagaaatttctgatttagcagattttttaaattcaatgggagctaagattaaaggagcaggaacagatgagattaggattgaaggtgtggaaggattgactggtacaacttttaaaattcctgcagatagaattgaggcaggtacatatcttgtagcagcagctattacaaatggaaaaattataatcaacaagattgatccaaaaagaatgggctcaattatagaaactcttcaaaaagctggtgctgaagtgaattcaaatgggaattctatttcccttgatatgacgaagaatgctataaagcctattgatatagttacagctccgtttcctggatttccaacagatatgcaagcgcagtttactgttctaaattgcattggaaaaggaaaatctagcgtaaaagagactatttttgaaaatagatttatgcatgtacaagagctcaatagaatgggtactgatattacaattaatggaaccactgcactaattaatggagttgattctatttctggggctcaagtaatggctacagatctaagggcatcagcaa

SEQ ID NO: 244268 - DNA, 505 bp, Unknown
  Bacterial polypeptide expressing nucleotide sequence isolated from the Sargasso Sea
aattatacgaaatattaaatctaatattattagcactgagataaatattttaaaaaaaattggcgtaaaaattaaagttaaagaaaatgaggtaagagtgaacggaacaaaaaaaataagaagtataaaactaaaaacagcaccgtatccaggttttcctacagatttgcaagcccagttgatggttttactatgtaaggcagatggaatttccgaaataaacgagcaaattttcgaaaatagatttatgcacgcatcagaactaaatagaatgggagcaagaattaatatagttggaaataaagccattataatgggcaatactaattttgaagcagcagaattaatggcaacagatcttagagcatcagtttccttaattcttgcagcactgacctccaagggtaggtcaagaattcataggatatatcatttagacagaggatatgaaaatttagaaaaaaaacttagtaaagttggagctcgcattagaagaattaactaa

SEQ ID NO: 244269 - DNA, 532 bp, Unknown
  Bacterial polypeptide expressing nucleotide sequence isolated from the Sargasso Sea
aattagcggcgcattaacagcaaaaaatattaagattaaaaatatagacagcatattaataaaaacagaaataaaaattttaaaaaaaatgggcgtaaaaatgaaagttacaaaaaattatatcgaggttttaaaaagcaaaaatcttaaaaaaataaatgttaagacagaaccctatcctggttttccatctgatcttcaagcgcaaattatgatattgatgacacaagctaaaggaatttcaaaaattaaggaaaatatttttgaaaataggtttatgcatgttcctgaactaaaaagaatgggagcaaaaatcaagatacataacaatgaggcatatattgaaggtccctgttctctaactggggctgaggtaatggcgaccgacttaagagcatctgttagcttggtattggctgggttaattgctgaaaatagaacaaatataaatcgtatttatcatttagatagaggatatcaagatttagaaaaaaaattaacccagtgcaatgcaaatataaaaagaatctaa

SEQ ID NO: 244270 - DNA, 793 bp, Unknown
  Bacterial polypeptide expressing nucleotide sequence isolated from the Sargasso Sea
gtttgtcttccccttcgtttctgtcggcgccaccgaaaatctgatgatggcggccaccctagcaaagggtgagacggttctgagcaatgtggcccgggagccggaggtgaccgaccttgcggaatgcctcgtggccatgggctctaaaattgacggcatcgggtccgatacgctggccatccagggcgtcgatactctcaactcggctgaacattccgttgtcggcgaccgtatcgaagccggcacctatgccatggctgccgcgattaccgatggcgatgtcgaacttgccggggtaaaggccgaacatctggatgcagtatttcgtgcccttgcggatgccggacttgagattgggaaaacttacgacggtgtttccgtacgtctaggaaaagggggcctgaagggggtcgacgtgatgacagaaccgtttcccggatttccaaccgatctacaggcgcagatcatggcattgatgtcggttgcggacggggcggcgatgattacggaaacgattttcgaaaaccggtttatgcatgtgccggaacttgcccgcatgggggctaatgtgaatgttcatggggcgtcggcacttgttcggggtgtcgaccatctgaccggagccgaagtcatggcgactgatcttcgcgcgtcttcgtcgctgatactggcggcactggcggccatgggtgaaaccgtggttcggcgggtttatcatcttgaccgaggctacgaacgcatagaggaaaagcttgccgcctgcggtgcggttatccggcgggaaaaagaatag

SEQ ID NO: 244271 - DNA, 412 bp, Unknown
  Bacterial polypeptide expressing nucleotide sequence isolated from the Sargasso Sea
acaggccgtactttaaaatcagtgaatgtaaaaactgtgcctcatcctggctttcctaccgacatgcaagcacagtttactgtgttgaatgtggtggctgaaggcgtgggtatggtcactgaaaccattttcgaaaatcgttttatgcatgtgcctgagttgcaacgtatgggggctgatattcagctggaaggcaatacagccttgattaagcataccgacaagctgatgggggctcaggtcatggcaaccgatttaagagcttcagccagcttagtgattgcaggtttggtcgcagaaggcgaaacagtggtcgatcgtatttaccatatcgaccgtggctacgagcaaattgaacataagctcaagggcttaggcgctaatatccagcgcatcaatgctcccgcctgat

SEQ ID NO: 244272 - DNA, 676 bp, Unknown
  Bacterial polypeptide expressing nucleotide sequence isolated from the Sargasso Sea
gatctaattatttttttaaaaaagctaggatgcaaaattaataaaattggagaaagaggtattgatgttattggtgtagaaaagttaaaatcagtaacacacaaagttatttctgatagaattgaaactggtacttatatcatagcctcagctttaacaaagggacgattaaaaattaaaaatattaacccaaaagttatgaccgctgaaattaatcttctaaaaaaaatgggagttaaaatagttaaatataataattatgtaatagcaagctgttcagacaaactcaaatgtgccaatattgaaacgaaaccatatccaggttttcctacagatctgcaagcgcaaattatggttttaatggccaaggctgaaggtatttcaaaaattaaagaaaatatttttgaaaatcgttttatgcacgtctctgaattaagaagaatgggtgcgcatattgaaattacagaaaataccgcaaaaattattggaggagaaaaacttaatggtgcagaattaatggcaaccgatttaagagcttcagtaagtttagtgcttgctggactggttgcaaaaagtaacacgattgtaaatagaatttaccatttagacagaggttatgaaaacattgaaaaaaaattatcaagatgtggagctcagattaaaagactgaaatgag

SEQ ID NO: 244273 - DNA, 483 bp, Unknown
  Bacterial polypeptide expressing nucleotide sequence isolated from the Sargasso Sea
catgcaaaaaatattgataaatggaggaaatcttctccagggttctgttcctgtcagtggatcaaaaaatgcatctctcccaataatggctgcaagtattcttactaatgaaaatttagaactcgaaaacgtacctgatttagttgatgtaaatacaatgtcagcagttttatcatcgcttggtgtcaatgttacaaaaaaagatgttaatacaaatcgtctaacacttcgttattcagactctgaaagtacaatagcggagtacgatttagttagaaagatgagggctagtatattagttcttgggccattacttgcacgtaaaaggcacgctagcgtatctcttccaggggggtgcgcaataggtgctcgaccagtagatttgcacataaatgcattaacgaaacttggcgcagcatttgaattagatggtggatatattaaatgtagcgctccaaatggcttaaaaggaaataaaattaa

SEQ ID NO: 244274 - DNA, 808 bp, Unknown
  Bacterial polypeptide expressing nucleotide sequence isolated from the Sargasso Sea
ccttatgtaaatgatattcttactatgcttaatcttctcaaatttattggcttaaaatacaaattatcaaaaaaaaaaaattcagtagaggttatcaatcaaaataaaaatataaacaccgtagcaccctacaaactagtaaaaacaatgagagcaggtgttttagttttgggacctctactcgctagatataaaaaagcaaaagtatcacttccgggagggtgcgctattggaacaagacctgttgacctacacttatttgctttgaaaaaattgggtgcaaaaattaaaattaaaaatgggtatatactagcttcagccattaacgggttaaaaggtgcaagaattaaatttccaaaaatatctgttggagctacagaaaacgccattttagctgcggttcaagctaaaggcgttaccataatagagaattgcgctgtcgaacctgaaattaaagatttaataaattttttaaaaaaacttggagtaaaaataaaaattactggcagaaaaataagcatcaaaaaatcaatacaagaaaaaaaaatatctcataaagtaatttgtgacagaattgaacttggaacttatctaataggaggagctttagcggcaaaaaaattaatattaaaaaacatagactcaagtttaattaaaaaagaaattcatattttaaaaaaaatgggtgtgaaaatgtatgttggtcaaaactacatagaggtatataaatctagaaacattaaaaatattgatataaaaacacgatccttactcccggttttcccacagatttgcaagctcaaataat

SEQ ID NO: 244275 - DNA, 895 bp, Unknown
  Bacterial polypeptide expressing nucleotide sequence isolated from the Sargasso Sea
tatgagagctggtatccttgttctgggaccaatgttggcaaaatatggaaatgcaaaagtttcaacaccagggggatgtaccattggagttagacccatagacatacatttaaaagctctgggtaaactaggtgtaaatcataaaattgtagatggctatgttcatgcaaactcaaaaaataaattaaaaggtgcaaaaatcaaatttcctaaaatatctgttggagcaacagaaaatttgattatagccgcatctatggccgaaggaataacaactttatcaaattgcgcaattgagccagaaataaaagatttagttaattttatcaactgcatgggtggaaaaataaaatggattggaaaaagaactataaaaattgagggtgtaaaaaattttaaggaagtaaaatatacaattatgcccgacagaatcgaggccggaacttatctaatcgctgcagctgtaacggaaggtaatttaaaaatatcaggaataaaacctaatataataagaactgaaatagaaatattaaaaaaattaggattaaaaataaagattgaaaaaaaccaaatcaatattattggagttaaagatataaaaagtattaatttaaaaacatcaccttacccaggttttcctactgatttacaagcacagttaatggttttactttgtatgagcaaaaaaatttctacaattagtgaagagatttttgaaaatagatttatgcatgttgctgaattaaatcgaatgggagctaaaataaaaacaaaaggaaacaaagcatttatagaaggaaatacaaaatttaaatcagctgaattaatggcaacagatttaagggcttcagtttcattaatacttgctgcattaattgcgaaaggaaaaacaaca

SEQ ID NO: 244276 - DNA, 907 bp, Unknown
  Bacterial polypeptide expressing nucleotide sequence isolated from the Sargasso Sea
ttttacaatttcttcagctgatttagtagacatagaggcaagatatgaattagtaaaaactatgagagcatctatattagttctgggaccattattagcaaaatatggtaaagcaagaattgctttacctggtggttgtgcaatagggacaagaccagttaattttcatttagattctttaaaaaaaatgggagctgaaataaatttaaagaatggttacattgaggcatcttctaaaaaattaataggtgctgaaattagatttgatggcattacagtaactggaactgaaaatttaatgatggcagcaactcttgcagatggcattacaaaacttacaaatgttgcaagagaaccagaaataattgatctagcaaatatgcttaattctatgggagctaaaatcacaggcgctggctctgatgaaattattataactggagtaaatgcattaaaaggaacaacatatgatattcctgcagatagaatagaagctggtacatatcttgctgctgctgcagttacaaaaggagaaatcacagttgatggcataaatccagaaagattaatgaaagttatagataaattaaaaaatactggagctaaattaagttatgacgcaaattctatttcaatctcaatgacaaaaaatgttcctgagccagttgatattactacagctccttttccagaatttccaactgatatgcaagcacaattctcagtaataaatgcaatttctaatggaacttctaatatttatgaaactgtttttgaaaacagatttatgcatattttagaacttaatagaatgggatgcgatattgaagtgaaaggcaatcatgcgaaaataaatggcgttaaaaatatttatggagcagaggtaatggctacagatttaagagct

SEQ ID NO: 244277 - DNA, 307 bp, Unknown
  Bacterial polypeptide expressing nucleotide sequence isolated from the Sargasso Sea
tttgagaaccgcttcatgcatattcacgaactccaacgcatgtggggcggacatcaacctgcacggaaataccgcactcgtccagggggtggaacagttgggcggggcacaggtgatggcgacagatttacgggcctctgcctgcctggttcttgcggggctcgtggcccgcgaacagaccgtgatcgaccggatttatcatatcgaccgaggctacgactgtatcgaggagaaactgctgcaatgcggcgccgatattcgccgggtctctgattcacgcttcccgagggtccatgcggtcgtctag

SEQ ID NO: 244278 - DNA, 373 bp, Unknown
  Bacterial polypeptide expressing nucleotide sequence isolated from the Sargasso Sea
attggcgacaaaaccttatccaggttttcctactgatttacaagcacaactaatggttttgatgacacaagctaaaggcatctcaaaaataaaagaaaatatttttgagaaccgatttatgcatgtccctgagttgaaaagaatgggtgctaaaatagatattaagaatagaacagccttcataaatggattttcaaatttaactggtgcagaagttatggctactgacttaagagcttctgtaagtttagttttagccggtcttgttgctgataatagaactacagtaaataggatttatcatttagacagaggttatgaaaatttggagaacaagttaaaaaattgcagagcagagatcaaaagaatttaa

SEQ ID NO: 244279 - DNA, 745 bp, Unknown
  Bacterial polypeptide expressing nucleotide sequence isolated from the Sargasso Sea
tcattaacaccttgggtaaaaccaatcttgagaaattgtgctaaagagcctgaagtaagcgaattagcaaattttttaaattcttgtggagctaaaatttctggtgcaggtaaatcgataattgaaatcgagggaacagattgtcttaatggaaaaaaatggaaaattctttcagatagaatcgaagcaggaacatatttaattgcagccgcaatgacaaatgggcatgttaaaataaataatataactccttctactataaaaattattcaccaaaagctttctgatactggagtgaaaataaaactagagaaaaatgcagttgaggctgatgcgacaataactgacttgcaggctacagatatttgtacgaaaccttttccaggatttcctactgatatgcaggctcaatttatggcattaaattcgatatcacatggcagttcaattattgaagaaacagtttttgaaaatagattccagcatgtaattgaattaaggaaaatgggagcaaatatagatcttgaaaaaaataaagcaaaaataattggagttcccaatcttgtagggtcagttgttagggcatcagatttaagagcatctgctagtttagttctagccggtttagttggtaaaaatcgaactcaaatcgatgatatattccatatagataggggctatgaatgcattgaggaaaaattgaacaaactaggagctgaaattattagggagccagtactctagc

SEQ ID NO: 244280 - DNA, 396 bp, Unknown
  Bacterial polypeptide expressing nucleotide sequence isolated from the Sargasso Sea
aaaaaattaaaaatattaatatcaaaacagccccgtacccaggctttccgacagacttacaagctcaaataatggtattattatgtaaagcaaataaaaaatcagaaattaaagaggaaatctttgaaaatagatttatgcatgtttcagaattaaatcgtatgggagcaaaaatttcgattaatggaaataaagcatctattccaggaaatgtaaattttcaagcagcagaattaatggcgacagatttaagagcgtcagtatctttaattttagctgcattaaatgccaaaggtaaatcaattataaatagaatctaccacttagataggggctacgaaaatattgaaaaaaaattaaagaatataggtgctaaaattaaacgaatatattaat

SEQ ID NO: 244281 - DNA, 574 bp, Unknown
  Bacterial polypeptide expressing nucleotide sequence isolated from the Sargasso Sea
tgaaataattccagatcgaattgaggcaatcacgatggttattgctggaattataaccaagggagagcttaggattgagaacatcaattcttcacatatacaacaacccatcgagctgataagaaaatgtggagcaaatcttgagatatttgatgattatctatatttgaaaggttctaatgtaatttctcccattagttttgagaccaatccctatccaggaatcccaacagatattcaggcgcagctaatggtattaaatactgttgcagagggtgactcaaaggttaaggaaaccatttttgagaatagatttatgcatatattagagcttaaaagaatgggtgccaatattggaattgatggcaatactgcaattataactggagttcaaaaattaaattctgcacaggtaatggctacagatttaagagcctctgccgctttgattctcgcaggcttgattgctgatggagaaacaatcattgatcgaatttatcatttggatcgtggatatgaaagtattgaagaaaagctatcaaatataggtgcaaaagttcgaagaattgactaa

SEQ ID NO: 244282 - DNA, 802 bp, Unknown
  Bacterial polypeptide expressing nucleotide sequence isolated from the Sargasso Sea
ccctttattatcaaagtatcgaatagccaaagtcagcctccctggtggatgctcaatcggtacgaggcctgttgatttacatattagtgcatttgaaaaaatgggtgctagtatcttacttaaagatggttacatagaagcaaaagcaccaaataaagggctttatggtgcagaaattagcttcccaaaaatttcagttggagcaactgaaaatgtaattatggcagcatcattggcaaatggaagaacgagaattctaaatgctgctaaagagccagaaattatcgacttggcaaattgccttaacagaatgggtgcatcaataaaaggtgccggtagtagcgaaattattatagacggagttaaagaattagtgggatgcaatcataaagttatacctgatagaattgaggctggaagttttgcaattgctgcagcaattacaaaaagttcattagaattatttaattgtgagcctaaacatcttgagagtttatccaaaaaactaattaatgcaggtgtaaattgggaaagtaataaggatattattaaaattacttctgatggtatattaaaacctgttaatgtccaaacagcagaatatcctaattttcctacagatttacaagcacaatttatgactttaatgaccgtcgctaatggcaattcagaaataattgaaaatatttttgaaaatagatttatgcatgttccagaacttttgagaatgggcgctaatatttctgtcaatggtggtatcgcgaaagtttcaggagttcaaaacttaaaaggagctcaaata

SEQ ID NO: 244283 - DNA, 862 bp, Unknown
  Bacterial polypeptide expressing nucleotide sequence isolated from the Sargasso Sea
aaaattaggagctaagataaaaataaaaaatggttatatttttgctgaggccacacagggcttaactggtgcgcaaatcaaattcccatcaatatccgttggtgccacagaaaacgttattatcgcggcgagtttagctaaaggaattacatatttaaaaaattgtgcttccgaacctgaaataaaaaatttgactgattttttaaataaaatgggggccaaaatttcctggctaggaaaaagaaaaattaaaataataggatgcaaaaagtttaagcaagtaaaacacaaagtaatgtttgatagaattgaagctggaacatttattattgcaggggctttaatagggaaaaaattaaaaatatcaggtattcaaaaaaattttttaaaaacagaacttaaaattttaaaaaaaatgggtgttaaaatgcaaattaacaaagatcatattaacatgctagattcatcaaaaataaaaccggcaaaaataaaaacagaaccttatcctgggtttcccactgatctacaagcacagatgatggttttgatgacaaaagccagaggaaaatcacaaataaaagaaaatatttttgaaaacaggtttatgcacgtccctgaactaaatagaatgggagcaaaaattaatacttcaggaaatttatcttatataaatggtcctcaaaatttaaatggtgctgaagttatggcaaccgaccttcgagcatcagtaagtttggtgctagcaggattgattgcaaataatgaaacaataataaatagggtgtaccaccttgatagaggatatgaagatttagaaaaaaaactcaaacactgcaaagcaaagatttctagaattttttag

SEQ ID NO: 244284 - DNA, 898 bp, Unknown
  Bacterial polypeptide expressing nucleotide sequence isolated from the Sargasso Sea
tctaaaaaaactttaaaactctcaaatgtacctaatgtggttgatgttctaaatttaataaaattactgaaaaattatggtgtaaaaattgaacacaaaaaaaataaattaaaaataaatccatcaaaaattaaaaatctatcagcagattatgatgttgtacgaaaaatgagagcctctatattgattctaggtccattactttctcgatttggtgaggctagaatatctttaccaggaggatgtgccattggaactaggccaatagatatacatcttgctggtttatcaaaattgggtgctaattttgaaattcaaaatggttttgttgttggcagtgttaagtcacaattaattggaaataaaattaaattaccatttccaagtgtaggagcaactgaaaatatactaatggcttcagtattggctaaaggtgaaactaaaatttctaatgctgcaagagaaccagaaatagaagatttgtctaactgtcttataaaaatgggtgcaaaaatagaaggtcatggaacaaaaactattcttgttcaaggtgtaacaaatttaaaaaaagcagagcatgagataattgctgatagaattgttgctggcacatatataattgcagctttgatgttaaattcaactttagaaataaataactttaatactatttatttaaaatccttaattgatattttaaaaaaaatgggtgcaaaattaaaagtaagtaaaaattcgataaaagtccttaaaggatcaaaactaaaatctactagtctttcaactagtccatatccaggttttcctaccgatttacaagctcagttaatgtctcttatgtgtatctctgatgggaagtcaaaaattaaagaaacaatttttgaaaatagatttatgc

SEQ ID NO: 244285 - DNA, 636 bp, Unknown
  Bacterial polypeptide expressing nucleotide sequence isolated from the Sargasso Sea
tttggactctatattagtgacaggcagtggtcctttaaatggtaaaattccgattgctggggcaaaaaatgcctgtctagcgttaatgcccgtaacacttctaactgatcaacctgttacactcacaaatgctccaatattgagtgacattaaaacagctgaggcattattaagctcattgggtactgaagttacctttttaaatggcgggaaagtgcttgttatgtcttcccataatttaaagtcgagccatgctgactatgacattgtaagaaaaatgagagcctctaacttggttctagggccattattagctcgcaatggtgaagctgttgtttcgttgcctggcggatgtgcaattggagctcgtcctatggatctccatattggtgctttggaggctttaggtgccaccattgagttaaaggaaggttatttgcatgccaaatctaatggtcgattaaaagcaggaactttcgagatgcgtatggcgtccgttggggcgactgaaaattttattatggcagcgactttagctaatggcacatcaattttgaaaaatgcagcaaaagaacctgagatagttgaccttgtaaaatgtttgcgatcgatgggggctcaaataactggagaggg

SEQ ID NO: 244286 - DNA, 436 bp, Unknown
  Bacterial polypeptide expressing nucleotide sequence isolated from the Sargasso Sea
tactgaggaaaatgcaatttcgatagatatgaaggggaaaaaaccaaaagcggttgatatacataccgcaccattccctggttttcctacagatatgcaagcacaatttactgcaatgaatagcatcgcagtgggttcgggaacaatcaccgaagctgtttttgagaatagatttatgcatgtacatgagctacaaagaatgggcgcagatcttaaattagaagggaataccacaataactgatggtgttgagcagttaacatgcgctcctgttatggctactgatttaagggcatcagctagtttagttttagctggattagttgctaagggtcagacaactgttgaccgtatttaccatatagatcgtggttacgagacaatagaggagaaattatcacaactaggggcggaaattaggcgtattccagaataa

SEQ ID NO: 244287 - DNA, 410 bp, Unknown
  Bacterial polypeptide expressing nucleotide sequence isolated from the Sargasso Sea
tgaaatttttgagagtaaaaatataaaaaagataaatattgaaacaaacccataccctggttttccaactgatttacaagcacaattaatggttttgatgactcgtgctaaaggaaaatcaacaattaaagaaagtatttttgaaaatagatttatgcacgtaccagaactaaagcgaatgggagcaaatatagagataaagaataaaatagcaattattaaaggaccttccaagttaactggagcagaagtgatggcaacagatttacgagcatcagtaagtttagtcttggctggcttagcggcagataatagaacaattattaatagaatatatcatcttgatagaggttatgaatttctagaaaaaaaattgaaaaattgcaaagcacgtattaaaagaatttaaa

SEQ ID NO: 244288 - DNA, 943 bp, Unknown
  Bacterial polypeptide expressing nucleotide sequence isolated from the Sargasso Sea
tggaaagccacggtatctttgcccgggggttgcgcaatcggaacaagacctttagacgttcatctttttggactaaaaaagttaggagccaaaattaaaataaaaaacggatatattttggcagaggcaaaaagaggacttttgggaacaagaataaagttaccatcaatatcagtaggtgcaactgaaaatgtaataattgctgcaagctatgcaaaaggaactacctatataaaaaattgtgcgtgcgaaccagaaataaaaaatctaacagattttttaaaaaaaatgggggtcaaaatacaatggattggtaaaagaaaaataaaaattataggaaaccaaaaattaaaatctgtgagccattcagttatgtttgacagaatagaggcaggaacttttattattgcgggagcattagccggtcaaaagctcagaatagttggattagagtctaaaattttaagaaaagaactagtaattttaaaaaagatgggagtgaaatttaaaattaaaaaaaatgaaataactgtttttaactcaaaaaatattaaacctgtttctatttccacagaaccataccctggttttcctacagatcttcaggcacaaataatggtgctaatgataaaagccaaaggagtctcaaaaataaaagaaaatatttttgaaaatcggtttatgcatgttcctgaactaaatagaatgggaggaaaaataaaagttgtaggcaatttatccgtcattaatggtcctcaggaattaaatggtgcagaggtcatggcaactgatttgagagcttctgtaagtttagttttagcaggtttaattgcaaaaaatagaacagctataaatagagtttatcatttagatagaggttatgaaaatttagaaaagaaacttagaaaatgtagagcaaacatttctagactcaattattgat

SEQ ID NO: 244289 - DNA, 685 bp, Unknown
  Bacterial polypeptide expressing nucleotide sequence isolated from the Sargasso Sea
aatggatagtttaaaaattaaaggtggaagacaacttaacggccaaataaaaataagtggtgctaaaaatgccgctttacctttaatggcttgtggacttttaattgataaaggtaaccttgaaatagattctatgcctagtttagcagacacaaaatttatgtgtatccttttaaaaaatttgggggttaaagctaaaattataaataatattgcatatttaagtggagacccgtcacaatatgtcgcaaaatatgatattgttagaaaaatgagagcctctattctggttttgggtccattattagcaagagttggtattgctaaagtaagtttacctggtggatgttcaataggaactagacctgtagatcttcatattcaagcgttagaaagaatgggtgctacaattaatctaattaatggatatattgaggcaaaggctcctagaaatgggcttcaaggagcagaaattaaatttcccaaaatttctgttggggcaacagaaaatataattatggcagcctctttagcaaatggaagaactaaaatattaaatgctgcaagagaaccagagattattgatttagcaaattgtttaaactctatgggcgctctaataaatggcgtagggacaagtgagattatcattgacggagtaaaaagtcttaatggatgcaaacat

SEQ ID NO: 244290 - DNA, 813 bp, Unknown
  Bacterial polypeptide expressing nucleotide sequence isolated from the Sargasso Sea
aaaaaattctgcgttgcctttgatgacaatttctttgttaattgataaagggttggaactaaaaaatgtccctgatcttcttgatacaagaacaatgaatcaattaattaatgaattaggcattaaaggcaacctttcaaaaggctcaattaatttttatggcaaacctattcaaattaaggcttcagacaatttagtaaaaagaatgagagcgtctattttaatattagcacctttgttacaatcaaaaaaaagggctttagtacctctacctggagggtgtgaaattggaagcaggcctatagatatacatattgaagtcattagaaaattgggcgctaacgttgaattaaaaaatggatatttagaagcccatctatcaaaagaaggttttattggtgcagaaatcaaattttcaaaagtatctgtaggagcaactgaatgcgcaattttagcttctgttttagcccaaggtagtacaacattatataatgctgcgaaagagccagaaattgttgatttgggcaattgtttaaataaagctggagcagatattacaggacttggagataataaaattgttataaatggggtaaaaagattaaatcctatttcttattctgtaatgcctgatagaattgaagccggttcattcgctttagcagctgcaattacaaaaggtaaagtttttataagaaatacagaaattgatcctttagatacatttttacaaaagttaaaaaaaactggggttaatgttgaaagttctaaaaatgaattaaagataacaggaagtaatgaaatttcttgtgt

SEQ ID NO: 244291 - DNA, 703 bp, Unknown
  Bacterial polypeptide expressing nucleotide sequence isolated from the Sargasso Sea
tcctctagttgcaaagtatggcaaggcccgaattgctctacctggcggctgcgctattggttcaaggccagtcaattatcacttagatgccttaaagcaactgggcgctaaaataaaattgaaaaatggatacattgaggcatctgctaataagttagttggatctaatataagatttgatggagttactgttactggaactgaaaatattatgatggctgcctctcttgctcaaggggtgactgttcttacaaatgtagcaaaagaacctgaaataattgatcttgctgacatgttgaattccatgggcgccgatattaaaggagctggaacagatgagattactattaaaggtgtaaatgaactttttgggactagcttcacaatacctgctgatagaattgaagccggaacatatcttgtagcagcagcagttaccaatggaagtattacaattgatagcattaatccaaatagactaatgaaagttattaatatgatagaaagaagtggacctaaaatcagttttgacgacaattctatttctatttctatgaataaagatcgtccagatccggtggatataactaccgctccatttcctgaatttccaacagatatgcaagcacaattttcagttataaatgctatctctagcggagtttcgaatatttatgaaactgtttttgaaaatagatttatg

SEQ ID NO: 244292 - DNA, 338 bp, Unknown
  Bacterial polypeptide expressing nucleotide sequence isolated from the Sargasso Sea
ggctcaattttgtgcattaaactctgttgcaaacggtaaagctgagatggttgaaaatatatttgaaaatcgatttcagcatgtagtggaacttcacagaatgggtgctgacatacaaattaagggaaacattgcatctagtacaggtgttgattcactgacagcagctcctgttatggcaacagatctgagagcctcagcaggcctaatcattgctgcgcttgcagcaaaaggtgacaccatcattgatagaatttaccatatcgatagaggatacgagagagtggaagaaaagctccaacaactgggagctagagtatcaagagaaaattcttgaa

SEQ ID NO: 244293 - DNA, 844 bp, Unknown
  Bacterial polypeptide expressing nucleotide sequence isolated from the Sargasso Sea
gggaaaatcccaattgctggggcaaaaaatgcctgtctagcattaatgcctgtaacacttttaactgatcaacctgttacactaacaaatgctccaatattgagtgatatcaaaacagccgaggctctacttagttcattgggtactgaagtttcctttttaaatggtgggaaagtgctggttatgtcatcccataatttaaagtcaagccacgctgactatgacattgtaagaaaaatgagagcctctaacttggttttaggaccactattagctcgcactggcgaagctgtcgtttcgttacctgggggatgtgcaataggagctcgtcctatggatcttcatattggtgctttggaggctttgggcgctatcattgagttaaaagaaggttatttgcacgctaaatcaaatggtagattaaaagcaggaacattcgaaatgcgtatggcatctgttggggcgacagaaaatttcattatggcagcgactttagctaatggcacatcagttttgaaaaatgcagcaaaggaacctgaaatagttgaccttgtaaaatgtttgcgatcgatgggcgcacaaataaaaggagagggttcaagcactgtggagatccaaggtgtagatactttaggtggtacaactcatcctgtagttgttgatcgaattgaacttggcacctacatgattgccccagcaattgctggcggccaggttgatttgattggtgggaaaaagaaattgttaggcgagttttggaacagtctagaacgtgttggtctggagatttcagaaacagcggatggtataagagccaaaaaggtaaatgaagtaattaaagctg

SEQ ID NO: 244294 - DNA, 805 bp, Unknown
  Bacterial polypeptide expressing nucleotide sequence isolated from the Sargasso Sea
attgatcttcatttagaaggacttaaaaaattaggtgcaaatttttatgttgaaaatggttatgttgtaggcgctgttgaagatgaattaataggtacgcatatcactcttcccttcccaagtgttggtgcaactgaaaatattttgatggctgcttcgatagcaaaaggaataacaataattgaaaatgctgcaagagagccagaaataaatgacctagcattcgccttgaataagatgggagcaaaaataaatgttaaaaaaaatggaattataaaaattgatggtgttaattcacttactcaagctactcacaagattatgagtgatagaatagttgctggtacatttgtgattgcagctgtgatgttaaataaaaaatttaccgtaaaagatattgagagcaatcatttagaagccttaacatcttcattgattaagatgggagcaaaattaaaagttaagaaaacttctattcaaattatgcctactacaaatttaaatggaattaagattcaaacatctccttatcctggctttccaactgatttacaggctcaaattatggctttaatgagtttggtgaatggaaattcacaaataaaagaaaatatatttgaaaatagattcatgcatgttcctgaactaaatagattgggagctaagataaaagtgaaaaaagatatagctttaatagctggtaatagaaatttaaaaggtgcacaggtaatggctagtgatttaagagctagcgtgagcttagtacttgccgccttatgtgctgaaggagaaagtgtaattaatc

SEQ ID NO: 244295 - DNA, 803 bp, Unknown
  Bacterial polypeptide expressing nucleotide sequence isolated from the Sargasso Sea
aaaaagaacttatctggaaacatctcaatctcaggttcaaagaacgcaactcttccaattttagctgcttccattttagccaatgaagttacgctaagaaacattcctttagtaaaagatatatttacaatgatagatctactaaagtttattggcataaatattaacattaacaaaaaagataaaagtataaatttacaaaataaaacaaaaataaatactttggcaccttacaaattagttaaaacgatgcgagccggtgttttagttcttggacctctgttgacaaaatataagcatgcaaaagtttctttaccaggaggatgcgcgataggaacaaggccagtcgatttacatttatttgctttaaaaaaacttggcgcaaagataaaaattaaagatgggtatataattgctgaagcaaaaaatggcttaaccggagcaaaaattaaatttccctcaatttcagttggagctacagaaaatgctttattagcagccttcaatgccaaaggaaaaacagtcctgtcaaactgcgctatagagccagaaattcttgatttggtaaaatttttaaaaaaacttggttgtaaaatcaaaatattaaatagaaaaattaccatttctgctgaaaaaaagattaaaaaaaaaaaaataatacataagattatttttgatagaatagaagcaggtacatatatagttgcaagtgctctagcaggtaaaaaaattgttttaaataatattcaacctaaaataataaattttgaattaaatatttttaaaaagatgggagttaaaat

SEQ ID NO: 244296 - DNA, 537 bp, Unknown
  Bacterial polypeptide expressing nucleotide sequence isolated from the Sargasso Sea
cagcaactattaccaatggaaaaattacaatcaaaaagattgactcagctagaatgggctcaattatagaaactcttcaaaaagccggggctgaagtgtgtttaaacgaaaattctatttcactagatatgacgaaaaatactataaagcctgttgatattgtcacagctccttttcctggatttccaacagatatgcaagcgcagtttactgttcttaactgcatcggacacggcgaatccagtgtaaaagagactatatttgaaaatagatttatgcatgtgcaagagctcaatagaatgggtactgatattacaattaatggaaccactgcgctaattaatggagttgattctatttctggggctcaagtaatggcaacagatttaagggcatcagcaagtttgatattggcgggacttatagcaaaaggagaaactattgtagataggatttatcatattgatagaggctatgaaagaatagaagaaaaattatcaaatcttggtgcagaaataataagattacctaattaga

SEQ ID NO: 244297 - DNA, 760 bp, Unknown
  Bacterial polypeptide expressing nucleotide sequence isolated from the Sargasso Sea
gccacagaaaatgttttaatagcagcttgtttttctacaggtgagacaaaattaagaaattgtgcaattgaacctgaaataaatgatctaattttttttttaaaaaaacttggatgtaaaatcaaaatagtcggaaagagaggtataaatatcttaggagtaaaagaactaaaatcaaccgtgcacaaagttatttttgatagaattgaagcaggtacatatattatcgccgcagctttaactaagggaaaattaaaaattaaaaacattaatccaaaaattatgttaacagaaattcgcttattacataaaatgggagttgatattcttagaaagaaaaaccacattgtagtaagtcgttcaaaaaaacttaaaagtattaacattgtaactaaaccgtaccctggttttccaacagatttacaagctcagattatggttttaatgaccaaggctgagggagcttcaattataaaagaaggtatttttgaaaaccgttttatgcacgtttccgaattgagaagaatgggagcgcaaatagcaattaatggaaacaaggctaagatttttggaaaaagcaaactaaacggagctgaattaatggcaactgatctcagagcctctgtatgcttagttttggctggcctagttccttcgaataaaacaatcttaaatagaatctatcatttagatagaggttatgaaaaaattgaatacaaattatcaaaatgtggagctcaaattagaagattgcaatgag

SEQ ID NO: 244298 - DNA, 814 bp, Unknown
  Bacterial polypeptide expressing nucleotide sequence isolated from the Sargasso Sea
tctggcagtattaatattttccggttcaaaaaattctgctttaccaattctagctgctacaatactaaataatcacacaacaataaaaaatattccatttgtaaatgatattctaacaatgttaaatctgctgagatttataggattaaaatacaagatatcaaaaaaaaaaaatttagttgaagtcatcaactcaaatacaaatataaatacagtagcaccttacaaacttgttaaaacaatgagagcgggtattttggttttaggacctttgcttgcgaagtatagaagagctaaagtgtctttaccaggtggatgtgcaatcggcactagacctgttgacttacacttatttgcattaaaaaaacttggagcaaaaattaaaatcaaaaacggatatatatttgcctccgccatcaatggtttaagagggacaagatttaaatttccaaccatttctgttggtgccactgaaaatacaattttagctgcggttcaagccaaaggtgtaacaattattgataattgtgctgttgaacctgaaataaaagatctaattaattttttaaaaaaacttggggtaaatatcaaaataaaagggaggcaaataacaataaaaaaaataataaaggaaaaaaaaatatcacataaaataatttgcgacagaattgaacttggaacttatctaatttgtggtgctttgacagcaaaaaagctcaaacttaaaaatgtcgactcggatttagtaaaaaaagaaatcaaaactttaaaaaaaatgggagtaaaattaaatgtaaataaaaattttatagaa

SEQ ID NO: 244299 - DNA, 778 bp, Unknown
  Bacterial polypeptide expressing nucleotide sequence isolated from the Sargasso Sea
ctctaaagtatcagtaggagctacagaaaatttattaattgcagcatgttttgcaaaaggaaccactatattaaataactgtgcaattgaacctgaaattaaggatctagtaaattttttgataaaattaggatgtgatgttaaatggattggtaaaagatcacttgaaattataggagtaaaaaaagtaaatgaaatatcttattcagtaatgttcgataggattgaagcagggacttatttaattgctgctgcgattactgaaggaaatttaaaaattaaaaatatcgatccgaatataattaaaacagaaattaatattcttaaaaagattggaatgaaaatttttataaaaaaaaatgaactacagataattggtaataaaaacattaaaaacataaacattataaccaaaccttatcctggattcccgacagatttacaggcacaaatgatggttctattatgtaaagcaaacaagaaatcaattattaaagaaaatatttttgagaatagatttatgcatgtatccgaattaaatcgaatgggagctcaaatttctattaatggtaataaagctctaatttctggaaacataaaatttgcacctgcagaattaatggcgactgatcttagggcatcagtctcattagttcttgcagcattaggtgctaaaggaaaatcagtaattaatagaatttatcaccttgatcgaggctatgaaaatatagaaaaaaaattgaaaagagtaggagctaaaataaagcgaattaattga

SEQ ID NO: 244300 - DNA, 898 bp, Unknown
  Bacterial polypeptide expressing nucleotide sequence isolated from the Sargasso Sea
aaaaaaatagaaataaaaggagtacctctagtaaaagatgtaatcactatgtgtcatttacttaagtacatgggctctaatataaaattaaatactaatagtaaaaaaatttttatagaaaataaaaataaaaaaataaaaaatattgccccatattcttttgtaaaaactatgagagctggcgtgatcgtgctaggttcattgctcgctaaatttggaaaagcaaaagtttcattaccaggcggatgtgcaattggaacaagacctattgatgttcatctttttggtttaaaaaaattaggagctaaaattaaaattaaaaacggttatattttagcagaagcaaaaaaaggtttaaaaggaacaaaaattaaatttccttcgatatctgtcggcgcaacacaaaacgtaattatagcgtccagtcttgcaaaaggaacaacatatttaaaaaattgtgcctgcgaacctgagataaaaaatttgactaattttttgaaagcaatgggaattaaaattaagtgggtaaaaaaaagagagattaaaattataggaaatcaaaaattaaaaccagtaaagcatcatgtaatgtttgacagaattgaagctggaacctttattattgctggggcattatcaagccgtaaacttaaaattcttggtttagaaactaaaattttaaaaactgaattaggggttttaaaaaaaatgggagtaaagatgaaaataggtaaaaatgaaattacagttttaaattcaaaaaaaattaaacctgtctctataaaaaccgagccttacccgggatttccaactgatctacaagcacaaattatggttttgatgactaaagcaaatggaaattctaaaataaaagaaaatatttttgaaaatagattta

SEQ ID NO: 244301 - DNA, 763 bp, Unknown
  Bacterial polypeptide expressing nucleotide sequence isolated from the Sargasso Sea
ttaccaggaggatgtgccattggaactaggccaatagatatacatcttgcgggtttatcaaaattgggagctaattttgaaattcaaaatggttttgttgttggccgtgttaaatcacaattgattggaaataaaattaaattaccttttcctagtgtaggagcaacggaaaatatacttatggcttcggtattggcaaaaggtgaaactaaaatttctaatgttgcaagagaaccagaaatagaagatttatcaaactgtcttataaaaatgggtgcaaaaatagcaggccaaggaacaaaaactattttagtgcaaggtgttacaaatttaaaaaaagcagaacatgagataatttctgatagaattgtagccggtacatatattattgcagctttgatgttaaattcagctttagaaattaataattttaatactatttatttaaaatctttaattgatattttaaaaaaaatgggtgcaagattaaaagtaagtaaaaattcaataaaagtttttaaaggatcaaaactaaaatctactagtctttcaactagtccatatccaggttttcctactgatttacaagctcagctaatgtctcttatgtgtctctctgatgggaagtcaaaaattaaagaaacaatttttgaaaatagatttatgcatgttcctgaactcaatcgattaggcgcaaatattacggtagaaaaagatactgctacaattataggtaatcaaacatttaaaaggagcgcaggta

SEQ ID NO: 244302 - DNA, 696 bp, Unknown
  Bacterial polypeptide expressing nucleotide sequence isolated from the Sargasso Sea
gagaacctgaaattatagatttatgtaattgtttagtatcaatgggtgctaaaattaaaaatatcggttcaagtagattattaatatgcggcgttgatagcttgaatgaagcaaaacatgaaataatttctgatagaattgttgcaggtacatacctaattttagccattatgcttaattcaaaaattgaaattaaaaaatttaatcccaatcatttagtttcattaataaatattttaaaaaaaatgggtgctaattttgaaatttttgaaaattctgcaaaagtgtatccatcgaagaaactcaggtctgttaaagttgcaactgctccataccctggctttcctacagatttacaggctcaacttatggcattaatgagtatggtcaaaggcaactccgaaataaaagaaacagtatttgaaaatcgatttatgcatgttccagaattaaatcgtttaggtgctcaaattaaagtgaataaagataaggctataatagaaggtagtcaaaattataaaggggctcaagtgatggcaagtgatttaagagctagtgtaagtcttgtgttagcagctttgtgtgctaatggtaaaacaacaattaatagagtataccatctagatagaggatatgagaaaattgaaaaataccttggaaaacttggcgcaaaaataaaaagacagaaaagttaac

SEQ ID NO: 244303 - DNA, 759 bp, Unknown
  Bacterial polypeptide expressing nucleotide sequence isolated from the Sargasso Sea
attgggtgcaaaaacaatatttgataaaggatcattgaatattgattcctcagccgcagataatccagaagcgccttatgatctggttaagacaatgagagcatcattttatgttttaggtcctttgatatctagatttggtagagtaaatgtgtctttgcctggtggttgtgcatggggccccaggccagttgattatcatctgaaaggtttagagcagttgggagctaaattaaaccttgatggtggtaatattcttgcggaggcaaaagagctaatagggaacgatatccattttgagtttccttcagtaggggcgactggaaaccttgcaatggctgcagtaagagctagcgggactactaggctttataattgcgctaaagagcctgagataacacaattatgtaactttttaaatagtatgggtgctaagattgaaggtatcgggacagaaaccctaattattcatggagtagatgaacttcattctgcagatatagagattattccagatagaattgaagcgggtacatttttaatggctggggcgttattaggtgaaattgaagtgaaaaatattataccaaagcatcttgataaggtagttcataaactgcgtgagacaggatgtctattaaaaataaatcaaaacagtataatcataacgccccctgaaaaaatcaaatctgttgatatgacaactactgtataccctggttttccaacagatttacaggctcagtgggtttcaatcat

SEQ ID NO: 244304 - DNA, 322 bp, Unknown
  Bacterial polypeptide expressing nucleotide sequence isolated from the Sargasso Sea
atggataaattaataataaatggtggtaataagctttttggtgatgtccaaataagtggagctaaaaacgcagtattgccaattatgactgctacgttaatagttccaggaaattataaaataaataatgtcccagatcttcgagatacaaggacgatggttgagctattaaaaattattggagcaaatgttcagttttctaataacactctattaatcgatacaaaagaatgcaataatcctcatgctccatatgatttagttaaaacaatgagagcctctttttatgtattaggccccattgctttcacgatttcatgaa

SEQ ID NO: 244305 - DNA, 788 bp, Unknown
  Bacterial polypeptide expressing nucleotide sequence isolated from the Sargasso Sea
agatttcccctcaatatcggtaggagcaacagagaatgttattatagcggcaagtcttgcaaaaggaacaacatatttaaaaaattgtgcatgcgaacctgaaataaaaaatttaacagattttttaaaaaaaatgggtgtcaaaataagctgggtaaaaaaaagagagattaaaattgtaggaaataaaagactaagacctgttagccacaatattatgtttgacagaattgaagctggcacatttgttatagcaggagcattaataagtaatcgtcttaaaattcttaatgtggacactaagattttaaaaaaagaattgacagttttaaaaagaatgggtgtaagacttaaaataaaaaaaaatgaagtactggttttagaatcaaaaaatataaaacctatttctattaaaacagaaccctacccaggatttccaacagatttacaggcgcaaattatggtgctgatgacaaagggaaaaggtaagtctaaaataaaagaaaatatttttgagaatagatttatgcatgttccagaattaaatagaatgggtgcaaaaataaaaatttcaggaaatacatcaacaattactggtttgcagaatttaaatggagcagaagttatggcaactgatctacgtgcctctgtgagtttagttttggctggattaattgcaaaagacaaaactattataaatagagtttaccatttagacagaggttatgaggggttggaaaaaaaattaagaaaatgtaaagcaaatatttccagaattcattactaat

SEQ ID NO: 244306 - DNA, 784 bp, Unknown
  Bacterial polypeptide expressing nucleotide sequence isolated from the Sargasso Sea
aaagtttctgtaacaggtactgaaaatttaatgatggcagcatcattaacacttggtaaaacaatcttgagaaattgtgctaaagagcctgaggtaagtgagttagcaaattttttaaattcttgtggagctaaaatttctggtgcaggcaaatcgataattgaaattgagggaacagatcttctttatggtaaaaaatggaaaattctctcagatagaattgaagcaggaacatatttaattgcagctgcaatgacaaatgggcatgtcaaagtaaataatatatctccttctacaataaaaattattcatcaaaaactaagtgatactggagtaaaaatcaaattagataaaaatgcaattgaggctgatgcgacaacaactgacctacaggctacagatatttgtacaaagccttttccaggatttcctactgatatgcaggctcaatttatggcattgaattcaatatcacatggcagttcaattattgaagaaacagtttttgaaaatagatttcagcatgtaattgaattaaggaaaatgggtgcaaatataaatcttgaaagaaataaagcaaaaataattggagtccccaatcttgtaggatcagtcgtaatggcatcagatttaagagcatctgctagtttagttttagctggtttagttggtaaaaatcgaactcaaatcgatgatatatttcatatagataggggttatgaatgcattgaagaaaaattaaataaattaggagctgaaattattagggagcccagtactctag

SEQ ID NO: 244307 - DNA, 790 bp, Unknown
  Bacterial polypeptide expressing nucleotide sequence isolated from the Sargasso Sea
gcaaattaaaaataatttagttggaagttttattgatctacctttttcaagtgttggagcaactgaaaatattatgatggcagcagttttatctgacggcatgacaactattaataatgcagcaaaggaacctgaaataacagatttagctgattgcttaaataaaatgggggcaaaaatatataatgcaggaacaaatacaattcagattcaaggagtaaaaaatttattaagggccgaacatactataataaacgatcgaattgttgctggcacttttattattgcagctataatgcttaataaagattttttaataaaaaaaattaatcccaaacatcttaccaatgttattgatgttttagttaaaatgggagcaaatttagaaattggcaaagattttataaaagttttaaaatcagatttaataagtggtattgaaattgaaacccagccctatcctggatttccaactgatttacaggctcaaattatgtctttaatgacattggcaaatggaaattcaaaaattaaagaaaatatatttgaaaatagatttatgcatgttcctgagctaaatagattgggtgctaaaattaaagttaaaaatgatgaagccttaatacagggtaataatacatttaaaggtgctcaagttatggcaagcgatcttagagctagtgtcagtcttgttttggcaggcttatgtgcagaaggagaaactataataaatagggtctatcatttagatcgaggatatgaaaaaatcgaagaaatacttggcaaatgt

SEQ ID NO: 244308 - DNA, 853 bp, Unknown
  Bacterial polypeptide expressing nucleotide sequence isolated from the Sargasso Sea
acaagaccaatagatttacatttaaaagcattatctaaacttggagtacagtataaaattgtacaaggatacgtatatgcttcagctccaaaaggattagtaggatcaaatattcgtttttcaaaaatatcagtgggcgctactgaaaatttgattattgcagcaagtttagcaaaaggctcaactactttgagaaattgcgcaatcgaaccagaaataaaagatttggttaattttttaattaaggcaggatgtaatataaaatggattggaaaacgtacactcaaaatcaatggagtgagcaaaattaaagaaacaagttattcagtcatgtttgacagaattgaagctggtacatatttgattgcagcagctgttacagaggggaatttgaagattaagaatattattccaaatattattaaaacagaaatagccatcctaaaaaaaataggtgctagaattaatttaaaaagaaatgagatacacattattggtaatagtaaaattaaaagtgttaatattaaaacttcaccttatccaggggttgcaactgacattcaagcacaattgatggtattgttatgtaaggcaaataataaatcaactattaaagagaatatatttgaaaatcggtttatgcacgttgctgaattaaatcgaatgggtgcaagaattctaattaatggaaataaagctttaattgaaggaaatattagttttgcagcagcagaagttatggcaacagatttaagagcttcagtttctttaattttagctgcattaacagctgagggaaaatcagtaattaatagaatatatcatctagatcgtggttatgaagatatgaaaa

SEQ ID NO: 244309 - DNA, 568 bp, Unknown
  Bacterial polypeptide expressing nucleotide sequence isolated from the Sargasso Sea
aatgtttgatagaattgaagctggaacatttattattgcaggagctttaatgggaaaaaaattaaaaatatcaggaattcaaaaaaattttttaaacacagaacttaaaattttaaaaaaaatgggtgttaatatgcaaattaacaaagatcatattaacgtactttattcatcaaaaataaaaccagtgaaaataaaaacagaaccttatcctgggtttcctactgatctacaagcacagatgatggttttaatgacaaaagctagaggaaaatcacaaataaaagaaaatatttttgaaaacaggtttatgcatgttcctgagctaagaagaatgggggcaaaaattaatacctcaggaaacttatcttatataaatggtcctcaaaatttaaatggtgccgaggttatggcaaccgatcttcgagcatcagtaagtttggtgctcgcaggattgattgcaaataatgaaacagtaataaatagggtgtaccaccttgatagaggatatgaggatttggaaaaaaaactcaaacactgcagagcaaagatttctagaattttttag

SEQ ID NO: 244310 - DNA, 664 bp, Unknown
  Bacterial polypeptide expressing nucleotide sequence isolated from the Sargasso Sea
cttctgaatgccatgggagcaagaattgaaggcctaggagaagattgcataacaatacaaggagttgaaaaccttttcggcgctgaaattgaaattattcctgatcgaatcgaggcaatcacaatgattattgccggaataataacccaaggtgaactcgagattgaaaatatcaatccttcacatatagaggaacctattgagttgatcaggcaatgtggcgcaattcttgagatatctgatcagagtttatttgtgaaaggctctgatgagattcttcccattagttttgagaccgagccatatccaggaataccaactgatattcaggcgcagctgatggtattaaatagcatttcgaaaggtgattctaagatcactgagacgatttttgagaatagatttatgcatgttttggaactcaaaagaatgggcgcaaatattggaattgatggaaatactgcagaaataaggggcgttacaagtttaaattcagcgcctgtaatggcaacagatttaagagcatctgcagctttaattcttgccggtcttattgcagaaggagaaaccataattgatcgcatttatcatctcgatcgcggatatgagagtgttgaagaaaaactatcaaatgtcggtgcaaaagttagaagaattgactaat

SEQ ID NO: 244311 - DNA, 718 bp, Unknown
  Bacterial polypeptide expressing nucleotide sequence isolated from the Sargasso Sea
actgtaatcgagaatgccgctagagagcccgaagtagttgatttagctaattgtctcacagctatgggagctaacattcaaggagctggtacagatattataactatcgagggagtagaaaagcttgaaggtgcatctttcagtgttatgccggacagagttgaagtaggaacttatctaacggcagtagcaatgactggagggaaggtaaaaattaaatcagccaaaccagaatatctttcttcagtaatatctaaacttgaacttacgggtgctctaatctcgtctggagagaattgggtagaaattaatatgaacgaacccaagcctaaagctattagccttactactggaccttatccttcttttccaacagatatgcaggctcaatttgtatcattaaatgctattgcaaatggcaactcaactgttacagaaactgtttttgagaataggtttatgcatgttcaagaaatagcaagaatggggggcaacattgccctaaaaggaaatactgctgtaattgaaggaattaagaaattgaagggtgctccagttatggctacagacttgagggcttcagcaagcttagttttagcaggtttagttgctgaaggagcaaccaccatcgatcgcatttaccatatcgatcggggatacgaaagaatagaagaaaaattaaaaatgctaggtgcagatatagaaagaatatcctgag

SEQ ID NO: 244312 - DNA, 922 bp, Unknown
  Bacterial polypeptide expressing nucleotide sequence isolated from the Sargasso Sea
cttatccggggcgggacaccactccagggccgacttgccgcttctggctccaagaacgcagccttgccaattatggcagcaacgttgcttgccgaggatgcctgcgaattgcagggcgtaccagtgctgcgcgatgtaaccactatgacaacgcttctcgccagcctgggtgccagcgtgtctcaacaggagccagtaggtacattgcgcattgagagtaggtcggtgcagcggttcagggcgccctatgatctggtcaagacaatgcgagcatcgatattggtattgggtccgttattggcgcgtttcggcagggcggaggtttcctttcccggggggtgtgctatcgggagtcggccagtagaccttcatattcgggcgttggaggcaatgggtgcgcggatttcagtcgaatccggctacatcatcgcggaagccaccgagggtctgcgcggagcagatttttccttcgatactgtgacggttggcggtacagagaacgccatcatggcagcggttctggcgcgtggcgagagcgtgctgagaaatgtggcgcgggagccagagataggggatttggtgggtttcctgcggggcatgggtgcccagatcgaaggcgacggaacggacaccctggtggttcagggtgtatcggcgctgcatggcacaacctatcgtgtcatgccggaccgcattgaggtcggtacttatctggtagcggcggccgcgacgcgaggacacatcacgatagacggggtgaaccctgatctattgggcgtcgtgctcgacaaacttcggcgagctggcgcggatctaagctgcgcgtcagactccgtggctctggatatgagaggcaggcgaccgctggcagtggacatcgagacgcagccttttcccggttttctgaccgatatgcaggccc

SEQ ID NO: 244313 - DNA, 887 bp, Unknown
  Bacterial polypeptide expressing nucleotide sequence isolated from the Sargasso Sea
aatgagagtgctcaaaaaagaaaatgttataaaaattttaaatgataacagaaagataaatactttagctccttataaacttgtaaagaccatgagagctggagtattagttttaggttcattactaacaaaatatggaaaagcaaaagtttctttaccaggaggttgtgcgataggaaccaggcctgttgacttacatttatttgcacttaaaaaatttggagcaaaaattagaatcaaagatggatatattattgctgaagcaaaaaagggattgagagggtccctaataaagtttccatcaatttcggtaggggccactgaaaatgcactattagctgcgttcaatgcaaaaggtaaaacagttcttaaaaattgtgctgttgaacctgaaataatagatttaattttatttttgaataaattgggagctaatataaaaatttctggaagaacgatatcaatttatgaaaaccataataaaaagaaagaaattaactataaaataatgtttgatagaattgaagctggaacctacatgattgcaggagcattggttggaaaaaggattgttttaaataaaattaagccaaaaataattaaaaatgaaattgaaactataaaaaaaattggagcgaaaattaaagtgaaaaattcctcacttataattacaaaagcaaaaaaattaaaacgtatcaatgttttgacaaaaccctatcctggatttccaacagatcttcaagctcaactaatggttcttttgactcaagctgacggtatctcaaaaataaaggaggatatttttgaaaatagattcatgcatattccagaattaaatagaatgggtgcaaatattgaagcaaaaaataaagttgcaatcataaaag

SEQ ID NO: 244314 - DNA, 911 bp, Unknown
  Bacterial polypeptide expressing nucleotide sequence isolated from the Sargasso Sea
tgcatggggcccacgtccagttgatttccatttaaaaggattagaaaaattaggagcaaagatcacattaaatagtggttacatactcgctgaagcaaaaaggttaaagggtactaaaataagttttgagtttccgtcagttggtgctacaggaaatattgctatggccgcaactactgcacaaggaacgacagttatagaaaatgctgcgagagagccagagatagttcaattatgtgagtatttgaatgccatgggtgcatctatcaaaggaataggtacatcgcgcattatcattgaaggagtggattcgcttcattctgcagatatcaaggtaatcccagataggattgaagctggtacatttttaatggcaggttcagtattaggaaaaataaaacttacggatgtcaatccttcacatttggatactgtacttttaaaactcaaggaaattggtgctgatatcaatacctcgtcgaattcgattacaataaaaccaacagataatattaaacctgtagatatgactactgcagtataccctggttttgcgaccgacctacaggctcaatgggttgcactgatgacgatttcagctggttcttcagttattacggacacggtttaccatgatcgcttcagtcatgttcccgagctcaatcgctttggagccaatattagggttgataataatactgcttttataagaggagtagaggagctagttggtgctcctgttatgtctacggatataagagcaagtgctgcactaataattgcaggactttttgcaaaaggcaagacaactgtgagtcgtatttatcatattgataggggctatgaaaaaattgaagataagttccgtttattaggtgcaaatatctacagagaagattcaaatggataat

SEQ ID NO: 244315 - DNA, 823 bp, Unknown
  Bacterial polypeptide expressing nucleotide sequence isolated from the Sargasso Sea
ttaggtgctaattttcaagttgaaaatggttatgttgtaggtgaagttgaaaaagaattggttggtaaccatattactctaccttttccaagtgttggagcaactgaaaatattttgatggctgctgcaattgcaaaggggaaaacaataattgaaaatgcagcaagagagccagaaataaatgaccttacatttgttttgaataagatgggtgcaaaaataaatattaaaaaaaatggtattataaaaattgatggtgttaattctctctccaaagctacgcacaagattttaagtgatagaatagttgcaggcacatttgtaattgcggctgtgatgataaataaaaaatttgaagtaaaggacattgaaagtattcatttagaggctttaacttctgcattgattgaaatgggtgcaaaattaaaaattaacaaaacatctattttaattatgccaagtaaaaatttaaatggcataaagattcaaactgctccctatccaggctttccaacagatttacaagcacaaattatggctttgatgtgtgtagtaaaaggaaattcacaaataaaagaaaatatatttgaaaatagattcatgcatgtacctgaacttaataggttaggagcaaagataaaagttaaaaaagatctggctctaatcacaggtaatagaaatcttaaaggtgcgcaagtcatggcaagtgatttaagagctagtgtaagtttggtgcttgctgcattgtgcgcagaaggtgaaagtattattaatcgagtttatcatcttgatagaggatatgaaaaaattgaaaatactcttg

SEQ ID NO: 244316 - DNA, 610 bp, Unknown
  Bacterial polypeptide expressing nucleotide sequence isolated from the Sargasso Sea
aatggataaaataactgtaaagggcaatgctgaactttttggatcaataaaagtttcaggttctaaaaatgcagctctaccaatattaatttcaagtttgttaagtggtgaagatttagaattaagtaatcttcctgaattggaagatataaataatatgaaaaaattattactaaattatggagtaaaaattattgaaaattcaaatcaaaccattttaaatgctcataatattataaataaagtagctgattatgatgtagtaagaaaaatgcgagcatcaattttaattcttggtccattgttaggaagatttaataaagctgtagtttcccttccaggtggttgtgcaataggaactcgaccaattgatatacatttagatggtttatccaggctaggagttgattttacaattgaaaacggtttagttaaagcaaatgctaaaaatcagttaatcggaaataatattacattgtcatttccaagtgtaggagctactgaaaatatattgatggctgcggtattagctaagggtagcacgataattgaaaatgctgctatggaacccgaaattatagatttaatattgtgtttagaaaaaatggga

SEQ ID NO: 244317 - DNA, 838 bp, Unknown
  Bacterial polypeptide expressing nucleotide sequence isolated from the Sargasso Sea
attagagaatgtccctgatttagttgatgtccatacgatgtcccaagtcttgtcatcgcttggggtaagtgtagtttcacaaaatgagagtaaaaataatctttctttcacttattctgactctgacagtgtaatagctgagtatgatttggttagaaaaatgagagctagcatcttagttcttggcccacttctagcgcgcaagaggcacgctagtgtctcacttcccggtggatgcgctataggagcaagacctgttgatttacatattaatgctcttacaaaacttggagcatcatttgaattagagagtggatacataaaatgtaatgctccaaacggtttaattggaaacaaaataaattttgacagggtttctgtgggtgcaacagaaaatatcgttatggcagcctcactagctagaggtgaaagcgaaattacaaatattgcgcttgagccagaggtcatggatctcatcagttgtttaaacaaaatgggagcaaaaattgaacttggagataatcgaaacattttaatcgaaggtgtagatcggctgaaaggaacagtgcactctataattccagatcgaattgaggcaatcacctatatcatagcgggggccttaattggaaaaaacttagaaattacaaacataaacatagagcacgttagcaatgtgttagaaatattaaatgagctttcaattaattttgcaatgaaggagagttctattactgttgagcaatctagaatttcagatggaataactatcgacacaatggaatatcctggttttccaacagatgttcaagctcaaatgatggttttattgtcactc

SEQ ID NO: 244318 - DNA, 610 bp, Unknown
  Bacterial polypeptide expressing nucleotide sequence isolated from the Sargasso Sea
gggcgttgatgatctgcatggagcaactcattcggtgatttctgatcggattgaggccggtacatttgccattgccgcagccatgaccgatggggatctgacattacaccattcccgagggcacaatcttgacgcgctgttgatggtgctgcgcgaaacaggtgccgctgtcagtgaaagtgacaatttgataaggattgtgggtaatggtcgccctgtagcggctgatattgcgactgatccttttccagggtttcctactgatttgcaggctcaattcatggcgatgatgtgcattgctacggggtcttcgcgcatttctgagacaatttttgaaaatcggttcatgcatgttccagaattactgcgcatgggagccgatattcaggttgatggaggggttgcaatggtacgagggcgtgatgcgcttagcccggcaccagtgatggcaactgatttgcgcgcctcggtatcgctcgttctggccgcactaacgattaccggaacaagccaaattggccgaatctatcatcttgatcgtgggtatagcaggctcgaggaaaaactcggaaagtgtggcgcaatcttgcagcgggtcaaggcggtataa

SEQ ID NO: 244319 - DNA, 571 bp, Unknown
  Bacterial polypeptide expressing nucleotide sequence isolated from the Sargasso Sea
aaaatcatttttgacagaatagaggctgccacttatttagttgctggagtcttgatagggaaaaagattgtattaaataatgttgatagacaaatttttaagtacgagatagatactttaaaaaaaatgggagctaaaatgaaaactgcaaaaaactcaataatagtttacaaaagcagcacaattaaaaagaccaacatatcaactaaaccatatccaggttttccaaccgatttacaggctcaattcatggtcctgatgacccaagcaaaagggctgtcgacaataaaagaaaacatttttgaaaatagatttatgcacgtacctgaattaaaaagaatgggtgctaagatacaaataaaaaacaaaacagcatatattagtggaccaacaaaattaaatggcgcggaagtaatggctactgacttaagagcttctgtgagcttagttctagctggattagtagctaataataaaacaataattaacagaatttaccacttggataggggttatgagactttagaaaataaacttaaaaagtgcaaagcccagataagaagaatttaag

SEQ ID NO: 244320 - DNA, 913 bp, Unknown
  Bacterial polypeptide expressing nucleotide sequence isolated from the Sargasso Sea
aatggatcgaatccatattttaggtggagaaaggctggaaggcgaagtattaatcgggggcgcaaaaaatgccgctctgcctttaatggcatcctcccttctctcctcttctcctttaactttgagtaatttgccacatttagttgatattactaccatggtccaattgctaggtgatttaggtgtaaaaatcagtatggatggagattctccaaatggaggttacgcgggccgagcaataaaaatggatgcctctgaaccactggaaaaatcagcgccctatgatctagtgaggaagatgagagcttcagtacttgttttaggtccacttttggcgaggtggggggaggcaagggtgtcaatgcccggaggttgcgcgataggaacaagacctattgatttacatctttcggctttagaagctttaggtgctaccatcgatttaaaggagggatatgtaaatgcaactgcgcctaacggacttaagggttgtgaagtaaattttccatttgtttcagtgggagctacagaaaatattttaatggcttctacgttagctaaaggtaagactattataaagaatgcggcccgcgagccggaaataattgatttagcaaattgtttagcggatatgggcgccagcattaatggagctggaactgatactatagaggtggtagggaccgaggaattgaatggtactgattatcaaataattcccgatagaatagagacaggtacttatgcaatagcctcggcaattaccggtggagacttgctgctgagaggagcaaggtttgatactttatcggcatttttttccctgctcggtaaagccggcgttgaagttattcaggagaatgaaggtgtgaggatcaagcgtacaacggagccgcttgccgctgttgacatt

SEQ ID NO: 244321 - DNA, 475 bp, Unknown
  Bacterial polypeptide expressing nucleotide sequence isolated from the Sargasso Sea
ttgatttttttaaaaaagattggagctaaaattactttttctggcacaagaggtttaaatattcatggagttaaaaatttaaagtctacaactcataaagttatttttgatagaattgaagctggcacctatattatagcttcagcattaacaaaaggtaaattaaaaattaagaatgttattccaaaaattatatcaaatgaaatcagtttattaaataaaatgggcgtggttatagataaaggaaaaaaatatattacggtaactcgaccaggaaaaattaaaaacactaatataacaaccagtccttatccaggatttccaactgatctacaagcgcagattatggttttgatgacccaagccaatggaatctcgaccgtaaaagaaaagatattcgaaaatcgttttatgcatgttcccagaattaaaaagaatgggtgcagacattcaaatcaagggcaatgttgcaaaa

SEQ ID NO: 244322 - DNA, 910 bp, Unknown
  Bacterial polypeptide expressing nucleotide sequence isolated from the Sargasso Sea
aatgtctgataaacctttgtttctagctgactatgaaatagtaaaaaagatgagagcttccatccttgttcttggaccactattagcgaggtttgggcaagcggtggttgctcttcctggaggctgtgcaataggtgcgaggccagtcaacctccatttgatggcactagaagcacttggagccagcttttcaattgaaaatggttatgttaaaggaaaagtggttagttcgttaaaaggatgcaaaattaaatttccattcgagtcagtaggggccacagcgaacacgattatggcagctgttcttgctagaggaacaacagagttggtaaacgtagctagagaaccggaaataatagatttgtgtaggtgcttaaagtcaatgggctgtaacattgaaggtgatggtgaacgcaccattgttattgagggtgtaaacaacttgagaggaacaatccataatgttgtaatggatagaattgagcttggtacatatatgattgctggcgctatttctgacggagatataaagctaactgggggaaacgtagctttgcttgaaaagttcattgaaaaactgtacgagataggaatagagattaataaatctgaagattatttaagggtacggagaatcaaaaacgaattcatttaccctactaatattgtcaccgagcccttccctggatttccaacggatctacaagcgcaaatgatggcattactgtctattgctgatggggtttcaaaaatcgaggaaaaaatttttgaaaaccgatttatgcatgtgccagagcttatcagaatgggagccaatattgagacagagggccgaaaagccattatatcaggagttcatcaattaattggtgcaccggtcaaagctacggatttgcgcgcatcggtctct

SEQ ID NO: 244323 - DNA, 605 bp, Unknown
  Bacterial polypeptide expressing nucleotide sequence isolated from the Sargasso Sea
atctaatcaacctcgaaatcttaaaatttcttatgagctcgttagaaaaatgagagcatcatttctaattttgggaccacttttgacaaaatatggttatgctgaagtttctttacctggcggatgtgcaattggaacgagaccagtggatcttcatattagtgctttagaaaaaatgggggctgagtttattattgaggacggatatataaaaggaaaagttaaaggaaggttaaaaggttgtgaaatcacgttaaaaaaaatatccgttggggctacggaaaatattataatggcagccacattagctgatggtgaaacaatcataaaaaacgcagcacgtgaacctgaaatttcagacttatcaaattttttagtagactctggtgcagaaatagatggttatggaacaaatgtcataaaaattaaaggaaaaaaaagattaagaggatgtgaattttccgtaatgccggacagaattgaagcaggcacatacgctttatgtgtaatgggatgttctggtaatataattttagaaaatgtcaatgatttgatttgtaatcatttaaagaaaatttttaaacctttgaatgttttgtttctta

SEQ ID NO: 244324 - DNA, 757 bp, Unknown
  Bacterial polypeptide expressing nucleotide sequence isolated from the Sargasso Sea
gatgaatatcaattatacaataaataatggttatattgttgcaaaaagagaaggcccgattaaaggattaaattttaaattagaaaaaaaatccgttggttgtacacatttttttcttatgcttgcatgtttagcaaatggcacatctaagttatctaatgcatcatgtgagcctgaagtaatccatcttggattgttgttaaataaaatgggtgccaaaataaaaggattaggatcaaagaaaataataatagaaggcgttaaaaaactaaatggcgttactgaaattataccctcagatcgaattgaaacaggtacttttgcaatagcagtttctgcaaccggaggaaaagtaaaattagaaaatacaaattatgaagaaaataaattactttttaatatattagaaaaaacaggatcaattattaataagtcaaaaaattcaatatcaattgaaaaaaaacataataaaatttatgcagctaatattaaaactagcccctatcctgggtttccaacagatttgcaggcacaaatcatggcgttaatgacaatttcaaatggaaagtcagaaattaaagaaaatatttttgaaaatcggtttatgcatgtacaggaacttgtaagaatgggcgctaatattaaattggataaagatagagcaattataaaaggcgttagaaggctaaacggagcaaatgttatggctacagatttaagagcatccgcatcgctaataatagctggtttagttgct

SEQ ID NO: 244325 - DNA, 985 bp, Unknown
  Bacterial polypeptide expressing nucleotide sequence isolated from the Sargasso Sea
ttcatcagctaatttaaaagatactgaggctagatatgaattagtgaaaacaatgagggcatccatattagttcttggcccattgatagcaaaatatgggaaagcaaagattgctttgcctggaggttgtgccataggaactagaccagttaactatcatcttgatgcattaaaaaaaatgggagcaaaaataaaactaaagaatggttacatcgaagcaacgtctaaaaagttacatggagctgatataagatttgaaggagttaccgtaactggaactgagaatttaatgatggccgctgcacttgctgagggcacatcaaagcttacaaatgttgccaaagagccagaaattattgatctggctgatatgcttaattcaatgggtgcaaaaattaaaggcgctggatcagatgaaataattatagaaggagtgaatgacttaaaaggtactgtatttgatatacctgcagacagaatagaggcaggaacatatttagtagccgcagcagttaccaatggagaaatcactgtcgatggaataaacccagaaagattgatgacagttattaataaattagaaaatacaggagctaagttgagttatgataaaaaatctatttcaatttcaatgaaaaaaagtattccagagcctgtagacataactacagctccctttccagaatttcctacagacatgcaagcacaattctctgttattaatgcaatttctaatggaacttcaaatatttatgaaactgtttttgaaaatagatttatgcatattttagaattaaatcgaatgggttgtgatattgaggtgaaagggaatcatgcaaaaataaatggcgttaaaaatatttatggggcagaggttatggctacagatttaagagcatcagccagtcttattctggcaggcttatgcgcaaaaggagaaacagttgtggatagaatttatcatattgatagagggtatgagcgt

SEQ ID NO: 244326 - DNA, 319 bp, Unknown
  Bacterial polypeptide expressing nucleotide sequence isolated from the Sargasso Sea
tggccattctatttccctggatatgacggaggatgtcatccagcctgttgatattgttacagctccttttcctggatttccaacagatatgcaagcaccgtttactgttctaaactgcatcggatcaggtgaatcaagtgtaacagagactatatttgaaaatagatttatgcatgtgcaagagcttaatagaatgggtactgatattacaattaatggtactactgcacttattaatggagttgattctatttccggggctcaagtaatggccacagatttaagggcttcagcaagtttgatactggctggtttaata

SEQ ID NO: 244327 - DNA, 225 bp, Unknown
  Bacterial polypeptide expressing nucleotide sequence isolated from the Sargasso Sea
tacaaattaagggaaacattgcctctagtacaggtgttgattcactgacagcagctcctgttatggcaacagatctgagagcctcagcaggcctaatcattgctgcgcttgcagcaaaaggtgacaccatcattgatagaatctaccatatcgatagaggatacgagagagtggaagaaaagctccaacaactgggagctagagtatcaagagaaaattcttgaa

SEQ ID NO: 244328 - DNA, 905 bp, Unknown
  Bacterial polypeptide expressing nucleotide sequence isolated from the Sargasso Sea
tttgttaagtgataagcaagtttctattttaggtattccaaaattaacggatactttcttttttttagaacttttatcttcttttggagttgaggttaaaggattagataactttaaaaacacaaagaaatttattttaaatgcaaaaaaaattacaaataataaagctccttataatcttgttaaaaaaatgagagcatctattttagttctggggcctttattagctaggacaggaaaagcaattgtttctttaccaggcggctgttcaattggtttaagaccagttgatatacacttaaaatctttggaaaaattaggagcaagaatttttattgaaaaagggtatatttatgcggaagctttaaaaggtttaaagggtaataaaattgtttttcctaaagtatctgttggagcaactattaatgttttaatggctgctgttttagcaaagggtacaacagaaattcacaatgctgcaaaagagcctgaaatagaagacttgggtctttttttaaaatctatgggcgcaaaaatagaaggtttgggaacaaataaaattttagtagaaggagttacaaaattggaaaaaacaaattataaagtaatgctcgataggatagaagctggaacatatgcattagctgttgcaatagctggaggtgaaatagaattagtaggtgctgaaaaaaaattattaactttttttttaaatattctagaaactataggtgtagagtattttgttactgaaaacagtataatttttaaaagaaactcaaactcattaaactctatagacgttacaaccgaaccatacccaggatttccaacagacttacaagcgcaattaatggctgtaatggcaatatcgaacgggacatcagttataacagaaaatatat

SEQ ID NO: 244329 - DNA, 199 bp, Unknown
  Bacterial polypeptide expressing nucleotide sequence isolated from the Sargasso Sea
attaaaggtgttaaatctttgtctggtgcagaagtaatggctactgatctaagagcatccgcaagtctaattcttgctggattatgtgcaaaaggagaaacaattgtagatagaatttatcatattgatagaggatatgaacgaattgaagaaaaattaaattatttaggggcaaacattgtaagactgcctagttaga

SEQ ID NO: 244330 - DNA, 424 bp, Unknown
  Bacterial polypeptide expressing nucleotide sequence isolated from the Sargasso Sea
aatgcagtacaaattattcggtagtaaaaaaattagaaatatgaaaattaaaactgctccttatcctggatttcccacagatttgcaggcgcaaataatggtgctactgtgtaaggcaaataaaaattcaattattcaagaaaatattttcgaaaataggttcatgcatgtggctgaacttaatcgaatgggtgcacaaatttcaataggtggaaataaagctcttgtaaaaggaaatataaactttgcacctgctgaattaatggcgactgatttaagagcttctgtttctttggttttagctgcactaacagcgaaaggaaaatcagtgataaatagaatttatcatttagatagagggtatgaaaatattgaagtaaaattaaaaaaagttggcgcaaagataaagcgagttaatcaatga

SEQ ID NO: 244331 - DNA, 562 bp, Unknown
  Bacterial polypeptide expressing nucleotide sequence isolated from the Sargasso Sea
tagagttgaagtcgggacatatctcactgctgtggctatgaccggtggtttagtaaaaataaaatctgccaaacctcaatatctttcatctgttatattgaaactagaaggttgcggcgccactatcaatcaaggtgaagattgggttgaaattaaaatggatgcctctagaccacaagcaacaagtttaaccacaggaccttatccttcttttccaacagatatgcaggctcaatttgtttctttaaattctattgccaaaggaaattcaacagttactgaaactgtttttgagaatagatttatgcatgttcaagaaatagcaagaatgggcggcaatataacccttaagggcaacacggcagtgatcgaaggaataaacaaattaaaaggagctcctgttatggcaacagacttaagagcatcagctagtttggtcttagcaggactagtagcagagggagatacgacaatcgataggatttatcatattgacagaggttatgaaagaatagaagaaaagctgaaaatattgggagctgatattgaaagaatatcttaa

SEQ ID NO: 244332 - DNA, 634 bp, Unknown
  Bacterial polypeptide expressing nucleotide sequence isolated from the Sargasso Sea
gggggttggtaaagaagccattgatatcattggtgtaaaaaaactaaaaacaacaagacacaaagtaatttttgatagaattgaagcaggaacttatattattgcttcagctttaacaaatagcactttaaaaattaaaaatattgattcaaaaattatgtctactgaaattaatgtattaagaaaaatgggaattactattattataaaaggtaataatttaattattaaacccattaaaattttaaaaaatattaatattagtactaagccatatccaggatttcctactgatttgcaggctcaaattatggttttaatgaccagagccaatggtatttcaaaaattactgagaatatatttgaaaatcgatttatgcatgtttcggaattgagaagaatgggagcacaaattgatattaaaggtaatagggctataatttttggaaataaaaaattaaacggagctgaattaatggctactgacctaagagcatcagtctctcttgttcttgcagccttagtggcgactaacaaaacaattataaatagaatataccatttagacagggggtacgagaaaattgaaaaaaaattatcaaaatgtggtgcgaaaattagaagattgcaatga

SEQ ID NO: 244333 - DNA, 937 bp, Unknown
  Bacterial polypeptide expressing nucleotide sequence isolated from the Sargasso Sea
ggagaggcaaaggtttcattgcctggaggttgtgctattggagctcgaccttttgatctccatattcagggcttagaaaaattaggagcaaggatagatatcagagacggatatatattggcctccgcagatagattgataggctcgtcatattgttttccaaaaaagagcgtgactggaactgcgaatatattaatggctgcaaccttgtcagaggggcaaacagaaatcgtcaatgcagcttgtgaaccagaaattgttcaacttggtgagcttcttaatgctatgggagcaaaaattgatggcgtcggaggagattgcataaaaatagaaggtgtagaaaatcttgtcagcgctgaaattgaaattattccagatcggattgaggcaattacaatgattattgctggaatcataacccaaggtgagctcaagattgagaatatcgatccttcacatatagagggacctattgatttgatcaggcaatgtggtgcaaagctggagatatcagaacgcagtttattagtgaaaggaccagatcagattcttcccattagttttgaaactgaggcttatccaggaattccaactgatattcaggcgcaattgatggtattaaatagtattgcaaacggtgactctaagatcacagagacgatttttgagaatagattcatgcatgtattggagctcaaaagaatgggagcaaatataagtattgatggaagcactgcaaaaataagcggtgtttcaagattaaattcagcacctgtaatggcaactgacctgagagcttctgccgctttgattcttgcaggtcttattgcaaaaggagaaactgtgatcgatagaatttatcatctcgatcgcggatatgagagtcttgaaaaaaagctatcaaatatcggtgcaaaagttcgaagaattgactaat

SEQ ID NO: 244334 - DNA, 812 bp, Unknown
  Bacterial polypeptide expressing nucleotide sequence isolated from the Sargasso Sea
aatggatagattaattataaaaggtaaagccaatttaaaaggatcaattaatattaaaggttcaaaaaactctgctttaccaattatggtaagtgcacttttatcaaaaaatacattaaaattaaaaaatttacctaaacttgatgatattagcaatatgtcaaaacttttagagagctatggggcaattattaaaacttcaaaagataatttagaaattgattgcaataaaattattaataaagatgcagattatgacatagttagaaaaatgagagcatcaattttaatattgggccctttactagctagatttggtagtgctagaatttctttacctggtggatgcgctataggaactaggccaattgatatacatcttgaaggattaaaaaaattaggtgctaaatttaccgtagaaaatggttacgtaataggtgatgtatcagataaattaattggaaatcacattttattaccttttccaagtgttggcgcaactgaaaatattttgatggctgcctcaattgcaaaaggaaaaacaatcatcgaaaattctgctatggagcctgaaatagctgacttagcagttagcttaaataaaatgggagctaaaataaaaattgaaaaaaaaggaattattaaaatagaaggtgtaaaaaaattatataaagcatctcataaaataatgagtgatagaatagttgctgggacttttattattgcggcagtaatgttaaataaaaattttgtagtgaaacaaatagatagctcacatttaaaagctcttactgatgctttgcaacgtatgg

SEQ ID NO: 244335 - DNA, 777 bp, Unknown
  Bacterial polypeptide expressing nucleotide sequence isolated from the Sargasso Sea
aaatttgagggagttacagtaacaggaacagaaaatcttatgatggctgcaactcttgctaagggccaaacaatactaaccaatgttgcaaaggagcctgaaattgcagatctagctgatatgcttaattctatgggcgcaaagatatctggagcaggaactgacaaaatagttattgatggcgtagataaacttaaaggcacaatatttgatataccagcagacagaattgaagctggaacttatcttgtagctgcagctgtaaccaaaggcagtattactatcgatggaattaatcctaaccgcctaatgaaagttattgataagttaagggctgctggagctgaaattgattacaatgaagattcaatttcaattaacatgaaattagaatttccaaatccagttgatatcacaacagctccttttccagaatttccaacagacatgcaagctcagttttcagtaattaatgcaatatcgacaggaactgccaatatatatgagactgtttttgaaaatagatttatgcatatcttagaattgaacagaatgggttgcgacatttctgttaaaggcaatcatgctgttattcaaggagttaaatcaatttatggagctcaagtaatggcgactgacttaagagcttctgcaagtttgatccttgctggcctgtgcgctgagggcgaaacagttgttgataggatttatcatattgatagaggatatgaaagaatcgaagaaaagctaaactatttaggtgcaaatattattagg

SEQ ID NO: 244336 - DNA, 934 bp, Unknown
  Bacterial polypeptide expressing nucleotide sequence isolated from the Sargasso Sea
catgacgtgacgactactaccagattactaacccaaatgggcattagtgttactatggatgagtttatggatattagtttagatccgtcaactattcataatctatatgcaccttatgaacttgttaaaacaatgcgttcttcaattcttgttcttggcccactgttgactaaatatggggaagccaaagtgtctttacctggtggatgcgcgattggcatgagaccggtcgatatgcatttagatgccctccaaaaaatgggagcaagtatctctgttgaaaatggatacatcacagcaaatgtgaagagattgaaaggcgctgatattcttttcccgcaaaagtctgtaactggcacggagaatattattatggctgcaactttggcaaaaggcacaacaacaattagaaatgctgctagcgagcctgagatctcagatttgtgtctcttccttaataaaatgggtgctcaagtcagcggctttggtagtgatgaagttacaattcagggtgtggattctctcaaaggcactagacacaaaccactgccagatagaatagaagcaggtactttcatggtagcggcggcaattacacaaggcgacatcgaaataaataatattgtacctgagcatagtcgtgctgtaatagataaacttatccaatcaggagctgaaataaaaatactcaaagattctgtaagggtaaaaatgaacaaaagaccaagggcgataaacattgagacaaatgcttacccctttttcccaacagatatgcaagctcaaatgactgcattgaattgtatagcagagggagacagctctgtaaaagagaatatttttgaaaacaggttcatgcatgcacaagagctaataagaatgggtgcaaagataagagttcatgacaacattgcagaaatatctggtactaaag

SEQ ID NO: 244337 - DNA, 937 bp, Unknown
  Bacterial polypeptide expressing nucleotide sequence isolated from the Sargasso Sea
atgttaagtgacgaaatggaagttcaagttgatacttcgaatattcaaaacctcaatgcacgttacgaactagttaaaactatgagagcatcaattcttgttttgggacctctgttggctaggtttcagcaagcttcagttgctcttcccggtggatgtgcaatcggaagtcgtcctgtaaaccttcatatagaggctatgcgagcaatgggagcagaggtaaatattgtagatggaaatatcaaagcaaaagttaatggacgtttgaagggcgcgaaaataatatttgaaccagtaagcgttacgggaacagaaaatgtgattatggcagcttgcttagctgatggtattacaactatagaaaatgctgctagagagcctgaagtaatagatttagctaattgtcttatgcaaatgggcgcaaacataaaaggtgcaggaactgacatgattattatagaaggtgttgatagactagaaggtgcatcgtttagtgttatgcctgatagagttgaagttgggacttatcttacagcggctgctatgactggtggtttagtgaaaataaaatctgctaaaccacaatacctttcatcagttatatcgaaactggaaagttgcggcgccattatcaatcaaggggaggattgggttgaaattaaaatggatgtctctagaccacaagcaacaagtttaactacagggccttatccttcttttccaacagatatgcaggcacaattcgtttctttaaattctattgccgtaggaaattctacagttactgaaactgtttttgagaatagatttatgcatgttcaagaaatagcaagaatgggaggtaatattaaccttaaaggcaatacggcagtaattgaaggtatagacaaattaaaaggagctcctgttatggcaacagacttaagagcatcagcta

SEQ ID NO: 244338 - DNA, 712 bp, Unknown
  Bacterial polypeptide expressing nucleotide sequence isolated from the Sargasso Sea
aactatattaaacaacgcagcaaaggaaccagaaatagtagatttagcaaatatgttgaatctaatgggtgcaaaagtaaaaggtgcgggatctgaatgtataacaattgaaggagtcgaatctctaaagggatgtgattacaaagtaatacctgacagaattgaagcggggacttttttaattgctgcggcaataacaagatcaacaataagtctttcagattgcgaaccaaatcacttaagagaagtaattagcaaactagaactttgtggctgcaagttcgaatattcccaacactttctacgaattattccaaataaaattttacattctgttaatatgaatactagttcattccccggttttccgactgatctacaagcaccttttatggctttaatgacgacagcaaatggaacttcagaaattaaagaaacagtatttgaaaatagaatgcatcatgttcaagagctaaatcttatgggagccaatattactgtaaaaaataacattgcgacagttgtaggagtcaaaaaattggaagggagagaagttatgggatctgatttaagggctactgctgcattagctcttgcaggacttacagccaatggtaaaacactggttagaggattacaatatttagaaagaggatatgaagaattcccaaaaaaattacacaaaattggagcaaaaatattaaaaaaataa

SEQ ID NO: 244339 - DNA, 946 bp, Unknown
  Bacterial polypeptide expressing nucleotide sequence isolated from the Sargasso Sea
aatgggcacagacatttgttttcatgaaaatggagacattgaagttgactctacgaagatacacatactagaagcacgctatgatttggtaaaaactatgcgggcatctgtgctagtaatgggaccacttgttgcaaggcatggaaaagcaaaaatttctcaaccaggaggatgcaatattggggctcgaccaattaattttcatttacagggtttagagaaaatgggtgcacagataaagtcagacaataaatttatctatatagaagctaaaaaacttattcctattcaatttgagtttccaaatgtttctgttactggaacagaaaacttaatgatggcctcagtttttgttgagggcaagacaacacttaaaaattgcgcaaaggaaccagaagttgaggatttagcaaatttcttaaatagttgtggagcaaaaatagagggtgcaggctcttcagtcataactattgaaggtgttgagactcttaagaagactcactgggaagttctttttgatcgaattgaagcaggaacttatctagttgctggggccataaccaaaggaaaagttagaatcaataaaattattccggaaaagcttaaatgtttaataatttctcttgagaaaatgggattcaaaattttttgtagtaaaaattcaattgaaatcgatgcaagacagtcaacaataaagtgtcaggatttttctactgatccatatcctggttttccaacggatatgcaagcgcaattaatggctttaaattgtattggtgagggctcagctttaataacagagcaggtttttgaaaatagatttcaacatgtgaaagaacttagaaaaatgggtgcaaacatcaccctagaaaaaaatcatgccgtcgtcaaaggtgtaccaaatttagttggttcagaggtaactgcttcagatttgagagcatcg

SEQ ID NO: 244340 - DNA, 544 bp, Unknown
  Bacterial polypeptide expressing nucleotide sequence isolated from the Sargasso Sea
tttctaatagcaggagcattaatagcaaaaaaactcaaaatagtttcactagaaaccaaggtaattaaaaaagaacttaaaatcttaaaaaaaatgggtattaaattaaaaataaataaaaatgaaatagtaattttaaattcaaaaaatattaaaccagttaaaattaaaaccgaaccttatcctggttttccaactgatcttcaagctcaaattatggtattgatgacaagagcaaatggtacttcaaaaataaaagagaatatttttgaaaatcgatttatgcatgttccagaattaaatagaatgggtgcaaagataaaagtatctggaaatctatctaaaattgacggtgttaaaagtttgtatggcgctgaagtaatggcaactgatcttagggcctctgtgagcttggttttagcaggtttaattgcaaaaaatagaacaattataaacagagtttatcatttagatagaggttatgaaaatttggaaaacaagcttcgaaaatgtggtgcaaatatttctagaacgaattactaat

SEQ ID NO: 244341 - DNA, 748 bp, Unknown
  Bacterial polypeptide expressing nucleotide sequence isolated from the Sargasso Sea
ggagctgatatttctctagatgagaaaatgaactttaaacttaacacatcaaacctttcaaaccttgaagccaggtatgagcttgtaaaaactatgcgagcttctatcttagtccttggttctatggtggctaaatatggatatgcgaagattgcgctacctggagggtgcgctatcggaagtcgtcctgttaattatcacctcaaagctcttgaaaaacttggcgcagaaatatctcttaataatggatacattgaggcaaaagctaaaaaattaattggggctagtatagagtttgagggagttactgttactggaacagaaaatctgatgatggctgcctctcttgctgaggggttaacagttttaactaatgttgcaaaagagccagaaatttctgacttagcagattttttaaattcaatgggagctaagatttcaggagcaggtacagatgaaattagcattgaaggtgtggaagaattgactggaacaacttttaaaattcctgcagacagaattgaggcaggcacatatcttgtagcagcagctgttactaatggaaaaattacaatcaaaaagattgatccagctagaatgggctcaattatagaaactcttcaaaaagctggggctgaagtgagtttaaatgaaaattctatttcactagatgtgacgaataatgctataaagcctgttgatattgtcacagctccgtttcccggatttccaacagatatgcaagcgc

SEQ ID NO: 244342 - DNA, 894 bp, Unknown
  Bacterial polypeptide expressing nucleotide sequence isolated from the Sargasso Sea
cttcacacaaaagaaataattaatcataaagcatcttatgatttagtaaaaaaaatgagagctagtttttgggttcttgctcctcttttagcaatgaaaggatatgcagaagtttctttgcctggaggttgcgcaattggaacaaggccaataaatatttatttagaaatgcttaaagaaatgaatatcaaatattcaataaataatggctatatagtagcaaaagcagaatctcccattagaggcataaacttcaaattagaaaaaaagtctgttggttgtactcatttttttcttatgcttgcgtgcttagcagctggaacatcgaaactatctaatgcagcttgcgaacctgagatagttcagcttggaatgctattaaacaaaatgggcgctaaaattaaaggattaggatcaaataaaattatcattgagggtgttaaaaagttaaacggaattaatgagatagtaccttcagacagaattgaagctggaacttttgcaatagcagcctctgcaactggaggaaggatcaaattagaaaatacgaattatgatgaaaataaaacactattcaaaatattagaaaaaactggatcaaaaattaacaaatcaaaaaattcaattagtattgaaaaaacgaatgatgaaatttatccagcaaatatcaagactagtccatatcctggatttccaactgatttacaggcacaaattatgacacttatggcaatatcaaatggtaaatcagaaattaaagaaaatattttcgaaaatagatttatgcatgtacaagaacttgtaagaatgggcgctaatattaaattagataaagataaggcaattataagaggtactagaaatctaaatggagcaaatgttatggcaacagat

SEQ ID NO: 244343 - DNA, 706 bp, Unknown
  Bacterial polypeptide expressing nucleotide sequence isolated from the Sargasso Sea
aaataattgtgcaatagagccagaaataaaagatttagtaaactttttaataaaacttggctgtaaaataaaatggactgcaaaacgttctctaaaaatcttgggagttgaacaattaaatcaaataacttactcagttatgtttgacagaattgaggcaggtacctatttaattgctgcagtagtaactgagggagatttaaaaattaagaatataattccacaaataattcaaacagaaataaatctattaaaaaaaattggagcaaaaataattatgaaaaaaaatgagataagaattataggtagtaaaaagataagaaacttgaatataagaactgctccatatcctggatttcctactgacttacaagctcagattatggtgctcctatgcaaagcaaacaaaaattctttaataaaagaagatatttttgaaaacagatttatgcacgttgctgaactgaatagaatgggtgcacgagtttcaattagtggaaacaaagcttttgtaaaaggtaagacaacttttgcgccagctgaattaatggctacagatttaagagcatctgtatcactaatattagcagcgctttcggcgaaaggtaagtccgttataaatagaatttatcatcttgatcgaggatatgaacatattgaaaaaaaattacgtaaagtaggtgctaaaataagacggatcaactaa

SEQ ID NO: 244344 - DNA, 891 bp, Unknown
  Bacterial polypeptide expressing nucleotide sequence isolated from the Sargasso Sea
attggagttagaaacaaaaaaaattactaatcacattgcagactatgatattgttagaaaaatgcgtgcttcaatactagttcttggaccacttttagcaagagaagggaatgcgagtgtttctttgcctggagggtgtgcaattggtgctagacctgttgatctccatctatttgggttagaaaagttaggtgcaaaactcaaattaaaagatggatatataaaagctagtgtaaatggtcgtttaaaaggagcaaaaattaaatttccttttgcttctgttggagctactgaaaacattataatggcagcaactttggcgaaaggtacaagcgttataaaaaatgcagctagagaacccgaaattattaatctttgtaattgtatcatatcaatgggtggtaaaattgatggaatcggtacctctacaattactattgaaggggtagattctctaaaaagtactactcatgaagttttaggtgatagaatagaaatgggaacatttatgcttgcacctgcaataactggtggaaaagttaaaataaaaggttgtaatacagattatttatcattttttattgataaattagtagaaactggagttgatgtttttaaagaaaaaaatgaagtattagtaacaagaaatgtagattatttaaaaccaattaatgttgtaacagaaccgtacccaggatttccaacagatcttcaagcacaaatgatggcgttgacttgcttctcgaaaggaatttctacatttgaagaaaaaatatttgagaatagatttatgcatgcaccagaattaataagaatgggagcgaatatcgaagttcaaggtggtgttgctagggttgcaggcgttaagaagctcaaaggtgctcctgtgat

SEQ ID NO: 244345 - DNA, 776 bp, Unknown
  Bacterial polypeptide expressing nucleotide sequence isolated from the Sargasso Sea
ttgtgccataggcagcagacctgttgatatacatctttttgttttaaagaaacttggagctaaaattaaaattaaaaacggctatattctagccgagacaaaaagaggattagtgggaaaaaaaataagattaccatcaatatctgttggcgcaacagaaaacgctttaatcgcagccagttgtgccaaaggtacaacttatctaagtaattgtgctcgtgaacctgaaattaaagatttgacattttttttaaaaaaaatgggagttaaaattcaatgggtaggtgataggaaaatcaaaatttcaggtaaccaaaatttaaaatctacaagccacgatgtaatgtttgacagaatagaagccggcacttttctaattgcaggagcattagctggaaaaaagataaaaatctcgggaattgatacgaaaattttaaaaaaagaaatttctattttaaaaaaaatgggcgttaaaatgaaaatttataaaaatgatattgtcgtattgaactctaaaaatattaaaccaatttcaattaacactgaaccctacccaggttttcctacagatttacaggcacagatcatggtattaatgactaaggcgaacggagtctctaaaattaaagaaaatatttttgaaaaaagatttatgcatgttccagaattaaaccgtatgggtgcaaaaattaaaatatctggagatacctcttttatttatgggccgcaaaaattaaatggagcagaggttatggccactgatcttagagcatcag

SEQ ID NO: 244346 - DNA, 847 bp, Unknown
  Bacterial polypeptide expressing nucleotide sequence isolated from the Sargasso Sea
aaaattaaagacgggtatatccaagcagaagcaaagaatggtcttatttggaaaaaaaataagacttccaaagatatctgtaggtgccacacaaaatttaataatagccgcttgttatgcgagtggaacaactattttaaaaaattgtgcatgcgaacccgaaattaaagatttaacagtctttttaaaaaaaataggtgctgatattaaatggattacaaaaagggaaataaaaatcaaaggtaataaaaagttcaaaccagcaaatcattcagtaatgtttgatagaatcgaagcaggaacttttataatagctggagctttgattgctaaaaaactaaaaattatttcaatcgatacaaaaataatagaaaaagagataaaaattttaaaactaatgggtgtaaaattaaaagtaaaaaaaaatgaaattacaattttaaaatcaaaaaaaattaaacctgtttcaattaaaactgaaccatatcctggttttccaactgatcttcaagctcaaattatggtactaatgacaaaggcaaatggaacttcaaatattagagaaaatatttttgaaaaccgctttatgcatgttccagaattaaatagaatgggtgcaaaaataaaagtactcggaaatttatctaaaattgaagggtttaaagttctgaatggtgctgaagttatggccacagatttaagggcatctgttagtttggtcttagcaggtctaattgcaaaaaacagaacaattataaatagggtttatcatttggatagaggatatgaaaatttagagaataaattaaaaaaatgtggtgcaatcatttctagagtaaatttttaa

SEQ ID NO: 244347 - DNA, 916 bp, Unknown
  Bacterial polypeptide expressing nucleotide sequence isolated from the Sargasso Sea
aattcttattgaagaaaaaattgtcaaagcaaatataaaaggagataaaagcagattaattggtactcatatcaaattaaagtgcccaagcgtaggagctactgaaactttaataatggccgcatcattagcagagggaagaactacgattgagaatgctgcaagagaacctgaaattcaagatttatgccaaatgctaaataaaatgggggcaaaaatttacgactctggcaaggaaaaaataattattgatggtgttaatgagctgtctggttgtactcataaagtaattccagatcgaatagaggctggtacttttttaatagctgctgctgcgacttcctcttcgataacaatttctcctgtaattcctaatcatcttgaagcagtcacgaataagcttcaagagagtggaagtaaaattacaattaaaggtaattcaatcacaatcaactgtaataagatcaaaggggtagaaattgaaactgctcctttcccaggatttccaactgatttgcaagcaccatttacaactttaatggcaatcgcaaatggtgaatcaaagataacagaaacaattttcgaaaacagaatgaaccatgttcatttacttaacaaaatgggggcgaatataaaattaaacaaaaacattgcttatatcaaaggtgttaaaaaatttaaagggatggatctagttggatctgatttgaggtcttcagctgcattaataattgctggaattatagctgaaggaactagtacaatttctggtttagagcatttggatagaggttatgaaaattttgaatcaaaactaaaaatattgggtataaaaataactagagagtttaacaaaaaaactttgaaaaataaggaatttaagactaattcagacccatcggatattcctcgataa

SEQ ID NO: 244348 - DNA, 357 bp, Unknown
  Bacterial polypeptide expressing nucleotide sequence isolated from the Sargasso Sea
tcacagatgattatgtttgatagaattgagcttggaacttatttaattgcagcagcactaatgggtaaaaaaatcagttttcccaatgtcattccaaaaataattaatactgaaattaaagttttaaaaagtatgggcgtaaaaattaaattacaaaataaaaaaattactatttataaatctttgaatattaaatcaacaaaaattaaaacaaagccttatcctggttttccaactgatcttcaggctcagataatggttcttatgtccaaagctaaaggtttttcatcaatcgaagagaatatttttgagaacagatttatgcatgtccctgaacttaaaagaatgggtgcaaaa

SEQ ID NO: 244349 - DNA, 632 bp, Unknown
  Bacterial polypeptide expressing nucleotide sequence isolated from the Sargasso Sea
caccgacaccatcaccgtccacggtgtcgagcgtctgcacggcgcgcgttattcggtgatgcctgaccgcattgaaaccggtaccttcctggttgccgctgctgcgacccgcggccgggtcaagctcaaagacaccgacgcttcgatcctcgagtcggtgctgctcaagctggaagaggcgggggcccacatcgataccggcaagaactggatcgagctggacatgaagggtaaccgtccgcgcgcagtcaatctgcggacagcgccctatccggcattcccgaccgacatgcaggcgcagtttgtcgccatgaatgctgttgccgaaggcaccggtaccgtcatcgagacgattttcgagaaccgcttcatgcacgttcaggaaatgaatcgcatgggtgcgcgcattctggttgagggtaataccgcgatcgtcaccggggtcgagcgtctgaaggctgcgccggtgatggcgaccgacttgcgtgcatcggccagtctggttattgccggtctggttgccgacggcgacaccctggtcgaccgtatctaccacattgatcgtggttacgaatgtattgaagaaaagctgcaggccctgggcggtatcattcgccgggtcccggcctaac

SEQ ID NO: 244350 - DNA, 726 bp, Unknown
  Bacterial polypeptide expressing nucleotide sequence isolated from the Sargasso Sea
tatgcaaaaattagaggtttccgggccgaataagctcaaaggccatatagatatatctggttctaaaaacgcatcactgccgattttagcagctactttattatcaaataaaaaaatttatttgaaaaatttacctaaagtaaaagatattgaaacgatgatagcattgttaaaatcattgggctctatgattaaattaaataaaaaatatttaatgattaataatttcaaacaaaataaaaattttgcatcatataatttagtgaaaactatgcgagcgggaattttagttcttggtcccttagttgcaaaatttggaaatgctaaggtatctttaccaggagggtgcgctattggtacacgtccaatagacattcatttaaaagctttatcaaaattgggagttaaatttaagattaaacaggggtatgttcatgcaagtgctccaaacggattagtaggttcaaatatcgattttccaaaaatttctgtcggagcaactgaaaatttaattattgcctcaacttttgctagaggtgaaactattttaacaaattgtgcgattgagccagaaataaaagacttagtaaattttttaaataagatgggttgtaatttaagatggctatcaaaacgtaaaatcaaaataattggtgtcaattatatcaaggaagtaagttactctgtgatgtttgatagaattgaagcaggcacatatttagttgc

SEQ ID NO: 244351 - DNA, 610 bp, Unknown
  Bacterial polypeptide expressing nucleotide sequence isolated from the Sargasso Sea
gaaggagttgatagactagaaggtgcaacctttagtgtaatgcctgatagggttgaagttgggacatatctcaccgcagtggctatgaccggtggtttggtaaaaataaaatctgccaaacctcaatacctttcatcggttatattgaaactggagggttgcggcgccattatcaatcaaggggaagattggattgaaattagaatggatgactctagaccacaagcagcaagtttaactacaggaccttatccttcttttccaacagacatgcaggctcaatttgtttctttaaattctattgccaaaggaaattcaacagtaaccgaaactgtttttgagaatagatttatgcatgttcaagaaatagcaagaatgggcggcaatataacccttaaaggcaacacggcagtgatcgctggaatagataaattgaaaggagctcctgtcatggcaacagacttaagagcatcagccagtttggtcttagcaggtctagtagcagagggagatacgacaatcgataggatttatcatattgacagaggttatgaaagaatagaagaaaagctgaaaatattgggagctgatattgaaagaatatcttaaa

SEQ ID NO: 244352 - DNA, 913 bp, Unknown
  Bacterial polypeptide expressing nucleotide sequence isolated from the Sargasso Sea
tttggttcggtaaaagtatccttaccaggtgggtgtgcatggggcccacgtccagttgatttccatttaaaaggattagaaaaattaggagcaaagattacattaaatagtggttacatactcgctgaagcaaaaaggttaaagggtactaaaataagttttgagtttccgtcagtcggtgctacaggaaatattgctatggccgcaactactgcacaaggaacgacagttatagaaaatgctgcgagagagccagagatagttcaattatgtgagtatttgaatgccatgggtgcatctatcaaaggaataggtacatcgcgcattatcattgaaggagtggattcgcttcattctgcagatatcaaggtaattccagataggattgaagctggtacatttttaatggcaggtgcagtattaggaaaaataaaacttatggatgtcaatccttcacatttggatactgtacttttaaaactcaaggaaattggtgctgatatcaatacctcgtcgaattcgatcacaataaatccaacagataatattaaacctgtagatatgaccactgcagtatatcctggttttgctaccgacctacaggctcaatgggttgcactgatgacgattgcatctggttcttcagttatcactgatacggtttaccacgatcgcttcagtcatattcccgagctcaatcgctttggagccaatattagggttgataataatactgcttttgtaagaggagtagaggagctagttggtgctcctgttatgtctacggatataagagcaagtgctgcactaataattgcaggactttttgcaaaaggtaagacaattgtgagtcgtatttaccatattgataggggctatgagaagattgaagataagttccgtttattaggtg

SEQ ID NO: 244353 - DNA, 892 bp, Unknown
  Bacterial polypeptide expressing nucleotide sequence isolated from the Sargasso Sea
tatgcatttgaaaggcttggaggagctaggggttactttcagcagtagtcatggatacatagaaggtgttgctgaaaaactagttggaggaaaagtattacttagctttcccagtgttggtgctactgaaaatttgcttatggcagcggtcttggcagaaggggcgacacttatagaaaacgctgcgcgtgaacctgaaatagttgaccttgtagattttctaaacagtatgggggcgcaaattactggagaaggaacttcaactcttcaaattcaaggagtcgatcatttagaaccagtcgaacatactgtcattccagatcgaattgaagcagctacttacatctcagctttaggaatgacaggaggtcatattgtcatagaagaagctcggttagaccatatggaaatgctcactgaaaaattaaaagagatgggaatagagattgaacaagttgattcaggaattagtgtgactgtttcccaaaggctccaatcgattgatttggcaacattgccatatccgggagttgctactgactacaaaccttttttagttacattgctttcaatttcggatggagtaggaatcgttactgagaatattttcgctggaagatttcgttatgttgatgaactgatcaggatgggtgcagatatacgtgctgagggtcatcatgctgttgtgcgaggagttgaaagactttcaggggcgcctgttagagctcccgatatacgagcaggggctgctttagtcttggctggattagcagcagaaggagaaactttagttggatcggctagtcatatagagcgcggttatcaggatttagtaggaaacttacattctttgggcgcagagattgaattcctcaattatcaggagaaatag

SEQ ID NO: 244354 - DNA, 448 bp, Unknown
  Bacterial polypeptide expressing nucleotide sequence isolated from the Sargasso Sea
aatgggagtaaaaattaaatgctttaaaaatgaaattcatattataggagcaaaaaaaattaaaaatataaatatcaaaactgctccctatccaggatttccaacagatttacaagctcagattatggtactattgtgtaaagctaataagaactctgaaatcagagaagatatttttgaaaatagatttatgcatgttagtgaattaaatcgaatgggggcaaaaatttctataagtggaaataaagctattgtgactggtaatactaattttacttcagctgaattaatggcgacagatttaagagcctcggtatctttaatattggctgcattaaatgccaaaggcaaatctataattaatagaatttatcatcttgatagaggctatgaaaatcttgagataaaacttaaaaaagttggtgcaaaaattaaacgtttgaattga

SEQ ID NO: 244355 - DNA, 961 bp, Unknown
  Bacterial polypeptide expressing nucleotide sequence isolated from the Sargasso Sea
attggcagggaaatgttataagctcgacggctctgccttaagcattagggcagaagaaatccagagcaaaaaagctccttatgatttagtccgaaccatgcgagcctcctttctggtgcttggcccactcttggctcgttgtggatatgctgaagtatcgttgcctggaggctgtgcaatcggttcgcgccctgtagatcagcatcttaaggggtttgaggcaatgggtgccaagatagaggtgagagagggttatgtaattgccgagactcccgagggtttgcaaggcgccgatatttattttgacaaacccacagtcggaggaaccgaaaatataatgatggcggcaagtttggcgtctggaacgactaatattttcaacgctgcaacagaaccggaggtcaagaatctaggaaattttcttcgcgcaatgggggcagatatctctggacacggatctaaccagataaaaataaggggagtctcccatctcaaaggatgtacctatagagtctcagctgatcgaatcgaagccggtacattcatggtcgctgcagcggcgacgcgaggtcaaataactataaacggagcggacccccgagagcttgaagtggttaccgaattgttgagagagtcgggggctgaagtcgagacaagcgttgacagaattagagtttcaatggaggctaggccgcgcgctgtggacattgaaacagcgcctttccctggatttccaacagatttgcaagcgcaattcatggtcttgaattccgtcgcgaaaggtaaggctttcgtaagggaacaaatctttgaaaacagatttatgcacgttcaggagttaatacgtatgggggcgaaaatagaactcagaggaaataacatggcggtagtaactggtaggaaagcgttgaagggtgctccggttatggctacagatctgagagcatcctcatctttagtg

SEQ ID NO: 244356 - DNA, 793 bp, Unknown
  Bacterial polypeptide expressing nucleotide sequence isolated from the Sargasso Sea
tatgcgtgctggaatattagttcttggtcctttacttgcaaaattcggtagagccaaagtatctcttcctggtggttgtgcaattggtactagacctgttgatcttcatctgaaagctttatcaaaattaggtgtaaaatataaaataattcagggctacattcatgcaacagctccaaaaggtttaataggtacaaaaattactttttcaaaaatttcagtaggagcaactgaaaatttgataatagctgctacattagctaaaggaaccacaatattaaaaaattgtgcaatagaaccagagataaaagatttaacaaattttttaattaaattaggatgtaatttaaaatggttatcaaatcgaacaattagaattaaaggggtaaaaaatacacatgaaattaaatattctgtgatgtttgataggattgaagcaggaacatatttgattgcagccgctgctactgaaggaaatttaaagattaaaaaagtaattccagaaataataaagactgagattaatattttaaaaaaaattggtgcaaaaattgtagtaaaaaaaaatcaaattcatatttatggaaataagaaaataagaaacacaaatataaaaacagccccctatccaggattccccacagatttacaagctcaaattatggtattgctgtgtaaagcaaacaaaaaatctttgattaaagaagatatttttgaaaacagatttatgcatgtttcagaattaaatcgaatgggtgctaaaattttaataaaaggggaaacaaagctttga

SEQ ID NO: 244357 - DNA, 733 bp, Unknown
  Bacterial polypeptide expressing nucleotide sequence isolated from the Sargasso Sea
ttatgagcttgttaaaacaatgcgatcatcaattctcgttcttggtcctttgttggctaagtatggcgaggctaaagtgtctctacctggcggatgtgcgattggtatgagaccagtcgacatgcacttagttgcactacaaaaaatgggagcaagtatttctgtagaaaatggttatatcacagcgaaggttaaaaagctaaaaggcactgagattttttttccacgaaagtctgtaactggtacagagaatattattatggctgcaacactggctaaaggtacaaccacgattaataatgctgctagtgaacctgaaatctccgatttgtgtcttttccttaataaaatgggcgctaaagttagcggttttggtactgataaagttacaattcagggcgtggattcgctaaagggtactagacacaaaccactacctgatagaattgaagcaggaacttttatggtagcggcagcaatcacgcgaggtgacatagagataaataatatcgtccctgagcacagccgtgctgtaatagataagcttatccaatctggtgctgatataaaaatactaaaagattctgttagggtaaaaatgagcaaaaggccaagggcgataaatattgagacaaatgcatacccttttttccccactgatatgcaagctcaaatgactgcattaaattgtatcgcgaatggagacagttccgtaaaagaaaatatttttgaa

SEQ ID NO: 244358 - DNA, 934 bp, Unknown
  Bacterial polypeptide expressing nucleotide sequence isolated from the Sargasso Sea
cgaaaagatactcaatctcaaaatgtctgataagcatttatttttagccgattatgaaatagtgaaaaagatgagagcttctatcttggttcttgacccactgttagcgagatttggtcaagcgatggttgcccttcctggaggctgtgcaataggtgcgaggcccgtgaaccttcatttgatggcgctggaagcacttggagcaagattttctattgaaaacggttacgttaaaggaaaagtggctggttcattaaaagggtgcaaaattaaatttccattcgagtcagtaggtgccacagctaacacgattatggccgctgtccttgctaaaggaacgacggaattgctcaacgcggccaaagaaccagaaataatagatttgtgtacttgtttgaagtcaatgggctgtaatatagaaggtgatggtgagcatactattataattgacggtgtgaatagccttagagaaacagtacataatgtagtgatggatcgaattgagcttggcacatatatgattgcaggtgctattactgatggagatataaaacttaccggaggaaacgtagctttacttgaaaactttatcgaaaaactctgcgagataggtataaagattgatcaatgtaaagattacttgagggtaaaaagagtaaaaagttcatctgtaagatctacaaatatcattactgaaccctttcctggtttcccaactgatctacaagctcaaatgatggccctgttatctatcgctaatggggtttccaaaatcgaagaacaaatttttgaaaaccgcttcatgcatgtgccagagcttattcgtatgggagctaatattgagatagagggtcggaaggccataatctcaggtgtttctgaattaagaggagcaccagtcaaagctactgacctccgtgcatcagtctctctc

SEQ ID NO: 244359 - DNA, 602 bp, Unknown
  Bacterial polypeptide expressing nucleotide sequence isolated from the Sargasso Sea
atgtaaaaaaattaataaaaatattacccatgatattatttttgatagaattgaacttggtacttatatgatagctgcagctttagtaggtaaaaaaattacatttaacaaaatagactcaagagttattaaaaatgaaataaatgttttaaaaaagatgggagttaaattaaaaactcaaaaatcttctatagaaatttttaaaagtaaaaatattaaaagaataaatctttcaaccaaaccatatcccgggtttccaacagatttacaagctcaattgatggttttaatgactcgtgcacaaggaatatcaaaaattaaagaaagtatttttgaaaatagatttatgcatgttccagagctaaaaagaatgggagctaatatagagatagtcaataaaacagcagttattaaaggtccctcaaggttaacaggggcagaagttatggcaacagatttacgagcttcagtaagcctagtattagcaggattagttgcagataatagaacaattattaacaggatatatcacttagatagaggttatgagtttttagaaaaaaaattgaaaaactgcaaagcaagtattaaaagaatttaat

SEQ ID NO: 244360 - DNA, 481 bp, Unknown
  Bacterial polypeptide expressing nucleotide sequence isolated from the Sargasso Sea
gattataaaaacagaaatagatatattaagaaagttaggaatgaaaattaaacttgaaaaccaacaaataaatattcaaggaactaatgatataaaaaatattaatttaaagacttctccatatccaggatttccaacagacttacaggctcaattaatggttctactttgtaaaagtaaaaagcattcagtaattaaagaagagatttttgaaaatagatttatgcattgtgcagaattaaaccgtatgggagcaaaaattaaaacaaaaggaaacaaagcttttattcaaggaaatacaaaatttaaagcagctgaattaatggcaacagatttgagggcttcagtttcattaatacttgcagcgttagctgctaaaggaaaaacaacaataaatagaatatatcatttagatagaggttacgaaaaaatagaaaaaaaattaagaaaagtaggggctaaaattagaagaatttcctaa

SEQ ID NO: 244361 - DNA, 763 bp, Unknown
  Bacterial polypeptide expressing nucleotide sequence isolated from the Sargasso Sea
cttgattacaatagatgcaaaaatgagtattgaaattaacaatacacagttaaataattgcgttgctccttatgaattagttcgcactatgcgggcttctattctggtattgggaccactattggcacgctttaagcaggctcgtgtttccttgcctgggggctgcgctattggaacccgaccagtagatatgcatcttgacggcttaagggctatgggcgctgaaattagtattgataatggtttcattaatgcaacagtgaaaaaattcctgcatggcgcaacgtatcgttttccacaagttacagtaaccggaacagaaaatttgttgatggctgcggttatagcgcgcggacagactattttagaaaatgcagcttgtgagcctgaggtggaagatctagtaaactttttgaacgctatcggtgctagaattagtggtattggaacatctcgtttggttatagacggcgttgagtcattaagtggcggacactataccgtcttggctgataggattgaggcaggaacatatttggcggccggtgttattacccgtggttgtgtgtctgtgcatgggatacaaccaaaaatattaggcgctacaattgagcgcttgcaggcggcaggtgctgtaattaaacagggtgaagattgggttcaggttgatatgcagggacgtcgccctattgcggttgatattaaaacggcgccataccctgggtttgcaactgacatgcaggctcaactatttagttatgaa

SEQ ID NO: 244362 - DNA, 851 bp, Unknown
  Bacterial polypeptide expressing nucleotide sequence isolated from the Sargasso Sea
attcggaaaggcagatgtatctttgccaggcgggtgcgctataggatctaggccggtaaatttgcacctccaaggactagctgcgatgggcgcggaaatttccgttcagggcggttatatcagggcaaaatcaaaaagactcaaaggcgttgatttcgttttcgaaattgtaacagtgacaggtaccgagaatctgcttatggcagccactctcgctgatggggtgactgtaattcggaatgcggcccgggagccggaggtagtcgacttagcaaactgtttgaatagcatgggtgctagaatagaaggtataggaaccgatactgtccgtatagagggagtggaatgcctagagggcacaaagtatgaaattctcccagatcgaatagaaacgggaacatatttagtcgccgctgccataacgggaggggctgtaaaaattaaacaaaccaagccggagcttttggagtctgtgctatctaaattgtccgaagcaggagcggatttagaagttggtaaagactggataaaacttaatatgcaaggtagaaatctgcaagctgtggacatccatacatctccctatcctggttttccgacggatatgcaagctcaatttaccgcgctgaattgtgtagctgacggcaccggtacaattactgaaactgtgttcgagaataggttcatgcacgtgctagaactccagcgcatgggtgcggacgtcaaacttgaaggaaatacggtgataactagtggtgttgaccggcttacgggtgcgcccttaatggctacagatttgagagcgtctgccagtctggttttaggaggattagtcgccccaggtgcaaccg

SEQ ID NO: 244363 - DNA, 721 bp, Unknown
  Bacterial polypeptide expressing nucleotide sequence isolated from the Sargasso Sea
tctgagagcaaaaaatgctgcattacctatgatagcttcaaccatattatgcgatgagaaagttactcttagaaatttgccttaccttcaagatattacaacaatgttcgaattattgggttcaatgggagctgaaattttacttgatgaaaatatggattttacgatttcatcatctaatttaaaagatatagaagccagatacgaattagtaaaaacaatgagagcatccatattagttcttggtccattgatagcaaaatatggtaaagcaaagattgctttgccaggtggttgtgctatagggtctaggccagttaattttcatcttgatgcattaaaaaaaatgggagcaaaaataaaactaaaaaatggttacatcgaagcagagtctaagaagttgcatggagctgacatacgatttgatggggttactgtaaccggaactgagaatttaatgatggctgctacacttgctgatggcacaacaaagcttacaaatgttgccaaagaaccagaaattattgatctagctgatatgcttaattcaatgggcgcaaaaattaaaggcgctggatcagatgaaataattatagaaggagtaaataacttaaaaggtactatatttgatatacctgcagacagaatagaggcaggaacatatttggtagctgcagcagttactaacggagaaatcactgtcgatgggataaatccagaa

SEQ ID NO: 244364 - DNA, 571 bp, Unknown
  Bacterial polypeptide expressing nucleotide sequence isolated from the Sargasso Sea
aataattccagatcgaattgaggcaatcacgatggttattgctggaattataaccaggggagagcttaggattgaaaatatcaattcttcacatatgcaacaacctatcgagctgattaggaaatgtggagcaaatcttgagatatttgatgattatctatatttgaaaggttctaatgtaatttctcccattagttttgagaccaatccctatccaggaatccccacagatattcaggcgcagctaatggtattaaatactgttgcagagggtgactcaaaggttaaggaaaccatttttgagaatagatttatgcatatattagagcttaaacgaatgggtgccaatattggaattgatggcaatactgcaattataactggagttcaaaaattaaattctgcgcaggtaatggctacagatttaagagcctctgccgctttgattcttgcaggcttgattgctgatggagaaacaatcattgatcggatttatcatttggatcgcggatatgaaagtattgaagaaaagctattaaatataggtgcaaaagttcgaagaattgactaa

SEQ ID NO: 244365 - DNA, 406 bp, Unknown
  Bacterial polypeptide expressing nucleotide sequence isolated from the Sargasso Sea
tatggaaaagctactaatcaaaggcggaaatactcttattggaaaaatccaatgctctggtgctaaaaatgcagcactaccgatgatagcagcaactattctttgcgatgaaaaaataactctgaagaaccttccttacttacaagacatcacaactatttttgaattattgggatctatgggggctgagattttgcttgatgaagatatgaatttcacaatatctgcatcaaatctaaaagatattgaagcaagatatgaactcgtaaaaactatgagggcatctattctagtgcttggaccattattggctaaatacggaaaagcaagaattgctttgcctggaggatgtgcaattggtactcggcccagtgaattttcatttagatgcttgaaacaattaggg

SEQ ID NO: 244366 - DNA, 820 bp, Unknown
  Bacterial polypeptide expressing nucleotide sequence isolated from the Sargasso Sea
atggataaattaataataaaaggaggttctaaaatttctggctcagttaatgttcacggttcaaaaaattctgcactaccgattatagtatcttctcttttatctaaaaaaactttaaaactctcaaacatacctaatgtggtcgatgttcaaaatttaataaaattactaaaaatttatggtgtaaaaattgaacacaaaaaaaataaattaaaaataaatccatcaaaaattaaaaatctatcagcagattacgatgttgtgcgaaaaatgagagcctctatattgattctaggtccattactttctcgatttggtgaagctagaatatctttgccaggaggatgtgccattggaactaggccaatagatatacatcttgctggtttatcaaaattgggagctaattttgaaattcaaaatggttttgttgttggcagtgttaaatcacaattgattggtaataaaattaaattaccttttccaagtgtaggagcaactgaaaatatactaatggcctcagtattggcaaaaggtgaaactaaaatttctaatgctgcaagagaaccagaaatagaagatttgtctaactgtcttataaaaatgggtgcaaaaattgaaggtcatggaacaaaaactattcttgtacaaggtgtaacaaatttaaaaaaagcagagcatgagataattgcagatagaattgtagccggcacatatataattgcagctttgatgttaaattcagttttagaaattaataactttaatactatttatttaaaatctttaattgatattttgaaaaaaaatgggtgctaaa

SEQ ID NO: 244367 - DNA, 690 bp, Unknown
  Bacterial polypeptide expressing nucleotide sequence isolated from the Sargasso Sea
tggacctagccaagtatctgattgctatgggtgcggatattcagggcgcaggcactgataccatccgtattaccggtaaagaaaagctgcacggcgcacgtcacactgtattacctgataggattgaaaccggtacttttttagttgctgctgctgtcacaggcggtgatgtcacctgcttaaatgcatcaccggctgagcttgaagtcgtgctggagaaactacgggaagctggcgctgacgtcactaccggaccggattggatccgtctgaacatgacaggccgaaccttaaaatcagtcaatgtgaaaacagtacctcacccaggtttccctaccgacatgcaagcacagtttactgtgttgaatgtggtggctgaaggtgtaggtatggtaactgaaaccattttcgaaaaccgctttatgcatgtgcctgagttacaacgtatgggcgcagatattcagctggaaggcaatacagcgctgattaagcatacagataagctgatgggtgctcaggtaatggcaaccgatttaagagcttccgccagcttagtgattgcaggtttggtggctgagggagagacagtggttgatcgtatttaccatatcgaccgtggttacgagcaaatcgagtacaagctaaaaggcttgggcgctaatattcagcgcatcaatgctcccgcctgat

SEQ ID NO: 244368 - DNA, 649 bp, Unknown
  Bacterial polypeptide expressing nucleotide sequence isolated from the Sargasso Sea
atggaaaaattattaattaaaggtggcaaccctctaaaaggaaaaatttcttgttctggagcaaaaaatgctgcattgcctatgatagcctcaaccatattatgtaatgagaaagttacccttaaaaatctgccttatcttcaagatatcacaaccatgtttgaattactgggttcaatgggatctgaaattttacttgatgaaaatatggattttacaatttcatcagctaatttaaaagatacagaggctagatacgaattagtcaaaacaatgagggcatccatattagttcttggcccactgatagcaaaatatgggaaagcaaagattgctttgcctggaggttgtgctataggaactagaccagttaactatcatcttgatgcattaaaaaaaatgggagcaaaaataaaactaaaaaatggttacatcgaagcaacgtctaaaaagttacatggagctgatataaggtttgaaggagttaccgtaaccggaactgaaaatttaatgatggctgctgtacttgctgagggcacatcaaagcttacaaatgttgccaaagagccagaaattattgatctggctgatatgcttaattcaatgggcgcaaaaattaaaggcgctggatcagatgaaataatttaga

SEQ ID NO: 244369 - DNA, 844 bp, Unknown
  Bacterial polypeptide expressing nucleotide sequence isolated from the Sargasso Sea
aattcaaatggctttgttgttggcagtgttaaatcacaattgattggaaataaaattaaattaccttttccaagtgtaggagcaactgaaaatatactaatggcctcgatattggcaaaaggtgaaactaaaatttctaatgctgcgagagaaccagaaatagaagatttgtcaaaatgtcttataaaaatgggtgcaaaaatagaaggccatggaacaaaaactatttttgtacaaggtgtaacaaatttaaaaaaagcagagcatgagataattgctgatagaattgtagctggcacatatataattgcagctttgatgttaaattcagctttagaaataaataactttaatactatttatttaaaatccttaattgatattttaaaaaaaatgggtgcaaaattaaaagtaagtaaatattcgataaaagtctctaaaggatcaaaactaaaatctactagtctttcaactagtccatatccaggttttccaactgatttacaagctcagttaatgtctcttatgtgtatctctgatgggaagtcaaaaattaaagaaacaatttttgaaaatagattcatgcatgttcctgaactgaatcgattaggtgcgaatataacagtagaaaaagataccgctacaataataggcaatcaaacatttaaaggagcgcaggtaatggctagtgatttacgagctagtatcagtttagtgttagctgctatgaatgcaaatggtcaaacgacactaaatcgtgtctatcatcttgatagaggctatgaaaatattgaaaaaacattaggtagtttgggagcaaaaataaaaagacagaaaatctaac

SEQ ID NO: 244370 - DNA, 785 bp, Unknown
  Bacterial polypeptide expressing nucleotide sequence isolated from the Sargasso Sea
aatggctaaaattatagtaaatggtggcaaagaattatctggaactataagagttagtggctctaaaaacgcggcattgccaataatgacggcgtcacttttgactggaggtgatctagagctcagtaatatcccacaactagctgacgtcactataatgagagaacttttacaatctttgggcactaaaatatctttaaataagaacccccgctccttaaaactttctacaaagacaatcggcaattatacggctgattacgagatagttaggaaaatgagagcatcaattattgtcctgggcccaattctagcaagaaataaaattgctaaggtagcacttcctggcgggtgctcaattggttctaggcctatagatcttcatcttaaaggcatggaagctatgggtgcaaaaatctatatggatggggggtatgttttcgcagaagcggttaatggacttcaaggagcagagattaaattccctgctgtatctgtaggcgcgactgaaaatatcattcttgccgccaccctagccgatggcaaaaccactatttctaatgctgcacgcgagcctgagattgtagatttatgctgttgtctccagaaaatgggggccaatatcaagggagctggcactgacataataacgattaagggagtttcttcgttaaatggagcctgtcattcagtaatggctgacagaattgaattgggtacattcatgttagcgcctgcgctaacgggcggtgaaatttttctggagggagaacatcttaaagcta

SEQ ID NO: 244371 - DNA, 838 bp, Unknown
  Bacterial polypeptide expressing nucleotide sequence isolated from the Sargasso Sea
gacatcaattatacaataaataatggttatattgttgcaaaaagagaagggccgattaaaggattaaattttaaattagaaaaaaaatccgttggttgtacgcatttttttcttatgcttgcatgtttagcaaatggcacatctaagttatctaatgcatcatgtgagcctgaagtaatccatcttggattgttgttaaataaaatgggtgccaaaataaaaggattaggatcaaaaaaaataataatagaaggcgttaaaaaactaaatggcgttaatgaaataataccctcagatcgaattgaaacaggaacttttgcaatagcagtttctgcaactggaggaaaagtaaaattagaaaatacaaattatgaagaaaataaattactttttaatatattagaaaaaacaggatcagttattaataagtcaaaaaattcaatatcaattgaaaaaaatcataataaaatttatgcagctaatattaaaactagcccctatccagggtttccaacagatttgcaggcacaaatcatggcgttaatgacaatttcaaatggaaagtcagaaattaaagaaaatatttttgaaaatcggtttatgcatgtacaggagcttgtaagaatgggcgctaatattaaattggataaagatagagctattataaaaggcgttagaagactaaacggagcaaatgttatggctacagatttaagagcatccgcatcgctaataatagctggtttagttgctacaggtacaactaaaattagtaggatttaccatttagatagaggattctataatttagaaaataaattaaataattgtggagcat

SEQ ID NO: 244372 - DNA, 879 bp, Unknown
  Bacterial polypeptide expressing nucleotide sequence isolated from the Sargasso Sea
taaaaaattttcatgccccatatgatttggtgaaaaccatgagatcatcaattttggtcttaggaccattactcgctcgttttggttctgctgttgtatcattgccaggcggatgtgcaataggcacaagacctgttgaaatgcacttagatgcattatctaaaatgggagtgacatttgacatacaaaatggttatatatctgccaattgcagcagacttattggttgtgagatttcatttcctaagacaactgttacaggaactgagaatatactaatggcctccacgcttgcagaaggtaaaacagttataactaatgctgcacgtgaaccagaagtcgttgatttagcaaatttcttaaatgaaatgggagcagaaataactggtcatggtacagatgttatagaggttaaaggtgtgaaatcattgagaggtgtatcatattctgctttacccgatagaattgaaacaggtactttcttagtagcagccgccataactggaggagagattacaataaagaatactatttcaaatcatgtagcaatcataatagaaaaacttagacaatctggggcaataattgattcaaccgattcttctataacactaaacatgcaaggcaaaagaccaaaagcagtaaatattgaaaccggagcttatcctttatttccaactgatatgcaagctcagttgacagcattaaatacaattgcaagtggaacaagcataataaaagaaaatatctttgaaaatcgctttatgcatatacaagaaatgtctagaatgggggcagaaattaaacttgagcaaaattgtgccataatatcaggtaaagatgaacttgttggtgcgtcagtaatggctactgattgag

SEQ ID NO: 244373 - DNA, 880 bp, Unknown
  Bacterial polypeptide expressing nucleotide sequence isolated from the Sargasso Sea
aaaacttaaacagtttgctccttacaatcttttaaaaactatgagagctggggttttgctattgggtccacttttaactagatacaaaaaagctaaaatttctttacctggaggttgtgctattggatctagaccagtaaatcttcatttagaagctctaagaaaaatgggagcaaaaattaaaataaaagagggatatatttttgcatcggccaaaaatggattaaagggtacgaaaattaaatttccaacaatatcggttggagctactgaaaatattttaattgcagcatgttttgcaaaaggaaaaagtataattaaaaattgtgcatgtgaaccagaaataaaagacctaagcaattttttaattaaaatgggatgtaaaattaaatggattggaaaaagaaaaatagaagtaaatggtgtaaatgaattaaaacctgttaaatataaaattatttttgatcgaatagaggcaggcacatatattattgctgctgcgcttacgaaaagtaaagttgcaataaaaaatgtagacttaaaagcaataaaagctgaaattagaattctaaacaagatgggcattaaaattattaaaagaaaagaaaaaattattgttaaaacagaaaaaaaaattaaaagcacaaatataacaactaaaccttatccagggtttcctactgatttacaggcgcaaatgatggttcttatgtcaaaggctagcggaatttcaacaattaccgaaagcatatttgaaaacagatttatgcacgtgcctgagcttaatagaatgggagccaaaattacaattaatggaaatagagcaaaaattcatggcgtgaaagaacttaaaggtgctgaattaatggcactgacctaa

SEQ ID NO: 244374 - DNA, 958 bp, Unknown
  Bacterial polypeptide expressing nucleotide sequence isolated from the Sargasso Sea
ggtaaaaaccatgcgagctggagtattggtattaggaccacttttaactacatataagaaggcaaaaatttcacttcctggaggctgtgcaattggaactagacctgttgacttacatctctttgcacttaaaaaacttggagcaagaattaaaataagaaatggatatattgttgctgaagcaaaaaatggattaaaaggagcaaatattaatttccctagcatatccgtgggagccactgaaaatgcagtgttagcagcattcaatgctaatggaaaaacaatacttaaaaattgcgcgatagaacctgaggttaaagatctcattaaatttttaaatacattaggtggaagaattaaagttgttggacgaaaaattgtaattactgggtgtaagcaaattaaaaaaaatataacacacgaagtcatttttgatagaattgagtcaggaacttatatgatagccgcagctttaatgggtaaaaaaattatatttaataaagtagacccaaaaataattcaaaacgaaataaatattttaaaaaaaatgggggtaaaattaaaaactcaaaaatctactattgaaattcttaaaagcaataatataaaaaaaataaatctttcaacaaagccatatcctggatttccaactgatctacaggcacaattgatggttttgatgactcgtgctcaaggaatgtcaaaaattaaagaaagtatttttgaaaatagatttatgcatgttccagaattaaagcgaatgggagccaacatagagataaagaatcaaacagcaattattaaaggtccttcaaagttaactggagcagaagtaatggcaacagatttaagagcatctgtaagtttagtattagcaggcttagttgcagataatagaacaattattaatagaatataccatcttgatagaggttatgagtttttagaaaaaaattga

SEQ ID NO: 244375 - DNA, 769 bp, Unknown
  Bacterial polypeptide expressing nucleotide sequence isolated from the Sargasso Sea
tctgtaggtgctactggtaatatcttaatggcaagtgtattagctaggggagagactcatattgaaaatgcagctaaggagcccgaaatagtacaattatgcgaagttttaaatcaaatgggtgcaaatattgttggtattggcactgatacattaactatttatggagtagataaattacattccgtagatattaatgttataccggatagaattgaagcaggaacatatttaattgctggtgcaacaatgggaggcataactcttaataattgtaatccaaaacatttagaagatgttatcaataaattaaaactatctggagcaaatatttcttctaatgaaaattctttatcaattgagaaaatagattcaatagaatctgttgatattactactgaggtttatccaggtttccccacagacttacaggcccagtggatggcatttatgtctatagcaaaaggaaaatcaacaattattgatactgtatatcatgatcgatttactcatatacctgaactaaatagattaggcgctaacattcaattgaaggataataaagctatagttgatggtgtaaataaattaaaaggtgcgcaagttatgtctacagatattcgtgcaagtgctgcattaatattgggagcaataattgcagaaggtaaaacagaaattagtagagtatatcatatagatagaggatatgattcaattgagaaaaaatttcaatctttaggtgctgatattgtacgtattaatgaataat

SEQ ID NO: 244376 - DNA, 1004 bp, Unknown
  Bacterial polypeptide expressing nucleotide sequence isolated from the Sargasso Sea
tgaagcgccatatgatctagtaaaaactatgagagcatctttttatgtcttaggtcctctcatatcgagatttggtaaagttcaagtttctttaccaggtgggtgtgcatggggacccaggccagttgattatcatttaaaaggattagagaaactcggagcaaacctaaatttagatggcggaaatatcttagctgaggctaacgagctgattggctgtgatattcattttgagttcccttcagttggggcaacaggcaatctagctatggcagcagtcagagctaaaggtacaacaagattatttaattgcgctaaagagccagaaataactcagttgtgtgagtttttaaacagtatgggagcaaatataaagggcattggtacagattctttaactattctaggcgttaatgaattgaaccaagctgatataacaataattccagataggattgaggctggtacttttttaatggcgggggctttaaatggtgaaataaagattaataatgttattccactgcatttagaaaaggtcactaacaaattaattgagactggatgtaaaataaatataaatgatgattccatatcaattacgcccccagaaaatttaaaatcagtagatatgacaactgctgttttcccagggtttccaacagatttgcaggctcaatgggtagctttgatgtctttatcagacagttcatctattgttacagatactgtttaccatgacagatttagccacattcctgaactggcaaggttaggcgctaatatcaaagtagagaaaaatactgcattcattcgaggtgttgatcaactggttggcgcacctgtaatgtcaacagatataagagctagtgctgctttatttattgctgcattggctgctaaaggtaatacaaagataagcagaatatatcatattgaccgtggttatgaaaaaatcgagcaaaaatttcttagggctaggtgcagatatacaaagggtgcca

SEQ ID NO: 244377 - DNA, 856 bp, Unknown
  Bacterial polypeptide expressing nucleotide sequence isolated from the Sargasso Sea
catggataagctcgaaattatttctaatggaccattgcaaggtcaggtttctatttctggtgctaaaaatgcagccttacctattttgatgtctgctattttagctgatacaacgtcaaattttaataatgtgccacagttgcgcgatattgcaacgacctcaaaattacttgagtgcctcggggctgaagtgattcaaggtgaaaatcgtgtttcaatttaccctcaggctattcataatttttgcgcaccttatgatttagtcaaaaccatgcgcgcatctattttgattttaggcccgcttttagccaagtttggtcaagccgatgtatctctacccggtggttgtgcgattggtgcacgccctgttgatttacacatcagcggtttagaagcgatgggagcagaaattacacttaatgatggctatatccgtgcgcgtgttcgtgatcgattacacggtgcgcatattgtgatggacatcgtaagtgtaacaggtacagaaaatttgatgatggctgcaactttagcagaaggcgaaaccgtgattcataacgctgcacgtgagcctgaagtcgtcgatttagcacattgcctcattaagatgggggctaaaattacaggggaaggtacggacaccattcgtattcaaggcgtgcagcgtttgcagggtattgattatgctgtgatgcctgatcgtattgaaacaggaacgtatttggttgctgcagcggtgacacgcggtaaaattagatgcatcaacgcagagcctaaatctttagaagcggttttgcataagctagaagaagcgggagcgaagatccaagtcggtgaagattggattgatttagatatg

SEQ ID NO: 244378 - DNA, 568 bp, Unknown
  Bacterial polypeptide expressing nucleotide sequence isolated from the Sargasso Sea
tatggaaaaattaaagatcattggtggcaataaactctcaggatctatttcttgttccggagcaaaaaatgcagctttgccaatgcttgcagcaacaatattatgtgatcagcccatcacttttaaaaatttaccttaccttcaagatattacaaccatgtttgaaatcttaggatcaatgggtgctgaaattactcttaatgaaaatatgaattttataatttcaacatctacattgcatgactttgaggctagatatgaactagttaagactatgcgagcttcgattttagttcttggatcacttgtagctcgttatggatttgcaagaattgcactccctggaggctgtgcgattggtactcgtccagtagattttcatctagatgcattagaaaaacttggagctaaaattgaactaaaaaatggttatattgaagctacttctaagaaattagttggctgtgaaattaattttccaggagtttctgtaactggaacagagaatattatgatggctgcagttcttgctaaaggccaaactgttttaagaaatgttgcaaaagaa

SEQ ID NO: 244379 - DNA, 470 bp, Unknown
  Bacterial polypeptide expressing nucleotide sequence isolated from the Sargasso Sea
agaaataaatttacttaacaagatgggtgtaaggataataagaaaaaaaagacatatgatcgttagtcgtccagataagcttaaaagtgctcgcgtgataactcaaccgtatccaggatttcccactgatttacaagcccaaattatggttttaatgataaacgctaagggcatttcaacaataaaagaaaatatttttgaaaatcgttttatgcatgtttctgaattaagaagaatgggtgcgcagattgaaattaagggtagcatggccaagattattggaaaaagtaaactaaatggagcagagttaatggcaactgatttgagagcttcggtttgtttggttttagcaggattagttccttcgaataaaactgttgtaaatagaatatatcatctagacagaggatatgagaaaattgaaaaaaaattatcaaaatgtggagctcaaataaaaagattaaaatgag

SEQ ID NO: 244380 - DNA, 862 bp, Unknown
  Bacterial polypeptide expressing nucleotide sequence isolated from the Sargasso Sea
gctaaatttggaagtgcaaaagtttcacttccaggtggatgtgcaataggtactagacctgttgatattcatctagaggctttatcaagactaggtgttaaatatagaattaatcagggctatattcacgccaatgctccgaaaggattaataggtgcaaaaattcgtttcccaaaaatatctgtaggagccactgaaaacttaatcattgctgcaagtttagctgagggtgagacaatacttaataattgtgcaactgagcctgagattaaagacttagtaaaatttttagcaaaaatgggatgcaatattaattggataagtaaacgatcattaaaaattaaaggtgtgagtaaaattaatgagatagtttataaagtaatgtttgatagaattgaagcgggcacttatttaattgcagcagctgtaacacaaggaaatttaagaattaagaatatcattccaaagattatcaaaactgagactgaaattttaaaaaaaattggatcaaaaattatccaaaaaaaaaatgagatacacataattggtaaaaaaaaaattaatagaatgaatattaaaactgctccttacccaggatttccaacagatttacaagctcaaattatggtattgctgtgcaaggcaaacaagaaatctttgataaaggaagatatatttgaaaacagatttatgcatgttgcagaattaaaccgaatgggtgctcaaatatctattgatggaaataaagcaaaaattgagggtaatacaaaatttgcagccgcagaactaatggccactgatttaagagcctcagtttgtttaatattggcagcattatctgccccaaggcaaaatctataat

SEQ ID NO: 244381 - DNA, 877 bp, Unknown
  Bacterial polypeptide expressing nucleotide sequence isolated from the Sargasso Sea
gatgcacttaaaaaacttgggaatgaaatatgatattaagaaaggctatattcatgctcatacaaaagaaaaactcaaaggtgcaaaaatcagattttcgaaagttagtgttggagcaactgaaaatacaattatagctgcatgtttagcaaatggaatttctattcttagaaactgtgcgatcgaaccagaaataattgatttaataaattttttaaaatcaggtggtgctaaaataaaatttgtaggcaagcgtactttgaagatagagggcattaaatctttagaaagtacaagttattctgtgatgtcagatagaatagaaacaggaactttttgtatagcagcatgtttaactggaggtaatttaaaaataaataatttcgatccaaaaattattaaaacggaattatcattgctaaaaagagttggagcaaaaattaaagtagctaaaaatcaaattcatatatctggtccaaaaaaaatcaaaaatttaactaatttagttactaaagaatatccaaactttcctacagatttacaagcacagtttatggttctactttgtaaggctaaaggcaaaagttcaataactgaaagtattttcgaaaatagatttatgcatgtagctgaattaagaagattaggtgctgagattttaattaaaaaaaataaggcatttatttcaggtgatactaactttcaagctgcagaattaatgtctagtgacttaagagcttcagttgccttagttttagctgcaatagttgctaaaggatcgtccacaattaatagaatttatcaccttgatagaggatatgaaaatatagagaataaactaagaaaagttggggtaaacattcgacgtgttaattga

SEQ ID NO: 244382 - DNA, 811 bp, Unknown
  Bacterial polypeptide expressing nucleotide sequence isolated from the Sargasso Sea
agatatgagcttgtaaaaactatgcgagcttctatcttagttcttggatctatggtggctaaatatggatatgcgaagatcgcattgcctggagggtgcgctatcggtagtcgtcctgttaattatcacctaaaagctcttgaaaaacttggtgcagaaatatctctcaataatggatatattgaggcaaaagctaaaaagttaactggagctaatatagagtttgagggagttactgttacgggtacagaaaatctgatgatggctgcttcactagctgagggattaacaactttaactaacgttgcaaaagagccagaaatttctgacttggcagattttttaaattcaatgggagctaagatttcaggagcaggaacagatgagattaggatcgaaggtgtggaagaattgactggaacaacttttaaaattcctgcagacagaatcgaggcaggtacatatcttgtagcagcagctgttactaatggaaaaattacaatcaataagattgatccaaaaagaatgggctcaattatagaaactcttcaaaaagccggggctgaagtggattcaaatggtaattctatttccctagatatgacgaaggatgctataaagcctgttgatattgtcacagctccgtttcctgggtttccaacagatatgcaagcgcagtttactgttctcaactgcattggagctggtgaatcaagtgtaacagagactatatttgaaaatagatttatgcatgtgcaagagcttaatagaatgggtactgatattacaattaatggaaccactgcactta

SEQ ID NO: 244383 - DNA, 919 bp, Unknown
  Bacterial polypeptide expressing nucleotide sequence isolated from the Sargasso Sea
agagatagattcacaaaatatttctattaaagaacttccatatgaacttgttaatggactaagagcaagtttcttttgtatcggtccactattaagtaaatttggagaggctaaagtccctttgcctggagggtgcaatattggttcaaggccaatagatgagcacattaacgggcttaaagcactaggcgcggaaattcttattgaagaagaaattgtcaaagcaaatataaaaggagataagagcagattaattggtacccatatcaaattaaagtgcccaagcgtaggagctactgaaactttaataatggccgcatcattagcagagggaagaactacgattgagaatgctgcaagagaacctgaaattcaggatctatgccaaatgctaaataaaatgggggcaaaaatttatgactctggcaaagaaaaaataattattgatggtgttaatgagctgtgtggttgtagtcataaagtaattccagatcgaatagaggctggtacttttttaatagctgctgcagcgacttcctcttcgataacaatttctcctgtaattcctaatcatcttgaagctgtcacgaataagcttcaagagagtggaagtaaaattacgattaaaggtaattcaattacaatcaactgtaataaaatcaaaggggtagatatcgaaacagctcctttcccaggatttccaactgatttgcaagcaccatttacaactttaatggcaatcgcaaatggtgaatcaaagataacagaaacaattttcgaaaacagaatgaaccatgttcatttacttaacaagatgggggcgaatataaaattaaacaaaaacatagctcacatcaaaggtgttaaaaaacttaatgggatggatctagttggatctgatttgagggtctcagctgca

SEQ ID NO: 244384 - DNA, 292 bp, Unknown
  Bacterial polypeptide expressing nucleotide sequence isolated from the Sargasso Sea
gtaaaagagactatatttgaaaatagatttatgcatatacaagagcttaatagaatgggtactgatattacaattaatggaaccactgcactaattaatggagttgattctatttctggggctcaagtaatggcaacagatttaagggcatcagcaagtttgatattagcaggactaatagctaaaggagaaactattgtagataggatttatcatattgatagaggctatgaaagaatagaagagaaattatccaatcttggtgcagaaataataagattgcctaattaga

SEQ ID NO: 244385 - DNA, 931 bp, Unknown
  Bacterial polypeptide expressing nucleotide sequence isolated from the Sargasso Sea
atctggagcaaagaacgcggtcttaccaattatggcttccgcgttgtttgccgagggcacaactacaattaaaaatgtcccagatttacgtgatactcgaacttttatagatcttttaacaaatctgggcgcaaaatgcacgttcgataagtcaattctctctattgatgcttctgaaatcacctcgctagaagcaccatacgacctagttaaaaccatgagagcttctttttatgttatgggtccgcttttagcaagatttggagaaactaaagtttcgcttcccggtgggtgcgcgtggggccctaggccggttgattaccacttaaaaggatttgaaagattgggcgcaaaaattgagctcaatcaaggatatattttagctagatcaaatcaactcactggtggaaatatttcttttgagatagcttctgttggtgctactgcaaatattttaatggccgcagtattggcgaaaggccaaacattaattacaaatgccgctattgaaccacatattgttcagctttgtgaagttttaattgatatgggggcagatatagatggtgttgggactaataaattgactataaatggtgtccaaaaacttcatcctgtcgaagttacggttattcctgatatgattgaagccggaacatttttgatggccggagcaacgttaggtgatattcaactgcaaagcgttgacccagagcatttgacaatagttttggaaaaattacagctagccggatgcgatatttctttagaaactgattctattttaatcaaaagaaataataggatcaaaccagtcgatattaccactgatgtgcatcccgggtttctgacagatcttcaagcgcaatggattgctttaatgtcaattgcggatggagcgtctgtagtaacagagtcgatttatttagac

SEQ ID NO: 244386 - DNA, 890 bp, Unknown
  Bacterial polypeptide expressing nucleotide sequence isolated from the Sargasso Sea
tatggattttacaatttcatcagctaatttaaaagatacagaggctagatacgaattagtcaaaacaatgagggcatccatattagttcttggcccactgatagcaaaatatgggaaagcaaagattgctttgcctggaggttgtgctataggaactagaccagttaactatcatcttgatgcattaaaaaaaatgggagcaaaaataaaactaaaaaatggttacatcgaagcaacgtctaaaaagttacatggagctgatataaggtttgaaggagttaccgtaaccggaactgaaaatttaatgatggctgctgtacttgctgagggcacatcaaagcttacaaatgttgccaaagagccagaaattattgatctggctgatatgcttaattcaatgggcgcaaaaattaaaggcgctggatcagatgaaataattgtagaaggagtgaatgaattaaaaggtactgtatttgatatacctgcagatagaatagaggcaggaacatatttagtagccgcagcagttacaaatggagaaatcactgtcgatggaataaacccagaaagattgatgacagttattaataaattagaaaatacaggagctaagttgagctatgataaaaaatctatctcaatttcaatggaaaaaagtattcctgagcctgtagacataactacagctccctttccagaatttcctacagatatgcaagcacaattctctgttattaatgcaatttctaatggaacttcaaatatatatgaaactgtttttgaaaatagatttatgcatattttagaattaaatcgaatgggttgtgatattgaggtgaaagggaatcatgcaagaataaatggcgttaaaaatatttatggggcagagg

SEQ ID NO: 244387 - DNA, 829 bp, Unknown
  Bacterial polypeptide expressing nucleotide sequence isolated from the Sargasso Sea
ttatagtttagtaaagaccatgagagcgggagttttggttctaggacctttattagcaaaatatggttcagcgaaggtatctctgcctgggggatgttctataggatcaagacccatagacttacatttaaatgccttaaaaaaaatgggagcaaaaataaacgtaaagaacggatatattattgcttctgcaaaaaatgggttgaaaggcaccttaattagatttcctaaaatatctgtaggcgcaacacaaaatatattaattgcctcatgtttttcaaaaggtacaactaaactcagaaattgtgcttcagagccagaagtagaggatttaattaattttttaaaaaaattaggatgtaaaatatacaaagtaggaaaaagaggtttagatatagaaggcgtggttaatttaaaaccatgtgtgcacaaagttatttttgacaggatagaagccggtacttatattattgcggcagcattaacaaacggtcggttaaaaattgaaaatattgatccaaaaattatttctacagaaattcatttgttaaatcaaatgaaagtaaaaatagtaagaaaaaaaaattatattattgtaacttcgcccaaaaaaataggtggaattaatattgaaactcaaccttatccaggctttccaactgatcttcaggcacaaataatggtattgatgacacaatctcaagaaatttctactattagagaaaatatttttgaaaatagatttatgcacgtttctgagctaagaaggatgggagcaaacattgaggttgttggtaacagggcaaaaatttatggaggaaagcagcta

SEQ ID NO: 244388 - DNA, 440 bp, Unknown
  Bacterial polypeptide expressing nucleotide sequence isolated from the Sargasso Sea
aatgcaaaaattacttattgatgggaaaaagatcttatctggaagtattaatatttcaggttctaaaaattcaactttaccaatacttgcagctacaatattaaatagcaatacaactataaaaaatattcccttagtaaatgatatctttactatgctcaatctgctaaaattcattgggcttgaatttaaactttcaaaacaaaaaaaatctgtaaatgtaattaataataatcaaaaaattaatactgtggcaccctataagcttgtaaaaacaatgagagctggcgtgctagtcttaggacctctattggctaagtataggaaagcaaaagtttcattaccaggagggtgtgcaattggaacaagacctgttgatttacatttattcgctcttaaaaaacttggagctaaaataaaaattaaaaatggatatattt

SEQ ID NO: 244389 - DNA, 802 bp, Unknown
  Bacterial polypeptide expressing nucleotide sequence isolated from the Sargasso Sea
ctaaatggcaataaaatcagttttgattttccatctgtaggtgctactggtaacatcttaatggcaagtgtattagctaggggagagactcatattgaaaatgcagctaaggaacccgaaattgtacaattatgcgaagttttaaatcaaatgggtgcaaatattgttggtattggcactgatacattaactgtgcatggagtagataaattacattccgtagatattgatgttataccggatagaattgaagcaggaacatatttaattgctggtgcaacaatgggaggcataactcttaataattgtaatccaaatcatttagaagatgttatcaataaattaaaactttctggagcaaatatttattctaatgaaaattctttatcaattgagaaaattgattcaatagaatctgttgatattactactgaggtttatcctggtttccccacggacttgcaagcccaatggatggcatttatgtctgtagcaaaaggaaaatcaacaattattgatactgtatatcatgatcgattcactcatatacctgaactaaatagattaggcgctaacattcaattgaaggataataaagctatagttgatggtgtaaataaattaaaaggtgcgcaagttatgtctacagatattcgtgcaagtgctgcattaatattgggagcaataattgcagaaggtaaaacagaaattagtagagtatatcatatagatagaggatatgattcaattgagaaaaaatttcaatctttaggtgttgatattgtacgtattaatgaataat

SEQ ID NO: 244390 - DNA, 691 bp, Unknown
  Bacterial polypeptide expressing nucleotide sequence isolated from the Sargasso Sea
atgatttgcgtaagcgaaaagaagtcatatcttaaatcacaaaatttaaagatttttggccaaggcaaattaaatgggttcgttgaaataagtggtgcgaagaattcggccttagttttgctggctgcatcattactaactaatgaaaaaatagttcttcagaatgttccacgtcttacagatattgaaaaaatgggcaatattcttaagaatttaggcgttaatttaaaagaaaaaaacaatactttagagatagattcaaagaatatttccattaaagaacttccaaatgagcttgttaatggattaagagctagtttcttttgtatcggtccactattaagcaaatttggagaggctaaagttcctatgcctggtgggtgcaatattggttcaaggccaattgatgagcacattgaagggcttaaagcattaggagcagaaattcttattgaaaaaggaattgtcaaagcaaacattaaaggaaagaaaagtagattaattggtactcatatcaaactaaaatgcccaagcgtaggagcaactgaaactttaataatggcagcatcattagcggaaggaagaactaccattgaaaatgctgcaagagaacctgaagttcaagatttatgccaaatgcttaataaaatgggtgcaaaaatttacgactctggtaaagaaaaaataatta

SEQ ID NO: 244391 - DNA, 751 bp, Unknown
  Bacterial polypeptide expressing nucleotide sequence isolated from the Sargasso Sea
aatggaaaaattactaattaaaggaggaagcactttatcaggaaaaatctcttgctcgggagcaaaaaatgcagccttgcctatgatagcctcaacaatcctaagcaatgagagcatagttttaaaaaacttaccatatttgcaagatatcacaacaatgtttgaattactcggatcaatgggggccgaaatccttttagatgaaaatatggacttcactatctcatcatttaatcttaaggatattcaagcaagatatgaattggttaagactatgagagcatccatattggttctgggtcctttagttgcaaagtatggtaaggctagaattgctttaccaggcggttgcgctattggttcgaggccagtaaattatcacctagatgccttaaagcagcttggtgccaaaataaaattgaaaaatggatatattgaggcatctgcaaatagattaatcggatctaatattagatttgacggcattactgttactggaaccgaaaatattatgatggctgccacacttgctcaaggagtaactgttcttacaaatgtagcaaaagagccagaaatagttgaccttgctgacattttgaattcgatgggcgctgacattaaaggagcagggacagatgagattacaattaagggtgttagtgaactttctggaactactttctcaattcctgctgatagaattgaggccggaacatatctagtggcagctgccgttactaatggaaatata

SEQ ID NO: 244392 - DNA, 868 bp, Unknown
  Bacterial polypeptide expressing nucleotide sequence isolated from the Sargasso Sea
gatttagtgcgtaccatgcgtgcttcaattttagtgttaggcccattgcttgccaaacagggtaaagcgaacgtgtctttgcctggtggttgtgcgataggcgcacgcccagtgaaccttcatttaactggccttgaaaagatgggcgcaaagattgaagtagacgaaggctatattcgtgctgaagttgatggtcgtttaaaaggcgcccgtatctttatggatatggtgagtgtaggtgctaccgaaaacttacttatggccgcggcattggctgatggtacgactattttagaaaacgctgcacgagagcctgaaattgttgatttggcgaattgtcttatccagatgggcgcgaaaattagcggtgcaggaagcgataaaataaccattgagggcgtggaaaccttaaacggttgtgattatgcagtgctgcctgaccgtatagaaaccggtactttcttggtagcggccgctgtgacaggtgggaaaatacgctgtactcatgcggcgccagatacattagatgcggtgctagataagctagagcaggccggagctaaaatcaccactggtgatgactggatagagctagacatggaagggcgcaaaccgcaggctgtgcgagttaaaaccgcaccacacccagcattccctacggatatgcaggcgcagtttgttaccttgaactgtgttgccgaaggcacgggcgtaattacagaaaccatttttgaaaaccgcttcatgcacgtgccagagttacaacgtatgggcgcagaaatcgcgttagaagcgaactcagcagtgtctaaaggctgctcaagtcttaaaggagctccggtaatggctactgaccgcgcgcgtcggc

SEQ ID NO: 244393 - DNA, 790 bp, Unknown
  Bacterial polypeptide expressing nucleotide sequence isolated from the Sargasso Sea
gtctttccatcagtcactggtgggcggcacagagaatgtcttgatggcggcagttctggcgagtggtgaaaccgtgatctccaatgcggctcgggaacccgaagtcacggacctcgcccattgtctgatagccatgggagcaaaaatcgagggcattgggacagacacgttgcgtgttcaaggcgtagagcgtctgcaaggtgttaaacatgcggtcctgcctgaccggatcgaaaccggcagttacgccgtagccgcagcgataactggtggagacctattgctacgtggcgcccgtatgaacttgatcgaggccacggtcgacctcctaagccgtgccggcgtcagttttacggaggaagccaacggcgtccgcgtcacccggaccgatgggcgggtgcgcggcgtagatctaatgaccgaacccttccctgggtttccaaccgatatgcaggcgcagttcatggccctcatgtccgtcgccgacggtgcctcaatggtgacagaaaccattttcgaaaaccgtttcatgcacgttcccgaattatctcgcatgggcgctgacatcaatgtacacggcgcgtccgccattatccgtggcgtgccggcattgtctggcgcacccgtcatggcgaccgacttgcgcgcgtctgtttccttggtactggccggtctggcggcagaaggagaaaccatagtcaaccgcgtttatcacttggatcggggctacgagcggcttgaagagaagctggcgcgctgcggtggagagattcaccgcctagcagactga

SEQ ID NO: 244394 - DNA, 346 bp, Unknown
  Bacterial polypeptide expressing nucleotide sequence isolated from the Sargasso Sea
cccacagatttacaagctcaattaatggtactaatgatttgtgcaaaaggtaaatctacaattaaagaaaatatttttgaaaatagatttatgcatgtaccagaattaaaaagaatgggagcaaatattgaaattaaaaataagaaagcaaccattatcggcccatcaaaacttactggtgctgaagtgatggcaacagatttaagagcgtccgttagtcttgttctcgctggcctagtcgccgaaaatagaacaataatcaatagaatttaccatcttgatagaggatacgagtctttagaaaaaaaattaaaaaattgtaaggctaatataaagagaatttaag

SEQ ID NO: 244395 - DNA, 439 bp, Unknown
  Bacterial polypeptide expressing nucleotide sequence isolated from the Sargasso Sea
aatggagaagttgttaatcagaggagggagtcaactctccggaaaaatcacatgttcaggcgcaaaaaatgcagccttgccaatgattgcatcgacgattttgtctgatgaaaaagttactttaagaaatcttccttatcttcaagatataacaacaatgtttgagcttttagggtctatgggatcggatattattttggatgaaaatatgaacttcactatcttttcaaaagatctaaaagatactgaagcaagatatgaattggtcaaaaccatgcgtgcatcaattttagttttagggccattggttgcaaaatacggaaaggcaaaaattgcattacctggaggttgtgcaattgggtcaagaccagttaattatcatcttgattctctagaaaaaatgggagcaaaaataaaattaaaaaaatggatatattga

SEQ ID NO: 244396 - DNA, 940 bp, Unknown
  Bacterial polypeptide expressing nucleotide sequence isolated from the Sargasso Sea
gtttctggtgcaaaaaatgctgttttaaagcaaatgatcctttccatactttcagaaggtgtatataaaatagaaaatgtcccaaatattgcagatgtttactacatgcaagaagttctggatgttcttggaataacatcaaaacttgatgataaatctttagagattaattctccatcagatatttcagttgaagctccatatgaggtagttcaaaagatgagagcttcaattatcgtcttaggtcctttattagcaagaaagggtgaagctaaaatagcttttccaggtggtgatcagcttggcccaagacctgtcaagatgcatattgaggcactagaaaaaatgggtgctaagtttgaacttgatcatggtgtgcttattggaaaaaccgatggactaaaaggtgttgaaatcaatcttccctatgcatcagttggagcaacagagaacacaatattagcagctgtactagctgatggaacaaccgttattgaaaatgctgcaagagaaccagaagttgttgatttggtaaagatgcttaaaaatatgggtgcccaaatcgaaggtgaaggttcaagtgaaattacaattcagggagttgattctctaaaaagtaccaaccataaagtaattggagacagggttgttgcgggaacttatcttgctgcatttttagctacaaaaggatcaggcgtaattaaagggattggtccagattgtctacccatggaattgaagaaatttcaagaaatgggtgcggatttagttatcaatgaaaattctatagaaataaatatcgcaaaagaaatttcctcaattgagatttctactcttccattcccaggagtagcaacagatttacagcctatttttggggcttgtctattaaaagcgaatggcacatcaataataactgaaaatgttacgaccagaggtt

SEQ ID NO: 244397 - DNA, 901 bp, Unknown
  Bacterial polypeptide expressing nucleotide sequence isolated from the Sargasso Sea
aatgaataattcagaaaaattaattgttactgggaacagaaaacttttaggagacgtaaaaataagtggtgcaaaaaattcagcattgccacttatgacagtttctttgttaattgataatggctttcagcttaaaaatgtccctgatcttcttgatacgaaaattatgagacaattaattagtgaactgggtgttaaaattaacattgctcaaaactcaataaacttttttgggaagcctattgaaattcaagcttcagaaaatttggtaaacaaaatgagagcttcaatcttaatactagctcccttattgcaatcacaaaaaagagctttagtacctcttccaggtgggtgtgaaataggaagcagacctattgatatgcatattgaagttataaaaaaattgggtgctaaagttgaattgaaaaatggctatttgtttgctgaattgtcaaacgacggttttattggtagtgaaattaaattttcaaaagtctctgtaggtgcaactgaatgtgcaattttagcatctgttttagcaaaaggaaaaacaacattatctaatgttgccatggaaccagaaattgtagatttaggtaactgtttgaataaagctggagccaatattaaagggcttggggaaaaacaaattattataacgggagtaaaaacactaaatcctataacatattctgtaatgcctgatagaattgaaactggttcttttgcattagcagcagcaattacaagaggaaaagtttttataaaagatacagaaattaattttttaaaaaaatttttagaaaagctaaataaagcaggagtaaaattagaatgttttaaaaatgaattgaaagtaacgggatacaatacaatttctagtgtagatgttcaacacaac

SEQ ID NO: 244398 - DNA, 710 bp, Unknown
  Bacterial polypeptide expressing nucleotide sequence isolated from the Sargasso Sea
aatgaatagttttacttacaataatactgaaaaaatttatataacaggtgagcaaaaattaactggaaatgttaatattagtggagccaaaaatgccgctttaccactaatggcgctttctttaataattaataaagattttaatctgtataatgttcctgatttagtagataccagattaatgtctaaattgttaattgatttaggtattgaaataaattggaaaaaaggaaatttaaacttttatgggaagccaaaaaaagatgaggcatcttatgatttagtaaggcagatgagagcttcaattcttgttttaggacctttgttagcatcaaaaggttcagcaaaagtgcctcttccagggggctgtgctataggtagtaggcctattgatttacatattatggtaatggaagctcttggagcaaatgttaaatttgacagaggttttataatctgttctttaagtaatgagggattaaaaggtggtgttattaattttcctaaagtttcagtgggtgctactgaaagtgcattaatgactgctattttggcgaaaggtcaaacgaaaatctttaatgctgcaagagaaccagaagtaactgatttggcacattgcctgaacaaagcaggtgcagatataaagggtattggaactgataatttaataattaatggtgtaaaagagttgaaccaagtttctcattcag

SEQ ID NO: 244399 - DNA, 735 bp, Unknown
  Bacterial polypeptide expressing nucleotide sequence isolated from the Sargasso Sea
tatggataaattgattattaccggcggtgcccgccttgatggcgagattcgcatttccggtgcgaaaaactccgccttgccgatcctggcagcgaccctgctgtgcgatggcccggtgactgtggccaacctgccgcacctgcacgacatcaccaccatgatcgagttgttcggtcgcatgggcattgagccggtgatcgacgagaagctggccgtcgaaatcgacccacgcaccatcaagaccctggtcgctccgtacgaactggtgaaaaccatgcgtgcgtcgatcctggtgctgggccctatggttgcccgtttcggcgaagccgaagtagccttgcctggcggttgcgccattggttcgcgtccggtcgacctgcacatccgtggccttgaggccatgggcgcagtcatcgacgtcgaaggcggctacatcaaggccaaggcgccggaaggcggcctgcgcggcgcgaacttcttctttgataccgtcagcgtcaccggtaccgagaacatcatgatggccgctgctctggccaacggtcgcagcgtgttgcagaacgccgcacgcgagccggaagtggtcgacctggccaacttcctcaacgccatgggcgcgaaggtttccggtgctggcaccgacaccatcactattgatggtgtagagcgtctgcacaccgccacctacaaagtcatgcctgaccgcatcgagaccggtacctacctggtggccgc

SEQ ID NO: 244400 - DNA, 325 bp, Unknown
  Bacterial polypeptide expressing nucleotide sequence isolated from the Sargasso Sea
gttctaaactgcatcggaccaggtgaatcaagtgtaacagagactatatttgaaaatagatttatgcatgtacaagagcttaatagaatgggtacggatattacaattaatggcaccactgcacttattaatggagttgattctatttctggggctcaagtaatggcaacagatttaagggcatcagcaagtttgatactggctggtttaatagcaaaaggagaaactattgtagataggatttatcatattgatagaggttatgaaagaatagaagagaaattgtccaatctgggcgcagaaataataagattacctaattaga

SEQ ID NO: 244401 - DNA, 730 bp, Unknown
  Bacterial polypeptide expressing nucleotide sequence isolated from the Sargasso Sea
gcagcacaagccaaaggaaaaacaactctcattaattgtgctaaagaaccagaaatatcagacctaatatcatttttaagaagtcttggttgtaaaattaaagaatcaggaagaaaaattattgtaagtggaaactttgaacctaaaacagtttctcacaatataatgtttgatagaatagaagcaggaacctatcttatagcctccgcgttgattggaaaaaaaatctctcttcactctctaaaaactaggactataaaaaaagaaattgaaactttaaaaaaaatgggagtaaaaatgaacgtagaaaaaaataagataacagtctttcaatcaccaaaaatcaaaaagactaacattgtaacatcaccttatcctggctttccgacagatttacaagctcaaataatggttttaatgaccaaagcagttggaaaatctaaaataagggaaaatatttttgagaatagatttatgcatgttcaagaactgaagagaatgggagctaaaataaatgttaaaaataataatgctacaattgaaggaccaacaaatttgtctggtgccgaagttatggcaacagatcttagagcatcagtatcattagtcttagcaggtttaattgctgaaaatagaacaataataaatagaatttatcaccttgatagaggatacgaaaaactagaggaaaaacttaaaaagtgtaaggctataattaggagagtttagt

SEQ ID NO: 244402 - DNA, 705 bp, Unknown
  Bacterial polypeptide expressing nucleotide sequence isolated from the Sargasso Sea
tgcaaaagagcccgaaaattattgatttggcaaacatgctaaatacaatgggtgcaaagatctatggtgccggttctgatgaaatagttattgaaggggttgataatttgaatggtacggaatttgaaataccagcagatcgaattgaagcagggacttatcttgttgcagctactgtcacaaagggtgatatcactatcgaaggaatcgacccaaagagactcatgatagtaattgataaattgcgacagtctggagctgatttagaatttagtgaagattctatttctatttcgatgaaaaaaaatagaccaaatccagtcgatatatctactgcaccatttccagaatttccaaccgacatgcaagcacaattttctgtaattaatgccttatctaatggtaacgctaaaatttatgaaacagtttttgaaaaccgttttatgcatatattagaattaaaccgaatgggatgtaacatttacgtaaaagggaactgtgcaaccattgaaggcgtatcatcaatttctggagcagaagttatggcaactgatttaagagcttcagcatgtttaatacttgcaggtctatgtgcagatggagataccattgttgatagaatttatcacattgatagaggttatgagcgaatagaagaaaaacttaattatttaggcgcaaacataattagacttccaagttaaa

SEQ ID NO: 244403 - DNA, 826 bp, Unknown
  Bacterial polypeptide expressing nucleotide sequence isolated from the Sargasso Sea
ttagttcttggacccttgttagcaaaatatggaaaagcaagaattgctcttcctggtggttgtgctattggaactagaccagtaaattttcatttagacgctttagagcaactaggagcaaaaattattttaaaaaatggttatatagaagcatcagcaactaaactttatgggaacaaaataagatttgatggtgttactgtaactggaaccgagaatttaatcatggcagcaactttagcggaaggaagaacaaccttaacaaatgttgcaaaggagccggaaataattgatttagcagaaatgttaagctcaatgggtgcaaaaattacaggggcaggaagcgatgaaattattatagatggagtaaatagtcttcatggaagtgagtattctattccagctgatagaattgaagctggtacatatcttgctgctgccgccgttacaaatggaaatataactgttgagggtataaatcctaaaagattaatgaaagtaattaataaattggatgatacaggggctgacataacatacaagaaggattctatatcaatatcaatgaacagagatcgaccaaggccagttgatgttacaaccgctccgtttcctgaatttcctactgacatgcaggcacaattttcagtaattaatgctatatccagtggcacatcaaatatatatgaaactgtattcgaaaatagatttatgcatattcttgaattgaatagaatgggatgtgatataacagttcagggaaaccacgccgttataaatggagtgccatctctttatggtgcagaagtaatggcaacagatctta

SEQ ID NO: 244404 - DNA, 826 bp, Unknown
  Bacterial polypeptide expressing nucleotide sequence isolated from the Sargasso Sea
ttcatcgcttattccaaaaaaaaattaaaaggtgcaaagattaaatttccaaaaatatcagtaggagcaacagaaaatttaattatagcctcatccatggctgaaggtactaccatcctgtctaggtgtgcaattgagcccgaaataaaagatttagtaaattttattaattgcatgggaggaaagattaaatggataggaaaaagaactttaaaaattgtaggagttaaaaattttaaagaagtaaaatatgaaattatgcctgataggattgaagcaggaacatatttaattgcagccgcagtaacagaaggaaatttaaaaattataggaattaatcccaatattataaaaactgaaatagatattttaagaaaattaggagcaaaaataaaaattaaaaatgaacaaataaatattaaaggaactgataatataaaaaatatcaatataaaaacagcgccttacccaggttttccaacagatatgcaaggacaactaatggtattactttgtaaaagtaaaaaacgttcagtgattagtgaagaaatttttgaaaatagatttatgcatgtagcagaattaaaccgaatgggtgcaaaaattagaacaaaaggaaacaaagcttttattgaaggaaatacaaattttaaggcagccgaattaatggcaacagatttaagagcttcagtttcattaattcttgctgcattatcagcaaaaggaaaaactacaattaatagaatatatcatttggacagaggatatgagcaaatagaaaaaaaattaagaaagctaggcgctaatattagaagaatttcctaaa

SEQ ID NO: 244405 - DNA, 208 bp, Unknown
  Bacterial polypeptide expressing nucleotide sequence isolated from the Sargasso Sea
ggcggggcgcaggtgatggcgacagatttacgggcctctgcctgcctggtccttgcgggactcgtggcgcgcgaacagaccgtgatcgaccggatttatcatatcgaccgaggctacgactgtatcgaggagaaactgctgcaatgcggcgccgatatccgccgggtctctgattcccgctccccgagggtccatgcagtcgtctagg

SEQ ID NO: 244406 - DNA, 685 bp, Unknown
  Bacterial polypeptide expressing nucleotide sequence isolated from the Sargasso Sea
aatggatagactaataatcaaagggaaagctgatttaaagggatctattaaaattaaagggtcaaaaaactctgcgttgccaattatggttagtgctcttcttactagaagtcctttaaagttaaaaaatttacctaaacttgatgatattgataatatgtcaaagctccttagaagttatggagcaaacattaaatccaaacaagataatttagaaataaaatgcaataatattactaacagagatgctgattatgatattgtaagaaaaatgagggcctcaattttgattttaggtccattactcgctagatttggaaaagcaagaatatccctcccaggaggatgtgcaattggtacgaggccaattgatattcatttagagggacttaaaaaattaggtgctaattttagttttgaaaatggttatgttgtaggtgctgttgaagatgaattaataggtaagcatatcacgcttccgttcccaagcgttggagcaactgaaaatattttaatggctgcttcaattgcaaaaggaaaaacaataattgaaaatgcagcaagagagcctgaaattaatgatctagcttttgccttgaacaagatgggcgcaaaaattaatgtaaaaaataatgaaattataaaaattgatggagttaattcactaactcaagctacacacaag

SEQ ID NO: 244407 - DNA, 277 bp, Unknown
  Bacterial polypeptide expressing nucleotide sequence isolated from the Sargasso Sea
ttgaaaaatagatttatgcatattcttgaactaaacagaatgggatgtgacatttcggttaatggtaatcatgcaataattaaaggagtgcagtcattatatggtgcagaagttatggcaacagacttaagagcatctgcaagcttaattcttgctgggctatgtgctaaaggtgagacagtcgtagatagaatttatcatatagatcgtggatatgagagaatcgaggaaaaactaaattatttaggtgcaaatatattaagacttcctagttaga

SEQ ID NO: 244408 - DNA, 955 bp, Unknown
  Bacterial polypeptide expressing nucleotide sequence isolated from the Sargasso Sea
aattctgccttacccatacttgctgcagctcttctggcagaaaaacctgtaaaaatagggaacgtgcctcatctgcacgacgtgacaaccacaatggagcttctaggtaggatggggctctctctcacagtagatgaaaaaatgactgttgaagttgatagcacttcgataaataatttttttgccccctacgaattggtgaaaacaatgcgctcatcaattttagttctggggcccttgctttcgagatatggacgagctgaagtctctcttccgggcggttgcgccattggggctagaccggtgaacctgcacttgcaaggtctggaggcgatgggcgcagagctgtctgttgaatcggggtacataaaagcgaaaacgaaaggattaagaggcgcagaaattgtacttgatatggtcactgtgactggtaccgaaaatcttctcatggcggctactttagcgaagggagtcacgattattaggaacgctgcgcgggagccggaagtagtcgatttggccaattttttgaagaaaatgggggcaataattgagggagctggttccgataccataaagatccaaggggtttcaagcttatcaggaacagagtatcgcgtactgccagatcgcattgagactggaaccttcttggctgccattgcgatgacgggaggtaaggggaaactaaagagaacaagacccgaattactaggttcagttctatccaaacttcgtgaggcaggatgtaaaattgatacgggtgaagactggatcgaattgaatatggttggtcgcgaattaagggctgttgatattcatacggctccttatccaggatttccgactgatatgcaagcgcaatttaccgcgcttaactgtgtcgcaaaagggagcgccaccgttactgagtcagtcttcgaaaatcgtttcatgcatgtcttagaattacaga

SEQ ID NO: 244409 - DNA, 376 bp, Unknown
  Bacterial polypeptide expressing nucleotide sequence isolated from the Sargasso Sea
atggataaattattaatagagggacaacgaccactctcaggggcggtacgcatatcaggagcaaagaattcagttttgccaatgctgtgtgcatccgtaatggtcacagatggtcaagttgagctcgaaaacgtaccacacttgcaggatgtcactacaactactagattactgacacaaatgggtgttagcgtgacgatggatgaatttatgaatatcagcctcgacccaagtacgattcataatttatatgctccatatgaacttgttaagactatgaggtcctcgattttagtcttgggtcctttactttctagatacggcgaggcaaaagtttcgcttccaggagggtgtgcgataggcatgaggcctgttg

SEQ ID NO: 244410 - DNA, 208 bp, Unknown
  Bacterial polypeptide expressing nucleotide sequence isolated from the Sargasso Sea
catgcattattaatgggagtttcatcaatttatggtgctgaagtaatggcaacagatcttagggcatcagctagtcttattcttgcagggctttgcgctaaaggagaaacagttgtagatagaatttatcacatagatagaggctatgagcgcatagaggaaaaactaaattacttaggagctaacataacaagacttcctagttaat

SEQ ID NO: 244411 - DNA, 584 bp, Unknown
  Bacterial polypeptide expressing nucleotide sequence isolated from the Sargasso Sea
aatggataaacttctaatcaaaggaagaacacctttaaatggagagatttacgcttctggtgccaagaattctgccttacctatattggcttcttctttattatcggattcacccttaactgtaggaaatttacctcatcttaatgatgttacaactatgttagagcttttagggtccatgggagtagatgtaacactgagtgatgaaatggaggttcaagtagatacttcatcaataatgaatttggatgctcgttacgagttggttaaaactatgagagcatcaatattagttttaggtcctctcttagcaagattccaagaagccactgtagctttacctggaggatgtgctatagggagtagacctgttaatcttcatattgaggccatgagagcaatgggagctcaaattaatatagaaaacgggtacataaaagcttctgtaaatggaagattaaaaggaagtaaaatttcttttgatccagttagtgtaactggaactgagaatgtgattatggcagccagtttagctgaaggtacaacaataattcagaatgctgctaaagaacctgaagtagttg

SEQ ID NO: 244412 - DNA, 571 bp, Unknown
  Bacterial polypeptide expressing nucleotide sequence isolated from the Sargasso Sea
atgcaaagattagaaattaaaggtggtaaaaaaatttcaggaacaatcaaaatttcaggctctaaaaatgctacccttccaatattagctgccacaatattaaccagtaaaaaaattattttaaaaaatataccaatagtaaaagatgtagaaactatggtgactcttttaggcacgatcggatcaagtattaaattgaataaaaaaaaaaaagtaattcaaataattaataagaaaaaattaaaaacttttgggtcttataatcttttaaaaactatgcgggctggaatattaatattagggccgatgttagctagatataaaatggcaaaagtctcgttgccaggaggttgttcaataggttcaagaccaatagatttacatttaaatgctttaaaaaagatgggagcgaatatccgagtaaaaaatggatacattatagcttcagcaaaaaaaggtttaaaaggttgtttaattaagtttccaaaaatatcagtaggagcaacagaaaacacattaatagctgcatgtttttcaaatggagaaacaaaactaagaaattgtgcaatgg

SEQ ID NO: 244413 - DNA, 837 bp, Unknown
  Bacterial polypeptide expressing nucleotide sequence isolated from the Sargasso Sea
tatgcaaaaactagaagtctttggagctaataagctcaaaggacaaataaatatttcaggttctaaaaatgcctcattacctatcttagctgcaactttattatctagtaaaaaagttaatttaaaaaatttaccaaaagttaaagacattcagactatgataaacttattacaatcgctaggttcaaaaattagatttaaaaaaaaaaaattaattattaataattctacacaaaataaaaattttgcttcttatagtttggtaaaaacaatgcgtgctggaatattagttcttggccctttacttgcaaaatttggaaatgcaaaagtttcacttccaggaggatgtgcaattggaactagaccaatagatattcatttaaaagcattttcaaaacttggtgttaaatacaatattacccaaggttatgttcatgcatctaccccaaaaggattagtaggttctaaaattcgtttcccaaaaatatctgtgggtgctacagaaaatttaattatcgcggcaagccttgcaaaaggtacaaccatcctaagtaattgtgcaatagaacctgaaataaaagatttagtcaattttttaaataaaataggctgtaaaataaaatgggttggaaaacgtaaaatcaaaattgatggagtaaatcaaataaatgaaacaacttattcagttatgtttgatagaattgaagctggaacttacttagttgcagctgcagcaacagaaggtaatttaaaaataaaaaatataattccaaaaattattaaaacagaaatagatacacttagaaaaattggtacaaaaattgttgttaaaaaaaa

SEQ ID NO: 244414 - DNA, 794 bp, Unknown
  Bacterial polypeptide expressing nucleotide sequence isolated from the Sargasso Sea
tatggcggagggtaaaagtagaattaaacgtgttccagatcttagagatacacgaacaatgataaagttgttggaaatcgtaggcgcaaaatgcacttttgataatggatcacttaccatagatggttctaccgtaaataaccctgaagccccatatgatttggtaaagaccatgcgtgcatcattctacgttttaggtccgttattagctcgatttggttcggtaaaagtatccttgccaggtgggtgtgcatggggcccacgtccagttgatttccatttaaaaggattagaaaaattaggagcaaagatcacattaaatagtggttacatactcgctgaagcaaaaaggttaaagggtactaaaataagttttgagtttccgtcagtcggtgctacaggaaatattgctatggccgcaacaactgcacaaggaacgacagttatagaaaatgctgcgagagagccagagatagttcaattatgtgagtatttgaatgccatgggtgcatctatcaaaggaataggtacatcgcgcattatcattgaaggcgtggattcgcttcattctgcagatatcaaggtaattccagataggattgaagctggtacatttttaatggcaggtgcagtattaggaaaaataaaacttatggatgtcaatccttcacatttggatactgtacttttaaaactcaaggaaattggtgctgatatcaatacctcatcgaattcgatcacaataaatccaacagataatattatacctgtagatatgaccactgcagtatatc

SEQ ID NO: 244415 - DNA, 794 bp, Unknown
  Bacterial polypeptide expressing nucleotide sequence isolated from the Sargasso Sea
aatgcagaaattattaattagaggaaaaaaagaactttctggaagaattacaatatctggatcaaaaaacgcaacacttccaattttagctgcctctattttatctcaaaatgtaaagcttactaacgtgcctttggtaaaagatacgtttacaatgatagaacttttaagatttattggaattaaagttgaaattaaaaataaaaaaaaaattattgaattaaaaaataataataatcgaataaatactttagcgccatataaattagtcaaaacaatgagagctggtgttttggttttagggccacttttaacaaaatataaaaaagcaaaagtgtctttgccgggaggatgtgcaattggtacacggccggttgatctacatttatttgcattaaaaaaacttggtgctaaaatagttattaaagatggatacataattgcaaaagcaccaaatggattaaaaggtacaagaattaaatttccctcaatttctgttggtgcaactgaaaatgcgattttggcagcttttggtgctaaaggaaaaaccactcttttaaattgcgctattgaaccagagataattgatcttatttcatttcttaaaaaattaggttgtgcaattaatattaaaggtcgtaaaataattatattaaataaaaaattattaaaaaaaaaaatttcccataaaatcatttttgatagaattgaagctggaacttatttgattgcaggtgccttaataggaaacaaaattactattaatcacgtcaagcccagtgtaataaattgtg

SEQ ID NO: 244416 - DNA, 821 bp, Unknown
  Bacterial polypeptide expressing nucleotide sequence isolated from the Sargasso Sea
tgtagcattggaattagaccaatagatattcatttaaagtctttatcaaaattaggagtaaaatataaaattatcgatggatatgtttatgctcatgtcaaaggtaaattaaaaggagcaaatataaaattttcaaaaatatctgttggtgctactgaaaacttaataattgctgcatcaatggctgaaggaacaagtgttttatctaattgtgcaatagaaccagagataaaagatttagtaaattttattaatttaatgggtggaaaaattaaatggattggaaaaagaactttacaaataaaaggagttaataaatttaaagagataaaatatagtattatgcctgatagaattgaagcaggaacttatttaatagctgcagcagttacagaaggaaatttaaaaatacatggcattaatcctaatataataaagacagaaatagatgtattaagaaaaattggaataaaaattatacttgaaaaacaatttataaagatttctggaacaaaggatattaaaagtttaaatttaaaaacctcaccatacccaggatttccaacagatttacaagcacaattaatggtattactttgcaaaagtaagaaacgctcagtggtaaaggaagagatttttgaaaatagatttatgcatgtagctgaattgaatagaatgggcgccaaaataaaaacaaaagggaacaaagcttttattgaaggtaatataaatttcaaaggtgctgaattaatggctacagatttaagagcatcagtttcattaattttagccgccttagctgcaaaaggaaaaacaacaat

SEQ ID NO: 244417 - DNA, 814 bp, Unknown
  Bacterial polypeptide expressing nucleotide sequence isolated from the Sargasso Sea
ggaattttagtattaggagcacttttagcaaagtatggcaaggcaaaggtctctttaccaggtggatgtgcaatcggtacacgtccaattgatattcatttaaaagcactttcagatttaggagttaaatataaaattgttcagggttatgtatatgctacagcaccgaagggccttaagggttcaaaaataagatttcccaaaatttcggtaggtgcaactgaaaatttaataattgctgcaagtctagctaaaggagaaactattctatcaaattgtgcaatagaacctgaaataaaagatttggtaaattttttaaataaaatggggtgtaaaataaaatggatatcaaaaagaactgttaaaattattggatgtaaaaatttaagccaaattagttatgaagtaatgccggatagaattgaagctggcacatatctaattgcttcggcattaacagaaggggatataaaaatttgtggcattgatccaaaaattattaaaacagaaataaagattttaaaaaaaattggcacaaatataaaaataaaaaataatgaaatttatgtaaaagggaataaattaattaaaaatattaaaattaaaacttcaccttatcctggatttccaactgacttacaagcacaaatgatggtgttgctttgtaaagcaagtaaaagttcaattataaaagaggatatatttgaaaatagatttatgcatgtagcagaattaaatcgtatgggtgcaagcataagcattaaaggaaatactgcaactataaaaggcaatattaaatttaattctgcagaat

SEQ ID NO: 244418 - DNA, 475 bp, Unknown
  Bacterial polypeptide expressing nucleotide sequence isolated from the Sargasso Sea
gctgtgttattaaagctgaaagatgcaggcgccacgattaccacgggtgaggattggattgaacttgatatgcacggcaaacgccctaaagcggtcaatattaaaacagcgccttacccggcgtttccaaccgatatgcaagcgcagttttgtgtgttgaatgcccttgcagaaggtactgggcgtgtcacagaaacgatttttgaaaatcgctttatgcacgtcccagagatgagccgtatgggcgcgaatatcgaattagaaggtaatacctgcattattcatggtattgaacgtttaaatggtgctcaagtcatggcaactgatttacgtgcttctgccagtttagtgattgctggtttaatggctgatggcattacaacggttgaccgtatttatcacttagaccgtggttatgaacatatcgaggctaaatttcaggggctaggcgctgaagtgatacgtgtgaaataaa

SEQ ID NO: 244419 - DNA, 920 bp, Unknown
  Bacterial polypeptide expressing nucleotide sequence isolated from the Sargasso Sea
aatgcagctttgcctatgtttggccgcaaccatactaactgatcaacaaattacttttaaaaatttaccttaccttcaagacattactacaatgtttgaaatcttaggctcaatgggagctgaaattactttaaatgagggcatgaacttcataatttcaacatcaaagcttaatgactttgaggcaaggtatgagttagttaagactatgcgcgcatctattttagtattgggctctcttgttgctcgtcatggttttgcacgaattgctcttcctggtggatgtgcaataggaacaagaccagttgattttcatttagatgcattagcaaaacttggtgcaaagattgaattaaaaaatggttatattgaagctaccgcaaaaaaattaattggttgtgaaattaactttcctggagtttctgttacaggaactgaaaatattatgatggctgctgttcttgctaaaggccaaacaattttaagaaatgttgccaaagaacctgaggttgaggatttagcaaattttctaaactctatgggagcaaagattaaaggagcgggcagtgatgaaattattatagatggtgttaataatcttagtggcacgaaatttagcatcccagcagataggatagaggccggaacatatctagttgctacagctataactggtggtgatgtcactatatcaaatgttcaagcgccaagaatgaataatattttagataaattaaaattaagtggagcttcaattaatatcggcaaagattatattcaacttaccatgaataaagattttactttaccagtggatatttctacagctccattcccaggatttccaactgatatgcaggcacaatttactgttttaaatgctctatcaaaaggggtctctgttgtaacagagaattgtg

SEQ ID NO: 244420 - DNA, 850 bp, Unknown
  Bacterial polypeptide expressing nucleotide sequence isolated from the Sargasso Sea
tggggccagacctatcaactatcatttaaattctttaaaaaaaatgggaatgaaatatgaaattaaaaaaggatatgtttatgctcattctaaaggaaaacttaaaggtgcaaaaattaagttttcaaaagtgagtgttggcgcgactgaaaattctatcctagctgcctgcttagcaaaaggtgtaacaattttaaaaaattgcgccattgaacccgaaataaaagatttgactaactttttgaaatctgcgggagcaaaaattaaatggattggcaaaagaacattgcaaattgaaggtgtaaagttacttaaaagtatcaactattcagtaatgcacgacagaatagaagctggtacattctgtgttgcggcctgtataacaaaaggagatttaattattaaaaattgtaattctaaaataattcaaaccgaattagatctattgaagaaaactggagcaataataagaagctataataatgaaatacatattaagggctctaaaaatataaagagtataaaaaatattataactaaggagtatccaaactttccaaccgatttgcaggctcaatttatggtattattatccattgccaatggcagaagtataatttcagaaaaaatttttgaaaacagatttatgcatgtcggagaactcagaagacttggtgcaaaaattaaaattaaaggtaataaggccattataaatggtggatcttctcttcaaggcgctgaattaatgtcgagcgatcttagagcttctgtcgctttagttttaggtgcattagtggccaatggtagttctgtaattaatagaatttaccatttagatagaggatatgaa

SEQ ID NO: 244421 - DNA, 748 bp, Unknown
  Bacterial polypeptide expressing nucleotide sequence isolated from the Sargasso Sea
aatggataaaataatcattcaaggccaaaattcactttcaggctcggtgaatattagtggtgcaaaaaatgccgtccttccaatcatgactgcagctttaatggcagaaggagaaagcgttatttctcgagttcctgatcttagagacacccgtactatgataaaattaatggaaattgttggcgctaaatgttcaatggaaggtaatcgtttgaagattgatgcagattcagtatataatccggaggcgccgtatgatttagtaaagacaatgagggcatcattttatgttttaggccctcttttagcgaggtttggaaccgtaaaagtatcactccctggaggttgtgcctggggtccacgtcctgttgattttcatttgaaaggtttagaaagattaggtgcaaaagttaccttgagaagtggctatatcctggcagaggcaaagaaattgaagggagctaacatcaactttgaatttccatctgtgggagctacgggaaatattgtcatggctgcagctactgctgatggaattacaactatagaaaatgctgcaagagagcctgagattgttcaactttgtgattatctaaacaaaatgggtgcatcaataagtggtattggatcatcaaaaatagtcgttgagggcgttgaatctctataccctgcaaatatagatgtcatccctgaccgcatagaagctggtacctttttaatggcaggtgctctgatgggtaaaatcaca

SEQ ID NO: 244422 - DNA, 778 bp, Unknown
  Bacterial polypeptide expressing nucleotide sequence isolated from the Sargasso Sea
tgcgtctattttatcagatcacaatattattcttaatggcattcctgatctagctgatgtcaaaacaatgattactctattggagtctatgggaatagagacaaataaaaactacaaaggttctcttacattaaattcctctggaattgattcaagatttgcatcatatgaacttgtcaaaacgatgagggcttcaatcatggtccttgggccattgctcgcaaagtatggagaagcgaaagtctctttgcctggaggttgcgctattggagctcgaccggttgatctccatatacagggattagaaaaattgggagcgaggatagaaatcaaggatggatatctactggcttcagcagatcgattgataggttcgtcatattgttttccaaaaaagagtgtaactggaacagcaaatattttgatggctgcaaccttagcagagggagaaacaaagattgtaaattcagcttgtgagccagaaatcattcaacttggtgagcttcttaatgccatgggagcaagaattgaaggcctaggagaagattgcataacaatacaaggagtagaaaaccttgtgggcgctgaaattgaaattattcctgatcgaatcgaggcaatcacaatgattattgccggaatcataacccaaggtgaaatcgagattgaaaatatcaatccttcacatatagaggaacctattaagttgatcaggcaatgtggcgcaattcttgagatatctgatcagagtttatttgtgaaaggctctgatgagatt

SEQ ID NO: 244423 - DNA, 489 bp, Unknown
  Bacterial polypeptide expressing nucleotide sequence isolated from the Sargasso Sea
gtgatttaagggctgtgcttgatgtgcttttagcttctggtgcaagaatagaggagaatagctctgggatcgtcgtggaaggtcctggcagtagtcctggggcagtagatattatgaccgacccatatcctggattccccacagatctgcaagcgcaggtaatggcttacatgacgcgagttgatggagctagcatgattacagaaacaatttttgaaaatagatttatgcatgtgccggagttaaaccgtatgggtgccaacataaacgtgcacaactctacagcgctgattagaggtgtgaaaaaactcatgggagccccagttatggcaacagatctacgtgcatcggtctccttagtgttagcgggattagcagctagtggcgaaacaactattaatcgaatttatcatttagatagaggctatgagaaccttgtatctaaattaaaatcatgtggtgcaataatagatcgagtgggaacttgag

SEQ ID NO: 244424 - DNA, 425 bp, Unknown
  Bacterial polypeptide expressing nucleotide sequence isolated from the Sargasso Sea
aaaaaataatattagagttattggaactaataatataaaaaatattaatattaaaacttctccatatcctgggtttcctactgatcttcaggctcaattgatggttttgctctgcaaagccagaaactattctataataaatgaagaaatttttgaaaatagatttatgcattgtgcagaacttaatagaatgggagcaaaaattgtgattaagggaagcaaagcatttatagaaggaaatattatttttaaatctgcagagctaatggcaacagacttgagagcatctgtatctttaattttagctgcgctcacagcaaatggtaaatcaacaattaataggatttaccatcttgacagggggtatgaacatattgaaaaaaaattaagaaaagttggagctagaattaaaagagtttattgat

SEQ ID NO: 244425 - DNA, 712 bp, Unknown
  Bacterial polypeptide expressing nucleotide sequence isolated from the Sargasso Sea
aattaaaaatgcagcaagagaacctgaagtgattgacttatgtaattgtataatttcaatgggtggtaatattgatggtgttggaacttcaacaattataattgatggtgtcgatcatcttaaacatacttcacataatgtattaggtgaccgtattgaaatgggtacatttatgctagcaccagcaattgcgggaggaaaaattaaaattagagggtgtaatacagattatttaaattcatttattgaaaaattagtcgaaacaggtgttgatatcaaaaaaaatgaaaatgaaattattgttgaaaaaaatatagatgttttaaacccaattaatgtcattacagctccttatccaggatttccaaccgatttacaggcgcaattaatgacattaacctgtttttcaaaaggaatttcaaaatttgaagagaaaatatttgaaaatagatttatgcatgtgcccgaattaataagaatgggagctaatattgaagtacaaggaggtacagcaaaggttactggtgtaaacaaacttaaaggagctccagtaatggcaacagatttaagagcttcagtaagtttaatacttgctggacttgcttcctccggagaaacggtcattagtcgcgtttaccatcttgacagaggctatgaaaatatagaaaaaaaactttcaaattgtggtgctaatattagaagattcaagtga

SEQ ID NO: 244426 - DNA, 736 bp, Unknown
  Bacterial polypeptide expressing nucleotide sequence isolated from the Sargasso Sea
tttaatagataataaaaataaattattaaaaacaattgcaccttactctttcgtaaagacaatgagagcgggtgtaatagttttgggttcattgctcacaaaatttggaaaagctaaagtttctttaccaggagggtgtgcaattggaactagaccagtagatatccacttatttggtttaaaaaaattaggtgctaaaattaagataaaaaatggatatatagttgctgaagcaaaagaaggtttaataggaaaaaagattaaatttccatcaatatctgtaggtgctactgaaaatttgattatagcagcaagtttagcaaaaggcataactcatttaaagaattgtgcatgtgaacctgagattaagaatttgacagattttttaataaaaatgggagtaaaaataaaatgggttggaaaaagggaagtaaaaatatttggaaagaaaaaactaaaaaaagttaaacacaatataatgtttgatagaattgaagctggtacttttattattgctggggctttagctggaaaaaaaataaaaattacaaatattgaaactaaaattttaaaaaaagaattaggtattttaaaaagaatgaatgttaaacttaaagtaaaaaaaaattatgtaattattaaagaatcaaataaaatcagaccagcgtctattaaaaccgagccatatcctggttttcctactgatcttcaagctcaaatcatggttttaatgacc

SEQ ID NO: 244427 - DNA, 655 bp, Unknown
  Bacterial polypeptide expressing nucleotide sequence isolated from the Sargasso Sea
tatgggtgctaaaattgatggtgctggtaccgatctaattaaaataaccggagtcgataagttagagggagctgcttttagtgttatgcctgatagagttgaagtcggaacctatcttactgcggtggcaatgacaggtgggcaagtgaagatcaagtctgccaaacctgaatacctttcttcagttatttctaaattagagcaaacaggttcagtaattaatacaggtgaggattgggtagaaatcaccatggacgaggataagcctgaagctataagcttgaccactggtccatatccttcctttccaaccgatatgcaggcacagtttgtatctttgaatgctatagcaaaaggtaattctactgttacagaaactgtatttgaaaataggttcatgcacgttcaagaaatagcaagaatgggaggtaacatcacccttaagggtaatacggcagtaattgaaggaatagaccgcttaaatggagctccggtaatggcaacagaccttagagcatctgcaagtttagttttggctggcttggttgctgatggtgctaccacgatagataggatctatcacattgacagaggctacgagaggattgaagaaaaattaaaaatgctcggtgcagatattgagagaatttcttga

SEQ ID NO: 244428 - DNA, 705 bp, Unknown
  Bacterial polypeptide expressing nucleotide sequence isolated from the Sargasso Sea
tatggataaaatagttgtaaatggagataaacctctttctggggtagtgaaaataagtggtgcaaaaaatgcagttcttcctgtaatggcagctacattattggctcctggaaaatatttaattgagaatgttcctgacttgcgagatacaaggacgatgatgaagcttttaaatattattggtgcaaaaacattatttgataaaggatcattaactattgattcctcatcggcaaataatccagaagctccttatgatctcgtgaagacaatgagagcatcgttttatgttttaggtccattgatatctagatttggtatagtcaatgtgtctttgcctggtggttgtgcatggggacctagaccagttgattatcatctgaaaggtttagagcagttgggagctaaattaaaccttgatggaggtaatattcttgcggaggcaaaagagctaataggaaatgatatacattttgaatttccctctgtaggagcaactggaaacctcgcaatggctgcagtaaaggctagcggaactactaggctttataattgcgctaaagagcctgagataacacaattatgtgagtttttaaatagtatgggtgctaatattgaaggtatcggaacagaaaccctaattattcatggagtagatgaacttcattctgcagacatatatattattcctgatagaattgaagc

SEQ ID NO: 244429 - DNA, 745 bp, Unknown
  Bacterial polypeptide expressing nucleotide sequence isolated from the Sargasso Sea
atggatagaattttagttaagggtggcactcctctagagggtgaaatagtgatttccggagcaaagaatgcctgtttggcgcttatgcctgctgcgttgctgacaaccgaacccttgacgttgactaacagccctttcctctcagatattgtgatgatgaaaaagttattgtcctctctgggatgtgaggtggctgatgtacaaagtagacgtataattactattactgcggggaatatttctaattgtactgcaaaatatgatattgtacgaaaaatgcgcgcatcaatattggttttggggccacttttagctcgtgaaggccgggcaatagtaagtttgccaggaggttgcgctattggtgcaagaccggtagatcttcacttaagtgcattggaagcgatgggggcgtctctagagttaaaagatgggtatatacatgcttccgctccaaaaggtctaaaaggagttgaatacacttttccaataatatcggtgggggctacagaaaatacgattatggcatctactttagcagatggtgtctccatactcagaaattgcgccttagagccggaaattagagatttgtgcgattgcttagtcggaatgggcgctaagattaaaggcgtgggaacccaaacgattactatcgaaggcgtgagcaaacttaccggaaatacccattctgttatcgttgacagaatagaattggggacttatatgcttgcgccggctattactg

SEQ ID NO: 244430 - DNA, 799 bp, Unknown
  Bacterial polypeptide expressing nucleotide sequence isolated from the Sargasso Sea
attggaaatacaataaaattttcaaagatatctgttggagctactgaaaatttaattatcgctgcaagtcttgcaaaaggaaaaacaattttaaaaaattgtgcaattgaacctgagattgtggatttaattaactttttaagaaaaatgggatgtgacattaaatggaaaggaaaaagaactattgcaataaatggagttaagtcattaaaaaaaattcaatacaaaataatgtttgatagaatagaagcaggaagctacatgattgcttcagcattgactgaagggaatctgagaatcataaatattaaaccaaaaataattcaaacagaaatagatatattaaaaaaaattggagcctctataaaaactacagatacagagttacgaattattggaaaaaaaaaaattaaaaatataaaaataactacatcgccatacccaggatttccaacagatttgcaggcacaattaatggtacttctttgtagatcttatggtcgatcagaaattatagaaaaaatttttgagaatagatttatgcacgcttctgaacttaatagaatgggagcaaaaataaaaatttcagggaataaagcaattatccaagggaatgtagtttttaaatctgctgaattaatggcgaccgaccttagagcttcagtttcactaatacttgccgcactgtcagcaaagggaaaatcaataattaatagaatatatcatttagataggggatatgagagcatagaaaaaaaacttaaaaaaattggcgccaatattagaagaatatcctaag

SEQ ID NO: 244431 - DNA, 619 bp, Unknown
  Bacterial polypeptide expressing nucleotide sequence isolated from the Sargasso Sea
agtataaatatttttggagtagaaaaattaaaatcagcagtacataaaattatatttgatagaatcgaggcaggaacatatattattgcagcagctttaacaaaaggctatttaaaaattaaaaatataaatccaaaaatcatgtcaacagaaataaattttttacaaaaaatgggaattgatataatcaaaaagaaaaatttcttaattgcaagtcgttcaaaaaagcttaagagtgttaatattgcaactgaaccatatccaggttttccaacagatttacaagctcaaattatggttttaatgaccaaggctgaaggagtctcaacaataaaagaaaatatttttgagaatcgtttcatgcacgttccagagttaagaagaatgggggcaaaaattgaaacaaaaggaaacaaagcaaggatttttggaaaaagtaaattgacaggagcagaattaatggcaaccgacctaagagcttctgtatgcttggcactagccggacttgttccatcaaataaaacaattgtaaatagaatttatcatttagacagaggatatgaaaaaatagaaaaaaaattatcaaaatgtggagctcaaattaaaagattgcgatgag

SEQ ID NO: 244432 - DNA, 946 bp, Unknown
  Bacterial polypeptide expressing nucleotide sequence isolated from the Sargasso Sea
ccaaaaagtaaaagatatggagacaatgattatttattagacttcttaggatctaatattaaaaaagcaaaagataaaataattatcaataactcatatcaaaaaaaaacatttgcatcttacagtttagtaaaaactatgagagcaggaattttagttcttggtcctttgttagcaaaatttggtactgcaaaagtatctcttcctggtggttgcgcgataggaacaagacctatagacatccatttggatgctttatcaaaactaggagttaaatataaaattattcaaggttacgttcatgcaactgctccaaaaggattgataggaaataaaatacgattttcaaagatatctgttggtgctactgaaaatttgataattgctgcaagttttgcaaaagggtctacttatttaagtaacatagcaattgagtctgaaattaaagatttaattaatttcttaaagtgcatgggatgtaatatcaaatggactggtaagcgttcagtaaaaattgagggtgtgtccaaagttaaagacattacctaccaagtaatgtttgacagaatagaagctggtacatatttaattgctgcagcagttacacaaggaaaccttaaaatcaaaaatattgtcccaaaaattatacaaacagaaattaatattttaaaaaaaataggtgcaaaaattaatgttaaaaaagatgaggttcatatagtgggcaataaaaaagtcaaaagtattaatataaaaactgccccatatcctggcttcccaactgatttacaagctcaaatgatggtattgatgtgtaaagcaaataagcaatctttaataaaagaagatatttttgaaaacagatttatgcatgttgccgaattgaatcgaatgggagctcaaatattaatcaaaggaaataaagcaatcgttcaaggaaacataaatt

SEQ ID NO: 244433 - DNA, 359 bp, Unknown
  Bacterial polypeptide expressing nucleotide sequence isolated from the Sargasso Sea
atcttctttccccacagatatgcaggctcaattcgtgtcattaaatgctattgcaaatggcaactcaactgttacagaaactgtatttgagaataggtttatgcatgttcaagaaatagcaagaatggggggcaatatttccttaaaaggaaatactgctgtaatagaaggaatcaagaaattgaagggtgctccagttatggctacagacttgagggcttcagctagcttagttttagcaggtttagttgctgaaggagcaaccaccatagatcgaatctatcatatcgatcgaggatacgaaagaatagaagaaaaacttaaaatgctaggtgcagatatagaaagaatatcctgag

SEQ ID NO: 244434 - DNA, 460 bp, Unknown
  Bacterial polypeptide expressing nucleotide sequence isolated from the Sargasso Sea
ttgaaaaaaatgggtgtaaatttaaaaataaaaaaaaatgaagtattgatttcaagcactaaaaaaataaaaccaatatcaattaataccgaaccatatccaggatttccaacagatcttcaagcacaaataatggttttgatgacaaaggctagcggtatttccaagataaaagaaaatatatttgaaaatagatttatgcatgtgccagagcttaatagaatgggagcaaaaattaaaattttgggtaacacctcttttataaatggtccgcaggaactaaatggtgctgaggtaatggctactgatctgcgtgcatctgtgagcttggttcttgcagggttagttgctaaaaacaaaactattatcaatagagtttatcatttggacagaggttacgaaaaaattgagaataaaattaaaaagtgtaagggaaaaatttcaagagtcgagtattaat

SEQ ID NO: 244435 - DNA, 880 bp, Unknown
  Bacterial polypeptide expressing nucleotide sequence isolated from the Sargasso Sea
catttagaggcgttaaaaaaaatgggagcatccattaaaataaaagatgggtatgtcattgcttctgcaaaaaaagggttaaagggatgttcaataaatttttccaagatatcagttggggctacagaaaatattttaattgcatcttgtttggcaaaaggaaaaactaaattacaaaattgtgcaattgaaccggaggtaaaagatttaatatcttttttaaaaaagataggatgcccaataaagcaagttggaaaaagaaatatagaaatagtaggtaaaaaaaaattaaattcagcaaaccacaaagttgtatttgatagaattgaagcgggcacatatatcattgcctctgcaattactaacggttctttaataattaaaaatataaaccataatttaattaaaactgaaattgtattgttaaaaaaaatgggaattaaaattttaaagaaaaaaaattatattattgtatatcctccaaaaaaattaaaatgtgttagtctagttacagaaccttaccctggctttccaactgacttacaagctcaaattatggttttaatgacgagagcagaaggagtatcaattattaaagaaaaaatttttgaaaatcgctttatgcacgtatcagagttaagaaggatgggtgcacatattgacgttgaaggaaataaagcaaaaatttatggaaatagtaaattaaacggagctgagttaatggcgaccgatctgagagcttctgtttgtttagtattagctggactaacagcctacaacaaaacaattgtaaatagaatttatcacctagatagagggtatgaaaatattgagaaaaaaatatctaaatgtggtgcacatattaaaagaatacaatgag

SEQ ID NO: 244436 - DNA, 820 bp, Unknown
  Bacterial polypeptide expressing nucleotide sequence isolated from the Sargasso Sea
gcaaagaatgccgctctaccgcttatggcaacagctttgctgacaaataacgagatcttgttagaaaacatacctcgcttgggtgatgttggctccatgtgtgaattgcttaggggggtgggtgtcgaaatatatggttctttacaagacgccggatgtttgcgattgcgttgtgaggagataactaatacagaggctccatatgacattgtgcgtaaaatgcgagcatccattctaatacttggtcccttgattgcccggtgtggcgaagctcgtgtttctctgccaggaggatgtgcaattgggaataggccggttgatttacatttaaacgcattgatgcaaatgggtgctcaaatcgatttgtctcgcggttacgtggaggctaagatacagggagaaaagcggctccagggtgcgagaataaattttcctatggtttcagtgggtgctacagaaaatttgatgctggcagcgactttagcaaagggtgagaccgagttattaaatgttgcgcgcgaacccgaaatagtaaatttggcggaatgtttgataaaaatgggtgcagaaatagaaggtcatggtaccgatacaatatatatccagggtaaagatgcattgagcggcactacacactcggtcataagcgatagaatagaggctggtacatttgccatagcagcttgcatcactggtggtaagttagagctcatcggtgcgaactctaatgatttacgagctatgcttgacgtgcttttagcttcaggcgcaaaaattgaagagcatagctggggacttctaattgagggccccgggtgat

SEQ ID NO: 244437 - DNA, 800 bp, Unknown
  Bacterial polypeptide expressing nucleotide sequence isolated from the Sargasso Sea
aataggaaatactattaaattttcaactgtatcagttggagctactgaaaatgctttgttagcagcctctaaagcgaaaggaacaactattctaaaaaattgtgcgatagaaccagaaataaaagatctaataatttttttaagaaaattaggattaacaataaacataaaaggacgaactataactgttacccatagtgtaaaaaaaaactcaaagattgttcacagcgtaatttttgatagaatagagctaggtacttatatgatcgccagtgctttacaagccaaaaaatatattacgataaataaaatagacccaaaattaataaaaattgaaattgatattttaaagaaaattggtgttcaaattaaaaaaaaaaaatcatcaataattgttacaaaaaataaaaaattaaaaagaataaatattagcacaaagccttttcctggttttcctactgatttacaagctcaactaatggtaatgttaactcaagctaaaggcatatctaaaattaaagaaaacatatttgagaatagatttatgcatgttccagaattaaagagaatgggtgcaaatatagaaattaaaaataaaacagcaattataaaaggtccaacaaaattaacaggtgccgaggttatggccacagacttaagggcttcagtaagcttagttttagccggtttagttgcagaaaataaaacaactatcaatcgtatttatcatttagaccgaggttatgaatttttggaaagcaagctaaaaagatgtaaagctgagataaaaagaatttaac

SEQ ID NO: 244438 - DNA, 483 bp, Unknown
  Bacterial polypeptide expressing nucleotide sequence isolated from the Sargasso Sea
aatggataaattaattatccaaggagaatctgatttatttggttcaatagatattcctggatctaaaaatgcgtcgcttccaatattagtagcatctttactgagtgaaaaaaatttaaatcttactaatattccaaagctgcaagatgtaaaatccatgatacaattattgagaagttttggcgtaaaaataaatgaaaataattctaaacttactttgaatgctaaaaatttaaaaaataatattgcagattatgatttagttagaaaaatgagagcatctattttagttttgggccctttacttgctcgttttaaaaaagctaagatttcgttaccaggtggatgctcaatcggtactagaccaatagatattcatttaaatagtttgaataaattaggtattaattttgaaattgaaaatggttttataagtggattagttaaaaatgaattaattggaaatataattgatttaccatt

SEQ ID NO: 244439 - DNA, 1121 bp, Unknown
  Bacterial polypeptide expressing nucleotide sequence isolated from the Sargasso Sea
ggcgaaatttcaatctcaggctcaaaaaatgctgccttaccaattttggcatcaacaattttattcgaaaacgaagtcataataaaaaatttacctcgtgttaaagatattgatacaatgataaatcttttaaaatctctcggttcagaaataaaatttaataaaaataaaaaaattgttaaaataacaaagaaaaaaaagcaaaatttttttgcatcatattcacttgttagaacaatgagagctggaatattagttttaggagcacttgttaccaaacatcaaaagtctattacttctttgcctggtggctgcctaataggggcaagacctgtaaactatcatttaaatgcacttaaaaaacttggaatgaaatatgaaattaagaaaggctatattcatgcacaaacgaaagaaaaactcaaaggtgcaaaaatcagattttcaaaagttagtgttggagcaaccgaaaatacaattatagctgcatgtttagcaaatggaatttctattcttagaaactgcgcgatcgaaccagaaataattgatttaataaattttttaaaatcaggtggcgctaaaataaaatttataggcaaacgtactttgaagatagaaggcattaaatctttagagagcacaagttattctgtgatgtcagatagaatagaaacaggaactttttgtgtggcagcatgtttaactgaaggtaatttaaaaataaataattttgatccaaaaattattaaaacagaattatcattactaaaaagagttggagcaaaaattaaagtagccaaaaaccaaattcatatatctggtccaaaaaaaatcaaaaatttaactaatttagttaccaaagaatatccaaactttcccacagatttacaagcacagtttatggttctactttgtaaggctaaaggtaaaagttcaataactgaaagtatttttgaaaatagatttatgcatgtagctgaattaagaagattaggtgctgagattataataaaaaaaaataaggcatttatttcgggtaatactaactttcaagctgctgaattaatgtctagtgacctaagagcttcggttgcattagtcttagctgcaatagttgcaaa

SEQ ID NO: 244440 - DNA, 701 bp, Unknown
  Bacterial polypeptide expressing nucleotide sequence isolated from the Sargasso Sea
catggataagttattaataaaagggggaaatattttagaaggggaaatatatgcttcaggtgctaagaattcagctcttcctattctagctgcttctttactggccagttcctcgatgaaaattggtaatttacctcacttgaaggatgtaacaacaatgatcgaattgtttggttccatgggtattgatgtagctttaaatgatgatatggaagtattaataaactcatctgatatacaaaatttaaatgcaagatatgaactagtaaagacaatgagagcatccatcttagttctaggccctttactggctaagtttaatcaagcaaatgttgctttacctggtggttgtgcaataggaagtaggcctgtgaatcttcatattgaagccatggaaaaaatgggagctgaagtaagtattgaagagggttacatcaaagcgaagtcaaaaaaagggttaataggagcagatatttatcttgatcctataagtgtcacagcaacagaaaatataatgatggctgcatctatagctaaaggaactacaattattagaaatgcagctagggagcctgaagtagtagacttagctaattgtctcactcaaatgggagcttctatagagggagaaggcactgacaaaattgttataaatggagtggaaagtctttctggatgtgattttaaagttatgccagata

SEQ ID NO: 244441 - DNA, 495 bp, Unknown
  Bacterial polypeptide expressing nucleotide sequence isolated from the Sargasso Sea
aatggaaaaattattgattaaaggtggaaattctctttcaggaacaataacctgttctggagctaaaaatgcagccttacctatgatagcgtcaacaattctttgtgatgaaaaggtaattcttaaaaatttaccttaccttcaagatatcactactatgtttgagctattgggatcgatgggagctgatattttacttgatgagaatatgaattttacaatctcatcctttgcacttaaagatactgaagccagatacgaattagtaaaaactatgagagcttcaatattggtcttaggtcctttaattgcaaaatatggtagtgcaagaattgctctccctggtgggtgcgcaattggctcaaggcctgtaaattatcatttggatgccttgaaacagatgggagcaaaaatagaattaagaaatggttatatcgaagcttctgcaaaagaattattaggtactaatattagatttgaaggaataactgtcac

SEQ ID NO: 244442 - DNA, 1054 bp, Unknown
  Bacterial polypeptide expressing nucleotide sequence isolated from the Sargasso Sea
atggatagcttaaagattataggtggagcaaaattaaaaggcaaaattaaaatcagtggtgcaaaaaactctgctctcccactaatggcctgtagtttacttataagcaaaggggagctcaaattagattcaatgccaaatttagctgatacaaggtttatgagcattctactctcaagtcttggaatgaaatcaaggattgagaataatattgcatatatttctggagaaccaaaaacatatattgcagaatatgatatagttagaaaaatgagggcgtctattcttgttttaggtcctttattagctaagtatcgaatagccaaagtaagtctccctgggggatgctccatcggtacgaggcctgttgatttacatattaatgcatttgaaaaaatgggtgctagcatcttacttaaagatggttacatagaggcaaaagcaccaaataaagggctttatggagcagatataagcttcccaaaaatttcagttggagcaactgaaaatgtaattatggcagcatcattagcaaatggaagaacaagaattctaaatgcagcaaaagagccagaaattattgatttggcaaattgcctcaaaagaatgggtgcatcaataaaaggtgctggtagtagcgaaattatcatagacggagttaaagaattagagggatgcaatcataaagttatacctgatagaattgaggctggaagttttgcaattgctgccgcaattacaaagagttcattagaattatgtaattgtgagccaaaacatcttaagagcttatccaaaaaactaattaatgcaggtgtaaattgggaaagtgataaggatataattaaaattacatctgatggtatattaaaacctgtaaatgtccaaacatcagagtatcctgattttcctacagatttacaggcacaatttatgactttaatgaccgtcgctaatggcaattcagaaataattgaaaatatttttgaaaatagatttatgcatgttccagaacttttgagaatgggtgctaatatttcagtcaatggtggtg

SEQ ID NO: 244443 - DNA, 1168 bp, Unknown
  Bacterial polypeptide expressing nucleotide sequence isolated from the Sargasso Sea
aatgactgcagcgctacttgtagatggaaagactacgataaacagcgttccagatcttcgagatacgagaacaatgattcgcttattagaaattataggtgctaaagttgcatttaaaaataattcgttatccataaatgcctctgatgtgaacaatttagaggcaccatatgatcttgttaaaactatgagagcttcattttatgttttaggccctttgcttgcaaggtttggtgaagttagagtatctctgcctggtggttgtgcttggggtccgagaccagtagattttcatttaaaaggattagaaaaacttggtgcaaagataagtcttgaaagtggttacatattagcaaaagcaaaacacctaaatggcaataagatcagttttgattttccatctgtaggtgctactggtaatatcttaatggcaagtgtattagctaggggagagactcatattgaaaatgcagctaaggagcccgaaatagtacaattatgcgaagttttaaatcaaatgggtgcaaatattgttggtattggcactgatacattaactatttatggagtagataaattacattccgtagatattaatgttataccggatagaattgaagcaggaacatatttaattgctggtgcaacaatgggaggcataactcttaataattgtaatccaaaacatttagaagatgttatcaataaattaaaactatctggagcaaatatttcttctaatgaaaattctttatcaattgagaaaatagattcaatagaatctgttgatattactactgaggtttatccaggtttccccacagacttacaggcccagtggatggcatttatgtctatagcaaaaggaaaatcaacaattattgatactgtatatcatgatcgatttactcatatacctgaactaaatagattaggcgctaacattcaattgaaggataataaagctatagttgatggtgtaaataaattaaaaggtgcgcaagttatgtctacagatattcgtgcaagtgctgcattaatattgggagcaataattgcagaaggtaaaacagaaattagtagagtatatcatatagatagaggatatgattcaattgagaaaaaatttcaatctttaggtgttgatattgtacgtattaatgaataa

SEQ ID NO: 244444 - DNA, 838 bp, Unknown
  Bacterial polypeptide expressing nucleotide sequence isolated from the Sargasso Sea
attggaaaaaggatatattcaatgtagcgcacctaaaggactgactggaaataagatcgaacttcctaaagtatctgtcggcgctactgaaaatattattatggcagcgtcgttagctaaaggtgagactaaaatttttaacatcgctttagaacctgaggtgattgatttgattaactgtttaaatactatgggagcaaaaattgaacttggtgacaacaggtctgtcgtgattcatggggtaacaactctgaaaggctcaaattattctattattcctgatcgtatcgaggccataacctatatttttgctggagcgctagcaggagatggacttaaaatagaaaatttaaacattgaacacatcagtaatgttttagagactttaaagacattgcctgtagatataattttcgatgaaaatactgtgatagtgaataaatctaatattagtgaaggtattgaaattcaaacaaaggaatatcctggtttcccaacagacgttcaagctcaaatgatggttttaatgtctatggctaaaactaagtctgtcatagacgaaaacatatttgaaaatagattcatgcatgtacctgaattgaatagaatgggagcaaatatcgaaattaatggcaaaagagcaattattaatccttgctcaggatttagaggagctccagttatggcaactgatctaagagcttctgtaagtttaattttagcaggattagcagctgaaggtgaaacaaccctaaatcgcatctatcacttggatagagggtatgaacaaattgaggtaaaattagaagcatgtggagcagagattaagagggtttaa

SEQ ID NO: 244445 - DNA, 1222 bp, Unknown
  Bacterial polypeptide expressing nucleotide sequence isolated from the Sargasso Sea
aatggtttgcgtaagcaacaataagtcatatcttaaatcccaacatttaaagattattggccaaaaaaccttaagagggaaggtaaaaataagtggtgcaaagaattctgctttagtattacttgcggcatcattactaactgacgaaaaaatcatattagataatgttcctcttctgactgatattgagaaaatgggaaatatacttaagaatttaggagttaaattacataataaagatcatcaattaataattgattcaaagaatatatccatacaagaacttccatatgaacttgtaaatggattaagagctagtttcttttgtattggagcattattaacaagatttggggaagcttcaatacccttacctggtgggtgcaatattggtgaaagacctatcaacgagcatataaacgggctaagggcactaggtgcagaaattatcattgacagagatatcgtaaaggcaaaactagtcaagaagaaaagtaaactttttggtgcaaatatcagattaaattgtccaagtgttggggctactgaaacgttaataatggcggcatccttagcagaaggcaggactgtgatagagaatgcggcaagggagcctgaaattcaagatttatgtcagatgttaaataaaatgggagcgaaaatttatgattctggtaaagaaaaaataattattgatggagtgcataaacttcatggctgtactcataaagtaatcccagatagaattgaagcaggaacttttttaatagctgctgctgcaacttcatcttcaattacagtttctccagtaattccaaatcacttggaggcagtattaaataagctagaagaaagtggtagtaaaataataataaaaggaaattcgatttcaataaaaggtaataatatcaaagcagtagatattaaaaccgctccatttccaggtttccctaccgacttacaggctccatttatggctctaatgactattgctaaagggagatctaagatcaccgaaacaatttttgaaaacagaatgaatcatgttgatcttttaaatcaaatggggagctctataactttgaaagataatatagctcacataaatggagttaaaaatttaagaggaatgacattagttggattagacttgagatcttcagctgctcttataattgctgctttaacctctaaaagtgttagttatgtatatggacttgaa

SEQ ID NO: 244446 - DNA, 997 bp, Unknown
  Bacterial polypeptide expressing nucleotide sequence isolated from the Sargasso Sea
atggataaattaataataaaaggaggttctaaaatttctggctcagttaatgttcatggttcaaaaaattctgcactaccgattatagtatcttctcttttatctaaaaaaactttaaaactctcaaatgtacctaatgtggttgatgttttaaatttaataaaattactgaaaaattatggtgtaaaaattgaacacaaaaaaaataaattaaaaataaatccatcaaaaattaagaatctatcagcagattatgatgttgtgcgaaaaatgagagcctctatattgattctaggtccattactttctcgatttggtgaggctagaatatctttaccaggaggatgtgctattggaactaggccaatagatatacatcttgctggtttatcaaaattgggagctaattttgaaattcaaaatggttttgttgttggtagtgttaaatcacaattaattggaaataaaattaaattaccatttccaagtgtaggagcaactgaaaatatactaatggcctcagtattggcaaaaggtgaaactaaaatttctaatgctgcaagagaaccagaaatagaagatttgtcaaaatgtcttataaaaatgggtgcaaaaattgaaggtcatggaacaaaaactattcttgtacaaggtgtaacaaatttaaaaaaagcagagcatgagataattgctgatagaattgtagctggcacatatataattgcagctttaatgttaaattcagctttagaaataaataactttaatactatttatttaaaatccttaattgatattttaaaaaaaatgggtgcaaaattaaaagtaagtaaaaattcgataaaagtctctaaaggatcaaaactaaaatctactagtttttcaactagtccatatccaggttttcccaccgatttacaagctcagttaatgtctcttatgtgtatctctgatgggaagtcaaaaataaaagaaacaatttttgaaaatagattca

SEQ ID NO: 244447 - DNA, 1264 bp, Unknown
  Bacterial polypeptide expressing nucleotide sequence isolated from the Sargasso Sea
gatgcaacaatttctggtttcaggcggcgctaccttaaaaggtgacgttgttatttccggcgctaaaaatgccgcacttcctattttattcgccactattctggcagagcagccttcggtgctgagcaatgtccctgtattaaaagacattgataccacctttaaattgttgcgtatttttggcgctgaagtcagctgtgaagggcatcaggtgactgtggatgcaacagcaattcacagccagatggccccgtacgagctggtgaaaaccatgcgcgcttccattcttgcattgggacctttgttagcccgttttggccatgccgaagtgtcattacctggcggttgcgctattggcgcccgaccggtgaatttacatattgacggtttacgcaaaatgggtgcagagatcacagtagaagcgggttatatcaaagccaaagcggctcgcttacatggtgctcatatttttatggacatggtcagtgtcacaggcactgaaaacctgatgatggccgcagtgctggctgatggcttaaccattattgaaaatgcagcacgtgagccagaagtggtggatttagccaagtatctgattgctatgggtgctgatattcagggcgcaggcactgatactattcgtattacaggcaaagaaaagctgcacggcgcacatcacactgtcttaccagaccgtattgaaacaggcacttttctggttgccgctgctgtgactggtggtgatgtcacttgcttaaacgcatcaccagctgagcttgaagtagtgctggaaaagctgcgggaagcgggcgctgaagtcagttccggatcagactggatccgtttgaatatgacaggccgtacgttaaaatcagtgaatgtaaaaaccgtgcctcaccctggttttcctaccgacatgcaagcacagtttactgtgttgaatgtggtggctgaaggcgtgggtatggtcactgaaaccattttcgaaaaccgttttatgcatgtgcctgagttacaacgtatgggtgctgatattcagctggaaggcaatacagccttgattaagcacaccgacaagctgatgggtgctcaggtgatggcgacggacttaagggcttctgccagcttagtcatcgcaggcctggtcgctgaaggtgaaactgtggttgatcgtatctaccatatcgaccgtggttacgaacaaattgagcataagcttaaaggcttaggcgctaatattcagcggattaatgctccggcctga

SEQ ID NO: 244448 - DNA, 898 bp, Unknown
  Bacterial polypeptide expressing nucleotide sequence isolated from the Sargasso Sea
ttggaaataaaaggaggtgaattacttgaaggaaatataaaaataagtggtgcgaaaaattctgctttagttttaatagcagcctcaattctttctaaaggtcaaatcaatctttttaatgttcctagaatttcagatgtatttattttgtctaaaatattaactgcaatgggtatgaatataaagtcaaattcagatcaattaggaataaacactaaaaaaattagccctccatccaacgatttattttttgatttatttcatgctcttagaggtagttttttttgcattggtccactacttgccagatttgggaaggcgaaaatacctttaccaggaggatgcttaataggatctcgaccaattgatgaacacataaattcactaaaaaagttaggcgttgtatttaaattcaaaaataattatttaagtgctgaagtaattactcccaataagaaattgattggatcatcaatcaattttaaatgtaaaagtgtaggagctactgagactttacttatggcagcatcattagcgaaaggaacaactacattaaacaacgctgcacaggaaccagaaatcatagatttagcaaatatgttgaatttgatgggtgcaaaagtaaaaggtgccggatctgaatgtataacaattgaaggagttgaatctttgaaaggatgtgattatacagttatgtctgacagaattgaagcaggtacttttttaattgcagcagcgattacaagatcaaacattagtctttacccatgcgaaccagatcacttaaaagcagttattaacaagctggaactttgtggttgcaagttcgaatattcaaaacactttttacgaattattccaaataaaattttaagttcagttaatatgactactagtc

SEQ ID NO: 244449 - DNA, 1258 bp, Unknown
  Bacterial polypeptide expressing nucleotide sequence isolated from the Sargasso Sea
aatggacaaattcaagatcgatggtcgttgtactctcaacggcgaagtgaccatctctggcgccaagaacgccgctctgccgatcctgttcgccaccctgctgtgtgatgaggagatccacctctccaacgtgccgcgcctgaaagacgtgggtaccaccatcaagctgctggagatgctgggtgccaccaccaaggtgaacggcaacgtcaccgtgctgaccggtgcggtgaacaaccatgtcgccccctatgagctggtaaagaccatgcgcgcctccatcctggcgctgggcccgctggccgcccgtttcggcgcggctgacgtctccctgcccggtggctgcgccatcggtgcccgtccggtcaacctgcatgtgcacggtctggaactgatgggcgccaagattgccatcgaagatggttacatcaaggcccgtgtcgatggccgcctgaaaggcgcccacatcctgatggacatggtttccgtcaccggtaccgagaacctgatgatggccgccaccctggctgacggccgcactgtgatcgaaaacgccgcgcgcgagccggaagtggtcgatctggccaacttcctcaacgcgctgggcgccaagatccagggcgcgggcaccgacaccctgaccatcgacggtgtcgagcgtctgcatggcggcagctacagcgtccagcccgaccgtatcgaaaccggtaccttcctggtgggcgcagcggtcaccggcggcaagatcacctgccgcaagaccgacccgaccctgctggaagcggtactggtcaagctggaagaggctggcgccctgattgagaagggtgaagactggatcaccctagacatgactggtcgcaccctcaagccggtcaccatcaagaccgccccctacccggccttcccgaccgacatgcaggcccagttcaccgtgctgaacgcggtggctaagggcaccggcatggtcaccgagactatcttcgagaaccgtttcatgcacgtacccgagctggtgcggatgggcgccgacatcgaactgcagggcaatgtggccatctgccgcgacacccagcagctcaagggtgcccaggtgatggcgaccgacctacgcgcctccgccagtctggtgctggccggcttcgtcgccgaaggctccaccatcgtcgatcgcatctaccacatcgaccgtggctacgaagacatcgagcacaagctgcaaggccttggcggccgcatcgagcgcatcaagggctga

SEQ ID NO: 244450 - DNA, 1084 bp, Unknown
  Bacterial polypeptide expressing nucleotide sequence isolated from the Sargasso Sea
atggataaactgattatcgacgggggcaagccactggcaggtttggttagagtctccggagctaaaaactcagtgttaccggttttagcagcaacgatcttggcggaaggtcctgttcaattacgcaacgtaccagagttgagagatgtctctacgatggctaagttgcttgaagaaatgggagccgttacgagctctgcagaagaatataatgtggatgcatcgagtttgtcttcctttagagctccgtatgagctagtgaagacaatgagggcctcttttttagtcttgggtccgctcctaacgaagtatgggaaggcggaagtttcattgcccggtggatgtgcgataggagcaaggcccgtcaatctgcacataaaaggcctagaagccatgggagctaagatacaggttgagtccggctatgttaaggcgagagctcctcaaggtttgaagggggcagaaatctttctagagatagcttcggttggcgccacagaaaatttgatcatggcagctgtattagccgagggcaaaactgttatccataatgcggcacaagaacctgagattacagacctaattagctttcttatgaagatgggggcgaaaatttcaggagcgggaacttcggttgttgagattgagggggtgcgctcattgagatcgatttctcatagcgtaattggagatcgggttgaggctggtacctttttaatcgcaggtgcagcgcttggtggagaaattgaggtccaaggtttcgatccaaaccatctaaccgttgttctcgagaaattaaaaatgtcgggagcaaatttagaaatctcacaagactcagttaagttaggcatgagtctctcaagaccagaaccggtcgatattgagactggagtttatccagggtttcctacagatatgcaagcgcagtatatggttttaaattgcattgcttctgggaaatcagttatccaagagcgcatatttgagaatcgctttttgcatgtgcaagaattaagtcgattgggagctgttattgaattacggggcaactccacagcagttgttaccggcgtaaataaatgac

SEQ ID NO: 244451 - DNA, 1261 bp, Unknown
  Bacterial polypeptide expressing nucleotide sequence isolated from the Sargasso Sea
atggataaattaatgataaggggtggttcacctttaaatggtgaaatctatgcttctggcgctaaaaattctgcacttccaattctagctgcttctttgttagcggattcacctctaaaggttggaaatctccctcacctcaacgatgtaaccactatgcttgaattgctaggttcaatgggtgttgatgttatgttgagtgatgagatggaagttcaagtagatacatcaagcatccataatctcaatgctcgttatgaattagtgaaaaccatgagagcctcaattttagttttgggaccattgctagcaaaatttggacaagccactgttgctttacctggcggatgtgcaatagggagccggccagtcaatttgcacatagaggcaatgagagcaatgggagctgagatcgacatagaagaaggaaatattaaagcgaaagtgaatggcagattaaaaggcgcaaaaataatttttgagccagttagtgttactggaacggaaaatgtcatcatggctgcaagtttagctgatggtgtgactgtaatcgagaatgccgctagagagcccgaagtagttgatttagctaattgtcttacagctatgggcgctaacattcaaggagctggtacagatattataactatcgagggagtagaaaagcttgaaggcgcatctttcagtgttatgccagacagagttgaagtaggaacctatctaacagcagtagcaatgactggaggaaaggtaaaaattaaatcagccaaaccagaatatctctcttcagtaatatctaaactcgaacttacaggcgctctaatctcttctggggagaattgggtagaaattaatatgaacgaacccaagcctaaagctattagccttactacaggaccttatccttcttttcccacagatatgcaggctcaattcgtatcattaaatgccattgcaaatggcaactcaactgtcacagaaactgtttttgagaataggtttatgcatgttcaagaaatagcaagaatggggggcaatattgccctaaaaggaaataccgctgtaatagaaggaattaagaaattgaagggtgctccagttatggctacagacttaagggcttcagcaagtttagttttagcaggattagttgctgaaggggcaaccaccattgatcgtatctaccatatcgatcgaggatacgaaagaatagaagaaaaattaaaaatgctaggtgcagatatagaaagaatatcctgag

SEQ ID NO: 244452 - DNA, 1267 bp, Unknown
  Bacterial polypeptide expressing nucleotide sequence isolated from the Sargasso Sea
aatggaaagactcattattaagggaggcaatcagcttcatggagaggtaagctgttcaggagctaagaattcggggttgccaatattggctgccactatcctcttagatactcctgctaaaataggaaatctgcctcatttgcaagatataacaacaatgcttgagcttctaaattcaatgggagcatcaattaattttgatgagagtggctatattgagattgatgcatctaatattcatttacctgaagcaagatatgaattagtcaaaacaatgagagcctccatattagtaatgggccctttagttgctagatatggaaaagcaaaaatatctcaaccaggaggctgcaatataggaacaaggccaatagactttcatctagatggattagaaaatatgggggcaaaaattaagtctgactcaaaatatatttatcttgaagcagataaattaaatcctatagattttaactttccaaagatttctgtgactggcactgaaaatttaatgatggcagcggctttagttaaaggaaaaacagtactgagaaattgtgctaaggaacctgaagtagttgaattggcaaattttctaaataattgcggagcaagtattgttggtgctggtgaatctacaattgagatcactggaagtgaatctttaaaatcaagtaaatgggatgtattgtttgatcgaatagaagccggcacatatatggttgcaggagctataacaaatggacacgtgaaaattaatcagattcaacctgaaactatacagataattagttcaaaactagttgaaatgggagcaattgttgagtctggcattgattgggttgaagttgatgcgacaactacagatcttatttcaaaagatttatctacagaaccattccccggatttcctaccgatatgcaagctcaatttatggccttaaatacaatatcaaatgggcattcgattatcgaagaaactgtttttgaaaatcgttttcagcatgtagatgaattaaaaaaaatgggagcagacatatctttagaaaaaaataaagcttcagttaaaggagtttcaaatcttgtcggtgctgttgtttctgcatctgatctcagagcttctgcaagtttagtgctagcaggtcttgtaggcaaaaatagaacacaaattgaagatatttatcatattgatagagggtatgaatgtatagaagagaaacttactaagttaggcgctgaaatttttagagaacctgcggaatattag

SEQ ID NO: 244453 - DNA, 1156 bp, Unknown
  Bacterial polypeptide expressing nucleotide sequence isolated from the Sargasso Sea
atggatagactaatcatcaaagggaaagctggtttaaaaggatctattaaaattaaagggtcaaaaaactctgcgttgccaattatggttagtgctcttcttactaaaagttctttaaagttaaaaaatttacctaaacttgatgacattgataatatgtcacagcttcttaaaagttatggagcaagcattaaatccaaacaagataatttagaaataaaatgcaataatattactaatagagatgctgattatgatattgtaagaaaaatgagggcctcaattttgattttaggtccattactggctagattcggaaaagccagaatatctctcccaggaggatgtgcgattggcaccaggccaattgatattcatttagaggggcttaaaaaattgggtgctaattttcgtgttgaaaatggttatgttctaggtgctgttgaagatgaattaataggtaaacatatcactcttccgttcccaagcgttggagcaactgaaaatattttaatggctgcttcaattgcaaaaggaaaaacaataattgaaaatgcagcaagagagcctgaaattaatgatctagcttttgccttgaacaagatgggcgcaaaaattaatgttaaaaaaaatggaattataaaaattgatggagttaattcactaactcaagcttcacacaagattatgagtgacagaatagttgctggcacatttgtgattgcggctgtcatgttaaataaaaaatttgaagtaaaagaaattattagcagtaatttagaagctttaacatcattattgataaagatgggagcaaaattaaaagttaaaaaaacttctattcaaattatgcctagtaaaaaattaaatggaattaaaattcaaacagctccttatccgggctttccaacagatttacaggcacaaattatggctttaatgagtttagcgaatggcaattcacaaataaaagaaaatatatttgaaaatagatttatgcatgttcctgaattgaatagattaggagcaaatataaaagtaaaaaaagatatagcttttatctcaggtaatagaaacttaaaaggtgcacaagtcatggctagtgatttaagagctagcgtaagtctggtactagctgccttatgtgcagaggaga

SEQ ID NO: 244454 - DNA, 1264 bp, Unknown
  Bacterial polypeptide expressing nucleotide sequence isolated from the Sargasso Sea
catgcaaaagatattgataaatggaggaaaccttctccagggctctgttcctgtcagtggatcaaaaaatgcatctctaccaataatggccgcaagtattcttattaatgaaaatttagaactcgaaaacgtacctgatttagttgatgtaaatacaatgtcattagttttatcatcgcttggtgtcaatgttacaaaaaaagatgttaaaacaaatcgtcttacacttcgttattcagactctgaaagtacaatagcggagtacgatttagttagaaagatgagggctagtatattagttcttgggccattacttgcacgtaaaaggcacgctagcgtatctcttccaggggggtgcgcaataggtgctcgaccagtagatttgcacatagatgcattaacgaaacttggcgcagcatttgaattagatggtggatatattaaatgtagcgctcctaatggcttaaaaggaaataaaattaatttttcaaaagtatcagtaggagctactgaaaacataattatggctgcatcgcttgctcgaggagaaagtgaaattagaaatatcgcagttgagcctgaggttatggatcttattgattgtcttaataagatgggcgctaaaatcgaattaggagaaaacagaaatgttcacattcaaggcgttgaccagctccaaggtgctgtccactcaattatccctgatcgcatagaagcaatcacatatataattggaggaactataattggtaacgatctcaagattacaaatctgaaccttgagcatatcagcaatgtattggaattattgaatgagctatctattaattactcaatgggtgagaatagcattattgttaatcaatccgagatctctgatggtattgatattaatacaatggaatatccagggttcccaactgatgtacaagcacaaatgatggttttattatctcttggaaaatctaaatcacaaataactgaaaacatttttgaaaacagattcatgcatgttccagaactaaaccgtatgggcgctaatattgaaaccaaagggaaaacagcagttattaatccatgcaaagggtttatttcagctcaagtcatggcaactgatttacgggcctcggtaagtttaattttagctggattggttgctaaaggtgaaacaacattgaaccgaatttatcatcttgatcgaggttatgagaaaatagagaaaaaattgcaagcttgtggtgcagatattcggagaataaattag

SEQ ID NO: 244455 - DNA, 1222 bp, Unknown
  Bacterial polypeptide expressing nucleotide sequence isolated from the Sargasso Sea
atggatagattagtaataaaaggtaaggctgatctcaagggatcaattaaaattaaaggttctaaaaactctgcactacctattatggtaagcgctcttttatctaaaaataccttaaaattaaaaaatttaccaaaacttgatgatatcaaaaatatgtcaaaacttctcagaagttatggggcaattataaaaacttctaaagataatttagaaattaaatgtaacaatataatcaatagagatgctgactatgaaatagttagaaaaatgagggcttccattttaattttaggacctctattagctagatttggaaaagcaaggatctcacttccaggaggatgtgcaataggaacaagacctattgatattcacttagatggactcaaaaaattaggtgctaattttgtagttgaaaatgggtatgtttttggtcaggtgtcaaaacaattgcatggaaataatattatactcccctttccaagtgtaggtgctacagaaaatatattaatggctgcttcaattgcaaaaggcaaaacaattattgaaaatgcagcaatggaacctgaaatatcagatttagctgttactttaaataaaatgggtgcaaaaataaaaattgaaaaaaaaggtgtcataaaaataaatggtgtaaaatcacttactaaagcatctcataaaattatgagtgacagaattgttgctggaacatttataattgctgcagtcatgttaaataaaaattttttagtacaagaaattgaaagtagtcacatagaggccttaacttttgcattaactaaaatgggtgctaaacttaaaattaataaaaattccattaaaatcatgccttctaaaaatttgaaaggtattaaaattcacacagctccatatccaggctttcccactgatttacaagctcagattatggcattaatgagtttagcgaatagtaattctcaaattaaagaaaacatttttgaaaatagatttatgcacgttccagaacttaatagattgggtgctaagattagagtaaagaaagatatcgctcatatattaggtaacagaaattttaaaggagcgcaagttatggcaagtgacttaagagcaagtgtgagtttagtattggctgctttatgtgcagaaggtgaaagtataattaatcgaatttatcatcttgatagaggatatgaaagaattgaaaatacccttgggg

SEQ ID NO: 244456 - DNA, 1171 bp, Unknown
  Bacterial polypeptide expressing nucleotide sequence isolated from the Sargasso Sea
atggataaattaattatccaaggagaatctgatttatttggttcaatagatattcctggatctaaaaatgcatcgcttccaatattagtagcatctttactgagtgaaaaaaatttaaatcttactaatattccaaagctgcaagatgtaaaatccatgatactattattgagaagttttggcgtaaaaataaatgaaaataattctaaacttactttaaacgctaaaaatttaaaaaataatattgcagattatgatttagttagaaaaatgagagcatctattttagttttgggccctttacttgctcgttttaaaaaagctaagatttcgttaccaggaggatgttcaatcggtactagaccaattgatattcatttaaatagtttgaataaattaggtattaattttgaaattgtaaatggttttataagtgggttagttaaaaatgaactaattggaaatataattgatttaccatttccaagtgtaggggcaacagaaaatataatgatggctgcaattttagcaaaaggaaaaacaataattaataatgcagcaaaagaaccagagataatagatttaggtgagtgccttaactctatgggtgcaaaaattattgggcatggaactaatacaattaatattgaaggagtgaatagcttaaatgattcaagctatgatattatgtttgataggatagttgcaggtacatatgttttggctggagttatgattaataaaaaatttactgttaaaaatattaaatctaaatatttagaatctttaattcaaaccctaataaaaatgaaagctaatttaatggttaatgataacgatattacaatattaccttcaaaaaaaataataggcattaatatagaaacagctccttatccaggttttccaactgatctccaagctcaaataatggccttaatgtgcatggcaaatggaccctctacaattaaagaaaaaatttttgaaaatagattcatgcatgtatctgaattgaacagattaggcgcaaatataaaaattaaaaaagatacagcatatgtagaagggaataagcaatttaaaggagctcaagtaatggctagtgatttacgagcaagcgttagtaaagtacttgcaggtctttgcgcaaaaaggggagactacagttaat

SEQ ID NO: 244457 - DNA, 1249 bp, Unknown
  Bacterial polypeptide expressing nucleotide sequence isolated from the Sargasso Sea
ttggaaaaattattaatcaaaggcggaaaaagtctttcaggtcagattgactgctcaggagctaagaatgctgctttgccagtaattgcagcatcaattctttcgtcagatgatataacgcttaaaaatcttccatatcttcaagatattactaccatgtttgaactcataggctcaatgggagctgatatttctcttgatgagaaaatgaattttaaactaaatacatcaaacctttccaaccttgaagcaagatatgaacttgtaaaaactatgcgagcttctatcttagttcttggatctatggtggctaaatatggatatgcgaagatcgcattgcctggagggtgtgctataggaagtcgtcccgtaaattatcaccttaaagctcttgaaaaacttggtgcagaaatatctctcaataatggatatattgaggcaaaagctaaaaaattaactggagctaatatagagtttgagggagttactgttacgggcacagaaaatctgatgatggctgcttcactagctgagggattaacaactttaactaacgttgcaaaagagccagaaatttctgacttggcagattttttaaattcaatgggagcaaagatttcaggagcaggaacagaagagattaggattgaaggtgtggaagaattgactggcacaacttttaaaattcctgcagacagaattgaggcaggtacatatcttgtagcggcagctgttactaatggaaaaattacaatcaataagattgatccaaaaagaatgggctcaattatagaaactcttcaaaaagctggagctgaagtgaattcaaatggaaattctatttcattagatatgacgaaggatgctataaagcctgttgatattatcacagctccgtttcctggatttccaacagatatgcaagcgcagtttactgtcctaaactgcatcggaactggtgaatcaagtgtaacagaaactatatttgaaaatagatttatgcatgtgcaagagcttaatagaatgggtactgatattacaattaatggtagcactgcacttattaatggagttgattctatttctggggctcaagtaatggcaacagatttaagggcatctgcaagtttgatactggctggattaatagcaaaaggagagactattgtagataggatttatcatattgatagaggctatgagagaatagaagagaaattgtccaatctgggcgcagaaataatgagat

SEQ ID NO: 244458 - DNA, 640 bp, Unknown
  Bacterial polypeptide expressing nucleotide sequence isolated from the Sargasso Sea
ttggagcaggttccaaaaattatacttattgaaggtgttaagtctttaaaaaaaacaaactatcaaattttaagtgataggatagttgctggaacatttattatagctgccgtaatgataaataaaaattttaaagtaaaaaaaataaattcgcatcatttagattctttgattgttgctttagaaaaaatgggagctaatttaaaagtaaaaaaaacatcagttgaaattttgcctactgaaaaattgctaggaatcaatattaaaactgctccttacccaggttttccaactgatttgcaggcacaaataatggccttgatgtgtattgttgatggtgattctgaaattaaagagacaatttttgaaaatagatttatgcacgtacctgaattaaacagacttggtgcagacataaaagtaaaaaaagaaacagcatatattaaaggaaatagaaaatttaaaggagcccaagtaatggcaagtgatttgagagctagtgtcagtttagttctagcagctctttgtgctaatggtaaaacggtaattaacagggtttatcatttagatagaggttacgaaaaaattgaaaaaacccttggaaaactagggcctaaaataaaaagagaaaaaatataag

SEQ ID NO: 244459 - DNA, 847 bp, Unknown
  Bacterial polypeptide expressing nucleotide sequence isolated from the Sargasso Sea
aatggagaaattgttaattaaaggaggaaacaaactctctggaataattacttgctcaggagcaaaaaatgcagctttgccaatgatagcatcaacaattttgtctgatgaaaaagtcactttaaaaaatcttccatatctccaagatataaccacaatgtttgagcttttaggttcaatgggtgctgatatcttattagatgaagatatgaatttcacaatacaatctaataaccttaaagatattgaagctaggtatgaactagttaagacaatgagagcttcaatattagttctaggccctttgcttgcaaaatatggtaaagcaagaatagcacttccggggggctgtgcaattggatcgcggcctgtgaattatcatcttgattctctcaggcaaatgggggctgagatagtccttaaaaatggttatatcgaagcgtctgcagaaaatttacaaggtgctagcattagatttgatggagttactgttactggaactgaaaatttaatgatggctgcaactcttgcaaaaggcacaacaactttattaaatgttgccagagaaccagaggttgctgatttagcaaatatgttaaattcaatgggagcaaaaattgatggagctggatcagatgagattaccatccaaggcgtcaaaaaacttagtggaacttcatttcaaatacctgcagatagaatagaagctggtacttatttagctgcagctgcagtgactaaaggagacataaaaattgaaggcattaatccaaacaggcttatgaatgttattgataagttaattcatactggtgcaaaagttgattatgatgaaaattccatatca

SEQ ID NO: 244460 - DNA, 758 bp, Unknown
  Bacterial polypeptide expressing nucleotide sequence isolated from the Sargasso Sea
tatggataagtttgttgtaaatggaggcaatcaaatttctggtactgtagatataagtggagcaaaaaatgctgtattacctttaatgactgcagcattgcttgttgatgggaaaactacgataaatagtgttccagatcttcgagataccaggacaatgatacggttattagaaattattggcgctaacgtagcatttaaaaataattcattatccatagacgcttctgatgtcaacaatttagaggcaccatatgacctagtaaaaactatgagagcttcattctatgttttaggtcctttgcttgccaggtttggtgaggtaagagtatctcttcctggaggatgcgcttggggtccaagaccggtagattttcatttaaagggattggaacaacttggagcaaaaataagtcttgaaagtggctatatattagcaaaagcagaatacctaaagggtaacaagattagttttgattttccatcggtaggtgctactggcaatattttaatggcaagtgtgttagcaaggggagagactcaaattgaaaatgcagcgaaggagccagaaattgtacaattatgtgaaatgttgaaccaaatgggtgcaaatatcattggtattggtactgataaaatcactgtaaatggagtagataaattgcatcccgtagatattgacgtaattcctgatagaattgaagcagggacatatttaattgctggtgcaacaatgggcgatataactcttaataatt

SEQ ID NO: 244461 - DNA, 790 bp, Unknown
  Bacterial polypeptide expressing nucleotide sequence isolated from the Sargasso Sea
atgcagcgactaataatcaaaggtaacaaacgattatctggaataataaaaatttctggatcaaaaaatgcgactctgcctattttagcttcaacaattttaagcgataaaaaaattttaattagcaatattccgatggtcaaggatgtaataacaatgtcacaattattaaaatatttaggttccgatataaaagtaaatcttaaaaaaaaaaaaattcttataaataataaaaaatctcttaaaactttagcaccatacagttttcttaaaactatgagagctggcgttattgttttaggacccttattatctaagtttggcgaagctaaagtatctctacccggaggttgtgctataggaactagaccagttgatattcatctttttggactaaaaaaacttggggctaaaataaaaattaaaaatggatatattcaagctgaggcaaaaaaaggtttaataggtacaaaaataaggttgccaaagatatcagtaggcgccacagaaaatttaattattgcagcttgttatgcaaacggaacaactttcattaaaaactgtgcatgtgaaccagaaataaaggatttaactaattttttaaaaaaaatgggcgctaacatccaatggattaaaaaaagggaaataagaattataggttgtaaaaaatttaaaccagttagccactcagtgatgtttgatagaatagaagcaggaacttttattattgcaggagctttaattgcaaaaaaacttaaaataatttcaattaaaactaaaataattaaaa

SEQ ID NO: 244462 - DNA, 1261 bp, Unknown
  Bacterial polypeptide expressing nucleotide sequence isolated from the Sargasso Sea
tatggaaaagttttcaataaagggcccatgtaggataaggggagaggttgaaatctcaggatcaaaaaattcctcacttccaatattagcagcaactttacttttcaatcagccagttatattaaaaaatttaccaaaggtaagggatatcaatacaatgataaacttattaagatctttaggttcaaaaattactttatctaaagataaaagagtcgccagaatacataataaaaaaaaattaaaaacatttgcgagttattcacttgtaaaaacaatgagaggttcaattttggttttaggtcctttaattgcaagacaatataaatcaaaaatttctttgcctggtggatgtttaattggagcaagaccaataaattaccatttagactctttgaaaaaacttgggatgaactatgttttaaaagatggctatattttagctaaatccaatggtaaattaaaaggatcaactataaagtttcctaaactatctgtaggagctacagaaaattctataattgcagcttgtttagcaaaaggtacgactattttaaaaaattgtgcaattgaacctgaaataaaagatttaacaaagtttttaaattcagcaggagcaaagatttcttggattgggagaacatgtaaaattgttggagtaaaaactttaaatccaacagaatactcagtcatggctgacaggatagaggctggtaccttttgtgtggcagcaacattagcaaaaggaaacttgaagatttcgaattttgatgcaaaaattatcaaaaccgaattaaaattactaaaaaagtttggggcaaaaataaaatcacataaagaaaaaatttttataaaaggtccagaaaaaattagatccattaaaaatattaaaactaaagaatatccaggtgtggcaaccgatctacagtcacaacttatggttttgatgtgtaaagcaagtggaaaaagttctatcactgaaaatatatttgaaaatagattcatgcatgtagcagaactgcgcagacttggtgcaaaaataaatgtaaagaataataaagcttacatttatggaaatactaaatttataggtgctgaattaatgtctagcgatttaagagcatcggtttcattggtattagcagcgatggtttctaaaggtaaatcaataattaataggatttatcatttagaccgtggttatgaaaatattgagcataaattaaaaaaaattggggttaaaataaaaagattaaaatag

SEQ ID NO: 244463 - DNA, 1192 bp, Unknown
  Bacterial polypeptide expressing nucleotide sequence isolated from the Sargasso Sea
gccgctttgcctgtaattgcagcatcaattctttcatcagaagatataacacttaagaatcttccatatcttcaagatattactaccatgtttgaactcattggctcaatgggagctgatatttctctagacgagaaaatgaactttaaacttaacacatcaaacctttcaaaccttgaagcaagatatgagcttgtaaaaactatgcgagcttctatcttagttcttgggtctatggtggctaaatatggatatgcgaagattgcgctaccaggaggatgcgctattggaagtcgtcctgtgaattatcacctcaatgctcttgaaaaacttggcgcagaaatatctcttaataatggatacattgaggcaaaagctaaaaaattaattggagctagtatagagtttgagggagttactgttactggaacagaaaatctgatgatggctgcctcacttgctgatggattaacagttttaactaatgttgcaaaagagccagaaatttctgacttagcagacttcttaaattcaatgggggctaagatttcaggagcaggtacagatgaaattagaattgaaggcgtggaagaattgactggaacaacttttaaaattcctgcagatagaattgaggcaggtacatatcttgtagcagcagctattactaatggaaaaattacaatcaaaaagattgactcagctagaatgggctcaattatagaaactcttcaaaaagccggggctgaagtgtgtttagacgaaaattctatttcacttgatatgacgaaaaatactataaagcctgttgatattgtcacagctccttttcctggatttccaacagatatgcaagcgcagtttactgttctaaactgcatcggacacggcgaatccagtgtaaaagagactatatttgaaaatagatttatgcatgtgcaagagctcaatagaatgggtactgatattacaattaatggaacctctgcgctaattaatggagttgattctatttctggggctcaagtaatggcaacagatttaagggcatcagcaagtttgatattggcgggacttatagcaaaaggagaaactattgtagataggatttatcatattgatagaggctatgaaagaatagaagaaaaattatcaaatcttggtgcagaaataataagattacctaattaga

SEQ ID NO: 244464 - DNA, 1264 bp, Unknown
  Bacterial polypeptide expressing nucleotide sequence isolated from the Sargasso Sea
aatggataagtttttgattaaaggtccttgtaaaattaagggacaagtttctatatctggcagtaaaaattcggctttacctatattagcgtcaacaattctatttgatgaggctgtaacaataggaaaccttccaagagttaaggatatagatactatgataaatttattaaaatctttaggttcaaaggttcaatatttcaacaataaaaaatctataaaaattacaaaaagtaaaaagcaaaaaatatttgcgtcatattcattagtaaaaactatgagagcaggaattcttgtacttggaccactaattgcaaaataccaaaaatcaataacatctttacctggaggatgtttaattggggctagacctgtaaactatcatttaaatgcattaaaaaaacttggaatgaaatataaaattaaaaaaggatatatacatgctttttcgaaaggtaaacttaaaggtacaaattataaattttcaaatattagtgtaggagctacagaaaatgctattattgcatcttgtttagcaaaaggaaaaactattcttaaaaattgtgctatagaacctgagataaaagatttaacaaattttcttaaatctgcaggagcaaaaataagctggataggaaaaagaacaattaaaatagaaggagtaaagtctttaaatagtatcaagtattcagtaatgggagatagaatagaggcaggaacattttgtgtagccacagcgcttactgcaggtaaacttttaataaaaaattttgattcaactttaattcaaacagaaataaactttttaaaaaaaataggttcaaaaatcaaaactaataaaaaagaaattaatattaaagggccaaataaaataaaaagtattaaaaatataataactaaagaatatccaaactttccaacagatttacaggcacaatttatggttctgctatgtaaagctaatggaagaagcataatcacagaaaatatatttgaaaatagatttatgcacgttgcagaacttaaaagacttggagcaaaaatagtaattaaagggaataaggctatcatagaaggaaatacagaatttttaggtgctgaattaatgtctagtgatttaagagcatctgtagcattggttttggctgctatggtagcaaaaggtcaatctgtaattaatagaatttatcatttagacagggggtatgaaagaatagaaaataaacttagaaaacttggagtaaatataaaaagattttcttga

SEQ ID NO: 244465 - DNA, 1261 bp, Unknown
  Bacterial polypeptide expressing nucleotide sequence isolated from the Sargasso Sea
attggaaaaattattaattaaaggtggaaaaagtctttcgggtgagattgattgttcaggaggtaaaaatgctgctttgccaataatcgcagcatcaattctttcatcaaataatataacacttaaaaatcttccatatcttcaagatatcactaccatgtttgaactcataggttcaatgggagcagatatttcattagatgagagaatcaattttagactcaatacatcaaacctttccaaccttgaagcaagatacgagcttgtaaaaactatgcgagcttcaattttagttcttggatctatggtagctaaatatggatatgcaaagattgcattacctggagggtgtgctatcggaagtcgtccagtgaattatcatcttaaagcgctagaaaagctcggtgcagaaatatcactcaataatggatatattgaagcaaaagctaaaaaattaattggagctgatattgagtttgatggagttactgtaactggtacagcaaatattatgatggctgcttcattagctgagggggttacaactttaacgaatgtcgcaaaagaaccagaaatttctgacttagcagattttttaaactcaatgggagccaggatttcaggtgcaggaacagatgagattagagttgaaggtgtggaagaattgactggaacaacttttaaaattcctgcagatagaattgaggcaggtacatatcttgtagcagcagctattactaatggaaaaattaccatcaaaaaaattgatccaactagaatgggctcaattatagaaactcttcaaaaagctggggctgatgtgaattttaatgaaaattctatttcactagatatgacgaagaatgctataaagcctgttgatattgtaacagctccatttcctggatttccaacagatatgcaagcgcagtttactgttctaaactgcattggacccggtgaatccagcgtaaaagagactatatttgaaaatagatttatgcatatacaagagcttaatagaatgggtactgatattacaattaatggaaccactgcactaattaatggagttgattctatttctggggctcaagtaatggcaacagatttaagggcatcagcaagtttgatattagcaggactaatagctaaaggagaaactattgtagataggatttatcatattgatagaggctatgaaagaatagaagagaaattatccaatcttggtgcagaaataataagattgcctaattag

SEQ ID NO: 244466 - DNA, 440 bp, Unknown
  Bacterial polypeptide expressing nucleotide sequence isolated from the Sargasso Sea
tagttttgatgataattctatttctatttctatgaataaagatcgcccagatcccgtagatataactactgctcctttccctgaatttccaacagacatgcaagcacaattttcagttataaatgcaatatctagtggagtttcaaatatatatgaaactgtttttgaaaacagatttatgcatattctagagcttaataggatgggatgcgatattgaagtaaaaggcaatcatgcgattattaatggagttgagtcaatatatggtgcagaagttatggctacggacttaagagcttctgcaagtttgattattgcaggtttgtgcgcaaaaggggagacagttgttgatagaatttatcatattgatagaggttatgagcgcattgaggagaaattaaattatttaggtgcaaatattgtcaggcttccatcttagt

SEQ ID NO: 244467 - DNA, 569 bp, Unknown
  Bacterial polypeptide expressing nucleotide sequence isolated from the Sargasso Sea
gcccgatagagttgaagttgggacatatctaactgcagtggctatgaccggtggtttagtaaaaataaaatctgctaaacctgaatatctttcatcggttatattgaaactggaaggttgcggagccactatcaatcaagggcaagattgggttgagattaaaatggatgcctctagaccacaagcaacaagtttaacaacaggaccttatccttcttttccaacagatatgcaggctcaatttgtttctttaaattctattgccaaagggaattcaacagttacagagacagtttttgagaatagatttatgcatgttcaagaaatagcaagaatgggtggcaatataacacttaagggcaacacggcagtgatcgaaggaataaataaattaaaaggagctcctgtcatggcaacagacttaagagcatcagctagtttggtcttagcaggactagtagcaaagggagatacgacaatcgataggatttatcatattgacagaggttatgaaagaatagaagaaaagctgaaaatattgggagctgatattgaaagaatatcttaaa

SEQ ID NO: 244468 - DNA, 1065 bp, Unknown
  Bacterial polypeptide expressing nucleotide sequence isolated from the Sargasso Sea
ctcgcgcaaggaacttatctccttaaagaagtcccagatattacagacgtccaatcaatggctgagcttctccgctctatggggctgacagttcgcaatctagaaaataatcaaattgaaataatgaatccaggggatatcacacctgaagctccatatgaacaaatagaaaagatgagggcatcgatagttgttttaggcccattagtatcaacctatgggaaggcaagagtagctctgcctggcggagacgatttcggcccccgcccaatcgatatgcatcttaaggggcttgaagcccttggggtgcgcttctcctctgaacatggatatatagaagcagaagctgagagattaattggcactcgagtcgtcttagattttccaagtgtcggggctacagaaaatatcatgatggcggcagtccgcgccgaaggagagacaattattgagaatgctgcaagggaacctgaaatagcggatctcgcagcattcctaaataggatgggcgcaaaagtgctgggcgcaggttcgtcaacggtcaccatccaaggagtagataatttagttgcggttgaacatactgttattcctgatcgaatcgaagtagcaacgtatctttcagcggtaggaattgccggcggagaaataaaccttctcggggctcgagcagatcacatggatatgttgtgtcaaaaacttggtgaaatggggatgcgcatttcatcagattcaaccggtctttgggctatggcaagtaaaggcctgcagtctgttgaccttgcaactctcccgtaccctgggctagcaactgattacaagccgtttctggtagcgatgctgtctgtagcagacggtgttggaatcgtaacggagaacctatttagtggccgcttccgttatgtcgatgaacttataagaatgggggccgaaattcgtactgagggtcatcatgcggttatacgcggggtacctaaactttcaggtgctccggtacgcgcacacgatattcgggcgggggcagctcttgtcacagcagctctcaaagctgacggagaaacagaa

SEQ ID NO: 244469 - DNA, 1204 bp, Unknown
  Bacterial polypeptide expressing nucleotide sequence isolated from the Sargasso Sea
tatggataagtttcaaattaaaggcccttgcaaaatcaagggtgaagttgaaatttcgggagcaaaaaatagcgctcttattttacttgctgcaactcttttatttgacaagcctgtaactttaaacaatttacctagagtaagagatatagatacaatgttaaatttattgaggtctctcggttccaaaataattttatctaaagacaagaaaattgtaaaaattcaaaataaaaaaaagatgaaaacattagccaagtattcacttgtcaaaacaatgagagcatccatacttgttttaggaccattaatatcaaaatttcataaatcaattacatcatatcctggtggctgtaatattggatctcgtccagtaaattatcatctatcagctttaaaaaaacttggaatgaaatatgaaattaaacagggttatattcatgcaaaatctaatggaagattaaatggtgcaaaaataaattttccaagaataagtgtaggcagtacagaaaatactattcttgcagcttctttagctagtggaaaaacaattttaaaaaattgtgcgattgaacctgagataaaagatcttacaaattttttaaatgctgcaggagctaaaattaaatggagtggaagaacttgttcaattattggggttaagtcactaaaagaaatcaattattctgttatgggagatcgaatagaggctggcacattttgtatagcagctacattagctgaaggtgatttacagataaaaaacttcaatccaaaaaatatagctacagagctaaaactattaaaaaaagcaggtgctaaatttaaaacttatgaaaataaaattttcattaaaggacctaaaaaaattaaaccaattaaaaatattaaaacaaaagaatggcctggtgtagcaacagatatgcagagccaattaatggtactaatgtgtaaagctaatggtcagagttcaattactgaaaatatatttgaaaacagatttttacatgttggcgagcttcaaagacttggagctaaaattaagatcaaaaatagtactgcctcaatagaaggaaatactaaatttattggtgctgaattaatgtcaagcgacttgagagcaagtgttgctttggtactggctggaatggtttctaaaggtaaatctgtaattaatcgtatctatcatttggatagagggtaa

SEQ ID NO: 244470 - DNA, 1067 bp, Unknown
  Bacterial polypeptide expressing nucleotide sequence isolated from the Sargasso Sea
aatggactcactaattataaatggcggaaagaaacttataggtgatattcctatttctggttcaaagaatgcgtgtttgccgatgatgatagcatcattaatgacagatgaaaaaatgatcttgaacaacatacctatgttatcagatgtaaaaacacttatatctatcctgaaatctttaggtaccaacgcagtgcatatcaaaaacagtcttaatcttcatactaaagaaataattaatcataaagcatcttatgatttagttaaaaaaatgagagcaagtttttgggttcttgcacctctattagcaaaaagtggctatgctgaggtttctttgcctgggggttgtgcgattgggacaaggccaatagatctttatttaaaaatcctgaaagagatgaatatcaattatacaataaataatggttatattgttgcaaaaagagaaggcccgattaaaggattaaattttaaattagaaaaaaaatccgttggttgtacacatttttttcttatgcttgcatgtttagcaaatggcacatctaagttatctaatgcatcatgtgagcctgaagtaatccatcttggattgttgttaaataaaatgggcgccaaaataaaaggattaggatcaaaaaaaataataatagaaggcgttaaaaaactaaatggcgttaatgaaattataccctcagatcgaattgaaacaggaacttttgcaatagcagtttctgcaaccggaggaaaagtaaaattagaaaatacaaattatgaagaaaataaattactttttaatatattagaaaaaacaggatcaattattaataagtcaaaaaattcaatatcaattgaaaaaaatcataataaaatttatgcagctaatattaaaactagcccctatccagggtttccaacagatttgcaggcacaaatcatggcgttaatgacaatttcaaatggaaagtcagaaattaaagaaaatatttttgaaaatcggtttatgcatgtacaggaacttgtaagaatgggcgctaatataaaattggataaagatagagcaattataa

SEQ ID NO: 244471 - DNA, 1261 bp, Unknown
  Bacterial polypeptide expressing nucleotide sequence isolated from the Sargasso Sea
attggaaaaattattaattaaaggcggaaaaagtctttcaggtcagattgactgctcaggagctaagaatgctgctttgccagtaattgcagcatcaattctttcgtcagatgatataacgcttaaaaatcttccatatcttcaagatattactactatgtttgaactcataggctcaatgggagctgatatttctcttgatgagaaaatgaattttaaactaaatacatcaaaccttaccaaccttgaagcaagatatgagcttgtaaaaactatgcgagcttctatcttagttcttggatctatggtggctaaatatggatatgcgaagatcgcattgcctggagggtgcgctattggaagtcgtcctgttaattatcaccttaaagctcttgaaaaacttggtgcagaaatatctctcaataatggatatattgaggcaaaagctaaaaagttaactggagctaatatagagtttgagggagttactgttacgggtacagaaaatctgatgatggctgcttcactagctgagggattaacaactttaactaacgttgcaaaagagccagaaatttctgacttggcagattttttaaattcaatgggagctaagatttcaggagcaggaacagatgagattagaattgaaggtgtggaagaattaactggtacaacttttaaaattcctgcagacagaatcgaggcaggtacatatcttgtagcagcagctgttactaatggaaaaattacaatcaataagattgatccaaaaagaatgggctcaattatagaaactcttcaaaaagccggggctgaagtggattcaaatggtaattctatttccctagatatgacgaaggatgctataaagcctgttgatattgtcacagctccatttcctgggtttccaacagatatgcaagcgcagtttactgttctcaactgcatcggacctggtgaatcaagtgttacagagacaatatttgaaaatagatttatgcatgttcaagagcttaatagaatgggttctgatattacaattaatggtaccactgcacttattaatggagttgattctatttctggggctcaagtaatggcaacagatctaagggcatcagcaagtttgatactagctggattaatagcaaaaggagaaactattgtagataggatttatcatattgatagaggctatgaaagaatagaagaaaaattgtccaatctgggcgcagaaataataagattacctaattag

SEQ ID NO: 244472 - DNA, 583 bp, Unknown
  Bacterial polypeptide expressing nucleotide sequence isolated from the Sargasso Sea
gatggaaaaattattaataaaaggcggaagctctttatcaggaaaaatctcttgctcaggagcaaaaaatgcagctttaccgattatagcttcaacaatccttagcaatgataaagtagttttaaaaaatctaccttatttacaagatatcacaacaatgtttgagttacttggatcaatgggggctgaaattttgttagatgaaaacatggatttcactatctcatcatttaatcttaatgatatccaagcaagatatgaattggtcaagaccatgagagcatctatattggttttgggtcccttagttgcaaagtatggtaaggctcgaattgctttgccaggcggctgcgctataggttcaaggccagtaaattaccacctagatgccttaaagcaactgggtgctgaaataaaattgaaaaatggatatatcgaggcgtctgccaaaaagttaattggatctaatattagatttgatggcattactgttactggaactgaaaatatcataatggctgccacgcttgcgcaaggagaaactattcttactaatgtagcaaaagaacctgaaataattgat

SEQ ID NO: 244473 - DNA, 948 bp, Unknown
  Bacterial polypeptide expressing nucleotide sequence isolated from the Sargasso Sea
tatggataaattaattatccagggcggcaaccctttagaaggcgaagtttcaatttccggtgctaagaattcagcactacccatactatcagcaacattattgactgataagccagttacaattagcaatgttcctcatctgcatgatattacaacaacaatagaattactcggaagaatgggttctaagatcacagttagcgagcatatgcacatagagattgataattctgaaattaataatttttttgctccatacgaattggttaaaacaatgcgagcatcaatacttgtgctcggcccacttcttgctcgttatggaaaagccgatgtatcactgccaggcggatgtgccattggctcgcgccccgttaatattcatatacaaggcttaatcgcaatgggcgcagaaattacaactgatacgggatacatcagagcaaaaactagtaatagattaaagggggtacatctaacacttgatcttgtgactgttacgggaacagaaaatttgatgatggcggctactttggctgaaggtaaaacaattattgaaaatgccgcaagagagcccgaagttaaagatttagctaattgtctaaacaaaatgggcgcaaaaatcgaaggcgccggaactgatcgtattgaaattgaaggggttgaatctcttaatggggcagagcatgagattttacccgatcgtattgagacaggaacataccttgttgctgctgctatgacacgaggtaaaatgcgcttaagaaataccaaatcagttttgttagagtcagttttgactaagctcatggaggcaggagcaagtattgaattggaggaaaatgctatttctattgatatggatgggaaaaaaccaaaggcggttgatgtacatacttcaccatttccaggattttcaacagatatgcaagcacagtttacagcaatgaa

SEQ ID NO: 244474 - DNA, 724 bp, Unknown
  Bacterial polypeptide expressing nucleotide sequence isolated from the Sargasso Sea
ttggaaaaattattaatcaaaggtggaaaaagtcttttaggtgagattgattgttcaggagctaagaatgccgctttgcctgtaattgcagcatcaattctttcatcagacgatataacacttaagaatcttccatatcttcaagatattactaccatgtttgaactcattggctcaatgggagctgatatttctctagatgagaaaatgaactttaaacttaacacatcaaacctttcaaaccttgaagcaagatatgagcttgtaaaaactatgcgagcttctatcttagttcttgggtctatggtggctaaatatggatatgcgaagattgcgctaccaggaggatgcgctattggaagtcgtcctgtgaattatcacctcaatgctcttgaaaaacttggcgcagaaatatctcttaataatggatacattgaggcaaaagctaaaaaattaattggagctagtatagagtttgagggagttactgttactggaacagaaaatctgatgatggctgcctcacttgctgatggattaacagttttaactaatgttgcaaaagagccagaaatttctgacttagcagatttcttaaattcaatgggggctaagatttcaggagcaggtacagatgaaattagaatgaaggcgtggaagaatgaatgggaacaacttttaaaattcctgcagatagaattgaggcaggtacatatcttgtagc

SEQ ID NO: 244475 - DNA, 931 bp, Unknown
  Bacterial polypeptide expressing nucleotide sequence isolated from the Sargasso Sea
agtcaatgtgtctttacctggtggttgtgcatggggtcctaggccagttgattatcatctgaaaggtttagagcagttgggagctgaattaaaccttgatggtggtaatattcttgctgaggcaaaagagctaataggaaatgatatacattttgaatttccttctgtaggagcaacaggaaacctcgcaatggctgcagtaagagctagcgggactactaggctttataattgcgctaaagagcctgagataacacaattatgtaactttttaaatagtatgggtgctaagattgagggtatcgggacagaaaccctaattattcatggagtaggtgaacttcattctgcagatatagagattattccagatagaattgaagcgggtacatttttaatggctggggcgttattaggtgaaattgaagtgaaaaatattataccaaagcatcttgacaaggtggttcataaactgcgtgagataggatgtatattaaaaataaatcaaaacagtatcattatcacgccccctgaaaaattaaaatctgttgatatgacaaccgctgtatatcctggttttccaacagacttacaggctcagtgggttgcaattatgtctctagcagatggctcttcggtggtaacagacactgtatatcatgatagattcagccatatcccagaattatctagacttggtgctaatataaaagtagaaaataatacggcatttatcagaggaaaaaatactcttgttggtgcgccagttatgtccacagatattcgagcgagcgcatcattaatcattgcagcacttgcagctaaaggagagacgcagatcagtagagtgtatcacatagatagaggttatgagaatattgaacaaaaatttgagagccttggcggagatatacgaagaatatcgaaatag

SEQ ID NO: 244476 - DNA, 784 bp, Unknown
  Bacterial polypeptide expressing nucleotide sequence isolated from the Sargasso Sea
atgcaaaagctagaggtctttggagcaaaaaagctcaaaggacaaataaaaatatcaggttcaaagaatgcttctttgccaattttggcagctactttattgtccagaaaaaaaattcatcttaaaaatttgcctaaagttaaagatattcagacaatgctttcattattaaaatctttaggatctaaaataaaagttaaaaaaaatgaaactataattgataataccaagcaaagaaaaaaatttgcatcatataatttagttaaaactatgcgagcaggaatacttgttttaggaccattgcttgctaagtttggatctgcaaaggtatctttaccaggtggatgtgcaataggaacaagaccaatagatatacatttaaaagctctatcaaaactaggagttaaatataaaattgatcaaggttatgtaatagctaatgccactaaaggtttgagaggaaataacattagattttcaaaaatatcagttggagcaactgagaatttaattattgcttctagttttgcaaaaggcactactattttatcaaactgtgcgactgaacctgaaataaaagatttagtaaattttttaaatcaaatgggatgtaaaataaaatggacttccaaaagaacaattaaaattattggagttagtcaagttataaaaacaagctattcaattatgtttgatagaattgaagcagggacttatttgttggcaggagctgttactgagggaaatttaaaaattcagaatataattccaaaatattattaaa

SEQ ID NO: 244477 - DNA, 1234 bp, Unknown
  Bacterial polypeptide expressing nucleotide sequence isolated from the Sargasso Sea
tatggataaattgattataaacagaacccttccgattgatggagaggtatcaatatcaggcgctaaaaatgctgttttacctatgatttgcgcatctgtaatggtatccaaaaagtctgttaagatcaaaaatgttccacatcttcatgatgttactacaactttaagattattaactcaaatgggggtaactactaccatggacgaacaaatgagtataagtcttgatgcgtctactattaataatagttttgcgccatatgatttagttaagaccatgagagcatctatattagtcttggggcctctgctagcaaaatacggtgaagctaaagtctcattgccaggtggctgtgcaataggaacaagacctgtgagtttacatatagaagcacttgaaaaaatgggcgcagtaattgagatagaaaacggttacatttctgccaaatgcaataaattacaaggaacttgtattgaatttccaaaaacaacagtcactggcacagagaacattcttatggcatctacacttgcaagagggaaaactctcataaagaatgctgcgatggagcccgaggttatcgatttagcgaattttttgattaagatgggtgcaaaaatttcaggacacggaacaagcaccatagagattgatggcgttgaaaatcttgagggagtttcttactcggccttacccgatagaattgagactggaacattcttggtggcagcagcaatcacaggaggtaaaataatagttaaacaagccatatcatctcatctcgaagctgttttgaaaaaattacaacaatcaggcgcagaaatccatttcacagaaagtgaaattcatttagatatgaaagggaagagaccaaaggctattgatattgatacaggcccataccctcaatttccaactgatatgcaggcacagttgacagcattgaacgcaatagcagacggtaccagcattatcagagaaaatattttcgaaaatcgctttatgcatgtgcaagaaatgactagaatgggtgctgatatcaaattagatcaaaatcgcgctattgtagttggtaaagaagaattggtaggagctcaagtaatggctacggatttgagagcatccgcgagtttgatattggcaggattagtagctaaaggtaagacggaaattgagagaatatatcatattgatagaggatatgactgcatagaaagaaaaacttcaacagct

SEQ ID NO: 244478 - DNA, 363 bp, Unknown
  Bacterial polypeptide expressing nucleotide sequence isolated from the Sargasso Sea
acccatattttcctacagatatgcaagctcaaatgactgctctaaatgctgttgcaaagggtgacagttttgttagagagaatatttttgaaaatcggttcatgcatgttcaagaacttgaaagaatgggcgcatcaataaaagttaatgataatacagctaaaatatctggaacaaaaaaacttttagcagcacctgtgatggcaacagatttgagggcttcagccagtctaatcttagcaggacttgcagctgagggaactacagaaattgcaagagtttatcatatagataggggttacgactgtatagaggaaaaactacagttaattggggctaggatttcaaggaaacccatgtaaa

SEQ ID NO: 244479 - DNA, 1261 bp, Unknown
  Bacterial polypeptide expressing nucleotide sequence isolated from the Sargasso Sea
tatggaaaagctattaatcaaaggtggtaataatctttctggaaagatcaaatgctctggagctaagaacgcagcattacccatgatcgcagcaacaattctatctgatgaaaaaattattctaaaaaaccttccttatttacaagatatcactactatttttgaattacttgggtccatgggcgctgaaattttgcttgatgaaaatatgaactttacaatatcttcatcaaatttaaaggatatcgaggcaagatatgagttagtaaaaactatgagagcttctatattggttcttggaccattattagctaaatatggtaaagcgaaaattgctcttcctggaggttgcgcaattggaacaagaccggtaaattttcatttggatgctttgaagcaattaggagcagaaattaatttaaaaaatggttatatagaagcatctgcaaaaaaacttcaaggaaacaagattaaatttgatggagttactgtaactggaactgagaatttaatgatggcagcaactttagctgaaggaagaacaatactaacaaatgttgcaaaggagcctgaaataatagatttagcagagatgttaaattcaatgggtgcaaaaatttcaggtgctggtagtgatgaaattattatagatggagtagagagccttcatcgaactgaatatgtaattccggctgatagaattgaagcaggaacatatcttgcagccgcagctgttacaaatgggaatataactgttgaaggtataaatcccaaaagattaatgaaagtaatttataaattgaacgatgctggagcccagatatcgcatgacgaaaattcaatatcaatatcaatgaaaaaagatcgacctaggccagttgacgttacaactgctccgtttcctgaatttcctacagatatgcaagcacaattttcagtaattaatgctatatccaatggcacatccaatatatatgaaactgtatttgaaaatagatttatgcatattcttgaattaaatagaatgggttgtgatataactgttcagggaaatcatgctgtcataaatggagtgccatctctttatggtgcagaagtaatggctacagaccttagagcttcagcgagtttaattcttgcaggtctatgtgccaaaggtgagacaattgtagacaggatttatcatattgacagaggttacgagaggatagaagagaaattaaattatttaggtgcagacatcacaagacttcctagttaa

SEQ ID NO: 244480 - DNA, 1258 bp, Unknown
  Bacterial polypeptide expressing nucleotide sequence isolated from the Sargasso Sea
atgatagtggaaaaacatatagtaatagaaggtaatcatcaattaaagggtgagctagaagttaaaggtgcaaaaaatgctgttttaaaacagatggttttacctatactcgctgaaggagattatacccttacaaatgttcctaacatcactgatgtttcatatatgcaagaggttctcgatgttttaggtttaaaaacagaattaactgataataaactcaatattcattctcctcaaaatataggcatagaggcaccttatgagttagtccaaaaaatgcgtgcatcaattattatcttaggtccattacttgcacgaaaaggagaagcaaagattgcttttccaggtggtgacgagctaggaccaagaccggtccaaatgcatttggatgcattagagaaaatgggtgctcacttcacccttgaccacggtgttttaactggtagatccgatggtttgaaaggtgtagaaataaatttaccctatgcatccgttggagcaacagagaacactttgcttgcagctgtattagcagaaggaaaaacggtaatagaaaatgctgccagagaacctgaagtagttgatttggttgaaatgctgaaaaaaatgggagcagaaataacaggtgcgggcactagtgaaataactatagaaggagtaaaaaaattaaatcctactaatcatgaggttgttggagatagaattgcagcaggaacttttttatcagcttttcttgctactcacggctcaggaattgttcgaggaataaaccccgaaaacttaccaatggaaataaagaaatttaaagaaattggtgcagaaatcaaagttgaagataattcaattgaaatatcatatgatggtaatttaaatgcagtagagctttctacacttccatttccaggtgttgcaacagatcttcaaccagtatttggagcacttttgttaaaagcatctggtacttccataattacagaaaatgtttatgatcaaaggtttcagtggataccagaagttcaaagaatgggcgcaagtgttcaaactggatggcaacatgcaatgattaaaggggtaaatagtttatctggtgcccctgttaattcaacagatattagaacaggagcaagcttagtaattgctgctcttcaagctgatggttcctcaaaaattacagggatagagcacataaatagaggttatgaagatatagttgcctcattaaattcacttggctcaaaaattgaatataattaat

SEQ ID NO: 244481 - DNA, 1060 bp, Unknown
  Bacterial polypeptide expressing nucleotide sequence isolated from the Sargasso Sea
atgttcgataagtcaattctctctattgatgcttctaaaatcacctcgctagaggcaccatacgacctagttaaaaccatgagagcttctttttatgttatgggtccgcttttagcaagatttggagaaactaaagtttcgcttcctggtgggtgcgcgtggggtcctaggccggttgattaccacttaaaaggatttgaaagattgggcgcaaaaattgaactcaatcaaggatatattttagctagatcaagtcaactgactggtggaaatatttcttttgagatagcttctgttggtgctactgcaaatattttaatggccgcagtattggcgaaaggccaaacattaattacaaatgccgctattgagccacatattgttcagctttgtgaagttttaattgatatgggggcagatatagatggtgttgggactaataaattgactataaatggtgtccaaaaacttcatcctgtcgaagttacggttattcctgatatgattgaagccggaacatttttgatggccggagcaacgttaggcgatattcaactgcaaagcgttgacccagagcatttgacaatagttttggaaaaattacagctagccggatgcgatatttctttagaaactgattctattttaatcaaaagaaataataggatcaaaccagtcgatattaccaccgatgtgcatcccgggtttccgacagatcttcaagcacaatggattgctttaatgtccattgcggatggagcgtctgtagtaacagagtcgatttatttagaccgattctcacatgtacctgaacttattaggcttggtgcagatatttcccttgaaaacaatgtggctattataagagggcaaaaagagttaattggcgcacaagtgatgtcaactgacattagagctagcgcatccttggtaattgcagcgctgatggctaaggggcgctctgatattagtaggatataccatattgatagaggttatgaaaaaattgaagaaaaattcaaattactaggtgcggatattcatcgtgaaaaagaataaa

SEQ ID NO: 244482 - DNA, 1186 bp, Unknown
  Bacterial polypeptide expressing nucleotide sequence isolated from the Sargasso Sea
atgcaaaagcttaaagtaaaaggtaaaaatattttatctggagaaatcaaagtctctggatcaaaaaatgctactttaccgataatcgcagcttcgatattgagtgaaaaaaaaattgatttaaaaagagttccaatagtaaaagatgttgtgactatgtgccatttattaaagtatatgggttcaaatattaaaatcaattataaaaaaaaaaatatttcaataaataataaaaataaaaatttcaaaaatgttgcaccatactcatttgtaaaaactatgcgagctggcgtgattgtcctaggctcgttattggcaagatttggaaaagctaaagtctctttaccaggtggctgtgcaataggaacaagacctgtagacattcacttatttggtttaaaaaaattaggagccaaaataaaaataaaaaatgggtatatttttgctgaagctaaaaaaggtcttattggcacccaaataaaatttccatcaatatccgtaggtgctacagaaaatattataattgcagcaagtttagctaaaggaactacccatctgagaaattgtgcttgtgaacctgaaattaaaaatttaactgattttttaaataaaatgggcgctaatatcacgtggttaggcaaaagagaaattaaaataattggctgtaaaaaactcaaaaaggtaaatcatcaaattatgtttgacagaattgaagcaggaacatttattatagcaggtgcattaattggaaaaaaattaaaaattttaggaattcagacaaatcttttaaatacagagattaaaatcttgagaaaaatgggagtaaagatgcaaattaacaaagaccatattaatatacttcactcgccaaaaataaaaccagtcaaaataaaaactgaaccatacccaggttttccaactgaccttcaagctcaaattatggttttaatgtccaaggcaaagggaaagtcccaaattaaagaaaatatttttgagaatagatttatgcatgtacctgaacttaacagaatgggtgcaaaaatttatacttcaggaaatttatcctatatagaaggtccccaaaatttaaatggtgcagaagttatggccactgatctgcgagcttctgtgagcttggtgctcgctggtctaattgcaaataaccaaacaattattaatagagttt

SEQ ID NO: 244483 - DNA, 865 bp, Unknown
  Bacterial polypeptide expressing nucleotide sequence isolated from the Sargasso Sea
atggataaattgattatccacggcggtgtttctttagaaggcgaagtttcaatatctggagctaaaaattcagccttaccaatattatcagcgactttactaacagaccaaccggttgttattggtaacgtaccacatcttcacgacataaccacaacaatagaattacttggacgtatgggctcaaggattacagttaatgaatgtatgaatatagaaattgataacgcagaaattaataatttttttgctccttatgagttagttaaaacaatgcgcgcatcaattcttgttttaggtccattacttgcacgttacggaaaagctgatgtatctctaccaggtggttgtgctattggctcacgaccagtgaatatccatttacaaggtttaattgcaatgggagcagaaattacaacagatagcggatatatacgtgcggtaacaaaagagagattaaagggagtacaactgacactcgatatggttactgttactggcactgaaaatttaatgatggcagctactcttgctgatggtttaacaattattgaaaatgctgcaagggaacctgaggtgaaagatttagcaatatgcctaaataaaatgggtgcaaaaattagtggggctggaacggatcgtattgaaattgaaggtgttgaaacactacatggaaccgagcataaaattttacctgaccgtattgaaacaggaacctaccttgttgccgctgtaatgacaggcggtaaaatgagactaagaaatactcggtcggtcttattagaatctgttttatctaaattatctgaagccggcgctacaattgatactgaggaaaatgcaatctccatagatatgagaggaa

SEQ ID NO: 244484 - DNA, 368 bp, Unknown
  Bacterial polypeptide expressing nucleotide sequence isolated from the Sargasso Sea
aatggatcaatttgttattcaaggtggcacttcacttgctggtgaggtgactatttctggtgctaaaaacgcagcactgcctattttatttgcctcacttttggccgacggtaaaagtacatttaccaatgtgccacgcttacgcgatattgtaactacagaagctttgctaaaaacattaggtgcagatgtaaattggcagagtgataccctcgtcattgatggtgcaactgttgataaaacgttggccccatacgatttagtaaagcaaatgcgcgcgtctgtattagcattagggcctttagttgctcgctttggtgaggcacaagtttcattgccaggcggctgtgctattggtgctcgccctg

SEQ ID NO: 244485 - DNA, 949 bp, Unknown
  Bacterial polypeptide expressing nucleotide sequence isolated from the Sargasso Sea
aatggataaattaataataaagggaaatgctaaaatttcaggctcagttaatgttcacggctcaaaaaacgctgcattaccaataattgtatcatctcttttgtctgagaagattgtaaaactttcaaatgtacctaatgtggttgatgtattaaatttaattaaattactaaaaaattatggtgttaaaattgaatataaaaaagacaaactaaaaataaatccaaaaaaaattaaaaatctatcagcagattatgatgttgtgagaaaaatgagagcgtctattttaattctaggacctctgctctctcgatttggtgaggctagaatatctttaccaggaggatgtgctattggaactaggccaatagatatacatcttgctggtttatcaaaattgggagctaattttgaaattcaaaatgggtttgttgttggtagtgttaaatcacaattgattggaaataaaattaaattaccttttccaagtgtaggagctactgaaaatatactaatggcttcagtattggcaaaaggtgaaactaagattttaaatgctgctagagaaccagaaatagaagatttgtcaaattgccttataaaaatgggtgcaaaaatagaaggccaaggaacaaaaactattttagtgcagggtgttacaaatttaaataaagtagatcataagataatttctgatagaattgtagctggaacatatataattgcagctttgatgttaaattcagatttagaaataaataactttaatactatttatttaaaatccttaattgatattttaaaaaaaatgggtgcaaaattaaaagtaagtaaaaattcaataaaagtttttaaaggatcaaagctaaaatctaatagtctttcaactagtccatatccaggttttccgaccgatttacaagcccagctaatgtctcttatgtgtatc

SEQ ID NO: 244486 - DNA, 1264 bp, Unknown
  Bacterial polypeptide expressing nucleotide sequence isolated from the Sargasso Sea
aatggataaatttaaaattaatggtccctctaagatcagaggagaggtatcaatttctggaagtaaaaatgctgctctaccaatacttgcagcaactttactctttgataaaaatgtaacaattaaaaatcttccacgagttaaagatatagatacaatgcttaaattgctaaaatcactaggaagaaaaattagctttaaaaataataaaaaaatcgcgacaatctcaaaagggaaaaaaaataatttttttgcaccttactctctagtaaaaacaatgagagcaggaattttagttcttggtcctttattggcaaaaaataaaaaagcaaaagtaagtagcccaggtggttgcagcataggagtaagaccaatagatatacatttaaaagctatatcaaagttaggtgttaaaacacaaattgaaaaaggatatgttaatgcaaaagctgaaggaggattagttggctcagaaataagattttcaaaaatatctgttggagctactgaaaatttgattcttgctgcttgtcttgcaaaaggaacaacaacaataaagaattgtgctattgagcctgagatcaaggatttgacaaattttcttaaaacagctggcgctaagatcaaatggattggtaaaagaactttaaaaatagagggagtaaaaacattaaaaagtataacttactcaatcatgaatgatagaattgaagcaggtactttttgtgttgccgcatgtttgaatagtggaaatttaaaaattaaaaatttcgagccaaaagttatcaatacagagataaaattacttaagaaaattggtgcaaacataaaaactacaaaaaatacaattcaaattaagggaccaaaaaagattaaaagtttggattttttaaaaactggagaatatccaaacttccccactgatttgcaagctcaaattatggtattattaaccagagcaaatgggaaaagcactattgaagaaaatatatttgaaaacagatttatgcatgttccagaattaaaaagattaggtgcgaaaataaatattaaaggaaacagggcaattattgaaggaactaataatttagagggagctgaattaatgtctagtgatttaagggcatcagtagctttagttttagcagcttttatttcaagagggacatctattataaatagagtatatcatttagatcgaggttatgaaaaaattgaaaataaattaaaaaaaattggggtaaaaataaaaagaatatcttag

SEQ ID NO: 244487 - DNA, 745 bp, Unknown
  Bacterial polypeptide expressing nucleotide sequence isolated from the Sargasso Sea
atgcagaaaattgttataaatggaggacaacctctaaggggtgtgattcctgttagtggatcaaagaatgctgctctacccattatggctgctagtattttaactaatgaaaaattagaactttcaaatgttccggatcttgttgatgtaaaaactatgagtttggttttatcatctcttggagttaatgtcgcaaaaagtgaaagtaataaaaattctattacacttcaatattcagatacggaaaaaactattgctgaatatgatttagtgagaaagatgcgagcaagtatattagtgctaggacctttacttgcaagaaagcgtgaggcgagtgtatcacttcctggaggttgcgctataggtgctcgaccaatcgatattcatatagacgcacttacaaagctcggtgcaacttttgaattggaaaaaggatatattcaatgtagcgcacctaaaggactaactggaaataagatcaaacttcctaaagtatctgttggcgctactgaaaatattgttatggcagcgacattagcaagtggtgaaactgaaatttctaatatcgcgttagagcctgaggtcattgatttaattaattgtttaaatactatgggagcaaaaattgaacttggtgacaataggtctgttgtgatcccaggagtaaaaactttgaacggctcaaactattctattattcctgatcgtatcgaggctgttacttatatcatagctggagcattag

SEQ ID NO: 244488 - DNA, 383 bp, Unknown
  Bacterial polypeptide expressing nucleotide sequence isolated from the Sargasso Sea
tgtgcgtattgcgcggcatcgggcgttccctaccgatatgcaggcccagttcacgctgctgaacctggtggcagaagggactggcttcatcacggaaaccgtgtttgagaaccgctttatgcacgtgcctgagctgagccgtatgggcgctcacgcagaaatcgaaagcaataccgtgatttgccacggcgtggaaacactctcaggcgcacaggttatggcgaccgatctgcgtgcatctgcaagtttagtgctggcaggttgtattgctgaaggtacaacagtggtcgatcgtatttatcacatcgatcgcggctatgagcgcatcgaagataaactgcgtgcgctgggcgcaaacattgagcgcgtgaaaggcgagtaat

SEQ ID NO: 244489 - DNA, 601 bp, Unknown
  Bacterial polypeptide expressing nucleotide sequence isolated from the Sargasso Sea
atggaaaaacttattatcgttggacaaagaaagcttaaagggtccgtaagaatttcgggtgctaaaaacgctgttcttccaattttagtctcaagtttattgacgaaacaaaaattagttattgggaatgtccctcatttgcaagatgtaaccactacaatatctcttctaagtgaaatgggggctgagtcgacaataaatgacaaaatggaagtagagatatgcactaaaagtgttaataaatttatcgctccgtatgaaatggtaaaaacaatgagagcatctatactagttcttggtccattgcttgcgaattatggtgaagctaaggtttcattacctggaggatgtgcgattggatcaagaccagtaaatcttcatattgatggcttgaaagcaatgggtgcaaaaattgaagtagaaaatggatacatttctgcgtcttcaaaaagactaaaaggtgctgaaataaatcttccaataccgtcagtgactggaacagagaatttgatgatggctgctacattagctaaaggcaaaacaattataaataattctgcaaaggagccagaagttgtagatttagcatcatgtttaagga

SEQ ID NO: 244490 - DNA, 932 bp, Unknown
  Bacterial polypeptide expressing nucleotide sequence isolated from the Sargasso Sea
attgaaaaagttagaaattaaaggtggctaccctcttaatgggagcgtgaaaatttcaggctctaagaacgctgcattgcccatgatgaccgcgtctattctatcggatgatgatattaccttaaatggcattcctgatctggctgatgtcaaaacattgattactctattagattcaatggggattaaggcaaaaaaaaaccacaaaggttcttttacatttaatgccagtgaaattaagtcaaaatttgcatcatatgaactagtcaaaaccatgagggcatcaatcatggtccttggaccattgttagcaaagcatggagaggcaaaagtttcattgcctggaggttgcgcaatcggatctcgaccagtcgatcttcatatagagggtttagaaaaattaggagcaacgatagaaattaaaaacggatatatattagcttctgcagaacgattagtaggctcaacttatttttttccaaaaaagagcgtgactggaactgcaaatattatgatggctgcgaccttagcagaaggagaaacaaaaattggaaatgcggcttgcgaaccagagattattcaacttggcgagcttctgaattctatgggagcaaaaattaaaggtcttggggaagatttcatatatgtagaaggggtagagaatcttgggggtgctgaaattcaaattattccggaccgaatcgaggcaatcacaatgattattgctggaatcataacccaaggagagctcaaaattgaaaatatcaatcctttacacatacagaaacccattgatttgattaggcgatgtggagctaagttcgaaatatttgaagattctctatttttgaaaggctcaaacagtattcttcccattagttttgagactaatccgtatcctggaataccaacagacattcaggcgcaactaa

SEQ ID NO: 244491 - DNA, 1079 bp, Unknown
  Bacterial polypeptide expressing nucleotide sequence isolated from the Sargasso Sea
aatgcaaaagttaattattaaaggaaaaaaaaacttatctggaactatttcgatttctggttctaaaaacgcaactttaccaattttagcagcaactattctagcaggcaatacaacacttacaaatgttccgcttgtaaaagatatttttacaatgcttgagttgttaaagtttattggaattaagattaaaataaataaacttcgtaggtctattaatttaacaagtaaaaaaataaatataaaaacattagcaccttacaaattagtaaaaactatgagagcaggagttcttgttttaggacctttattaactaaatataaaaaagcaaaagtctcattgcccggaggctgtgcaattgggacaagacccgtagatttgcatttgtttgctcttaaaaaactaggtgcaaaaataaaaattaaagatggctatataattgcagaggcaaaaaaaggtttgaaaggtactaggataaaatttcctaatatttcagttggagcaacggagaatgctttattagctgcttatggagcttcaggaaaaactgttttatctaattgtgctattgaacctgaaattttagatttaatatcatttctgaaaaaacttggttgtaaaattaatattcaaggtagaaagattgtcattgaaagtaagaaaataaaaaaagaaaaggtaaatcacagtataatttttgataggattgaagctggaacttatttagtagctggagttttaatcggaaaaaaaattataattaaagaaataaaaccaaaaatacttgaatgtgagatcaatattttaaaaaaaatgggagctaaaataacgttatctaaaaattcggtctctatttttaagtcaaataaacttaacaaaataaatatttcaactaaaccttatcctggttttccaactgatcttcaagctcaattaatggttttgatgacacaagcaaaaggtatttcacaaataaaagaaaatatttttgaaaatagatttatgcatgttccagaattaaaaagaatgggagcaaaaattgaaattaaaaataaaatagcatttatatgtggtccct

SEQ ID NO: 244492 - DNA, 742 bp, Unknown
  Bacterial polypeptide expressing nucleotide sequence isolated from the Sargasso Sea
atgcaaaagctagaggtctttggagcaaataagctcaaaggagaaattaaaatatcaggttcaaagaatgcctctttaccaattttagcagcaactttattgtctaacaaaaaaacttatcttaaaaatttacctaaagttaaagatattcagacaatgcttacattattagagtccttaggatctaaagtaaaatttaaaaaaaatgaaactattattgataatactaaacaaaaaaaaaaaatcgcttcatatagcttagttaaaactatgcgtgcaggaatactcgttttaggaccattgcttgcaaagtttggatcagcaaaagtatctttacctggtgggtgcgcaattggaacaagaccggtagatatacatttgaaagcgttatcaaaattaggagttaaatataaaattaatcaaggttatgtaatagcaaatgttcctaaaggtttaaaaggaaataatattagattttcaaaaatatcagttggagcaactgagaatttaattattgcatctagttttgcaaaaggcattactacattatcaaactgtgcgattgaacctgaaataaaagatttagttaattttttaaatcaaatgggatgtaaaatcagatggacttctaaaagaactatccaaattattggagtaaatgaagttattaaaacaagctattcaattatgtttgatagaattgaagcaggaacttactttgtagcaggagctattacagaag

SEQ ID NO: 244493 - DNA, 1261 bp, Unknown
  Bacterial polypeptide expressing nucleotide sequence isolated from the Sargasso Sea
atggagaagttgttaatcaaaggagggaatcaactctctggaaaaataacatgttcaggcgcaaaaaatgcagccttaccgatgattgcatcgacgattttgtctgatgaaaaagttactttaaaaaatcttccatatcttcaagacataaccacaatgtttgagcttttaggttcaatgggtgctgatatcttattagatgaagatatgaacttcacaatacaatcaaataatctcaaagatattgaggctaggtatgaattagttaaaacaatgagagcttcaatattagttttaggtcctttgcttgctaaatatggtaaagcaagaatagcacttcctggaggctgtgctattggatcacggcctgtaaattatcatcttgattctctaagacaaatgggagctgagatagtcttaaaaaatggttatattgaagcatcggcaaaaaatttaaaaggtgcaaatattagattcgatggagttactgttacaggcactgaaaatttaatgatggctgcaacacttgcagagggcaaaacaactttattaaatgttgcaaaggaacccgagattgctgatttagctgatatgttaaattcgatgggagcaaaaattgatggagctggatcagataaaattactatccaaggcgttgaaaaactaagtggaacttcatttgaaatacctgccgacagaatagaagctggaacttatctagcagctgcagcagtcactaaaggagacataaaaattgaaggtatcaatccaaacagacttatgaaagttattgataaattaataaatactggagcaaaagttgactgtgatgaagattccatttcatttagcatgtcgaatgatattcctgatccagtagatatcacaacagccccatttcctgaatttccaacagatatgcaagctcaattttctgttataaatgcaatttcaagtgggactgctaatatttatgagactatttttgaaaatagatttatgcatattcttgaactaaacagaatgggatgtgatatttcggttaatggtaatcatgcaataattaaaggggtgaagtctttatatggtgctgaagttatggcaacagacttaagagcatctgcaagcttaattcttgctgggctatgtgctaaaggcgagacagtcgtagatagaatttatcatatagatcgtggatatgagagaatcgaggaaaaattaaattatttaggtgcaaatatattaagacttcctagttaga

SEQ ID NO: 244494 - DNA, 1267 bp, Unknown
  Bacterial polypeptide expressing nucleotide sequence isolated from the Sargasso Sea
atggaaagacttattattagaggcggtaatcagcttcatggagaagtaaattgttcaggagcaaaaaattctggattaccaatattggcttcaacgattcttttagatacgcctgcaaaaataggcaatttacctcatttgcaggacataactacaatgcttgagcttctaaattctatgggagcatcaattaattttgatgagtacggttatatagagattgattcatctaatatttctgtgcctgaagcaaggtatgaattagttaaaacaatgagagcatctatattggtaatgggtcctttggttgctaaatatggtaaagcaaaaatatcacagccaggtggttgtgatataggaacaaggccaatagattttcatctggatgggctagagaaaatgggcgcaaaaattaattctgatgcaaaatatatttatcttgaagcagataaattaaatccaatagattttagttttccaaaaatatcagtaactggcacagaaaatctaatgatggcagctgccatcattgaaggtaaaactatattaaggaattgtgctaaagagcctgaagttgttgaattagcaaattttttaaataattgcggagcgaatatagtgggtgctggagaatctttaatcgagattaatggaataaaatctttaaagtctgataaatgggatgtgttgtttgatcgaatagaagccggcacatacatggtagcaggcgctataactaatggacatgtaaaaattaataaaattaaaccagagactataaaaataattagttcaaaattaattgaaatgggtgcaatagttaattctggtgatgattgggttgaagttgatgcaacaaaaacagaacttatttcaaaagatatatcaaccaaaccattccctggctttcctaccgatatgcaagctcaatttatggcattaaattcaatatcaaatggatcttcgactatcgaagaaactgtttttgaaaatcgctttcaacatgtagatgaattaaaaaaaatgggagcagacatatctttagataagaacaaagcattagtgaatggagtctcaaatcttgttggtgctgttgtttcagcatctgatttgagagcttcagcgagtttagttttggcaggtcttgtaggtaaaaatagaactcagatcgaagatatatatcatattgataggggctatgaatgcattgaagagaagctaactaaattaggggctgaaatatttagagaacctgcggaatattagg

SEQ ID NO: 244495 - DNA, 562 bp, Unknown
  Bacterial polypeptide expressing nucleotide sequence isolated from the Sargasso Sea
atggataaattattcataagaggaggctcgcctttaaatggagaaatttatgcctcaggtgcaaaaaattctgcattaccaatcctggccgcatctttattggctgattctcctctcagggtaggaaaccttcctcatttaaatgatgtaactacaatgttggaattattgggttctatgggtgtcgatgtcatgttaactgatgagatggaagttcaggtcgatacttcaaatattcaaaatctcaatgcacgatacgaactagttaaaaccatgagagcatcaatacttgtactagggccgctattggctaggtttcagcaagcttcagtcgctcttcctggtggatgcgcaatcggaagtcgtcctgtaaaccttcatatagatgctatgcgagcaatgggtgctgaagtgagtattgtagatggaaatataaaagcaaaagttgatggtcgcctgaaaggtgcaaaaataatatttgaaccagtaagcgtaacaggaacagaaaatgtgattatggcagcgagtttagcagaaagtatcacaactatcgaaaatgctg

SEQ ID NO: 244496 - DNA, 959 bp, Unknown
  Bacterial polypeptide expressing nucleotide sequence isolated from the Sargasso Sea
attggaaagtctagtcatcaggggcggccgggcgctacgcggcgaggttcgcatcgggggtgccaaaaatgcggccttgccggtattgatcagcgccctcctgacagatcagaacctgcgggtggcgaatgtgccccacctccgggatatcacgaccacgctggagctcttaggccgtcttggggcgcggatcgaggtcgatgaaaaatccatcattacggttaacgcggggtcgctgacctccaggcgagcaccctatgaactggtgaaaaccatgcgggcgtctattctggtgcttggtccgttgcttgcgcgctttggcgaggctgaggtgtcgcttccgggtgggtgcgcgatcggttcgcgaccggtcgatctccatgtgcgtgcactggagcagatgggtgccaccattgccgtcgagggaggttatatcaaggcgagcacatccggaggccgtttacacggtgccaaaatcgtcttcgataccgtgacggtcaccgggactgagaacctgatgatggccgcgagtctggcgcaaggcacgacagttcttgagaatgccgcgcgcgaaccagaagtgatcgacctcgccaattgtctggtcgccatgggggctcgaatcaccggagcaggcagtgatgtgattgaaatagaaggtgtgccgagtctctcaggagcctcacaccgggtaattccggaccgcattgaggccggcactttcctggtggccggtgcggtcacgcaaggagagatgcatcttcatgatgtcaatccctcccatctggacgcggtgacagccagattgcgcgatgccggagcagagatctcgatgacggagacaggggtcagcctgaccatgcgcgatcgcccacgggctgtttcgatcagtaccgccccttacccggggtttcccaccgatatgcaggctcagtttctgcttatgaactgcgtggccg

SEQ ID NO: 244497 - DNA, 790 bp, Unknown
  Bacterial polypeptide expressing nucleotide sequence isolated from the Sargasso Sea
aattaaacttcctaagatatcagtaggtgcaacagaaaatttaataatcgcagctagttatgcaaatggtacaacaattattaaaaactgcgcatgtgaaccagaaatactagatttaacaaattttttaaaaaaaatgggtgttaatataaaatggattagtaatagagaaataaaaattataggtggtaaaaaatttaagccagcgagtcactctgtaatgtttgatagaattgaagctggtacttttgtaatagctggagcattaataggaaaaaaacttaaaatagtttcactagaaactaaaataattaaaaaagaacttaaaattttaagaaaaatgggtgttaaattgaaaataaataaaaacgaaatagtaattttaaattcaaaaaatattagaccagttaaaattaaaaccgaaccttatcctggttttccaactgatcttcaagctcaaattatggtattgatgactagagcaaatggtacttcaaaaataaaagaaaatatttttgaaaatcgattcatgcacgttccggaattaaatagaatgggtgcaaagataaaagtttctggaaatctatctaaaattgacggtataaatagtttgtacggcgctgaagtaatggcaactgatcttagggcttctgtgagcttggttttagcaggtttaattgcaaaaaatagaacaattattaatagagtttatcatttagatagaggttatgaaaatttagaaaataaacttcgaaaatgtggtgcaaatatttctagaacgaattactaa

SEQ ID NO: 244498 - DNA, 1066 bp, Unknown
  Bacterial polypeptide expressing nucleotide sequence isolated from the Sargasso Sea
attaataaaagccacaaagattctcttaaattcaatgcctctggtgttgattcaaggtttgcatcatatgagctggtcaaaacaatgagggcatcaatcatggtcctaggaccattgctagcaaagtacggagaggcaaaggtttcattgcctggaggttgtgctattggagctcgacctgttgatctccatattcagggcttagaaaaattaggagcaaggatagagatcagagacggatatatattggcctccgcaaatagattgataggctcgtcatattgttttccaaaaaagagcgtgactggaactgcgaatatattgatggctgcgaccttggcagagggacaaacagaaatcgtcaatgcagcttgtgaaccagaaattgttcaacttggtgagcttcttaatgctatgggagcaaaaattgatggcgtcggaggagattgcataaatatagaaggtgtagaaaaccttgtcagcgctgaaattgaaattattccagatcggattgaggcaattacaatgattattgctggaatcataacccaaggtgagcttaagattgagaatatcgatccttcacatatagagggacctattgatttgatcaggcaatgtggtgcaaagctggagatatcagaacgcagtttattcgtgaaaggaccagatcagattcttcccattagttttgaaacagaggcttatccaggaattccaactgatattcaggcgcaattgatggtattaaatagcattgcaaacggtgactccaagatcacagagacgatttttgagaatagattcatgcatgtattggagctcaaaagaatgggcgcaaatatcagtattgacggaagcactgcaaaaataagtggtgtttcaagattaaattcagcgcctgtaatggcaactgacctaagagcttctgccgctttgattcttgcaggtcttattgcaaaaggagaaactgtcattgatagaatttatcatctcgatcgcggatatcagagtcttgaaaaaaagctatcaaatatcggtgcaaaagttcgaagaattgactaat

SEQ ID NO: 244499 - DNA, 561 bp, Unknown
  Bacterial polypeptide expressing nucleotide sequence isolated from the Sargasso Sea
catggaaaagctactaataaaaggtggtaagtctctatcaggcaaaataagttgttcaggtgcaaaaaatgctgctctcccaatgattgcagcaaccatactatgcgacgacaaggttgtattaaaaaatttaccttacttacaagatattacgactatgtttgagctattgggttcgatgggctcagaaattttattagatgaaaatatggactttacaatttcttcagcaaatcttaaagatattgaggcgagatacgaactagtcaaaacaatgagagcttcaatattagttttaggaccattattgtcaaagtacggaaaagcaagaatagctttaccaggaggttgtgcaataggctccagacctgttaatttccacttagatgcactaaaacagatgggtgcatcgataaccttgagaaatggttacattgaagcaaatgcttctcagcttaatggagcaaacattaaatttgagggagttacagtaacaggaacagaaaatcttatgatggctgcaactcttgctaagggccaaacaatactaaacaatgtcgc

SEQ ID NO: 244500 - DNA, 1372 bp, Unknown
  Bacterial polypeptide expressing nucleotide sequence isolated from the Sargasso Sea
atgatttgcggaagcaaaacgaagtcatatcttaaatcgcaaaatttaaagattcttggccaaggcaagttaaatggaatagttgaaataagtggtgcgaagaattccgccttagttttattagcctcatcattgctaactaatgaaaaaataattcttgaaaatgtaccttttctcactgatattgaaaagatggggaatatcttaaagaatttaggagtgaatttagttcgtaaaaacaaccaactagaaatagatccaacaactatttcgattaaagaacttccatatgaacttgttaaaggattaagagctagtttcttttgtataggtgcactattaactaaatttggagaagctcaagtaccgttaccaggtggatgcaatattggttcaaggccaatagacgagcacattaatggattaatcgcactaggagcagacattattattgaagagggaattgtaaaggcaaaaacaagggggaacaaaaatagacttcatggcactcatattaaattaaattgtccaagtgtaggtgcgactgaaactttaataatggcagcatctttagccaaaggaagaactactattgaaaatgctgctagagagcctgaagttcaagatttatgccaaatgcttaataaaatgggggcaaaaatttatgactccggtaaagaaacaattattattgatggtgttaataagcttggcggatgtacccataaagtaattccagaccgaatagaagctggaacttttctaatagctgctgctgcaacttcctcttcaataacaatttctccagtaatccctcatcatcttgaagctgtcactaataagcttcaagagagtgggagtaaaattacgattaaaggtaattcgatttctatcaagagtaaagagattaaaggagtagatattgaaacagctcctttcccaggctttcctactgatttgcaggcaccatttacaactctaatgacaatcgcaaatggtgaatcaaagataactgaaacaattttcgaaaacagaatgaatcatatttatttacttaatgaaatgggcgccagtataaaactaaacaaaaacgtagcttacatcaaaggtgttaaaacaattaatgggatgaatctagttggctcagatttaaggtcatcagctgcattaataattgcaggaatcatcgcaaaaggtagtagtaatttctatggattagaacatctagatagaggttatgaaaattttgaattaaaactaaaaaaattaggtgtaaaaataactagagaaatcagtaaaaataattttgaggagaatggatataaaattgaacatggatctgaaaatctttcaaaactcgaagcagcttagt

SEQ ID NO: 244501 - DNA, 946 bp, Unknown
  Bacterial polypeptide expressing nucleotide sequence isolated from the Sargasso Sea
tcatggttttgcaagaattgcacttccaggtggatgtgcaataggaacaagaccagttgattttcatttgaatgcacttgaaaagctaggagctaagattgaattaaaaaatggttatattgaagctactgcaaaaaaattagtaggatgtgatatcaattttccaggagtttctgttacaggtactgaaaatataatgatggctgccgtgcttgctaaaggtcaaactactttgagaaatgttgctaaagagcctgaggttgaggatttagcaaactttcttaattctatgggagcaaaaattaaaggagctggtagcgatgaaattattattgacggtgttgataatcttaatggcacaaaatttagcatccctgcagataggatagaagctggaacatatttaattgcagcagcgataactggtggtgatgtcactatatcaaatgttcaagcacaaagaatgaataacattttagataaattaaaattaagtggagccgtaattaatatcggtaatgatagtattcaactatccatgaataaagattctattttaccagtggatatttctacagctccatttccgggctttccaacagacatgcaggcacaatttactgtgttgaatgcattatcaaaggggtcttctgttgtaacagagaatgtcttcgaaaacagatttatgcatgttcaagagttaaataggatgggatgtgatattactgtcaagggaagtaatgcatttgtaaagggagtagattcattaaatggtgctccagtaatggcaacagatcttcgagcatctgcaagcctaatattggcaggattatgcgctaaaggagaaacagtagtagatcgaatttatcatatagatagagggtatgaaagaattgaggagaagctttcttatcttggtgctgacataacaagactcccaaattag

SEQ ID NO: 244502 - DNA, 1088 bp, Unknown
  Bacterial polypeptide expressing nucleotide sequence isolated from the Sargasso Sea
aatggataagctcttaattaaaggaagaatgcctcttaatggagagatttatgcttctggtgccaagaactctgccttgcctatattagcttcttcactattatctgattcgcctttagtagtaggcaacttgcctcaccttaatgatgtaacaaccatgttagaacttttaggttcaatgggtgttgacgttatgttgagtgatgatatggaggtcagagtagacagttcttcaatcaaaaatttagatgctcgttatgaattggttaagactatgagagcatctatattagttcttggtccgcttctagctagatatcaggaagcaactgtagctctgccaggcggttgtgcgataggaagcaggccagtaaatctacatattgaagccatgaatgcaatgggagcagagataaatattgaagatggttatataaaagcttctgttgatggaagattaaaaggtaataaaattttatttgatccagttagtgtaacagctacagaaaatgtaattatggcagctagtttggctgagggagtaacaactatacaaaatgctgctaaagagccagaagtagtagatctggcaaattgtttgataagtatgggagctaatattaagggtgcagggtcagatacaatagtagttgaaggtgtagactctcttaaaggaacaactttctcagtgatgccagatagagttgaagttggaacttatttaaccgcaacggctatgactggtggaaatgtaaaagtaaaatccgctaagcctgaatacctttcctctgtaatttctaaacttgagtcaactggagcccaaatacaaacaggcaaagactgggttgaaatttcgatggaaagggaaagaccaatttctacaagtttaacgacaggaccttacccgtcctttccaactgatatgcaggctcaattcgttgctctaaatgcaattgcgcaaggaaattctacagttaccgaaactgtgtttgaaaacagattcatgcatgtgcaggaaattgcgagaatgggaggggatataactctaaaaggaaatacagcagttatttcaggtattgataacctta

SEQ ID NO: 244503 - DNA, 1267 bp, Unknown
  Bacterial polypeptide expressing nucleotide sequence isolated from the Sargasso Sea
aatgatagtggaaaaacatatttcgattgaaggtaaccacaaattaagtggtcagataaatgtaaaaggcgctaaaaatgccgtattaaaagaaatgatccttcccatacttgcagaaggaaaatatcttcttaaaaacgtccctttgattgacgacgttgaatacatgcaggacgttttaaaagttttaggtataaatagtaattttaaaaataattctttagagatagtttcaccctcaacaattggtgttgaggctccatatgagatagtccaaaaaatgagggcttcaataattattcttggtcctttgttagctcgttgtggtgaagcaagaatcgcatttccaggtggagatcaattaggaccaagacctgtacaaatgcatctagatgcattagaaaaaatgggtgcaaattttgaacttgatcatggtgttttaattggaaaaacggatggccttaatggtgttgagataaaccttccttacgcgtcagtcggagctactgagaatactttactagcagctgtattagctaaagggagaacagtcattgaaaatgccgcaagagaacctgaaatagttgatattgtcaacatgttaataaagatgggtgccaatataagtggtgctggtacaagcgaaattattgttgaaggtgtagacaaactgaacccagcagaccatgaaattattggagatagaattgctgcaggaacttttttagctgcaatattgtcaacgaagggttcaggaagagtaaatggtattaacccagaacatttgcccatggagttaaaaaaattagctgaaatgggggcaaaaattgatagtactgaaacttctataaatattgaatatcgagataatcttcaatctatagaactttcaacattaccttttccaggaatagctactgatcttcaaccgatttttggttcagccttgttgttagctgaaggtacatcaatattgactgaaaatgtatatgatcaacgttttcagtggataccagaagttcaaagaatgggggcgaacatacagactggatggcaacatgcaatgataaaaggtgttgaaagtctatctggagctccagtccatgcaacagatattagaactggtgcaagcctgattattgcagcattgcaagctgatggttttttcacaatttcaggaattgatcatataagcagaggatatgaagatatcgtaacgtcattaagctcattagggggcacatcgaatataatgataatcatggat

SEQ ID NO: 244504 - DNA, 1261 bp, Unknown
  Bacterial polypeptide expressing nucleotide sequence isolated from the Sargasso Sea
atggactcactaattataaatggcggaaaaacactaataggtaatattcctatttctggatctaaaaatgcctgcctgccaatgatgatagcatcattaatgacagacgaaaaaatgactttaaataacatacctatgttgtcagatgtgaagacactaatatctattctaaaatctttaggtactaatattgagtataaaaaagataaccttcatcttcacacaaaagaaataattaatcataaagcatcatatgatttagtaaaaaaaatgagggctagtttttgggttcttgctcctcttttagcaaagaaaggatatgcagaagtttctttgcctggaggttgcgcaattggaacaaggccaatagatatttatttagaaatgcttaaagaaatgaatatcaaatattcaataaataatggctatatagtagcaaaagcagaatctcccattagaggtgtaaacttcaaattagaaaaaaagtctgttggttgtactcatttttttcttatgcttgcgtgcttagcaactggtacatcaaaactatctaatgcagcttgcgaacctgaggtagttcagcttggaatgctattaaataaaatgggcgctaaaattaaaggattagggtcaaagaaaataatcattgaaggtgttaaaaagttaaacggaattaatgaaatagtaccttcagacagaattgaagctggaacttttgcaatagcggtctctgcaactggagggaagatcaaattagaaaatacgaattatgatgaaaataaaacactattcaaaatattagaaaaaactggatcaaaaattaataaatcaaaaaattcaataaatattgaaaaaacaaatgatgaaatttatccagtaaatatcaagactagtccatatcctggatttccaactgatttacaggcacaaattatgacacttatggcaatatcaaatggtcaatcagaaattaaagaaaatattttcgaaaatagatttatgcatgtacaagaacttgtaagaatgggcgctaatattaaattagataaagataaggcacttataagaggtgctagaagtctaaatggagcaaatgttatggctacagatttaagagcttcagcttcactaataatagcaggactagttgcaataggtaaaactacaattagtaggatttaccatttagatagaggattctataatttagaatgtaaattaaataattgtggagcgtcaataaagaggattagcgaataat

SEQ ID NO: 244505 - DNA, 1081 bp, Unknown
  Bacterial polypeptide expressing nucleotide sequence isolated from the Sargasso Sea
attggaaaaattattaatcaaaggtggaaaaagtctttttggtgagattgactgttcaggtgctaagaatgcagctctgccagtaattgcagcatcaattctttcatcgaatgatgtaacgcttaaaaatcttccatatcttcaagatattactaccatgtttgaactcataggctcaatgggagcagatatttcgctagatgaaagaatgaattttagactcaatacatcaaacctttctaatcttgaagcaagatatgagcttgtaaaaactatgcgagcttctatcttagttcttggatctatggtggctaaatatggatatgcgaagattgcattacctggaggatgcgctattggaagtcgtccagtgaattatcaccttacagctcttgaaaagcttggtgcagaaatatcactcaataatggatatattgaggcaaaagccaaaaaactaaatggagctgatatagagtttgagggagttactgtaactggcacagaaaatttgatgatggctgccacattagcagagggagttacaactttaacgaatgttgcgaaagagccagaaatttctgacttggcagactttttaaactcaatgggagccaacatttcaggagcaggaacagataagattagaattgaaggcgtaaaagaattaatcggaacaacttttaaaattcctgcagataggatcgaagcaggtacatatcttgtagcaggagctcttacgaatggaaaaattacaataaataagatagatccaagtagaatgggtgcaattatagaaacccttcaaaaagctggagctgaaataaactcaaatgagaattctatttcattagatatgaagaataatgctataaaacctgttgatattattacagccccattccctggatttccaacggatatgcaagcgcaatttactgttttaaactgcatcgggaacggtgaatctttcgtaaaagaaactatatttgaaaatagatttatgcatgttcaagaacttaatagaatgggtactgatataacaattaaaggaactactgcacttattaaaggagttgattct

SEQ ID NO: 244506 - DNA, 1015 bp, Unknown
  Bacterial polypeptide expressing nucleotide sequence isolated from the Sargasso Sea
atggattattttgaaattaatggatcaaagacactgaacggtgttgttgagattagtggagcaaaaaacgctgtacttcctctgatggctgcagccattttaaataaggacaaattaagaatatctaatgttcccaatctatcagactccataacaatgtctaaattattagaaaaaatgggagcagaagtaaactttgaatctcataattcaatttttgttgatacatcaaaccttaatactccattcgcaccttacgatttagttaaaacaatgagagcatctttttatgttcttggaccgttgttagcaaggtttggtaaggcaaaagtatctcttcctggaggttgtgcatggggtcctagaccagtagattttcacttagaaggacttaaggcattaggagtaaaaatctccattgaaaacggatatgttgtcgctgatggaagtaatttgactggaaacaaaattcattttcctaaaatatcagttggagctactggaaatgttgttatggctgctatacttgctaaaggtacaacaacaataacaaatgctgcgtcggagcctgaaattcaacagttatgtgaaatgttaaatggtatgggggcaaatatctcaggaattggatctaataaccttacaattgagggagtcagctctctaaattctatttcaagtatatctgttattccagatagaattgaagctggaacattcttaattgcagctgcagctgttggtggcgaagtagaagtaaaaaatataatacctgagcacttagatagtgtgataaaatgtctacaaaaagccaatattcaattagaagtaaaagatagctcaatagttgttaagtcaaatacgaataatatactatccacaaatattgagaccaatgaatatccaagttttccaaccgacttacaagctcaatggatgatgttaatgtgcttagcaaatgggaattcgacaattaagaaaatatttattacgatagattttacgcacatatggg

SEQ ID NO: 244507 - DNA, 883 bp, Unknown
  Bacterial polypeptide expressing nucleotide sequence isolated from the Sargasso Sea
gatcttcacttatttgcactaaaaaaacttggtgctacaataaaaattaaaaatggttacatattagctaacacagaaaagggattgagaggcaatacaataaagtttccttcaatttcagtgggtgctactgagaatgccattatcgcgtcagttttagcagaaggcaaaactactttaaaaaattgtgctatggaaccagagatacaggatcttattttattcttaaagaaattaggttgtagtatttcttcagataaaaaaagaaatatttttgtaaatggtataaaatcttttttcccagtaactcataaagtaatatttgatagaattgaattaggaacatatttaatcgctgctgccttagccggaaaaaaagtatcttttttaaacataaacccaaaaattattagttctgaacttaaggttttaaaaaaaatgggagttagaatggaaataaaaaataataaaatcaccgtttttaaatctcaaaaattaaaaagaactaacattaaaactgaaccctatccaggcttcccgacagatttacaggctcaaataatgattttaatgacccaagcaaatggtaaatcaaaaataaaagaaagtatttttgaaaatagatttatgcatgtcccagaacttaaaagaatgggtgctaagattaaaattaaagacaatactgcaaagatttatggtcctaccaaattatcaggggccgaggttatggctacagacctaagagcctcagtctgtctcgttttagctggattgattgcacaaaaagagactactataaatagaatatatcacttagatagaggttatgaaaaattggaaataaaattaaaaaaatgcaaggcgattataagacgaatttaaa

SEQ ID NO: 244508 - DNA, 742 bp, Unknown
  Bacterial polypeptide expressing nucleotide sequence isolated from the Sargasso Sea
atggataaatttcgtgttcaggggccaaccaagctccagggcgaagtcacaatttcaggcgctaaaaacgccgcactgccgatcctgtttgcggcgctgctggctgaagaacctgtagagatccaaaacgtcccgaaactgaaggacgttgacacatcaatgaagctgttgagccagttgggtgcgaaagttgagcgtaatggttccgtgcacattgatgcgcgtgatgtgaacgtcttctgtgcgccgtacgatctggtgaaaaccatgcgtgcatccatttgggcgctcgggccgctggttgcccgctttggtcagggccaggtttcactgccgggcggctgcaccatcggcgcgcgtccggttgacctgcacattaccggtctggagcagttaggcgcgactatcaagctggaagaaggctatgtgaaagcgtccgttgatggccgtctgaaaggctcgcatattgtcatggacaaagtgagcgtcggtgcgactgtcaccatcatgtgtgcagcaacgcttgccgaaggcaccaccatcatcgaaaacgccgcgcgcgagccggagattgtggataccgcgaacttcctgattgcgctgggcgcgaagatcactggccagggcacagatcgtattacgatcgaaggcgttgagcgtctcggtggcggtgtgtatcgcgttctgccagaccgcatcgaaaccggtaccttcctggtggcggcggcaatttctcgtggca

SEQ ID NO: 244509 - DNA, 385 bp, Unknown
  Bacterial polypeptide expressing nucleotide sequence isolated from the Sargasso Sea
atggagaagcttttaattaaaggaggtaatcctctttcaggaagaatagaatgttcaggtgcaaaaaatgcagctttgccaatgattgcatcgacaattttatgcgaggaagaagttatacttaaaaatctgccttatctccaagatatcacaactatgtttgaacttttaggttctatgggagcagacataatattaaatgaaaatatggatttcactattacctcaaaaaatcttcaagatattgaagcaagatatgaacttgttaagacgatgagagcatcaatattagttcttggtcctttggttgcaaagtatgggaaagcaagaattgctttgccaggaggatgtgcaattggatctcgtcctgtaattatcatttaga

SEQ ID NO: 244510 - DNA, 893 bp, Unknown
  Bacterial polypeptide expressing nucleotide sequence isolated from the Sargasso Sea
tatagatttacacttaaaatttcttaaatcaataggcgtaagaaatcatatagataaagggtatgttatttctaaattaaataatattaaaaaaaaaaatatatatagatttcaaaaaatctcggtaggcgcaacaataaatagtattttagctagttgcttaattccaaataaaattattttaaataatattgctatagaaccagaaattgttgatttaataaaatttttaaaaaaagctggagtaaaaataaaatttcttagcaatagaaaaatagagatattaggtaaaaaacatttaaaccagatatcttacgagataatgcctgatcgaattgaagcaggcacatatatgattgcttcggccataactaatagcaagttgataattaagaagttaaacataaatcatgttcaaaataccataaattatttatcaaaagctaatattacagttaaaaaaattgataagaactcagtacaaattttaccaggtaaaataaaaccagtgagttttaaaaccagtccctacccaggcttcccaagcgatatgcaagctcaatttatgtctttaatgaattttgccaatggcacatctaaaattaaggaggagatatttgaaaatagatttttacatgtttccgaattaaatagaatgggagctgatattagtattatgaaaaatgttgctacaatcaatggtgtagagaagttaagagcagcagaggttatggcaactgatttacgagcatcagtatcattggttttagcaggactagctaccaaaggcaaaactgttattaatagaatatatcaccttgaaagaggttatgaggatttggtttataaattaaaaaattgcggtgctaaaataaaaaaaacaaatgtttgat

SEQ ID NO: 244511 - DNA, 715 bp, Unknown
  Bacterial polypeptide expressing nucleotide sequence isolated from the Sargasso Sea
ttgaaaaaattagcaattaatggtggataccccctaaatgggtccataaaaatatcaggcgctaagaatgcagcattacctatgatgactgcatctattttatcagatcacaatattgtgcttaatggcgttcctgatctagctgatgtcaaaacaatgattactctattggagtctatgggaatagagacaaataaaaaccacaaaagttctcttacattaaatgcctctggaattgattcaagatttgcatcatatgaacttgtcaaaacgatgagggcttcaatcatggtccttggaccattgctagcaaagtatggagaagcaaaagtctctttacctggaggttgcgctattggagctcgaccggttgatctccatatacagggattagaaaaattaggagcgaggatagaaatcaaggatggatatctactggcctccgcagatcgattgataggttcgtcatattgttttccaaaaaagagtgtaactggaactgcaaatattttgatggctgcaaccttagcagagggagaaacaaagattgtaaattcagcttgtgagccagaaatcgttcaacttggtgagcttctgaatgccatgggagcaagaattgaaggcctaggagaagattgcataacaatacaaggagtagaaaaccttgtgggcgctgaaattgaaattattcctgatcgaatcgaggcaatcacaa

SEQ ID NO: 244512 - DNA, 1264 bp, Unknown
  Bacterial polypeptide expressing nucleotide sequence isolated from the Sargasso Sea
atggacaaatttattgttaaaggtccttgcaaaataaagggcgaaatttcaatttcgggctcaaaaaacgctgccctaccaattttggcatcgacaatcttatttgaaaaagaggtcataataaaaaatttacctcgtgttaaagacatagatacaatgataaatcttttaaaatctcttggctctgaagtaaaatttaataaaaataaaaaaattgtaaaaataacaaagaaaaaaaagcaaagtttttttgcatcttattcacttgttagaacaatgagagcaggaatattagttttaggagcacttgttaccaaacatcaaaagtccattacttcattgcctggcggctgcctaataggggcaagacctgtaaattatcatttgaatgcgcttaaaaaacttggaatgaaatatgatattaagaaaggctatatccacgcacatacgaaagaaaaactcaaaggtgcaaaaataagattttcaaaaattagtgttggagcaactgaaaatacaattatagccgcatgtttagcaaatggaattaccattcttagaaactgtgcaatcgaaccagaaataattgatttaataaattttttaaaatcaggtggtgcaaaaataaaatttataggcaaacgtactgtgaagatagaaggtattaaatctttagaaagcacaagttattcagtgatgtctgatagaatagaaacaggaactttttgtgtagcagcatgtttaactggaggtaatttaaaaataaataattttgacccaaaaattataaaaacagaattatcattattaaaaaaagttggagcaaaaatcaaagtagccaaaaaacaaattcatatatctggtccaaaaaaaattaaaaatttaaccaatttagttactaaagaatatccaaactttcctacagatctgcaagcacagtttatggttcttctttgcaaggccaaaggcaaaagttcaataactgaaagtattttcgaaaatagatttatgcatgtagctgaattaagaagattaggagctgagattttaattaaaaaaaataaggcatttatttcaggtgatactaactttcaagccgcagaattaatgtctagtgacttaagagcttcagttgcattagttttagctgcaatagttgctaaaggttcgtctacaattaatagaatttatcaccttgatagaggatatgaaaatatagagaataaactaagaaaagttggggtaaacattcgacgtgttaattgat

SEQ ID NO: 244513 - DNA, 418 bp, Unknown
  Bacterial polypeptide expressing nucleotide sequence isolated from the Sargasso Sea
taatgaaatcagtgtagcaaaatcatcgattgatcaaggtatagaattagatacagaagaatttccaggatttcctacagatcttcaggctcaaatgatggtacttatgtcactaggaaagaaaaaatctataattagagagaatatatttgaaaatagatttatgcatgttccagaattaaatcgtatgggaggtaatatagaaatttctggtaagaaagctattattcatccgtgtgatcgatttttgggagctcaggttatggcaactgatttaagagcctctgttagtctagttcttgcaggtttagttgcaaatggtgaaacgacattgaatcgtatataccatttagatagggggtatgaaaatattgaaacaaaacttcaatcaattggtgctgatattaagagaatttaa

SEQ ID NO: 244514 - DNA, 1264 bp, Unknown
  Bacterial polypeptide expressing nucleotide sequence isolated from the Sargasso Sea
atggacaaatttattgttaaaggtccttgcaaaataaagggcgaaatttcaatttcaggttcaaaaaatgctgccctaccaattttggcatcgacaatcttattcgaaaaagaggtcataataaaaaatttacctcgtgttaaagatatagacacaatgataaatcttttaaaatctcttggctctgaaataaaatttaataaaaatagaaaaattgttaaaataacaaagaaaaaaaagcaaaatttttttgcgtcatattcgcttgttagaacgatgagagctggaatattagttttaggagcacttgttgccaaacatcaaaagtctattacttctttacctggtggctgccttataggggcaagacctgtaaattatcatttgaatgcacttaaaaaacttggaatgaaatatgatattaagaaaggctatatccacgcacatacgaaagaaaaactcaaaggtgcaaaaattagattttcaaaaattagtgttggagcaactgaaaatacaattatagccgcatgtttagcaaatggaattaccattcttagaaactgtgcaatcgaaccagaaatagttgatttaataaattttttaaaatcaggtggtgcaaaaataaaatttataggcaaacgtactgtgaagatagaaggtattaaatctttagaaagtacaagttattcagtgatgtcagatagaatagaaacaggaactttttgtgtggcagcatgtttaactggaggtaatttaaaaataaataattttaatccaaaaattataaaaacagaattatcattactaaaaaaagttggagcaaaaattaaagtagccaaaaaacaaattcatatatctggtccaaaaaaaatcaaaaatttaaacaatttagttactaaagaatatccaaactttcctacagatttacaagctcagtttatggttctactttgtaaggctaaaggtaaaagttcaataactgagagtattttcgaaaatagatttatgcatgtagctgaattaagaagattaggtgctgagattctaattaaaaaaaataaggcatttatttcaggcaatactaactttcaagctgctgaattaatgtctagtgacttaagagcttcagttgcattagttttagctgcaatagttgccacaggttcgtctacaattaatagaatttatcaccttgatagaggatatgaaaatatagagaataagctaagaaaagtcggggtaaacattcgacgtgttaattgat

SEQ ID NO: 244515 - DNA, 1264 bp, Unknown
  Bacterial polypeptide expressing nucleotide sequence isolated from the Sargasso Sea
aatgcaacaatttctggtttcaggcggcgccactttaaaaggtgacgttgttatttccggcgctaaaaacgccgcacttcctattttatttgccactattctggcagagcagccttcggtgcttagcaatgttcctgtattaaaagacattgacaccacctttaaattgttgcgtatttttggtgctgacgtcagccgtgatgaccatcaggtgacagtggatgcaactgctattcatagtcaaatggcaccttacgagctggtgaaaaccatgcgcgcctctattttggccttagggcctttgttagcccgtttcggtcatgccgaagtgtccttacctggcggctgtgccattggcgcacgtccggtgaatcttcatatcgatggtctgcgcaaaatgggtgccgagatcacagtggaagctggctatatcaaagccaaagcgacccgcttaaagggggctcatattttcatggatatagtcagtgtcacaggcactgaaaacctgatgatggccgctgtgctggctgacggtttaactatcattgaaaacgctgcacgtgagcctgaagtggtggacctagccaagtatctgattgctatgggtgcggatattcagggcgcaggcactgataccatccgtattaccggtaaagaaaagctgcacggcgcacgtcacactgtattacctgatcggattgaaaccggtacttttttagttgctgctgctgtcacaggcggtgatgtcacctgcttaaatgcatcgccagctgagcttgaagtcgtactggagaaactacgggaagctggcgctgacgtcactaccggaccggattggatccgtctgaatatgacaggccgaaccttaaaatcagtcaatgtgaaaacagtacctcacccaggtttccctaccgacatgcaagcacagtttactgtgttgaatgtggtggctgaaggtgtaggtatggtgactgaaaccattttcgaaaaccgctttatgcatgtgcctgagttacaacgtatgggcgcagatattcagctggaaggcaatacagcgctgattaagcatacagataagctgatgggcgctcaggtgatggcaaccgatttaagagcttccgccagcttagtgattgcaggtttagtggctgagggagagacagtggttgatcgtatttatcatatcgaccgtggctatgaacaaatcgaacataagctcaaaggtttaggcgcaaatattcagcgcatcaatgctccggcctga

SEQ ID NO: 244516 - DNA, 985 bp, Unknown
  Bacterial polypeptide expressing nucleotide sequence isolated from the Sargasso Sea
gagggcatcaatactagttcttggaccgctagtagcaaagtatggcaaagcaagaattgcattaccaggaggctgtgcaattggatctagaccagtaaattatcacttagatgcattaaagcaactcggtgcaaaaataaagttaaaaaatggatatattgaagcatctgctaaaaaattaattgggtctaatattaaatttgaaggtataactgttaccggaactgaaaatataatgatggcagccactcttgcagaaggcaaaacgattctttcaaatgtagcaaaagaaccagaaataattgatcttgcaaatatgttgaattctatgggcgcggatattcaaggagctggaactgacgaaataatagtacaaggtgtagatgagctaaatggaacagtgttcactatacccgctgatagaattgaggctggcacatatcttgtagcagctgctgttactaatggcaatatcacgatcgataaaattgatccaaaccgtttaatgaaagtgattagtaaaatagaaaatactggttcaaaaattagttatgacaaagattctatttctatttcaatggatcaagagcgcccagaaccagtagatattactactgctccttttcctgaatttccaacagatatgcaagctcaattttcagtaattaatgcaatatcatcaggagtttcaaacatatatgagactgtttttgaaaatagatttatgcatattctagaactaaatagaatgggatgtgatatccaagttaatggtaatcatgcattgataaaaggagttgaatctatatatggagctcaggtaatggcaactgatctgagagcatcagcaagcttaattctagcaggcctttgcgctaaaggagaaactgttgttgacaggatttatcatattgataggggatatgaacgtatagaagaaaaattaaattacttaggtgcaaatattattagacttccaagttaa

SEQ ID NO: 244517 - DNA, 401 bp, Unknown
  Bacterial polypeptide expressing nucleotide sequence isolated from the Sargasso Sea
gaggcatctcaaggcagtaagtttttctacttccccttatccagggtttccaactgatatgcaggctcaattttgtgcattaaactcagttgcgaatggtaaagctgagatggttgaaaatatatttgaaaatcgatttcagcatgtagtggagctacatagaatgggtgctgatatacaaattaagggaaacattgcctcaagtacaggggttgattcactaacagcagctcctgttatggctacagatctgagagcctctgcaggcctaatcattgctgcacttgcagcaaaaggtgaaacaatcatcgatagaatataccacatcgatagaggatacgagagagtggaagaaaagcttcaacaattgggagctagagtagcaagagaaaattcttgaa

SEQ ID NO: 244518 - DNA, 1255 bp, Unknown
  Bacterial polypeptide expressing nucleotide sequence isolated from the Sargasso Sea
tatgcaaagactagaggttcttggagcgaataagctcaagggacaaataaatatttcaggatcgaaaaacgcatcattaccaattttggcagcaacattgctttcaaaaaataaaataactttaaaaaatttaccaaaagttaaagatatagagacaatgattaatttacttcaatcattgggatcaattactaaatttactaaacaaagtcttgttatagataattctaaacaaaaaaaagtttttgcatcttataatttagtaaaaactatgagagctggaatactagtgcttggaccattacttgctaagtttggcaacgcaaaagtttcactaccaggtggttgtgcaattggtaccagacctgttgatattcatcttaaagccttatcaaaacttggagttaaatttaaaattttaaatggatatgttcatgctaatgctccaaaaggactaatagggacaaacataagtttctcaaaaatatctgttggtgctacagagaatttaattattgctgcttgctttgcaaaaggaaaaactattttaaaaaattgtgcaattgaacctgaaataaaagatttagttaattttttattaaaaacgggttgtaaaattaaatggattggtaaacgttcaataaaaatctctggagtaaaacaaattaaagaaattagttattcagttatgtttgatagaattgaggctggaacatatttgattgcggcagcattgacagagggaaagttacaaataaaaaatgtgatacctaaaataattaaaacagaaattgatattttaaagaaaattggggctaaaataaaagttaaccacgataagataaacattgtaggcaataaaaagataaaaaatttagaaattaaaacagctccgtatccaggttttccaactgatttacaagcccaaattatggttttgttatgtaaagcaaacaaaaaatcaataatcaaagaggatatttttgaaaatcgatttatgcatgttgctgaactaaaccgtatgggtgcacaaattttaactaaaggaaacaaagctgtagttcaaggaaatataaattttgtacctgctgaattaatggccacagatttacgagcatcagtttcattggtccttgctgctttaacagctaagggaaaatcagttatcaatagaatttatcatttagatagaggttatgaaaatttagaaaaaaaattaaaaaaggttggggcaaaaatacgccgagtgaactaa

SEQ ID NO: 244519 - DNA, 1264 bp, Unknown
  Bacterial polypeptide expressing nucleotide sequence isolated from the Sargasso Sea
atggaaaagtttgtaatcagaggtccttgtagggtcaaaggaaccgttaatgtttcgggaagtaaaaatgcagcgttacctatacttgccgccacattattatttaatagacctgttgaactaaaaaatgttcctgatgtacgagatattaaaacaatgttgaatttgttaagattttttaaaaaaaaagtaatttttttaaaaaataaaaaaactataaaaatttataattcaaaaaaaattaggacttacttgccttactcaatttcaaaaactatgcgtggatcaataatttgtcttggaggccttgtgtcaaagtatggaaaagcaatatcagcttatcctggcgggtgtgcaattgggatgagaccaattaatcttcatttagatgcgcttaaaaaacttggaatgaagtacgaaattaaaaaaggctatatttatgcaacggcaaaaaatggtttaaatggaaacaatattaaatttaaaaaaatatcagttggagccacagaaaatacaatcatagcagcaagtttagctaaaggaaaaacaattttaagaaactgtgcaattgaaccagagataaaagatcttacaaattttttatcttccgcaggagccaatataaaatggattggaaaaagaactgttcaaattgttggagtgcaaaaattaaaaagcacaaattatacagtaatgtgtgacagaattgaaacgggaacaatggctattgctgcagcattaaccggcggaattcttaaaataaaaggtttaaatccaaaaataataaatacagaacttgaacttgtaaaaaaaacaggctcaataatcaagtacggaaaaaatgaaataaaaatatatggagcaaaaaaaattaaaaatatcaaacttattaaaacaaaagaatatccaggatttccaacagatctacaagcacaattcatggtgctattatgtaaagcagaaggaagaagtgttattgaagaaaacatttttgagaatagatttatgcacgcgttagaactacagagacttggagcaaaaatttcattaaaaaaaaacaaagcaatcattgaaggaaattcaaaattagaaggagccgaactaatgagtagtgacttaagagcttcagtagcattagttttggcggcaattgcctctaaaggcaaatcaactattcatagaatttatcatctatcgcgaggatatgaaaatttggataaaaaattaaaaaaaataggagttaatataagtaaaatttactgat

SEQ ID NO: 244520 - DNA, 568 bp, Unknown
  Bacterial polypeptide expressing nucleotide sequence isolated from the Sargasso Sea
atgtttgatagaatagaagcaggaacatttattattgcaggagcactaattggtaaaaaattgaaaatttcaggaattcagacgcgttttttaaatacagagattaaaattttgagaaaaatgggcgttaagatgaaaattagtaaagattacattataatacttcactcacataaaataaaacctgttaatattaaaacggaaccctacccgggttttccaacagacctacaagcacaaatgatagttttaatgactaaagcaaaaggcaaatctcaaataaaagaaaatatttttgaaaatagatttatgcatgtgcccgaactcaatagaatgggagcaaaaattaatacgtcgggaaatttatcttatatagagggacctcaaaacttaaatggtgcagaggtcatggctactgatttacgagcgtcagtgagtttagttcttgcagggcttgtagcaaataatcaaacaataattaatagggtgtatcatttagatagaggatatgaagatttagaaaaaaaactcagacagtgtaatgcaaaaatttctagaatttcttaac

SEQ ID NO: 244521 - DNA, 907 bp, Unknown
  Bacterial polypeptide expressing nucleotide sequence isolated from the Sargasso Sea
atggaaaagctgctaataaaaggtggtaagtctctatcaggcaaaataagttgttcaggtgcaaaaaatgctgctctcccaatgattgcagcaaccatactgtgcgacgacaaggttgtattaaaaaatttaccttacttgcaagatattacgactatgtttgagctattgggttcgatgggctcagaaattttattagatgaaaatatggacttcacaatttcttcagcaaatcttaaagatattgaggcgagatacgaactagtcaaaacaatgagagcttcaatattagttttaggaccattattgtcaaagtacggaaaagcaagaatagctttaccaggaggttgtgcaataggctccagacctgttaatttccacttagatgcactaaaacagatgggtgcttcgataaccttgagaaatggttacattgaagcaaatgcttctcagcttaatggagcaaacattaaatttgagggagttacagtaacaggaacagaaaatcttatgatggctgcaactcttgctaagggccaaacaatactaaccaatgttgcaaaggagcctgaaattgcagatctagctgatatgcttaattctatgggcgcaaagatatctggagcaggaactgacaaaatagttattgatggcgtagatatacttaaaggcacaatatttgatataccagcagacagaattgaagctggaacttatcttgtagctgcagctgtaaccaaaggcagtattactatcgatggaattaatcctaaccgcctaatgaaagttattgataagttaagggctgctggagctgaaattgattacaatgaagattcaatttcaattaacatgaaattagaatttccaaatccagttgatatcacaacagctccttttccagaat

SEQ ID NO: 244522 - DNA, 1261 bp, Unknown
  Bacterial polypeptide expressing nucleotide sequence isolated from the Sargasso Sea
atgcaaaaattagaagttctcggaggaaaaaaacttagaggacaaattgaaatatctggaagcaagaatgcttcattgccaattttagccgcaacaatactttctgacgaaaaaatttatttatctaacttaccgagagttaaggatatagaaactatgattaatcttttaaagtccattggatcaaatattaaaataaataatgataaaaaatctttatctataataaataataaaaaactaaaattttttgctccttataatttagtaaaaactatgagggctggaatattggtattaggcccaatgttagcaagatttcataaagcaaaagtatctttacctggtggctgtagcataggtataagaccaatagatattcacttaaactgcctttctaaacttggagctaaatataaaatttcaaatggatatgtttatgcttcagcaaacaatggtttagttggagcaagaattaaatttccaaaaatttctgttggagctacagaaaatttgattatagcagcaagtatggcaaaaggtacatccatactttcaaattgtgcaattgaaccagaaataaaagatctagtgaattttttaaataaaataggggctaaaattaaatggataggtaaaagaactgtaaaaatttttggagtaaaaaaatttaaagaaaataaatatcggatcatgcccgatagaattgaagcaggaacctatatgattgctgctgcaataacagaaggaaaaattttaattaatgggattgattcaaaattaataaaaacagaaatagagttattaaaaaaaattggagttaaagtttttatttttaaaaataaaattaaagttataggaagcaataatttaaaaaatattataattaaaactgctccttatccaggttttcctaccgatcttcaagctcaaataatggttttgctatgtaaagctagcggtctttcaataattagtgaagaaatatttgagaatagattcatgcattgtggtgaactaaatagaatgggtgcaaaaataacaatcaaaggcagcaaggcatatataggtggaaacattaaattaaaatcagcagaacttatggcaactgatttaagagcttctgtctgtttaattttggctgcactgatagcaaaaggaaaatcaacaattaatcgaatttatcatttagatagaggatatgaatctattgaaaaaaagctaagaaaagttggcgctaaaataaaaagaaaatcttaat

SEQ ID NO: 244523 - DNA, 556 bp, Unknown
  Bacterial polypeptide expressing nucleotide sequence isolated from the Sargasso Sea
aatggattattttgaaattaacggattaaaaacacttaatggtgttattgaggtgagtggagcaaagaacgctgtacttccccttatggcagcttctattttaaatcaggataaattaaaaatatctaatgttcccacactatcagactcaataacaatgtctaagttattaaaaaaaatgggagcagatgtaaattttgaatctgataattcaatttctgttgattcatcaaaacttgataatccatttgcaccttacgatttggttaaaacaatgagagcatctttttatgttcttggacctttattagcaaggtttggtaatgcaaaagtatctcttcctggaggttgtgcatggggtccaagacctgtagactttcatttagacggacttaaggcattaggtgtaaaaatctcaattgagaacggttatgtaattgctgatggaagtaatttgattggaaataaaattcattttcctaaaatatcggttggagctactggaaatatagttatggttgcaatacttgccaaaggtacaacaactataactaat

SEQ ID NO: 244524 - DNA, 844 bp, Unknown
  Bacterial polypeptide expressing nucleotide sequence isolated from the Sargasso Sea
attaaaccttgatggcggcaatattcttgcggaggcaaaagagctaataggaaatgatatacattttgaattccgttctgtaggagcaacaggaaacctcgcaatggctgcagtaaaggctagcggaactactagactttataattgcgctaaagagcctgagataatacaattatgtgagttattaaatagtatgggtgccaatattgaaggtatcggaacagaagtcctaattattcatggagtagatgaacttcattctgcagacatagatattattccagatagaattgaagctggaacatttctaatggctggggcgttattaggcgaaattgaagttagagacattatcccagagcatcttgataaggtggttcataaactgcgtgagacaggatgtctattaaaaataaatcaaaaaagtataataatcacaccccctgaaaaaatcaaatctgttgatatggcaaccgctgtatatcctggttttccaacagacttacaggctcagtgggttgcaattatgtctctagcagatggttcatcagtggtaacggacactgtataccatgatagattcagccatatcccagaattatctagacttggtgctaatataaaagtagaaaataatactgcatttatcagaggaaaaaatacacttgttggtgcgccagttatgtcaacagatattcgagcgagcgcatcattaatcattgcagcacttgcagctaaaggagagactcaaatcagtagagtatatcatatcgatagaggttatgagaatattgaacaaaaatttgaaggccttggtggagatatacgaagaatatcggaataa

SEQ ID NO: 244525 - DNA, 832 bp, Unknown
  Bacterial polypeptide expressing nucleotide sequence isolated from the Sargasso Sea
cgaagcgcgcgcgaagcgtctgaagggcacgcgtatcgtgaccgatatgatcaccgtgacgggcaccgaaaatctgctgatggcagcggtgctggctgaaggcgagacggtcatcgagaacgccgcgcgggagccggaagtgggtgacctcgcgcatctgctggtcgagatgggcgcaaaaatcgaaggtatcggcaccgaccgtctggtcatccagggcgtcgacaggttgcatggcgcgaagcacacggtgattccggatcgtattgaagccggtacattcctgtgcgcggtcgcggccgccggcggcgatgtcaccttgcgtaaagtacgtccgctgatcctggaagctgtgaccgaaaagctgcgtgaagcaggcgtcacggtcgaagaaggcgacgactggatgcgcgtgcgcatggacaagcgtccgagcgcggtgagcttccgcacgtctgaataccccgcgttcccgaccgacatgcaggcgcagttcatggcgctcaacacgatcgcggacggcacctcgcaagtggtcgagacgatcttcgagaaccgttacatgcacgtgcaggaattgaaccgcctcggcgcgagcatcacgatcgacggcaacaccgcgctcgtgaccggcgtcgagaaactgtccggcgcgaaggtgatggcaaccgacctgcgcgcttcggcgagcctggtaatcgccgcgctgcgtgccgaaggtgaaacgctgatcgaccgcatctaccacctggatcggggttacgaccggatggaaaccaagctcaacgccatcggcgccaaggtgcgtcgtatcgccgggagccaggcatga

SEQ ID NO: 244526 - DNA, 556 bp, Unknown
  Bacterial polypeptide expressing nucleotide sequence isolated from the Sargasso Sea
atggaaaaattattaattaaaggtggcaactctctaaaaggaaaaatttcttgttctggagcaaaaaatgctgcattacctatgatagcttcaactatattatgtgacgaaaaagttacccttagaaatctgccttatcttcaagatatcacaaccatgtttgaattattgggttcaatgggagctgaaattttacttgatgaaaatatggattttacaatttcgtcagctaatctaaaagatatagaggctagatatgaattagtcaaaacaatgagggcatccatattagttcttggcccattgatagcaaaatatgggaaagcaaagattgctttgcctggcggttgcgctataggcactagaccagtcaactttcatcttgatgcgttaaaaaaaatgggagcaaaaataaaactaaaaaatggttatattgaagcaatggctaaaaaattacatggagctgaaataagatttgatggagttactgtaactggaaccgagaatttgatgatggctgcttcacttgcagaaggtacaacaaagcttacaaatg

SEQ ID NO: 244527 - DNA, 1261 bp, Unknown
  Bacterial polypeptide expressing nucleotide sequence isolated from the Sargasso Sea
aatggataaacttttgataaaaggaaggtcacctttgaacggtgaaatctatgcctcaggtgctaagaattctgctttacctattctagctgcttctcttttatccgattctcctgtaagagtaggaaatttgcctcatcttaatgacgtcactaccatgttagaacttttagggtccatgggtgtggatgttatgttgagcgacgatatggaagtagaagtagatacatcgtctatcaaaaatcttgatgctcgctatgagctggttaaaactatgagggcttcaatattagttttagggccactcttagctaagtatcaagaggctacagtagctttaccaggtggctgtgctataggaagtaggcctgtaaatcttcatatcgaagcaatgagtgccatgggagctgaaatcaacatcgaagatggttacataaaagcctcagtcaatggaagattgaaaggatgtgaaatctcctttgatcctgtcagtgtaacaggtacagaaaatgtcattatggcggccagtttagctcaaggactaaccaccataaacaatgctgctaaagaacctgaagttgtcgatttagtgaattgcttaagcagtatgggtgctaagattcaaggtgcaggaacggatataattaaaattgaaggagtaaactctttaagcggaacttctttctcagttatgcctgatagagtagaggtaggtacttatttaactgccactgctatgactggtggtaaagtgaagattaaatcagctaagccacaatatctctcttctgtaataactaagcttgagtcaactggtgccgtaattaagattggtgaagattgggttgaaattaccatggagagagatagaccagttgcaacaagtcttactacaggcccttacccttcttttccaacagatatgcaagcccagtttgttgcattaaattctattgcggaagggaactctactattactgaaacagtttttgaaaacagatttatgcacgtacaagaaattgcaagaatgggaggagatattgccctcaaaggaaatactgccgtaattaagggaattaaaggcctgaagggagctccagttatggctacagatttaagagcttcggccagtttagtactagctggcctagttgctaaaggttctacaacaattgataggatctatcatattgataggggctacgaaagaattgaagaaaaattaaaaatgcttggagcagacatagaaagaatctcttaa

SEQ ID NO: 244528 - DNA, 1063 bp, Unknown
  Bacterial polypeptide expressing nucleotide sequence isolated from the Sargasso Sea
atgttagtggaaaaaagtattcaaataaaaggtaagaaccaattaactggtgaaatagaaatctctggtgcaaagaatgcggttcttaaacagatgattcttccaatactttgtgaaggacaatacaaaattgaaaatgttcctaatattgctgatgtattttacatgcaagatgtacttggtgtattaggtattacttctaacttagaaggaaaaacccttgagatagtatcgcctaatgatatttccgttgaagctccatatgaaattgtgcaaaaaatgagagcttcaattattgttcttggaccgttacttgctagaaaaggagaagcaaaaatcgcttttcctggaggagatcagcttggacccaggcccgtcaaaatgcacattgaagctcttgaaaaaatgggagcatcatttgaattagaccacggagttttgattggtaaaacagacggcttaaaaggtgttgaaattaatctaccctatgcatctgttggtgcaactgaaaatacacttttagcggcagttctagctgagggcacaacagtgattgaaaacgcagcacgagaacctgaagttgtagatctaataaagatgttaaaaaatatgggtgcagacataacaggtgagggcagtagtgaaatagtaattaacggagtaaatgcattaaatagtacaaatcacaaagtcataggagatcgtatagttgcaggaacatatattggcgcatttttatcaacaaatggaaatggcaaaatagttggaattaatccaaatcatctacctatggaaattaaaaagtttactgagatgggagcaaagtttcaaattgacagcgattctattgaggttgaatcacctaaacaactgtcaccaattgatatttctacacttccatttccaggcatagctactgatttgcaaccaatatttggagcatcactactaaaagcgaacggaacgtcaataattacagaaaatgtttatgatcaacgttttcagtggattccagaagtgcagagaatgggtgctgatatacaaataggatggcaacatgcaa

SEQ ID NO: 244529 - DNA, 1264 bp, Unknown
  Bacterial polypeptide expressing nucleotide sequence isolated from the Sargasso Sea
aatggataaatttaaaattaatggcccctctaagatcagaggagaggtctcaatttctggaagtaaaaatgctgctcttccaatacttgctgcaactttactcttcgataaaaatgtaacaattaaaaatcttccacaagttaaagatattgatacaatgcttaatttactaaaatcactaggaagaaaaattagctttaaaaataataaaaaaattgcaacgatttcaaaagggaaaaaaaataatttttttgcaccttattctctcgttaaaacgatgagagcaggaattttagttcttggccctttattggcaaaaaataaaaaagcaaaagtaagtagcccaggcggttgtagtataggagttagaccaatagatatacatttaaaagctatatcaaagttgggtgttaaaatacaaattaaaaaaggatatgttaatgcaacagctcaagagggattaattggttcagaaataagattttcaaaaatatcagttggagctactgaaaattcaattcttgctgcatgtcttgcaaaaggaacaacaacaataaagaattgtgcgatagagcctgagatcaaggatctgacaaattttcttaaaacagcgggagccaagatcaaatggattggtaaaagaactttaaaaattgagggtgttaaaacattaaaaagtataacttactcaatcatgaatgatagaattgaagcaggcactttttgtgttgctgcatgtttgaatggtggaaacttaaaaattaaaaactttgagccaaaaattatcaatacagagataaatttacttaagaaaattggcgcaaagataaaaaccacaaaaaatacaattcaaattaagggaccaaaaaaaattagaagtttgaattttttaaaaactggagaatatccaaacttcccaactgatttacaagcccaaattatggtattattaactagagcaaatgggaaaagcacaattgaagaaaatatatttgaaaatagatttatgcatgttccagaattaaaaaggttaggtgcaaaaataaatattaaaggtaacaaggcaattattgaaggaactaataatttagagggagccgagttaatgtctagtgacttaagggcatcagtagctttggttttagcagcttttatttcaagaggaacatctatcataaatagagtatatcatttagatagaggttatgaaaaaattgaaaataaattaaaaaaaattggagtaaaaataaaaagaatatcttag

SEQ ID NO: 244530 - DNA, 235 bp, Unknown
  Bacterial polypeptide expressing nucleotide sequence isolated from the Sargasso Sea
gatgggtgctaacattgagattgatgcaaatactgcaatagtgaaaggagtttcaaaattaaattctgcgcaggtaatggcaacagatttgagagcttccgcagcattaattcttgcgggcttaattgcagatggaaagacaatcattgatcgcatttatcatttggatcgcggatatgaaagcgttgaagaaaagctattaaatataggtgcaaaagttagaagaattgactaa

SEQ ID NO: 244531 - DNA, 577 bp, Unknown
  Bacterial polypeptide expressing nucleotide sequence isolated from the Sargasso Sea
attggaaaaattattaatcaaaggtggaaaaaatctttttggtgagattgattgttcaggagctaagaatgccgctttgccagtaattgcagcatcaatcctctcatcagatgatataacacttaagaatcttccataccttcaagatattactaccatgtttgaactcattggctcaatgggggctgatatttctctagatgagaaaatgaactttaaactaaacacgtcaaacctttcaaaccttgaagcaagatatgagcttgtaaaaactatgcgagcttctatcttagttctagggtctttggtggctaaatatggatatgcgaagattgcattacctggaggctgcgctatcggaagtcgtcctgtgaattatcacctcaaagctcttgaaaaacttggcgcagaaatatctctcaataatggatacattgaggcaaaagctaaaaaattaattggagcttgtattgagtttgagggagttactgttactggaacagaaaatctaatgatggctgcttcactagctgagggattaacaattttaactaatgttgcaaaagagccagaaatt

SEQ ID NO: 244532 - DNA, 750 bp, Unknown
  Bacterial polypeptide expressing nucleotide sequence isolated from the Sargasso Sea
taataatggctgcaacccttgccgagggaaccactagactaaaaaatgttgctaaagagcctgagattattgatttagcaaattttttaaatattcttggtgcaaatattaagggtgctggtactgacgaaattattgttgaaggtgtagatgaattatctggaggaagattttcgattccctttgatagaattgaagcaggaacatatctggcagccgcagttgcaacaaatggaaatatcaaaatcaataaaattgattcatctagaatgggaaacatgattgaaaaatttcagttaatgggtgcgtttgttgaattaaaagaaaatactatccatatcatgatggagaagaatattgagccagtagacgttattactgagccttttccaggatttcccacagacatgcaagcacaatttacactaattaattctattgcaaatggtagtgccactgtgacagaaaaaatatttgaaaatcgtttcatgcatgttcaagaacttgtacgcatgggttgtgatataacggtaaatggaaacagcgcctttataaatggagtgaaaaagatttatggagcgcaggttatggcaacagatttgcgggcatctgcatgtttgattttagcaggtttatgtgccgtgggagagacaattgttgacagggtataccacattgataggggatatgagcgtattgaagaaaaattatcttaccttggagcaaatattgagagattgcctagataga

SEQ ID NO: 244533 - DNA, 1258 bp, Unknown
  Bacterial polypeptide expressing nucleotide sequence isolated from the Sargasso Sea
aatggataaattaataataaaaggaggttctaaaatttctggttcaattgatgttcatggtgcaaaaaattctgcactaccgattatagtatcttctctattatctgaaaaaactttaaaactctccaatgtacctaatgtggttgatgttctaaatttaataaaattattgaaaaattatggtgtaaaaattgaacacaaaaaaaataaattaaaaataagtccctcaaaaattaagaatctatcagcagattatgatgttgtgcgaaaaatgagagcctctatattgattctaggtccattactttctcgatttggtgaggctagaatatctttaccaggaggatgtgccattggaactaggccaatagatatacatcttgccggtttatcaaaattgggagctaattttgaaattcaaaatggctttgttgtcggcagtgttaaatcacaattgattggaaataaaattaaattaccttttccaagtgtaggagcaactgaaaatatactaatggcctcggtattggcaaaaggtgaaactaaaatttctaatgctgcaagagaaccagaaatagaagatttgtcaaactgtcttataaaaatgggtgcaaaaatagaaggtcatggaacaaaaactattcttgtgcaaggtgttacaaatttaaaaaaagcagagcatgagataatttctgatagaattgtagctggcacatatataattgcagctttgatgttaaattcagctttagaaataaataactttaatactatttatttaaaatccttaattgatattttaaaaaaaatgggtgcaaaattaaaagtaagtaaaaattcaataaaagtttttaaaggatcaaaactaaaatctagtagtctttcaactagtccatatccaggtttccccactgatttacaagctcagttgatgtctcttatgtgtatttctgatgggaagtcaaaaattaaagaaacaatttttgaaaatagatttatgcacgttcctgaactgaatcgattaggtgcaaatattacagtagaaaaagatacagctacaattataggtaatcaaacatttaaaggagcgcaggtaatggctagtgatttacgagctagtataagtttagtgttagctgctatgaatgcaaatggtcaaacaacactaaatcgtgtctatcatcttgataggggatatgaaaatatagaaaaaacattaggaagtttgggagctaaaataaaaagacagaaaaactaa

SEQ ID NO: 244534 - DNA, 554 bp, Unknown
  Bacterial polypeptide expressing nucleotide sequence isolated from the Sargasso Sea
aatggctaaaattatagtaaacggtggaaaagaattatctggcactataaaagttagtggatctaaaaacgcagcattgccaataatgacagcttcgcttttaactgacggtgagctagatctgagtaatatcccacagctatccgatgttactataatgagagagcttctacaatctttgggtactaatatatctttaaataaaagtccccgctctttgaaacttaccactaaggaaatcagaaattatacggctgactatgaaatagttagaaaaatgagggcatcaattattgtcttggggcctatcctagcgagaagtaaaattgcgaaggtggcacttcccggtgggtgctcaattggatccaggcctatagatctccaccttaaaggcatgcaagctatgggcgcaaaaatctatatggagggcggatatgtttttgcagaggcagctaatggacttcaaggagccgatatcaaatttccaattgtatctgtaggagcaactcaaaatatcgttcttgctgccacactagccaacggcaccaccacta

SEQ ID NO: 244535 - DNA, 1100 bp, Unknown
  Bacterial polypeptide expressing nucleotide sequence isolated from the Sargasso Sea
aattgttaaaatctctaggttccagattgaattttttaataataaaaaaactgtaaaaatttcaaaaaccaaaaaacaaaaatatttagcaccctattctttagtgaaagttatgagaggttcatttcttagtttgggagctttacttgccaaacatcataaagcaataatttctttgcccggaggatgtttaataggtgccagaccagtaaactatcatttaagtgctttgaaaaaacttggaatgaaatatgaaatcaaaaaaggttatatccatgcaatttcaaatggaaaacttaaagcatcgaattttaaattttcaaatataagtgttggggcaacagaaaactccattattgctgcatgtcttgcaaaaggaaaaactattttaaaaaattgtgcgatagaacctgaaataaaggatttaactaattttcttaattcagcgggtgcaaaaattaagtggataggaaaaagaactgtacaagtagaaggagtaaaaattttaaatagcattaagtactccgttatgggagataggatagaagcgggaacattttgtgtagcggcctcccttactgctggcgatttactaattaaaaattttgactcaagtttaatccaaacagaattaaatcttttaaaaaaaattggttcaaaaattaaaacatttaaaaaagaaatttatattaaaggaccaaataaaattaaaagtataaataatattgttactaaagaatatccaaactttcctacagacttacaagcacaatttatggtattattatgcaaagctaatggaagaagtacaattacagaaagtatttttgaaaatagatttatgcatgttgcagaacttagaagattaggtgcaaaaattagtattaaagaaaataaagccatcattgagggtaatactgattttttaggagctgagttaatgtcaagtgatttaagggcatctgttgccttagttcttgcggctatggtctcaaaaggcaaatcgttaataaatagaatttaccatttagataggggatatgaaaagattgaaaataaacttaaaaaaattggagtaaatattagaagattttcttaat

SEQ ID NO: 244536 - DNA, 706 bp, Unknown
  Bacterial polypeptide expressing nucleotide sequence isolated from the Sargasso Sea
tgcatcatgtgagcctgaagtaatccatcttggattgttgttaaataaaatgggtgccaaaataaaaggattaggatcaaagaaaataataatagaaggcgttaaaaaactaaatggcgttactgaaattataccctcagatcgaattgaaacaggtacttttgcaatagcagtttctgcaaccggaggaaaagtaaaattagaaaatacaaattatgaagaaaataaattactttttaatatattagaaaaaacaggatcaattattaataagtcaaaaaattcaatatcaattgaaaaaaatcataataaaatttatgcagctaatattaaaactagcccctatccagggtttccaacagatttgcaggcacaaatcatggcgttaatgacaatttcaaatggaaagtcagaaattaaagaaaatatttttgaaaatcggtttatgcatgtacaggaacttgtaagaatgggcgctaatattaaattggataaagatagagcaattataaaaggcgttagaaggctaaacggagcaaatgttatggctacagatttaagagcatccgcatcgctaataatagctggtttagttgctacaggtacaactaaaattagtaggatttaccatttagatagaggattctataatttagaaaataaattaaataattgtggagcatcaataaaaaggataagtgaataa

SEQ ID NO: 244537 - DNA, 1261 bp, Unknown
  Bacterial polypeptide expressing nucleotide sequence isolated from the Sargasso Sea
aatgaaaacacttgaagtttctggaaaaagaaaacttaagggtattattagggtatcaggatctaaaaatgcttcattgccaatattagcagcatcaattttatcaaacaaatctataaaaattttaaatttaccaaaggtaaaagacattgaaacaatgatttcacttttaatctctatgggatgcaaaattaaaatcaataatagaaaaaaatctttagaaataaaaaattcaaataaaattaaaactttcgcttcatataaacttatgaaaactatgagagcaggtattttagttttaggaccacttttagctagatttaaaaaggctaaggtatctcttccaggtggatgcgccattggtgctagacctgttgatattcatctaaagtcattatctaaattgggagcaaagtacaaaataaaagatggatacatttatgcaacagcaccaaatggattaaagggaaataaaattatttttccaagtatttcagtcggggctactgagaatattattatagccgcatgttttgccaaaggtaaaactattttaaagaattgcgcaatagagcctgaaatagatgatttaattctttttttaaagaaaatgggttttaatattgaatggaaaggtaagagaattttaagcatagtaggatctcgtgaaacaaaagaattaattcactctgtaatgcctgatcgtattgaggcaggcacgtacttaatagccggagctctcacaaatggtcaactctgcattaaaaatattaacccaaaaataattttaacagaaataaatatattaaaaaaaataggagtagaaataaaaataaaaaattcggatttaatagtttatagaaaaaaaaacttaagaagtttaaatattaagaccgcaccataccctggatttccaactgatctacaagctcaaataatggtattattgtgtcttgcaaagggaagatcatctataactgaagaaatatttgaaaatcgatttatgcacgcacctgaattaaatagaatgggagccaaaataaaaattaaaggtaataaagcctttatagatggaaatattaattttaaatcagctgaactaatggcaactgatctgcgcgcatcggtttcattagtacttgcagcgttatgtgctgatggtacatctaaagtcaatagaatatatcatcttgagagaggatatgaaagtttagaaaaaaaattgaaaaaagtaggatcaaaaattaaaaaagtttcttga

SEQ ID NO: 244538 - DNA, 625 bp, Unknown
  Bacterial polypeptide expressing nucleotide sequence isolated from the Sargasso Sea
aaaatagtcattgatggtgtagataaacttaaaggtataatttttgatataccagcagacagaattgaagctggaacttatcttgtagctgcagctgtaaccaaaggtagtattactatcgatgggatcgatcctaaccgcctaatgaaagttatagataagttgagggcttctggagctgaaattgattacaatgagaattcaatttcaattaatatgaaattagaatttccaaatccagttgatatcacaacagctcctttcccagaatttccaacagacatgcaagctcagttttcagtaattaatgcaatatcgtcaggaactgccaatgtatatgagactgtttttgaaaatagattcatgcatatcttagaattgaacagaatgggttgtgacatttctgttaaaggcaatcatgctgttatccaaggcgttaaatcaatttatggagctcaagtaatggcgactgacctaagggcttctgcgagtttgatccttgctggcctatgtgctgagggcgaaacagttgtagataggatttatcatattgatagaggatatgaaagaatcgaagaaaagctaaactatttaggtgcaaatattataagactcccaagttaat

SEQ ID NO: 244539 - DNA, 1057 bp, Unknown
  Bacterial polypeptide expressing nucleotide sequence isolated from the Sargasso Sea
cttcatcttcacacaaaagaaataattaatcataaagcatcatatgatttagtaaaaaaaatgagagctagtttttgggttcttgctcctcttatagcaaagaaaggatatgcagaagtttctttaccaggaggctgcgcaattggaacaagaccaatagatatttatttaaaaatgcttaaagaaatgaatatcaaatttgcaataaataatggttatattgtagcaaaagcagaatctcctattagcggcataaacttcaaattagaaaaaaagtctgttggttgcactcatttttttcttatgcttgcgtgtttagcaactggtacatcaaaattatctaatgcagcatgcgaacctgaggtagttcatcttggaatgttattaaataaaatgggcgctaaaattaaaggattaggatcaaaaaaaataatcattgagggtgttaaaaagttaaacggaattgatgaaatagtgccttcagacagaattgaagctgggacttttgcaatagcagtctctgcaactggagggaggatcaaattagaaaattcgaattatgatgaaaataaaacactgttcaaaatattagaaaaaactggatctaaaattaataaatcaaaaaattcaattagtattgaaaaaatgaatgatgaaatttatccggtgaatattaagactagtccatatcctggatttccaactgatttacaggctcaaattatgacacttatgacaatatcaaatggtaaatcagaaattaaagaaaatattttcgaaaatagatttatgcatgtacaagaacttgtaagaatgggtgctaatattaaattagataaagataaggcacttataagaggtattaaaaatctaaatggagcaaatgttatggcaacagatttaagggcttcagcttcactaataattgctggattagctgcaataggtaaaactacaattagtaggatttaccatttagatagaggattctataatttagaaagtaaattaaataattgtggagcatcaataaaaaggattaaagataatgggtgaa

SEQ ID NO: 244540 - DNA, 891 bp, Unknown
  Bacterial polypeptide expressing nucleotide sequence isolated from the Sargasso Sea
taacttttcaccttgatgctttaaaaaaaatgggagcaaaaatagaacttaaaaatggttatattgaagcaacgtctaaaaagctacatggggctgatataaggtttgatggagttactgtaaccggaactgagaatttaatgatggctgctacacttgctgaaggaatatcaacgcttaccaatgttgccaaagagccagaaattattgatctggctgatatgcttaattcaatgggcgcaaaaattaaaggcgctggatcagatgaaataattatagaaggagtgaataacttaaatggtactgtatttgatatacctgcagatagaatagaggcaggaacatatttagtagctgcagcagttaccaaaggagaaattactgttgaagggataaatccagagagattgatgacagttattaataaattagaaaatacaggagctaagttgagttatgataaaaaatctatttcaatttcaatgaaaaaaagtattccagagcctgttgatattactacagctccatttccagaatttcctacagacatgcaagcacaattttctgttattaatgcaatttctaatggaacttcaaatatttatgagactatctttgaaaatagatttatgcatattttagaattaaatcgaatgggttgtgatattgaagtgaaagggaatcatgcaaagataaatggcgttgaaaatatttatggtgcagaggttatggctacagatttaagggcgtcagctagtcttattcttgcaggcttgtgtgcaaaaggagaaacagttgtggataggatttatcatattgatagagggtatgagcgtatagaagaaaaattaaattatttaggcgcaaatattgtcagattgccaagttaag

SEQ ID NO: 244541 - DNA, 772 bp, Unknown
  Bacterial polypeptide expressing nucleotide sequence isolated from the Sargasso Sea
aagagcgtgactggaactgcaaatattttgatggctgcaacattagcagagggagaaacaaagattctcaatgcagcttgtgagccagagattgctcaacttggtgagcttctcaattctatgggagcaaaaattcaaggccatggaaaggattgcataacaatagaaggggttgagaatcttggaggtgctgaaattgaaataattccagatcgaattgaggcaatcacgatggttattgctggaattataaccaggggagagcttaggattgaaaatatcaattcttcacatatacaacaacctatcgagctgataagaaaatgtggagcaaagcttgaagtattcgaagattatctatatttaaaaggctcagatctgatctctcccattagctttcagacgaacccgtatccaggaatcccaacagatattcaggcgcagctaatggtattaaatactgttgcagagggtgactcaaaggttaaggaaaccatttttgagaatagatttatgcatatattagagcttaaaagaatgggtgcaaacattggaattgatggtaatactgcaattataactggagttcaaaaattaaattctgcgcaggtaatggcaacagatttaagagcctctgccgctttgattcttgcaggtttgattgctgatggagaaacaatcattgatcgaatttatcatttggatcgcggatatgaaagtattgaagaaaagctatcaaatataggtgcaaaagttcgaagaattgactaat

SEQ ID NO: 244542 - DNA, 1018 bp, Unknown
  Bacterial polypeptide expressing nucleotide sequence isolated from the Sargasso Sea
gagtcaaaatttgcatcatacgaactagttaaaaccatgagggcatcaatcatggtccttggaccactgttagcaaagcatggaaaggcaaaggtttcattgcctggaggctgtgctattggagcgcgacctgttgatcttcacatacagggtttggaaaaattaggagcaacgatagagatcaaggatggatatatattggcttcttcggatcgattgataggttcaacatattcttttccaaaaaagagcgtgactggaaccgcaaatattttgatggctgcaactttagcagagggagaaacaaagattctcaatgcagcttgtgagccagagattgttcaacttggcgagcttctcaattctatgggagcaaaaattcaaggccttggaaaggattgcataacaatagaaggggttgagaatcttgggggcgctgaaattgaaataattccagatcgaattgaggcaatcacgatggttattgctggaattataaccaggggagagcttaggattgaaaatatcaattcttcacatatgcaacaacctatcgagctgataaggacatgtggagcaaagcttgaggtatttgaagattatatatatttaaaaggctcagatctgatctttcccattagttttcagacaagcccgtatccaggaatcccaacagatattcaggcgcagctaatggtattaaatactgttgcagagggtgactcaaaggttaaggaaaccatttttgagaatagatttatgcatatattagagcttaaaagaatgggagctaacattggaattgatggcaatactgcaattataactggagttcaaaaattaaattctgcgcaggtcatggcaacagatttaagagcctctgccgctttgattcttgcaggtttgattgctgatggagaaacaaccattgatcggatttatcatttggatcgcggatatgaaagtgtcgaagaaaagctatcaaatataggtgcaaaagttcgaagaattgactaat

SEQ ID NO: 244543 - DNA, 939 bp, Unknown
  Bacterial polypeptide expressing nucleotide sequence isolated from the Sargasso Sea
aagcaagaatagcacttcctggaggctgcgctattggatcacggcctgttaactatcatcttgattctcttaagcaaatgggagctgagatagtcttaaaaaatggttacattgaagcatctgctaaaaatttaaaaggtgcggatattagattcgatggaattactgttacaggcactgaaaatttaatgatggctgcaactcttgcaaagggtaaaacaactttatcaaatgttgccagagaacccgagattattgatttagcagatatgttaaattcgatgggagcaaaaattaatggagcaggatcagataagatcactatccaaggcgtcgaaaaactaattggaacctcttttgaaatacctgctgacagaatagaagctggaacttatcttgcagctgcagcagtaactaaaggagacataaaaattgaaggtattaacccaaataggcttatgaaagttattgacaaattaatcaatactggtgcaaaagttgactatgatgaagattccatttcatttagcatgacgaatgatattcctgatccagtagatatcacaacagctccatttcccgaatttccaacagatatgcaagctcaattttctgtcataaatgcgatttcaagcggtactgctaatatttatgagactatctttgaaaatagatttatgcatattcttgaactaaacagaatgggatgtgatatttcggttaacggtaatcatgcaatcattaaaggagtaaagtcattatatggtgctgaagttatggcaacagacttaagagcatctgcaagcttaatacttgctgggctgtgtgctaaaggtgagacagtcgtagatagaatttatcatatagatcgtggatatgagagaatcgaggaaaaattaaattatttaggtgcaaatatagtaagacttcctagttaga

SEQ ID NO: 244544 - DNA, 682 bp, Unknown
  Bacterial polypeptide expressing nucleotide sequence isolated from the Sargasso Sea
aatcattcaacttggtgagcttctgaatgccatgggagcaagaattgaaggccttggagaagattgcataacaatacaaggagtacaaaaccttgtgggcgctgaaattgaaattattcctgatcgaatcgaggcaatcacaatgattattgccggaatcataacccaaggtgaaatcgagattgaaaatatcaatccttcacatatagaggaacctattgagttgatcaggcaatgtggcgcaattcttgagatatctgatcagagtttatttgtgaaaggtcctgatgagattcttcccattagttttgagactaagccatatccaggaatacctacagatattcaggcgcaattgatggtattgaatactattgcaaagggtaattctaatatcactgaaacgatttttgagaatagatttatgcatgttctggaacttaaaagaatgggcgcagatattggaattgatggaaatactgcagaaataaggggcgttacaagtttaaattcggcgcctgtaatggcaacagatttaagagcttctgcagctttaattcttgccggtcttattgcagaaggagaaaccataattgatcgcatttatcatctcgatcgtggatatgagagtgttgaagaaaaactatcaaatgtcggtgcaaaagttagaagaattgactaa

SEQ ID NO: 244545 - DNA, 348 bp, Unknown
  Bacterial polypeptide expressing nucleotide sequence isolated from the Sargasso Sea
tatgaacaaagttgtagctatattaggccctactgcagcaggtaaaactgacctagcattagaagtagctaaaaacttagaggctcaaattataagtgttgattctataatggtatacaggaatttaaatattggctctgcaaaaccttcaatagacgttttaaaaaagttcccccataagttagttaatattttaaatccagatgaaaaatataatgttgcttcattttataatgatgtattacaagaaattaatactgcgataaataaaaaaaaagtaccaattctagttggcggaacaatgatgtatttcaatactttatttaataatggcttaaacaatcttcc

SEQ ID NO: 244546 - DNA, 254 bp, Unknown
  Bacterial polypeptide expressing nucleotide sequence isolated from the Sargasso Sea
attgggtttattacaagaagttaaaaagcattattctcaaaacttatctttagaactgcaatctatgaaagcaataggaattaagttttttttcgagtatttaagtggaaaaagaaattttcaggacgctatgagtctgactcagcaggagagcagaagatatgcaaaaagacaaatgacttggtttaggaattcatttcttatgatactatttatgaaaatttatttgaagatgataaaaaatttgtgttaaa

SEQ ID NO: 244547 - DNA, 293 bp, Unknown
  Bacterial polypeptide expressing nucleotide sequence isolated from the Sargasso Sea
agagagaattaacaagagatctgaaaatatgattaaactaggtgcaatttcagaagttagaagatttattaaaatgcgtgtcccaaaaaataaaagcctcagtaaagcaataggaattaatgagattaaacaatatcttcaaaaaaaaatccaaatagaacaattaattgagaaaatatcaataaagacaaggcaatatgccaaaagacagagcacctgggctcgtggaaatatgaaagattggaacaaattgaatccatctggattagataagctcttaaaaaaaatttaga

SEQ ID NO: 244548 - DNA, 460 bp, Unknown
  Bacterial polypeptide expressing nucleotide sequence isolated from the Sargasso Sea
ttcttcaactgatactcaaagaacactcagagcatatgaagtaaaaaaatatacaaaaaaatcaatttatgagtgggcaaaaaaaacaaaacctttatttaaagatcatatatttataaagttttttataaatactccaaaaaaacaattgcttaaaaatattgagctgagaacgaattctatgatcgagaaaaagtgtattgatgaagttataaggtttagaaaaagaaggttaaaaaaaacactttcacctaataaaattatcggagttcaagaaattcaaagatatttaagtaaggaatttgaccaaaaaaatcttgtagaattaatgaatattaaaactaggcagtacgcaaagagacaaaaaacttggtctagagctcatatgactgattggcatatgatatattcaagcaattcttccattctcttaaaaaaaattttaaatctcgttagctaa

SEQ ID NO: 244549 - DNA, 391 bp, Unknown
  Bacterial polypeptide expressing nucleotide sequence isolated from the Sargasso Sea
tatgaataatatattcatccttataggacctactgcttctgggaaatctgatttagctatgaggttgatgagtaaatttccttttgaaatagttaatgcagatttatattctgtatacaaagagttaaacataggaacagcaaaaccctcaaatgaagaattaaataaatataagcaccacttaattaatatccttgaacctacaatgcaatataacgtctcacaatattgtaaagatgcacatcaatctattagtgaaatattatctttgaataaaattcctttaattacaggcgggactatgatgtatgtccatcaattattaaatggactctctcatgagtataatgtttcagaaactgattcaaatcttatcaaatttatacaaaat

SEQ ID NO: 244550 - DNA, 472 bp, Unknown
  Bacterial polypeptide expressing nucleotide sequence isolated from the Sargasso Sea
ttattctgaaaaagtccatattaataacaagaaaagacttgttagagctttagaagtttttgaaactactggaaagccaatgtctgaaaattttgacttaatgtcaaaagctagtaagtatgcaaataattattgttttgtttatttgcaaatgaagaatgactttttacatcctagaatattaaaaagaattgagcttatgattggcgatgggatgattgaggaggttgaagaaataattaatcaaaaaattgatatttctcatattgactatattggcttcaaagaattgtcattatttatcgataataagatttctattaacgaagccattgaaaaaatttttattcgtacaagacagtatgcaaaaagacaaaataagtggtttagttctaataggtatgatatatcctttgatttagaaaatttttcctcaaatgatattgttgataaattgattcaaataaactaa

SEQ ID NO: 244551 - DNA, 328 bp, Unknown
  Bacterial polypeptide expressing nucleotide sequence isolated from the Sargasso Sea
aaaatttatattgattatcctaaagatgaattaattaataaaatttccaatagagtagaccaaatgatgaaagatggagctattaaagaagttaaggattttttaaagctcaatttgaagagtgatagcaacatcctcaaagtcataggaataagagagattaaagattttattgataaaaaaacttctatgcatgatttaaaactaaatattgttataaaaaccagacaatacgctaaaagacagcgaacttggtctagaggccaaatgagtgattggcaaaaatttgattctgaggctcttttgaaatttataaaaaaattataaa

SEQ ID NO: 244552 - DNA, 346 bp, Unknown
  Bacterial polypeptide expressing nucleotide sequence isolated from the Sargasso Sea
tcctaaggaagattttattaaaatttatattgattttccaagagaaaatttacttcataaaatttcaaagagatcaggtcaaatgctcaggcaaggagcaataaaagaagttaaaaaatttatcaagctagggataaaaaaagacaattcctcaaataaggtgataggaattaacgaaattaaagattttcttagtaaaaaaattaatttgaatgaagttaaggaaaaaataacaataaaaacaagacaatatgctaaaagacaaaatacctgggcaagaggccaaatgatggattggcaaaaagttaacccaaaggatctgaaaaaaattttaaaaaaaatataa

SEQ ID NO: 244553 - DNA, 491 bp, Unknown
  Bacterial polypeptide expressing nucleotide sequence isolated from the Sargasso Sea
ttttgataaacttgttaaaattgattcattagcaaataataagattagacccactgatgttcaaagaactattagagcatatgaagtaaaactatttacaaacaaatctatatttgattggtataaaaaaacaaaatcaaaatttaaaaatagtgtttttgtaaaattatatatcgattttcctagaccagaactagttgaaagaattaatttaagaacgaaaaagatgttagaatctggtttaattcccgaagtaaagaaatttttaaagcttagagttccaagaagcaaaagtattaccaaggctataggcattcttgaaatcaagaatttaattgagaataaggttccaaaagagcaagttattgaaaaaatatcaataaagacaagacaatatgccaaaagacaagttacttgggctagaggcaatatgaaagattggaaaaaaattaagccaaaatatttagacaacttcttaaaaaaaatttaaa

SEQ ID NO: 244554 - DNA, 741 bp, Unknown
  Bacterial polypeptide expressing nucleotide sequence isolated from the Sargasso Sea
aatgtcagcttcaaagcctgaattagcaagtgattgcataatcctcacaggcccaaccgcatcgggcaaaactgcattgggcattcgtattgctcagcgactcaatgctgacatcctcagtgctgattcagtcgccgtatataaagggctcgatattggttcagccaaaccaactctggaagagcaagcccaagcgactcatcatctccttgatcttgtagatcccgcatcactctttaccgtatcagattggcttctcgcggcagccaacgccattcaggactgtcgtgaccgtggtcgacgtattctctttgttggcggcactccactgtatctgagatgtcttcgagatggactcgacgaatcccccgcaatagatctcgatttcagaaacagtctgactcaacagatagcgcagagcggccccaaggctctccacgagaagctcgggcgactccgtcctgacatagccgctaccattcatcccaacgacacaaaacgcatcattcgagcattcgaaatcattcaggcatctggggtagatcaccctcgctcatgggcacaagcacgcaattctaaaaagcaactttttccgtgcccgatactcgtcatcgatcaaccacgaaaaatactcaaccgccgaatacatgagcgagtcgaagcgatgtttgagtgtggaatcctggaagaaactgaagctgctgaacagcaatacggaatcggtacaacagcagcacaagc

SEQ ID NO: 244555 - DNA, 208 bp, Unknown
  Bacterial polypeptide expressing nucleotide sequence isolated from the Sargasso Sea
catgactgatccgataactgataattttctacacaaagtaagcaataagccaatcttacttgttggacctacagcgtctggaaaatctaaacttgcgatgtctttggctatcaaattgaaaaggcacattgttaatgcagattcactccaagtctacagtaattggcggattttacggccagacctacctcagaagatgaaaaaataa

SEQ ID NO: 244556 - DNA, 343 bp, Unknown
  Bacterial polypeptide expressing nucleotide sequence isolated from the Sargasso Sea
aaaagacgaatttttaagtatttatattgattatcctaaagagcaattggtaaataaaattacaaaaagagtagatcaaatgataaaagatggggctgtcgaagaggttaagaactttgaaaagttgaatttaaacaatgaaaataatcttaataaagttattggcatcagagagatcaaagattttattgaaaaaaaaacttcatttaaagaaatgaaactaaatattgtaataaaaacgaggcaatacgctaaaagacaaagaacttggtctagaggtcagatgagtgattggcaaaaatttgatcctaaggggctgcttaaatttataaaaaaattataa

SEQ ID NO: 244557 - DNA, 454 bp, Unknown
  Bacterial polypeptide expressing nucleotide sequence isolated from the Sargasso Sea
aataaaattaatcctactgatacccagagatcaataagagcttttgaagttaaaaaattcacaaagaaatctattcatgattggttcaaaaatactaaatcaaattatttagaagaggatttcttcaaaatttatattgattatcctcgtgatgaattgattgaaagaattcatcaaagaactggaaaaatgattaaaatgggtgctgtgaatgaggttaaaagatttttaaaactcaaaattaaaaaacaaatgactgctttcaaagcaatcggagtaaatgaaattcaagaatatttatctaaagaaaaaaaaattgatgaaatcaaagaaaaaatatcaataaaaactagacaatacgccaaaaggcaaagcacatgggctcgaggacatatgagtgattgggtaaaacttaagccatctgagataaacaaatttttaaaaaaaatttaaa

SEQ ID NO: 244558 - DNA, 454 bp, Unknown
  Bacterial polypeptide expressing nucleotide sequence isolated from the Sargasso Sea
ctgactccccaaagaatacaaagagcatatgaagtaaagttaaaaactcaaaaatctttattcgattggtttgctaatacaaaatcggattttttagattttgaaattaaaaaaatttttatcgaaatccctagggaattattacttaaaaaaatttctatgagaaccgaacaaatgttcagaaataattgtataaatgaggtaaagagattcaatgggcttaaggtaaataaacatttgtcagttaataaattaataggtgttcaagaaataaatgattttttaagaggatctatttctctggaacattgtaaggatctcatcaatattaaaactagacaatacgcaaaaagacaaaatacatgggctagaggccatatgaagaattggaacaagatttattcgaaaaatttatcaaatcttttaaaaaaaacattaaaagttgtaagctaaa

SEQ ID NO: 244559 - DNA, 543 bp, Unknown
  Bacterial polypeptide expressing nucleotide sequence isolated from the Sargasso Sea
gattaagatcaaaaataaggttattacataaaaaaattggaacagagaagttttttttagaattaatcaagttagatccaatatcaaaaaactttgttaaacccacagatactcaaagagtaattcgcgcttatgaagttaaatcatttacaaaaaggtcaatttacgattggttcaaaagtacacgatcagattatgaaaaggacgatttttttaaaatttgtattgattatccaagagttaaattaattgagagaattagggatcgtacagaggatatgattaaaaatggagcaatttcagaagtaaaaaaatttataagattaaaagttccaagagttaaaactgcctcaaaggcgattggaattgcagaaattagagaatatcttgagaaaaaaattgagttatctgaggtaattgagaaaatatcaataaagactaggcaatatgcaaagagacaatctacttggggcagaggcaatatgatggattggaacaaaataaagtcaggggacctaaacaaatttttaaaaaaaatttaga

SEQ ID NO: 244560 - DNA, 511 bp, Unknown
  Bacterial polypeptide expressing nucleotide sequence isolated from the Sargasso Sea
aagttttttaatgaactaattaaattagatcctttggccaaaagtttagtattaccatctgattcacaaagatccatgagagcttatgaagtgaaaaaatttacaaaaaaatccttatttgattttctaaaagaaacaaaatcaaattttaataataaaacttttaaaaaaatttttctaaataccccaagagaattgttgcataaaaaaatcgcgacaagagttgataaaatgtttagtgatggagttataaatgaagtggaaaagttctataaaatgaaagtcaataaagagttgtcttcaaacaaaattataggaataaaggaaattggtgattatttgcaaaataagactaaactaattgaaaccaaagaactcataacaataaagacaagacaatatgcaaaaagacagtttacttgggctagaggacatatgaaatcatgggagatgatttattcttcaaatattaatgatttatataaaaaagctatcaataaaatatcctaaa

SEQ ID NO: 244561 - DNA, 121 bp, Unknown
  Bacterial polypeptide expressing nucleotide sequence isolated from the Sargasso Sea
atggactacaagtccaaaatcattcttattgctggtcccacagcttctggaaaatcaaaaatagcagtcaacttagcgaaaaaaattaatggtgaaattgttaatgctgacagcatgcaag

SEQ ID NO: 244562 - DNA, 543 bp, Unknown
  Bacterial polypeptide expressing nucleotide sequence isolated from the Sargasso Sea
tcagaaatttgtataaaaaaatcggttctaaaagattttatgatcttcttcttaaacttgatcctaaaattaagggcagaattcttccaactgactcacaaagaattcaaagagcttatgaagtaaagattaaaacaaaaaaatcattatttgactggtttaccaatacaaaatctgattttttagattttgaaataaaaaaaatattcattgatattccaagggaagaattgttaaaaaaaatttctcaaaggacagagctaatggttaaaaatcaatgtattaatgaagtaagaaaattcaataaacttaaaattaaaaaaagtttatcagcaaataaactaataggtgttcaagaaatcaatgattttttgaagagatcattctcgctagaccaatgcaaagagcttatcaatataaagaccagacaatacgcaaagagacaaaatacttgggcaagaggccatatgaagaattggaataagctttattcgaaaaatttctcaattcttctaaaaaaatcattaaaagtcgtcagctaaa

SEQ ID NO: 244563 - DNA, 483 bp, Unknown
  Bacterial polypeptide expressing nucleotide sequence isolated from the Sargasso Sea
taatcaaattagatcctgtctcaaaaaaatttattaattcaaatgatgttaatagatcaattagagcatacgaagttaaaaagtttacaaaaaaatcattatacaaatggtttaaagaaacaaagaccttttttgataagaatgagtttgtgatgacttatgtggattatccaagagacgcactaataaagaatataaaaaaaagaatagataggatgtttgatttaggagccataaaagaagttaagaagtttaatctcattaaaattaataaattgaatagtgttaatcatgtgattggtattaaagagatcaactcttatttaagtaaaaaagctgaattgagcgatattaaagaacagattttaataaaaactagacaatacgccaaaagacagagcacttggtctcgaggtcatatgagtaattggtacaaaattgatccaaaatcaaaaaatccattcaaaaaaattttaaaataat

SEQ ID NO: 244564 - DNA, 196 bp, Unknown
  Bacterial polypeptide expressing nucleotide sequence isolated from the Sargasso Sea
tttgaacagctcccaccccctggtgatcaccctgctcgggcccaccgccagcggcaagaccgccctggcgctggacatcgccgaacagctggatctaccggtgatcaacgtggattcgcgccagctctacaaggagatggatctgggcaccgccaagccgacggcggaacagcaagcacgggtaccgcaccatctg

SEQ ID NO: 244565 - DNA, 272 bp, Unknown
  Bacterial polypeptide expressing nucleotide sequence isolated from the Sargasso Sea
agaccttatgttaaaatcaggagctattaatgaggtaaagaaattcttaaagctaaaagtaagaaaagatcacacatcttgcaaagtcattggcattaatgaaattagagattttcttgaaaaaaaaactaattttactgaagtcaaggaaagaattactataaaaacaaggcaatacgccaaaagacaaagtacatgggccagaggccatatgatgaattggcataaaattaacccaaaagatataaaaaaatttttaaaaaaaatataat

SEQ ID NO: 244566 - DNA, 454 bp, Unknown
  Bacterial polypeptide expressing nucleotide sequence isolated from the Sargasso Sea
aatagaataaaaccatcagatgctcaaagatctatgagagcttatgaggtaaaaacatataccaaaaaatctatttacgaatggttcaataatacaaaatcaaattatcaacatgaggatttttataaaatttatatagattttcctaaaaatgaattgcttaatagaattcactctagagctcgagaaatgatcaaaaaaggagccgttatggaagtcaaaaaatttaatagtcttaaagttagaaatgataaaactgccagtaaagctattggaataagggaagttaatgaatatctccttaaaaaaattgaaattgatcaggttattgaaaaaatatcaataaagacaaggcaatatgccaaaagacaaagaacatgggcgagtggcaacatgcaaaattggaacaaaattattccaattgagttaaataaatttttaaaaaaaatttaga

SEQ ID NO: 244567 - DNA, 628 bp, Unknown
  Bacterial polypeptide expressing nucleotide sequence isolated from the Sargasso Sea
ctttattttaattctttagtgaacggtttagtaaaaattccaaatattccaataaaatttagaaataaaataagattaatgcaaaaaaaaaacggtcaaaaaaaattctataaaaaacttttaaaaattgatccaaagataaaaggtaagattaatagcaacgactctcaaagatctatcagagcttatgaaattaagtcttatagtaaaaaatcaatgtatgattggttagctcaaacaaaaccccactttaaggatagtgaatttttaaaattatatattagttttgatagaaaaaaattaattgaaaagattgaagaaagaaccaaaaaaatgattaaatcgggagcaataagagaagttaaaaaattcagagatttaaaatcctccaaacaatccagtattaacaaaattataggaattcaagaattgagcaaatttttagaaaaagagataaaaatagataaagctaaagaattgatagtcataagaactagacaatatgctaagagacaggccacatgggcaagaagtaagatgacaacatggataaaggtagatcctaacgattttcaatcttggtttaaaaaaaataaattacctcttaaacttgaccaattaatataaa

SEQ ID NO: 244568 - DNA, 193 bp, Unknown
  Bacterial polypeptide expressing nucleotide sequence isolated from the Sargasso Sea
atgaataaaaagaaagcgcttgtaatttttggtcctacagcaagcggaaaatcttcaaaagcaattcaagttgctaaaaaatataattctacaataattaacgccgatagtattcaagtatacaaagaattaagattaattacttcacgcccctcaattgaggacgagaaaaactttgatcataagctatatg

SEQ ID NO: 244569 - DNA, 760 bp, Unknown
  Bacterial polypeptide expressing nucleotide sequence isolated from the Sargasso Sea
gtccaagtttacaaagatctttctttattatctgctagaccaacaacatctgatatgcagggaattccacattttttgtatggttatgttaactctaatacaaattattctgttacagattggttgtttcaaataaaattaaaattaattgaaataaaaaaattacaaaaaataccaatcttagttggaggaacaggtctttatttaaatgctgttattaatggtttggttccaattcctgttatttcaaaaaaaaataaagaagcaaccttactcaaatttaatgaaattggtatagatgaatttactaaaatagttgtagaaattgatcctgcttattcccaaaaaaataatgataaacatagattgttaagggcatatagcatttatcttgaaactgggaaaaatatttcttattggcataagttacccagagaaaaaaatataaataaaaaaatttactcattcttaatcaatgcagataggcaatctctttatgaaaaatgtgataaaaggtttaatgatatgctctttaaaggaggtcttgacgaggttaactatttatataatcaaaatattgatagatctcttcctgtatctaaatctttaggtgttaaatggcttttgagttatttagataatcaaattacttatgaagatgctgttagattgagtattagagatacaagacgatatgtaaaaagacaaatcacatggtttaaacataattatattccatataaaactatattaatataat

SEQ ID NO: 244570 - DNA, 499 bp, Unknown
  Bacterial polypeptide expressing nucleotide sequence isolated from the Sargasso Sea
gatgtcaaaaaatataccaactataatcattactggccctacagcaagcggtaaaaccaaattatctttagagttggcaaaaaataataatggtgaaattataaatgctgacattatgcaaatgtatgaagggtttaatattttaaaagcaatgccatctacagaagaaaaatttgaaattaaacattatttatttggtgtcataaaaaaagagacaaaatttacggttgcagattggattaaacttactaaagaaaaaatatctgaaattcacgaaaaaggtaaagttcctattgtagttggtggttcgggcatgtacttaaatgcagctataaatggtttgtctgaaattcctgatattaacaaagtttatcgtcataaagccgaacatttatataagattaatggattcgattttatattaaaaaaactaatcaaaatcgataaagattttaaaaatgaaaaaaatgatagacaaagattaattagagcatatgaa

SEQ ID NO: 244571 - DNA, 739 bp, Unknown
  Bacterial polypeptide expressing nucleotide sequence isolated from the Sargasso Sea
gttgacgcagccggaacctttggtgatcacgttgctggggcccaccgccagcggcaaaacagccctgtcgctggagatcgccgaacggctcaacctgccggtgatcaatgtggattccaggcagctgtaccgggagatgaccgtgggcaccgccaaaccgacggcggagcaacaggcgcgggtgccacatcatctgctggatctacgcaaccccgatcagccgatcaccctgcaggaatttcaggcggaggccgagccctgcatccagcgcgaactgcaaagccggggcatggcactactggtgggcggcagtggcttgtatctcaaggccctcaccagtggcctcaaaccaccggcagtgccaccgcaagcgcagctgcgtgcgcaactgagccaattgggtcaagcaatctgccatccgctgctccagcaggccgatccaacggccggcgccaggatcgcctccgctgatgccgttcgcacccaacgggctctggaggtgctgtatgccaccgggcgaccgatgagcagccaggccactgcagcaccaccgccgtggcgggtgctggaactggggctggatcctgccaacctgcgccagcgcattcagcagcgcaccgaccagctctacagcgacgggttggtggaggagacccggcagctggagaagcgctacggcgctgatctgccattgctgcagaccattggctacggcgaggccctgcagctcctgcaagga

SEQ ID NO: 244572 - DNA, 388 bp, Unknown
  Bacterial polypeptide expressing nucleotide sequence isolated from the Sargasso Sea
gaaatcaatttttgaatggtataagaaaacaaaaccatcttttaaaaaggatcaatttattaaaatttatattgattatccaagagatgaactagtcactaaaatttctaaaagagtagatcaaatgatgaaaaatggagctattcaagaagttaaggattttttaaagcttaatttgaagagtgatagcaacatcttcaaagttataggaataagagagattaaagattttattgataaaaaaacttctatgcatgatttaaaactaaatattgttataaaaactagacaatacgctaaaagacagagaacttggtctagaggtcaaatgagtgattggcaaaactttgatcccgaggctctttcaaaatttataaaaaaattataa

SEQ ID NO: 244573 - DNA, 762 bp, Unknown
  Bacterial polypeptide expressing nucleotide sequence isolated from the Sargasso Sea
tatggaaacgaataatagaataccatcaaaattaattgccatcgttggcccaactgggattggtaaaacagccttaagcgagcagatactaaaatatattgatgcagaagttgttagtatagatagtagacagatttatcgaaatatgaatataggtactgcaaagccaaaaccacatctattaaaaacaatcccacatcaccttataaacatagttgatcccatggatgattttagcattacagatttccttcaatcggctaaagcttcgatcgaggatattatttcaagagggaaaatacctttgcttgtagggggcactggacaatacttttggagtttgattgaaaactggactataccgtcagttcctcctaacccagaactccgtaaaaaattcgaacaaattgcgaataaatatggtgcagaacacctttttgaagaacttaaatctatagatgtagaagctacaaaaattattgactctaaaaatattaggagagtaattcgagctttagaggtaggtattgctggtgataaaaaatggtcggaactgcgtagtaaagatcccgttttatacaatccatttatcataggtttaaccaaagatcgtacaattctgtatagagatgtagataatagaatagatgaaatgctaaaagaaggatggattgaagaagtaaggctattaataaatagtaatattgatttaagttattcctctatgagtagccttggctatgacgaaatatataggtatat

SEQ ID NO: 244574 - DNA, 593 bp, Unknown
  Bacterial polypeptide expressing nucleotide sequence isolated from the Sargasso Sea
attgaaagattcttctcataaccatttaattgtaattgcagggcctactgcttctggaaaaacttctttggccattgaattggctttgtatttaaaatgtgaaattatatctgcagacagcagacagttttacagagaaatttctattggaactgcaaaaccttctgaaaatgaactaagtcaagtaaaacatcactttattaataataaaaatttagaagaactgtattctgctggtgaatttgaaaaagacgttattaatttattacccaacctatttaaacatcaaaatatagttatcatgacaggaggttctggcatgtacattgatgcggtttgtaaaggatttgacgaacttccaagaagtataagcataagagaagaacttaataaagcttatcgagataaaggaatttcttttcttcaagaggaacttaaattaaaagaccccgatcattttataaatgttgataaaaaaaaccctcaaagacttataagagcattggaaatttgcaggataactaatcaaccttactcttcattactaaacaaaaaaaacaaaccaagagattttgaaattcacaaaattgctt

SEQ ID NO: 244575 - DNA, 376 bp, Unknown
  Bacterial polypeptide expressing nucleotide sequence isolated from the Sargasso Sea
ttggaaaaaacacttactattttgggacccactgcaagtgggaaaactactttagcaattgaattggctaaagttttaaatggggagatcgttggtcttgattctagacaaatttataaaggaatgtcgatcgggacggcccagccaacggaagctgaaatggcaggtgttccacattatcttatttccatccgaagaccctcagaatctatttctgctggagagtacgtccaactcgtagaggaaaaaataatgcaaataaaaaataaaggtaaaagaccaataatttgtggcggctctggcttgtattttcgagctttgaatgaaggaattttcaagggaagtactaccgatacagtcattagaaaaaaataga

SEQ ID NO: 244576 - DNA, 516 bp, Unknown
  Bacterial polypeptide expressing nucleotide sequence isolated from the Sargasso Sea
aaaaaaaacttggacaaaagaagttttacgaaaaactattaaaattagatccatcctcaagaggaaaaataaaccctacggatactcaaaggtccatcagggcttttgaagttaaaaagtttacaaaaaaatctataaccgaatggtttaaaaatacaaaatcacaattcgtagaaaatgatttttttaaagtttatatcgatttccctagacaagagttaattgagcgcatcaatataagaacaagtgagatgatagaaaatggagcaataaaagaggtcaaaaattttataaagttaagagttagaaaagataaaagtgccaataaggccattggagttaatgaaattacagaatatttaaaaaaacaaaaagatttgaatgatactagagataaaatagccataaaaacaagacaatacgctaaaagacaaagtacttgggctagaggcaacatgatgagctggataaagttaaagccaaaagacataaatgaatttttaaaaaaaatttaaa

SEQ ID NO: 244577 - DNA, 816 bp, Unknown
  Bacterial polypeptide expressing nucleotide sequence isolated from the Sargasso Sea
atagtatgcaaatttatagagaattaaaagttataactgctagaccaactaatatagatattaaattaataaaacatcatctctatggttatgtttcaggaagtgaaagatataatgtagaaaaatggtgcaatgatgcaaaaaatattattgaatcattgtttaaaaataatgtaactccaatatttgtaggtggtacaggattatatatagatacattaattaatgggatcacttcaattccaagtatacctgagtctataaaaaaagagtcaaacaatttatttgataaaattggtttagataacttttttgaattaataaaagaaattgatattaacgctgttaataatatttctaagaatgacactcaaagattaaaacgtatctgggaagtttataaatttactggaaaaaaatttagcttatggaaagataataaaaataaaaaatttttagataatatagagtataaaattattttatttttacctgacagaactaaaaattataatcgtgtaaataaaagagttgagtcaatgatagaaaatggtgcagtgcatgagatagaaaatttattaaaatataactatagttctaaattaccaattatgagagctcatggtgttccagaaatatcatcttatttgcaaaaaaaagttacattagaagaatgcattaataatattcaacttgtaactagacattacgtaaaaaggcaaaatacatggtggaaatcatcgaatttacaattttataaaaaattcaatgaatttcctgatgaaatagacataaattcaaataatttagtctaat

SEQ ID NO: 244578 - DNA, 364 bp, Unknown
  Bacterial polypeptide expressing nucleotide sequence isolated from the Sargasso Sea
gatgttacactggctcggaattcgttgggaccgaacggctttgaacgtacggatagagaaacgaattcacgaaatggtggagagggggtggctcagggaggtgaaagaactccttgctgccggctatggtccccagctaaagagcatgtcggcacttggctatcgttacatggcccagcatctcgagggttcattaagcttgacgcaggcgatcgagaagacgtttattgctacccgcaggtatgcaaagcgtcagatgacttggtttgcacggatgcctgccgtaacctggtttgatggacctgtcagtctagagttagtcgaaggttggcttaacgaacaattcggtacgttggagagttag

SEQ ID NO: 244579 - DNA, 172 bp, Unknown
  Bacterial polypeptide expressing nucleotide sequence isolated from the Sargasso Sea
atggacctaaagtccaaaataattttaatttcaggaccaacagcaagcggcaaatcagattttgcattaaaattagcaaaaaaaattaatggtgaaataattaatgctgatagcatgcaaaattataaagaactcaatattttaacagctagacctcaaaaagataagtaaa

SEQ ID NO: 244580 - DNA, 337 bp, Unknown
  Bacterial polypeptide expressing nucleotide sequence isolated from the Sargasso Sea
tatattgattatccaagacaagaattaatcaatagaattaatttaagggttgagaccatgtttcaagaaggagcgattgaagaagttaagagatataacaaattaggagtaaaaaaagaaaatagctcaaataaggtaattggaattaaagaaatttcaaattatttaaataaacagtgcactcttgttcaggccaaggagttaattgccattaaaacaaggcaatatgcgaaaaggcagacaacatggtcaagaggacatatgcagtcttggaaaaagattaatcctaaaaatttaacattagtattaaaaaaagttaaaataattgcgtcttaaa

SEQ ID NO: 244581 - DNA, 382 bp, Unknown
  Bacterial polypeptide expressing nucleotide sequence isolated from the Sargasso Sea
atttttgaatggtataagaaaacaaaaccatcttttaaaaaggagcaatttataaaaatctatgttgattatcctaaagatgaattaattaataaaatttccaaaagagtagaccaaatgataaaagatggagctattaacgaagttaaggatattttaaagcttaatttgaagagtgatagcaacatatttaaagttataggaataagagagatcaaagaatttattgataaaaaaatttctatgcatgatttaaaactaaatattgtcataaaaactagacaatacgctaaaagacagcgaacttggtctagaggtcaaatgagtgattggcaaaaatttgatcctgaggctctttcaaaatttataaaaaaattataaa

SEQ ID NO: 244582 - DNA, 282 bp, Unknown
  Bacterial polypeptide expressing nucleotide sequence isolated from the Sargasso Sea
aagagatgattgatcaaggctttattgaggaagtagaaggcatattgaagaagaagcaaatggattcttctaaatcttccatgaagagtgttggttataaacaagtctcggattatttagaaggaaatttatctctagatgaaatggtgtttagagcagtgacagctacaagacaacttgctaaaagacaaatgacatggcttaggagttggaatggagtaatatggcttgaagaagaatcagataataatttagacatagttttggataccattaattaat

SEQ ID NO: 244583 - DNA, 319 bp, Unknown
  Bacterial polypeptide expressing nucleotide sequence isolated from the Sargasso Sea
cattatgatttgttacatcctagaattttaaaaagaattaaatgtatgattaatgatggaatgacaaatgaagttgaaaaaataattaatagtaaaataaatatttctcatattgattatataggctttaaagaaatttcttctttcataaacaaagaaatctcaattaatgaagctattgaaaatatttttgtgaggacaagacaatacgctaaaagacaaaaaaaatggtttgatgtaaataaatatgatatttcatttgatttgcatgagatttctaaaaatgatatagttgataaattgattcaaataaactaat

SEQ ID NO: 244584 - DNA, 442 bp, Unknown
  Bacterial polypeptide expressing nucleotide sequence isolated from the Sargasso Sea
tcctacagacactcaaagatctatcagagcctatgaagtaaaaaagtttacaaaaaaatctctaaatgaatggtttaaaaacacaaaatcaaactttgtagaagatgatttttttaaagtttatattgattaccccagacaagaattaattgagcgcatcaatctaagaaccacagagatgatagaaaatggagcaattaaagaagtaagaggtttgataaagctgagggttaaaaaagataaaagcgccaacaaagccattggagttagtgaaattagagaatatataaaaaaacaaaaagatttggatgatactaaagaaaaaatagccataaaaactagacaatacgccaaaagacaaagtacttgggctagaggcaatatgattaactggacgaaactaaagccacaagacataaataattttttgaaaaaaatttaa

SEQ ID NO: 244585 - DNA, 391 bp, Unknown
  Bacterial polypeptide expressing nucleotide sequence isolated from the Sargasso Sea
gaaatcgatagttgattggttcaaaagaactaaaatttttttttcgtctgaagagtttattaaattttatatcgactacccaagagacgaattactaaaaagaatttattcaagggtagaatatatgtttaaaaatggagtaattgaagaagttagaagatttaataaaattggagcaaaaagggaaaatagttcaaataaagttattggaattacagaaatcacaaatttactgaacaatcagtgcactcttcaagaggcaaaagacttaattgtcattaaaacaaggcaatatgcaaaaagacaggcgacatgggcaagaggtcaaatgcagtcctgggaaaaaatcaatcctaaaaacctgaacttaattttaaaaaaattaaaataa

SEQ ID NO: 244586 - DNA, 106 bp, Unknown
  Bacterial polypeptide expressing nucleotide sequence isolated from the Sargasso Sea
atgagtgccttgccccccgccattttcctgatgggccccacggccgccggcaagaccgacctggccatcgaaaagaccaaggtgctgccctgtgagttgatcagcg

SEQ ID NO: 244587 - DNA, 553 bp, Unknown
  Bacterial polypeptide expressing nucleotide sequence isolated from the Sargasso Sea
aatgagaagaataattaccataattggtccaacggctagtggaaaaacttcactggcaattagactatcaaaacagttaaatgcagaagttattggcttggattctaggcagatatataaaggtatgtccataggaacagcccagccaacaatcgaggaaatggatggggtcaaacatcatttgattggtttccaagaaccatcagaacccatatctgcaggagaatattcaaaacttcttattgatagagtaaaagctattcgatctgatagtaaggttcctatcatttgtggaggagcagggctttattatagggcaatatcaaagggaatattcaaaggtagtacatccgatctttcagttaggcatcgattagaagagtcgtatgataatgatccaatcaaattattagaaaagctccattttatcgaccccgaatatgcagagcttgtacacttgaacaataaaaaacgtcttgttagagcacttgaaatatttgaattaactggtaaaaccccaagtgagaattttattgaccaaatatctaatcca

SEQ ID NO: 244588 - DNA, 235 bp, Unknown
  Bacterial polypeptide expressing nucleotide sequence isolated from the Sargasso Sea
aatgaaagtagccaaagatttgtcttcaaacaaaataataggtattagcgaaataaaggattatttaagtggtaaaataactttaattaaggcaaaagagctaattgctcaaaaaacaagacaatatgcaaaaaggcaatttacttgggctcgggggcacatgaaatcatgggaaatgatttattcttcaaatattaatgatttgtttaaaaaaaccattaataaaatatcctaa

SEQ ID NO: 244589 - DNA, 476 bp, Unknown
  Bacterial polypeptide expressing nucleotide sequence isolated from the Sargasso Sea
aaaaattgatcctatttatgtgtctcagataaaacctacagacatacaaagatctataaggggatatgaagttaaattttacactaaaaaatcacttatagaatggtttaatgaaacaaaacccatttttgataaaaattcttttatgaaattgtatataaattatccgagaaaagaattaattgagcgtatctctaaaagaagtgagcaaatggtaaaagaaggagtagtaaaagaggtaaaaaaatttcttaccattaaagttaaggaagatataaactctaataaagtaattggcgttagtgagatcaatgattatcttgataaaataataggtttagagactttaaaagagagaatttcaataaaaacaagacaatacgctaagagacagagtacttgggctaggggtcagatgtcgaactggcaaaatttagagccacaggatcttaaaatttttttaaaaaaaatataat

SEQ ID NO: 244590 - DNA, 610 bp, Unknown
  Bacterial polypeptide expressing nucleotide sequence isolated from the Sargasso Sea
atattttaatacaattactaaaggaattagtaaaattccaaacattgatgtcaaaacaagaaataaagtgagaaagttattcaataaattaggtcacaaagaattttataatcaacttttaaaaattgatccaaaagttaataacaaaatactcccttctgactctcagagaattcaaagagcatatgaaattaagcttaaaactaaaaaatctatctttgactggatagcaaacactaaatcagattttttagattttaatattaagaagatttttttagatattccaagaaatgaattacttcataagatatcagaaaggactagtaaaatgtttaaaaataattgtattaatgaagtaaaaaaatttaattctctaaaaattaacaaaagtctctcagtaaataaattaataggcgtcaacgaaatcaacaaatatttattaaaaaccttaacgttagaacagtgcaaagaacttattaatataaagacacggcaatacgccaaaagacaaaatacttgggctagaggccatatgaagaattggaacaagatttattcgaaaaatttctcaaatcttttaaaaaaatcattaaaagttgtaacctaa

SEQ ID NO: 244591 - DNA, 541 bp, Unknown
  Bacterial polypeptide expressing nucleotide sequence isolated from the Sargasso Sea
tagaaatctttttaagaaattgggttataaagctttttatgaaaaacttttagatctagatccaaaagttaaaaacaagatactacctagcgatgctcaaagatctcagagagcttatgaagtaattttaaatacaaaaaaatcattatttgattggatagttaatactaaatcagattttattaattttgaagtttctaaaatctatcttgatataccaagagatgaattattaaaaaaaatttatttaagaacagaattaatgtttaagaataaatgtgtcgaagaagtaagaaaatttaattcattacaattaaataactctctttctgctaataaattgattggtgttcaggaaataaatggttatttgagggaagagtcatcattagatcaatgcaaagagcgtataaatattaaaacaaggcaatatgctaaaagacaaaatacttgggctagagggcatatgaagaactggaacaagctttattctaaagactttgctatacttttaaaaaaaactttaaaagttataagctaa

SEQ ID NO: 244592 - DNA, 170 bp, Unknown
  Bacterial polypeptide expressing nucleotide sequence isolated from the Sargasso Sea
gatggacattcagtccaaaataattttaatttcaggccctacagcatcgggaaaaatcagttttgcagtttacctggcaaaaaaatttaaaggagaaatttgtaatgcagatagtatgcaagtttataaagaaataaattatttaaactgcagaacaaatttaaagcaaa

SEQ ID NO: 244593 - DNA, 235 bp, Unknown
  Bacterial polypeptide expressing nucleotide sequence isolated from the Sargasso Sea
taaagattttttaaaactaaaaataagagaggacataacgtccagtaaagtaattggcgtaaaagagattaaagaatttattcaaaacaatataaacttaaatgaactaaatgagaaaatttctataaaaactagacaatacgccaaaaggcagagtacatgggctaggggacatatgagtgattggcaaaaaattaaaccaaatgaactcaataaatttttaaaaaaattataa

SEQ ID NO: 244594 - DNA, 401 bp, Unknown
  Bacterial polypeptide expressing nucleotide sequence isolated from the Sargasso Sea
gatgtcctctcaaccgctggtgatcgtgcttctggggcccacagccagcggcaagacggagcttggcctggagatcgctgaacgtctcgatctgcctgtgcacaacgtggattcgcggcagctgtacacgggcatggacgtgggaacggccaagccgacagcggcccaacaggccagggttgtgcaccatctgctggatctgcgcagtccggaccaaccgatcaccctgcaggagttccagcaggaagcagaggcgtcgatcgcagcgcaactgaaccgtcggggggtggctttgctggtgggcggcagcgggctgtatctgaaagccatcaccggagggttacgaccgccggctgtgccgccgcaaccagcgctgcgggagcagttagcccgacttggcc

SEQ ID NO: 244595 - DNA, 522 bp, Unknown
  Bacterial polypeptide expressing nucleotide sequence isolated from the Sargasso Sea
gatggaaataaaaaaagataaaataattacaataattgggccaactgcgagtggtaagactcaattagccgttaaaatttctaaagaattagatgctgaagtaattagtcttgattcaagacagatatatagaggcatggagattggtaccgcgcagccaacagaagatgaaatggaaaatataccacatcatttaatagggttttgtgatccaagtgaaccaatttctgcaggtgcttatgcaaagctagtttttgaaaaagttcatatgattcaaaataatggaaaattgcctattatttgcggtggagcaggtttgtattacaaagcaataaagaaaggcatttttaagggcagtagaacagatgatagcataagaactgaactagagagattatatgataaaaatccacattccttaatgagagatttaattagtattgatcctgactatgctaatattgtccatattaacaataaaagacgacttgttagagctttagaaatttttagaataactgg

SEQ ID NO: 244596 - DNA, 679 bp, Unknown
  Bacterial polypeptide expressing nucleotide sequence isolated from the Sargasso Sea
gttgagatggctgttcacaatggccaaatacctatttttgttgggggtactggcttgtatatcaaagcattgctggatggtttggctgcgatcccccctgttggagaacaggcgcgtaaacaggcgacggaattgtatcattggctagggggcgagaaatttcggagtgagctggcaaagagggacccagaaagtgcagagacaatcaaagttggtgacaaacaaagaatgatccgagcgtgggaagttgcggtgggaacaggtactccaatttctcagtggcaccggaagaagaagcagggagcccttgcaggtccttcgttcgttgtcaaaatcattcctgatcgtgcgtggctttacgccgcgtgtgaacgacgatttgaccagatgctggggaccggcgtattggatgaggtggctgctgtccaagccctagagttaccagccgacctgcccgctatgaatgttattggattttgcgctctttctgagtatttagtagggcactcttcacttgcggtgtgcaaatcaacagtctgccaggctaccagaaattttgctaagcgacagtatacttggtttgggcgtcagctgttggcgcatagggaatacatggacgttcacagtgctaaaacggctctcaaggacccagttgaggagtttttattgactgcatagg

SEQ ID NO: 244597 - DNA, 298 bp, Unknown
  Bacterial polypeptide expressing nucleotide sequence isolated from the Sargasso Sea
actggagcctggaataaactacgcgaccaaaaaaattaaacaaataaataaaaaaggaaaagttgcgctagttgtcggtggaactggcctttattttaaagcactgactgatggttttactcaaatacctaacattccggaaaaatataaaaaattaaagattgaaaaaaattttgtattaaaaaatccaaatatttttaaaggtatcttcttgaacgatacgcaaagggttcaaagagctttttcggtatataaatttacaaaaaaacccctttggttatggcaaaaagaaaataaa

SEQ ID NO: 244598 - DNA, 190 bp, Unknown
  Bacterial polypeptide expressing nucleotide sequence isolated from the Sargasso Sea
aagcttatcgggataagtgaaattgaagattttattcaaaaaaaaattcaaatttatgaagttatcgaaaaaatatcaataaagactaggcaatatgctaaaagacagactacttgggcaagaggaaatatgaaggattggaacaaaataaatccaaacaacctgaatcaatttttaaaaaagatttaga

SEQ ID NO: 244599 - DNA, 394 bp, Unknown
  Bacterial polypeptide expressing nucleotide sequence isolated from the Sargasso Sea
tttgtttgattggtataatgaaacatattctgattttactcaggacagtttcataaagttaattatcgattatcctagagataagttaattgaaagaatttccttaaggacaaatgaaattttgagagatggggcaattaaagaggctgagaggttttataaattaagagtgaagaaagatttatcgtctaataaagtcattggtttaagtgagattaaagaatatcttgataaaagaatagatctctgtgaactaaaagaaaaaatatcaataaaaacaaggcaatatgccaagagacaatctacttgggcaagaggccagatgtctgattggcaaaaaataaaatttaatagacttgaaacatttttaaaaaaatttcctaaatctacatag

SEQ ID NO: 244600 - DNA, 925 bp, Unknown
  Bacterial polypeptide expressing nucleotide sequence isolated from the Sargasso Sea
tctgttaggtccactgcatctggtaaaactgaatgggctattaactggcaaagccaattcgaagactttgaaatcatcagcgttgactctgtcatggtttataaagaatgcaatgttggatctgcaaaaccatctaagtttattttaaaaaaacatcctcattatttggttaactatgtttcgctcaattgcatattttctgttgcagatttttatcaagcagccaataaattaatcgaaaatattcattctcaaaacaagattccattaatggtaggggggagcatgatgtattttaaccttttaaaaaatgggctgagtgctttgccttctgcaaataaatcgctacggaaggatttagagaccaggatgcttgaaaagggaatagaagttctttacgcagatctaaaaaagctagatccacaagctgctcaaactattaaaccaaaagattctcagcgagttataagagcgattgaagttataacctcaaccggaatgaccataaatgacaatttgttatccataaagccgagtaggttaaaagaaaaatacaaactaatagagtttggaattttccctgagaaaagatctgagcttcatgaaagaatagaagctaggcaaggtgaattagttggagaaagattgcttgaagaaataagtcatattaaaagtaacctaaatatttctgctgctcatcctgccatgaaagcgataaattacagacagggattaaatgtaattgagggaaagctcgaaaagtctaaactttttgaaaagtctctttttgctacacgccaacttgctaaaagacaatgtacatggatgcgaggatgggaaaatttaagaaattttgatttgcatcaatgggcagatgctaccgaggagttaaaaaaccaacttaatttacttgaaatcatttaat

SEQ ID NO: 244601 - DNA, 193 bp, Unknown
  Bacterial polypeptide expressing nucleotide sequence isolated from the Sargasso Sea
taacaaagtcataggcattaaagagattaaagattttattgataaaaaaacatcattgaaagaaatgaaactaaatattgtaataaaaacaagacaatacgctaaaagacagagaacttggtacagagggcagatgaatgattggcaaaaaatagatcccaaagggctcataagattaataaaaaaattataa

SEQ ID NO: 244602 - DNA, 355 bp, Unknown
  Bacterial polypeptide expressing nucleotide sequence isolated from the Sargasso Sea
tatgaaattaagaaaatctttattgatatcccaagagaagaattgttaaaaaagatttctaaaagaacagaattaatgtttaaaaataaatgcatagaagaagtaaaaaagtttaattcacttagagtaaataaagtcctttcagccaataaattaattggggttcaagagataaacgcctttttaaaaggatcgatttcaatggatcaatgtaaagaacttataaatatcaaaaccaggcaatatgctaagagacaaaatacttgggccagaggtcacatgaagaactggaacaagctttattctaaagatttttctgtacttttaaaaaaaactttaaaagtcatcagctaaa

SEQ ID NO: 244603 - DNA, 634 bp, Unknown
  Bacterial polypeptide expressing nucleotide sequence isolated from the Sargasso Sea
atgctaataaataatcctttagcaataattggtcctactgcaagtggtaaatctataatagcagttgaattggctaaaagaataaatggcgaaataattggacttgattcaagacagatatataaaaatatgggtattgggactgctcagccaacaattgttgagcaaaatggaatagcacatcatttaattggaattaaatcacccaaagaggcaattagtgcaggtgcctattcaaaattagtatataatttaattgaggatattttttcaagaaaccatgttcccatattgtgtggtggctcaggattatattatagagctataactcgaggtatttttaaagagagtaaaacagatttaaagattagagaagaacttgaaaatgagtatgataaagatggccccaaaagtcttatggatcaattagtttctgttgaccctgattatgcaatcaatgttcatccaaataataaaaagaggcttataagagcattggaaatatatcgtagtactggaaaaccaccaagtcaacattataatgaacaattaaataactcaataaataaaatgctaaatctctttacaatttatctggaatgggaaaaaaatgaattaaataataggattcaaa

SEQ ID NO: 244604 - DNA, 523 bp, Unknown
  Bacterial polypeptide expressing nucleotide sequence isolated from the Sargasso Sea
gatggaaaatcattattacaaaaaaaatcctactatttttgaaggaatagatagaaatgatatacagagagtttcaagggcaatttcagtctatgaaggaacaggtttaactcttaaagagtggcagaacaaagataataaaaaatattttaaagcaaaagattttgttagattatgtctcacaccgccaaaaaatgatttagagaaaaaaataaaaaatagatttgatctaatgttaaaaacaggtgctttgaatgaagttcaaaaatacaagaaaacatttgttgaaccagctacatatatttctgctaattcaattataggaatttacgaaataggtttataccagcaaaaaaagattggtatcaaagatctaaaggacagagtgctggttagaacccgtcaatatgctaaaagacaatatacctggcaaagaggccagatgaaggattggaaacaattcaatgacactaattatctagatttaagaaaaaaaattctaagttatttatctaaaacttga

SEQ ID NO: 244605 - DNA, 498 bp, Unknown
  Bacterial polypeptide expressing nucleotide sequence isolated from the Sargasso Sea
aaaaaaaattttatgaaaagcttttaaaaattgatcctaaggttaaaggaaaaatcaatagtaacgatactcaaagatctattagagcctacgaaattaagtcttatagcaagaaatctatgtatgattggttagctcaaacaaagtcaaattttaagcaaaacgaatttttaaaactatatataaattttgaaagaaaagaactaattaagagaattgaaaagagaactataaaaatgatcaagttaggtgcggtcaaagaagttaaaaaatttaaaactttaaaagtttctgatcagtcaagtgttaataaagttataggaattaaagaattaagtaaatttttagaaaaaaaaataaaaatagatgaagctaaagaattgatagctataaaaactagacaatatgctaagaggcaagctacatgggcaagaagtaaaatgacaacatggaataggataaaccctaaagatttacaactttggataaaaaattagt

SEQ ID NO: 244606 - DNA, 652 bp, Unknown
  Bacterial polypeptide expressing nucleotide sequence isolated from the Sargasso Sea
aaagaaaaaaaaattccagtaattgttgccggtactggtttatattttagcacaatcacaaaaggtattagtaaaattccagacattgataaaaaaacaagaaacaaagtgagaaatctttataaaaaaattggttcaattaaattttataatcagctaacaaaacttgatccaaaaataattgataaattacttcctaccgatacgcaaagagttcaaagggcatacgaagtaaaattaaaaactaaaaaatcactttttgattggtttgcaaatactaaatcagattttttagattttgatataagaaaaatatttattgatatacccagggaggagctactcaaaaaaatttctaaaagaactgaacaaatgtttaaaaataattgtataaaagaagtaaaaagtttcaattctttaaaaataaacaaaagtctttctgcaaataaattgataggggtcagagagattaacgattatttaaaaggctccattaatattatgcagtgcaaggaatttatcaatataaagacaagacaatatgcaaagagacaaaatacatgggctagaggccatatgaagaattggaacaagatttattcgaaaaatttctcaaatcttttaaaaaagtcattaaaagttgtaagctaaa

SEQ ID NO: 244607 - DNA, 291 bp, Unknown
  Bacterial polypeptide expressing nucleotide sequence isolated from the Sargasso Sea
catgggtccaacaggagcagggaaaaccgacttagcaatagagttatacaagaacttagatatcaatattataagtgttgattctgttcagatttataaacatttaaatatagggagcggaaaaccctcatcaaatattcttgagaaatatcctcatgaattaattgatatcttaaaaccaaatgaaatttattccacttctcaatttcaagatgatgcgatcgactctattagaaatgcatttcaaaccaagagaacccctttactcgttggtggaacaatgatgtattt

SEQ ID NO: 244608 - DNA, 521 bp, Unknown
  Bacterial polypeptide expressing nucleotide sequence isolated from the Sargasso Sea
tatggtatttaatccagttaagaaaaaattttctgcaggacgttggcttaacgatgttgttaaaaaaatcgaaagaatttggaagaaagaaaaaaccccaattgttgttggtggaacagggttgtattttaaagctttaacagatggattagtaaagataccaaatatacccaataatattagaacaaaaataagaaaattacatcaaagagtagggcaaaagaagtttttttctcaacttataaaaatagaccctttagctaaaaaatttgtttctccaaccgataaacaaagatctatgagggcttacgaagtaaaaaaatttacaaaaaaatctttatatgattttacaaaaaaaacgaaaccgtattttagaaaaaatagatttataaaaatatttattgatactcccaaggagctcttaagtaaaagaatagaaaaaagagtagaaaatatgtttgaagatggagttattgatgaagtaaaaaaattttacaccctaggagttcacaaagatttgt

SEQ ID NO: 244609 - DNA, 436 bp, Unknown
  Bacterial polypeptide expressing nucleotide sequence isolated from the Sargasso Sea
gtttataatgctacaggaatcactttaaagaaatggcaaaataaaaaaaataaaaaatattttaatgaaaatgcatttataaaaatttgtcttactcctcctaaaccagagttagaaaaaaaaattaaaaaaagatttctggacatgttgaacgatggcgcaatagaagaagccaaaaaatatagaaatttaaatttatctttacatacgttgtatacatcaaattccataatagggcttaaagagatcgaattatttttggctaaaaaaatttcaatgaacgagttaaaagagaaagtacttataaaaacaaggcaatacgccaaaagacaatttacttggcaaagaggccagatgaagctatggaagagattttctgatataaattatcttgatttacgaaacaaaattataagctacttatctaaaacttgac

SEQ ID NO: 244610 - DNA, 708 bp, Unknown
  Bacterial polypeptide expressing nucleotide sequence isolated from the Sargasso Sea
aatgggaattaatcaaaaaattgttgtagtagcaggtccaacaagtagtggaaaaagtgaagtggcaattagtttggctaaggagtttaatggtgaactgatttgttctgattctatgcagatttttcgaaaaatggatgtgggtactgccaaaccttctttgcaggatcaggatttaattccacatcatcagcttgacttaattaatccagatgaaaattactctgcaggacagtatgcaagggatacttcaaaaattatcaagaatattcaagagcgaggacgtttgccaatacttgtaggaggtactggcttatattacaggtcacttatgtatggaatcagcaaaataccgccagttcctgagagtattcgtaaggaaattgaaggttggcagcaaaaaaagggcacaaaatattgtttcaagctgctgcagaaaaaagatcctgaatatgcagattttattcatccaaatgatacttcgaggattttacgcagccttgaagttgtgctttcgactggcaagtcattttattcatatcgattggaacagccatttggtgaagcaatttatcaatttcgtgcagttgcgcttaattgggatcgaagtgaactttatcaaagaattaataaacgtaccctcagtatgcttggttcaggatggcttgcagaagttgaaatgcttttgaacaactattcaccagaact

SEQ ID NO: 244611 - DNA, 233 bp, Unknown
  Bacterial polypeptide expressing nucleotide sequence isolated from the Sargasso Sea
gaattttttaaatttaaaaataaaaaaagataaaacctccaataaagtcattggtattggagaaattagagattttcttctaaaaaaaactactttaattgaagtaaaggaaagaatttcaataaaaactagacaatatgccaaaagacaaagcacatgggccagaggccacatgttgaattggcatagagtgaaaccaaaagatctcaatatttttttaaaaaaattataaa

SEQ ID NO: 244612 - DNA, 598 bp, Unknown
  Bacterial polypeptide expressing nucleotide sequence isolated from the Sargasso Sea
atggaagcagttcctgcaattattggtccaacagctagcggaaaaactactctcgcaattcacttagcaaaaaaaattaatggtgaaataataggtctggactcgcgtcaaatctataaagatatccctattggcacagctcaacctaatccttctgaaaaaaagactattaaacaccacctgattggagtgaagcctataaaggaatcaataaatgctggtgagtacgcaaagttagtagtgagatgtattgaaaaaataaaattaaaaaataaaattccaattatttgcggtggatctggtctttattttagagcaatctccaaaggtatttttgaaagtagccgctcagaattagatgttagaaaaaagctcgaattaaaatatgaaaatgaaggcggagtaagaatgctagatcgtttaaaagaattagactatgaatactcaaaacatatacatgctaataacaagaaaagacttgttcgagccttggaaatatttgaaacgacaggaaaaacgccatcggttcattttgctgagcaaaagaagaattatgctccagtcccaaaactcttttctatttatttaaaatgggata

SEQ ID NO: 244613 - DNA, 694 bp, Unknown
  Bacterial polypeptide expressing nucleotide sequence isolated from the Sargasso Sea
atggacaaatacctcatcctgattgcaggccctactgcagttggaaaaacgcaactttcactttctattgccgaacaatacaaaacagatattatatcatgtgattctagacaattttataaagaaatgtgcatcggaactgcagtccctaatgctgatgaattatcgaaaattaaacaccattttattcaaaatttaagcattgaagacaactattcaataggacaatttgagcgggacgcgcttgcaaaaattgaagcccttcacaaaaacaacaatatgatcgtgatggttggaggctctgggatgtacatcgatgctgtttgcaagggtctagatgatttccctccagtacctgattcaattcgtgaggaattgaacctacgtcatcaaaacgaaggcttagatgcattaaaaaaagaacttatgaagcttgacccagactattatgaactggcagactcatcaaatcctcatagaataatacgcgccatagaaatctgtatggtttcgggcaaacccttttcatcatttcgtaaacaacaggccaaaaagagaaattttaaaacagtaaaaatcatcctaaatagagatagagaagaattgtattctcgtatcaacaaaagagtagataggatgattaaagaaggtttgttagaagaagttaaaaacctttacaattataaagattata

SEQ ID NO: 244614 - DNA, 595 bp, Unknown
  Bacterial polypeptide expressing nucleotide sequence isolated from the Sargasso Sea
tttaaatcgatcacagaaggactagttgaaatgccaaatattcctttaagttttagaaataaagtaagactattacaaaaaagactaggtcaaaaaaaattttatcataatcttgtaaaaattgatcctttaataataaatcaaatcaatccaaacgatgtgcaaagaaccataagagcgtttgaaataaaaaagtttacaaaaaaatcaattactcaatggttcaaaaaaacaaaaactttattcgatccgactagctttataaaaatatatatagatttttccagagaagaactaattcatagaattaaaaaaagagtagatcaaatgtttaaagatggagtaattcttgaagttaaaaaatttaataatttaaaagttaaaaaagataatagctctaagaaaattattgggattgaagaaattagcatgttattaaaaggagaaattaacttaattgaagcaaaagaaagaattttcataaaaactaggcaatatgccaaaagacaaactacatgggctagagggcaaatgacctcctggcaaaaaattaatcctaacaatctaagcttaactttaaaaaagctaaaataat

SEQ ID NO: 244615 - DNA, 649 bp, Unknown
  Bacterial polypeptide expressing nucleotide sequence isolated from the Sargasso Sea
atgtcaaaaaatataccaactatagtcattactggtcctactgcaagtggtaaaaccaaattatctttagagttggcaaaacataataatggtgaaattataaatgctgacattatgcaaatgtatgaagggtttaacattttaaaagcaatgccatccacagaagaaacatttgaaattaagcataatttgtttggtgtcataaaaaaagaggtaaaatttactgttgcggattggattaaacttgctaaagacaaaatatcagaaattcataaaaaaggtaaagttcctattgtagttggtggttcaggtatgtacttaaatgcagctataaatggtttgtctgaaattcctgagattaagaaaatttatcgacataaagccgaacattcttataggattaaaggatttgatttcatattaaagaaactaatcaaaattgataaagattttaaaattgaaaaaaatgatagacaaagattaattagggcatatgaagttttcttgcaaacaggaaaatcaattaaatggtggcaaaataattcagttgctgagccaattataaagaattgtttaaaaatattaattttgcctcctagagatgaactatattcttttatagataaaagagtagatttgatggtgaaaa

SEQ ID NO: 244616 - DNA, 507 bp, Unknown
  Bacterial polypeptide expressing nucleotide sequence isolated from the Sargasso Sea
tgggtcaaaagaagttttatgaaaaactattaaaattagatccatcctcaagaggaaaaataaaccctacagacactcaaagatctatcagagcttatgaagttaaaaagtttacaaaaaaatctctaactgaatggtataaaaacacaaaatcaaacttcgtggaagatgatttttttaaaatttatattgattttccaagacaagaattaattgaacgtatcaatgtaagaacaagtgagataatagaaaatggagcaataaaagaggtaaaagatttcgtaaagctaagggttaaaaaagataaaagcgctaacaaggccattggagtttatgaaattagagaatatttgaaaaaacaaaaagatttgcatgatactaaagaaaaaatagtcataaaaactagacaatacgccaaaagacaaagtacttgggctagaggcaacatgattaactggatgaagctaaagccacaagacataaataattttttgaaaaaaatttaaa

SEQ ID NO: 244617 - DNA, 640 bp, Unknown
  Bacterial polypeptide expressing nucleotide sequence isolated from the Sargasso Sea
atgagaagaataattaccataattggtccaacagctagtggaaaaacttcactggcaattagactatcaaaacagttaaatgcagaagttattggcttggattctaggcagatatataaaggtatgtccataggaacagcccagccaacaatcgaggaaatggatggggtcaaacatcatttgattggtttccaagaaccatcagaacccatatctgcaggagaatattcaaaacttcttattgatagagtaaaagctattcgatctgatagtaaggttcctatcatttgtggaggagcagggctttattatagggcaatatcaaagggaatattcaaaggtagtacatccgatctttcagctaggcatcgattagaagaatcgtatgataataatccaaccaaattattagataaactccgttctatcgaccccgaatatgcagagcttgtacacttgaacaataaaaaacgtcttgttagagcacttgaaatatttgaagtaactggtaaaaccccaagtgagaattttattgatcaaagatctaatccaacagcagaattagatctgtatactattcaaataaaatggacacgaaatatcttaaacgaacgaatcatgcgtcggacagatgcaatgc

SEQ ID NO: 244618 - DNA, 409 bp, Unknown
  Bacterial polypeptide expressing nucleotide sequence isolated from the Sargasso Sea
actaaaaaatcgctttacgattgggctaaaaatactaaatcagattttctggactatgatctgagaaaattttatttagacacccctagagacattctgcttaattcaataaaaaaaagaacaaagtcaattttaggaaaacaggcgatattagaggttaaaaaatttttaaaaatgagagtaaacaaatctctatctgcaaattatataattggaattaaagaaatcaaaaaatatatagagggtcacatcaccaaaaaagagctaatcgaactagtaaatataagaaccagacagtacgccaagcgacaaagcacttggcaaaggggacatatgatgaattgggagatgctttataataatgatttttctgtcctttttaaaaaaattttaaaactttcaagctaaa

SEQ ID NO: 244619 - DNA, 428 bp, Unknown
  Bacterial polypeptide expressing nucleotide sequence isolated from the Sargasso Sea
aagatctttaagagcatatgaaattaaatcttttacaaaaaaatctatgattagctggttcaaaaacactaaatcagattacagtcataatgacttttttaaaatttgtattgattttccaagaaaagatttaatagaaagaataaataagagatctgaaaatatgattaaactcggtgcaattttagaggttaaaagatttatcaaactaagagtcccaaaaaataaaagcctcagtaaagcaattggaattagtgagattaagcaatatcttcaaaaaaaaatccaagcagaacaattaatcgagaaaatatcaataaagactaggcaatatgccaaaagacagagcacctgggctcgaggacatatgaaagattggaataaagttaatccagctggtttggaaaagctcttaaaaaaaatttaga

SEQ ID NO: 244620 - DNA, 472 bp, Unknown
  Bacterial polypeptide expressing nucleotide sequence isolated from the Sargasso Sea
cgaaagatcagtattaccaactgacactcaaagatctatgagagcatatgaggtaaaaaaatttactggaaaatctttattcaagtttttaagagaaacaaaatcaaactttaaaaaaaatgtctttaaaaaattattcattaatattccaagagaaatattgaatgaaaaaatagaaaaaagagttgaaaaaatgtttagtgatggtgcggttgatgaagtaaaaaaattttataaaatgaaagttaataaagaaatgtcttcaaacaaaatcataggcattaaggaaatcggtgattatttgcacggaaaaactacattaattaaagcaaaagaattaattgcacagaaaacaagacaatatgcaaaaagacaatttacttgggctagaggacatatgaaatcgtgggaaacgatttattctacaaatattaatgatttgtttaaaaaaaccattaataaaatatcctaa

SEQ ID NO: 244621 - DNA, 463 bp, Unknown
  Bacterial polypeptide expressing nucleotide sequence isolated from the Sargasso Sea
gatgatgtaagaatactaagggcgctagaaattattcatgcaactgatgaaaaactaagcaatgttctatctgaaaagccaaaaaatagttttaaagatgattttacaatctttcactttggaatagaaaatgaaagagatgttcttcatcaaagaattgaaaaaagattaaaacaaattattgaagcaggtcttatagatgaggttatttatttacttaataaatatcacattccttcagatcatcctcttagaaaagcagtaaattataagcaagccatccattacatagagaaaaaatatactttaaaagaatttgaacaagaatgtttatatgcaacaaggcaactagccaaacgtcaagttacttggcttcgaagttgggataaaaataagatctatgatataaacgatacaaatatattggaaaataaatttaaaaaggctatatctttactttaaa

SEQ ID NO: 244622 - DNA, 850 bp, Unknown
  Bacterial polypeptide expressing nucleotide sequence isolated from the Sargasso Sea
ggcgcatcgatagaacctatgtccagtgataaacaagaaaatagatgtatagttatttgtggtcctaccgcatccggaaaatctgcgcttgctatgaaattggcaaatgaattgaacggtgaaataatcaacgcagattcactgcaagtttataatgaactcaaaattttaacctctcgacctagcatcaatgataccgaaaatattcctcacaatttatttggtatccgcaaaatggttgagccctgttctgtaaatatttggattaaattagcaaaaaaatcaatttcccagatcattgatagagggaggataccgatagcatgtggtggaacgggtatgtatatccactatttatctaaaaggttgtccaaaattcctgaaatacccaacagagttcgactgcaggcacgcgaaagactaaaggtactaggcaatgaaaactttagtaaggagttaattaaattagatccattgttggggagtaaaattccatttggtgatagccaacggttaacgcgtgcctgggaagtaatgaaggcaacaggccaatctttggcggcgtggaatatggaaccggatcaagcaacaggcctaaatttatatcatgttttgctaatgcctgatcgcgagatattgtatcgtacatgtgaccagagatttttagggtttatggatcagggcgcagtagccgaggccgagacgataaaaaatatgaacctagatccatctttacctgcaatgaaggcattgggtttatcgcaaatcataaagtacttagatggagaaatgaatcttgatgatgcgattaagcaggctcaacaaaaaactagaaactatgcaaagcggc

SEQ ID NO: 244623 - DNA, 456 bp, Unknown
  Bacterial polypeptide expressing nucleotide sequence isolated from the Sargasso Sea
gaggaaaaataaaccctacagacactcaaagatccatcagagcttatgaagttaaaaagtttacaaaaatatctctaactgaatggtttaaaaacacaaaatcaaacttcgtggaagatgatttctttaaagtttatattgattttcctaggcaagaattgattgagcgcatcaatgtaagaacaagtgagatgatagaaaatggagcactaaatgaagtaaaagatttcataaagctaagggttaaaaaagataaaagtgccaacaaggccatcggagttaatgaaatcagagaatatttaaaaaaacaaaaagatttgaatgatactaaagaaaaaatagccataaaaactagacaatacgccaaaagacaaagtacttgggctagagctaacatgattagttggatgaaattaaagccacaagacataaataattttttgaaaaaaatttaaa

SEQ ID NO: 244624 - DNA, 784 bp, Unknown
  Bacterial polypeptide expressing nucleotide sequence isolated from the Sargasso Sea
catgactaaatttatttgcattagtggctgtactgcgtctgggaaatcaggacttgctgaagatttagctgcttacctaggaaacaccgttataataaacgctgatgctcttcaagtttataaatgttggcgaattttaacagatagaccaaaagagggttcatttaacaatttaaaattgtatggtcatgtatcatgcaaaaccgggtacaatgtcgctcattggctaactgaaataaagtatcttgtagaaaagtttattaatacttatgaaactttcatttttgttgggggaactggcttatattttaattcacttctcaatggcttgagtcaaattcctgaaattgatcttgatattagagagcagtctatcaaacattcaaattcatgcgatttttttattaaagaattagaaaaaagagatccagaaatacttaaagtaattgataataataatgtaagacgactgcaaagagcatgggaagtgattacccagacaggcaaaagtttaaattattggcagaacaaacccgctcaccctataatctcaaacaatgagacgaccaaaattctattgaatccacgcaaagaggagttaataaaaaaaattaaaaaaagagtagagcgcatgattgcgagaggtgtaattgatgaagttagttccgtacatagtaaaacatggaatacaaatctaccttttagtaaagctcttggtgcgaaagaaataataagctatctaaacaatgagtataatttagaccagatggaaatctatgattca

SEQ ID NO: 244625 - DNA, 409 bp, Unknown
  Bacterial polypeptide expressing nucleotide sequence isolated from the Sargasso Sea
tgaagttaaaaagtttacaaaaaaatctctatctgaatggtttaaaaatacaaaatcaaacttcgtagaagatgatttttttaaagtttatcttgattttcctagacaagaattaattgagcgtatcaatgtaagaacaagggagatgatagaaaatggagcacttaaagaagtagaagatttcataaagctaagggttaaaaaagataaaagtgccaacaaggccattggagttaatgaaattagagaatatttaaaaaaacaaaataatttgaatgatactaaagaaaaaatagccataaaaactagacaatacgccaaaagacaaagtacttgggccagaggtaacatgatcagttggaagaaactcaagccacaagacataaatatttttttgaaaaaaatttaa

SEQ ID NO: 244626 - DNA, 427 bp, Unknown
  Bacterial polypeptide expressing nucleotide sequence isolated from the Sargasso Sea
atgcctgaagcgtctctgcctattttattgctcatggggcccacctgctccggtaaaaccgcgttggcgattgaggcggcgcagacgctacccatcgaaattatcaatgtggattcggcgttggtgtataagggcttgaatattggtgcggcgcgccccactgaagaagagctggcattggcgccacaccggttgctgggttttcgtgatcttaccgagccctattccgctgcggattttcgcgccgatgcgctcaagcacattgaacagatccacaacaacggcaaattgccgttgttggtgggtggcacggtgctgtatttcaaagccttagtggaggggttggctccgttgccggaagcggatccggtggtgcgtgccgagattgcagcactggccgatgcgcagggctggccggcggtgcatc

SEQ ID NO: 244627 - DNA, 658 bp, Unknown
  Bacterial polypeptide expressing nucleotide sequence isolated from the Sargasso Sea
atgaatttttatatacaaaatgagtttgaagcacttgtgatttcaggtccaacaggttcaggaaaaaatatgattgctaatataattggaaatcaccttccaattatgatcataaatgcagacgcaattcaggtttacaaaaagtggaaaattttatctggacgtccaacagatattgaacaaaaaaaagtaattcataaactatacggacattataatggaaattattataatgttggaaaatggataaaagaagttgcttattatattgataaagcgaagaaaaatcatcttcttccagttattgttggaggaacaggtctttatataaatattctttttcaaggtatctctaatattccaagtataccaataaaaataaggaataaaggaaaaaagatattaaactctgatcctctttttttttataattatttaaagcaaaaggatcctcatattttatcaattattgattgtaataattatagaagacttcaaagagcatgggaggtcatggaaactactggagtaagtttaatagagtttcataaagatcgtgaaactcctattttaaatcccaaaaaaacaaaaaaaattattttatgtgttgataaaatcctattaaataagattattgactttagattcgataaaatga

SEQ ID NO: 244628 - DNA, 353 bp, Unknown
  Bacterial polypeptide expressing nucleotide sequence isolated from the Sargasso Sea
tttgaaaaccttatccccagtcatttgcattttaggaccgacgaattctggaaagacagatctatcgctgagactttttgatgaggtatctgcagagttgataagtgttgattccgttcaaatttacaaacatgcagacattgggagcaataaaatatccaaagaactacaaaaaaaataccctcacgagcttatcgatattattgagccttatgaaatttattccgttggtgaattcttaaaggatttgaagtgctccatggataaagcaactgagtcaaataaagtaccaattttagttggcggatcgatgatgtattttttttcatatctggtcggatttgatgatcttc

SEQ ID NO: 244629 - DNA, 481 bp, Unknown
  Bacterial polypeptide expressing nucleotide sequence isolated from the Sargasso Sea
gacccgctttgcaaaaaaaaaatcaacaaaaatgattctcaaagatcaataagagcctatgaggtaaaaaagtttacaaataaatctttgtttgattggtatagtgaaacttactctgattttactcaggacagctttataaagttacatattgattatcctagagataagttaattgagaaaatttccttaagaacaaatgaaatgttaagagatggggcaataaaagaggctaagaggttttataaattaagaataaagaaagatttatcatctaataaagttattggtcttagtgagattaaagattatctggaaaaaagaataaatcttaatgaacttaaagaaaaaatatcaataaaaacaaggcaatatgctaagagacagtctacatgggcaagaggacaaatgtctgactggcaaaaaataaaatttgatagagttaaatcatttataaaaaaatttcctaaatccgcataga

SEQ ID NO: 244630 - DNA, 120 bp, Unknown
  Bacterial polypeptide expressing nucleotide sequence isolated from the Sargasso Sea
tatggacatccagtccaaaataattttaatttcaggaccaacagcatcgggcaaatctcgttttgcaattaaattagcaaaaaaaattaaaggagaaataattaatgcagatagtatgca

SEQ ID NO: 244631 - DNA, 469 bp, Unknown
  Bacterial polypeptide expressing nucleotide sequence isolated from the Sargasso Sea
gctgaacttctccatccaaacgatacctcgaggattttacgcagccttgaagtcttgctgtcaacaggaaaatcaatatattcatatcagctggaacagccgtttggggaagcacgttatccatttcaggcagttgcgcttagttgggaccgaaatgacctttatcaacgaattaatcaacgtaccctgagtatgctgggttcaggatggcttggtgaagttgagatgcttttgaacagctattcaccggaacttaaacctatgcaatctataggatacagggaagttgtccaatacctccaaaacaagctgaaatggggtgcaatggttgaagaaattcaaaaacgtacacgtcaattcgctaaacgtcagttgacatggttccgcagggaagcaaagattgaatggtatgaacctgttgaacatgaccgaatcttggctgacatcaaagtttaccttgaaaattagg

SEQ ID NO: 244632 - DNA, 448 bp, Unknown
  Bacterial polypeptide expressing nucleotide sequence isolated from the Sargasso Sea
attaattctttagatgtacaaagatctctaagagcatttgaaattaaatcatttacaaaaaaatctatgattagttggtttaaaaacactaagtcgaattatgatcataatgatttttttaaaatttgtattgattttccaaggaaagatttaattgagagaattaataagagatctgaaaatatgattaaactaggtgcaattctagaagttaacaaatttatcaaaatgagagttccaaaaaataaaagcctcagcaaagcaattggaataagtgagattaagcaatatcttcaaaaaaaaatccaaacagaacaactaatcgagaaaatatcaataaagactagacaatatgccaaaagacagagtacctgggctcgaggacatatgaaagattggattaaagttgatccagctggtttggaaaagctcttaaaaaaaatttaga

SEQ ID NO: 244633 - DNA, 241 bp, Unknown
  Bacterial polypeptide expressing nucleotide sequence isolated from the Sargasso Sea
agaagttaaaaaatttatcaaattgagagttcccaaagataaaagcttaagcaaagcaattggtatgaatgaaataaaggaatatcttcaaaaaagaattcaaactgaacaattaattgaaaaaatatcaataaagacaaggcaatatgctaaaagacagagtacctgggcccgaggaaatatgaaagattggaataatgttaatccagatgctttggataagttcttaaaaaaaatttag
